United States Patent Application Publication US 2019/0348154 A1 - sequence listing, part 68

SEQ ID NO: 256110 - DNA, 219 bp, Klebsiella pneumoniae
atgcacgatagcactttagagactcgccttgcggagctggagagcagactggcgtttcaggaaatcaccattgaagacctcaataagaccgtcaccgcccacgagatagaaatggccaggatgcgcgaacatatgcgcctgatggtggaaaagctgaaagctactcagccctcgcatatggcttcacaggcagaagaaacgcctccaccgcactattaa

SEQ ID NO: 256111 - DNA, 576 bp, Klebsiella pneumoniae
atgaaagtagcaaaagacctggtggtcagcctggcctatcaggtacgtacagaagacggtgtgttggttgatgagtctccggtaagcgcgccgctggactacctgcatggtcacggttccctgatttccggcctggaaagcgcgctggatggtcacgaagtgggcgacaaatttgacgtagaagtcggcgctaatgacgcgtacggccagtacgacgaaaacctggtacagcgcgttcctaaagacgtgtttatgggcgttgacgagctgcaggttggcatgcgcttcctcgcggaaaccgatcagggcccggtaccggtagaaatcaccgaagtgggtgacgaacacgttgttgttgacggtaaccacatgctggctggccagaatcttaagttcaacgttgaagttgtcgcgcttcgcgaagcaacggcggaagagctggaacacggtcatgtacatggcgctcacggtcacgaccacgatcatgacggttgctgcggtggccacggtcacggccacgaccacgaacatggcaaaggcggctgcggcggtaacggcggctgcggttgccactaa

SEQ ID NO: 256112 - DNA, 201 bp, Klebsiella pneumoniae
atggctgtgcgtaaacgttttattgccggggcgaaatgcccggcgtgccaggctcaggattcgctggcgatgtggcgtgagaataatgtcgatatagttgagtgcgttaagtgtggacaccagatgcgagaggcggataaagaggtccgcgagcatgttcgcaaagaagagcaagtgataggcatttttcatccggactag

SEQ ID NO: 256113 - DNA, 1806 bp, Klebsiella pneumoniae
atggcgggagctgatttactgctggccggggtgttatttctgtttgccgcggtggtggcggtaccgctggcggcgaggctgggtattggcgccgtgttggggtatctgctggctggtatcgccattggcccctggggattagggtttatcagcgatgttgatgaaatccttcacttctcagaattaggcgttgtctttctgatgtttattattgggctggagctgaatccgtccaagctctggcggctaagaagctcaattttcggcgtaggcgccgcgcaggtcgctttcagcgcgctcattcttggcggcttgctcatgcttagcgacttctcatggcgcgctgcggtggtgggcggacttgggctggcgatgtcttcaaccgcgatggcgctgcagctgatgcgtgaaaaaggcatgagccgcagcgagtccgggcaactgggattctccgtactgctgtttcaggatctggccgttatcccggccctggcggtggtgcccctgcttgccggttcaggtgacgaccactttaattggctcaccatcgggatgaaggtcctggcctttggcgggatgctggttggcggccgttttctgctgaggccggtgtttcgttttatcgccggatccggcgtgcgggaggtcttcaccgcagcgacgctgctgctggttcttgcatcggctttatttatggatgcgctcggtttgtcgatggcgctggggacctttatcgccggcgttctgctggccgagagtgagtatcggcacgaactggaaatcgctattgagccctttaaagggctcctgctcgggctgttttttatttccgttggcatggcgctgaaccttggcgtgctctatacccacctgctatgggtagcggccagcgtcgcaatactggtgtcggtaaaaggcgtcgtgctgtatctccttgcgcgggtgtacggcctgcgtagcgcagaacgggtgcagtttgccggagtgctgagccaggggggagaattcgcttttgtgctgttctcattacccgcctcgatgcgcctttttcagaacgatcaaatggctctactgctggtgacggtgacattgtcgatgatgaccacgccgctgttgatgaagctaatcgacaaaatactctctcgccgattcaatcaatccgaagaggagggcgaggctccgtgggtcgaagatgataaaccgcaggtcattatcgttggttttgggcgctttggtcaggtgattggccgcctgctgatggctaacaaaatgcgtattacggtgctggagcgcgatatcagcgcggtcaatctgatgcgccaatatggctataaggtctactttggcgatgcgacgcagctggagctcctgcgctcggcaggagccgaagaggcgcagtcgatcgtcattacctgcaatgagccggaagataccatgaagctggtcgagatgtgtcaacaacactttccacatcttcatattctggcgcgagcgcgaggacgcgtcgaggcgcatgaactgctgcaggcgggagtggcgcagttttctcgtgaaaccttctccagcgcgctcgagctagggcgtaaagcgcttatctcgctaggcatgcaccctcatcaggcgcagcgcgcgcagctgcattttcggcgtcttgatatgcgaatgttgcgtgagttaatgccggttcatagtgatactctgcagatatcccgcgtgcgcgaagccaggcgcgagctggaggaaatttttcagcgtgagatgcaaaaagagagcagacagttagacggctgggatgaatttgaataa

SEQ ID NO: 256114 - DNA, 561 bp, Klebsiella pneumoniae
atgtctcagacagcgaaggttttgctgctgtatgcccacccagaatctcaggattccgtggccaaccgggttttgcttgaaccggccttacagttgtcgaatgttaccgtgcacgatctttacgcgcactatccggatttttttatcgatattgcccatgagcaggatctcctgcgccagcatgaggtgattgtttttcagcatccgctttatacctggagctgtccggcgctgatgaaagagtggctggatagggtgctcagccgtggttttgccagcggggcgggagggaaccagctggcgggaaagtactggcgtagcgtgattaccaccggggagccggagagcgcctatcgacgcgatgcccatcgctatccaataaatgacattcttcgccctttcgaactgaccgccggcatgtgccgcatgcactggataagcccgattatcgtctactgggcgcggcggcaatcgcctgacgatctgaaaagccgcgctcgtgcctaccgcgactggctggctaatcctgtaacggttggaggtacaaatggcgggagctga

SEQ ID NO: 256115 - DNA, 1905 bp, Klebsiella pneumoniae
atgattgttttctcctcgttacaaattcgtcgcggcgtacgcgtcctgctggacaacgccagcgccaccatcaacccagggcaaaaagtcggcctggtgggtaaaaacggctgcggtaaatccacgctgctttcgcttttgaaaaacgagattagcgccgacggcggctcgatgacttttcccggtagctggcagttggcctgggttaaccaagaaacgccggcccttcctcagccggctatagactatgttattgacggcgatcgcgaattccgcaagctggaggcggatttgcacgcggccaacgaacgaaatgacggacatgccattgcgacggtccacggtaagctggatgccatcgatgcctggaccataagatcccgcgcggccagcctgctgcacggcctcggtttcagcaatgaacagcttgagaggccggtgagcgacttttccggcggctggcgcatgcgtcttaacctcgcccaggcgcttatttgccgttccgatctgctactgcttgatgaaccgactaaccacctcgacctcgacgcggtaatctggctggagaagtggcttaaaagctacagcggcacgctgatcctgatctcccacgatcgcgacttccttgacccaatcgtcgacaaaattattcatatcgaacagcaaacgatgttcgaatacaccggcaactacagctctttcgaagtgcagcgcgcaacccgcctttctcaacaacaagcgatgtatgagagccagcagcagcgcgtggcccatctgcagagctatatcgatcgtttccgcgcgaaagcgaccaaagccaagcaggcgcaaagccgtatcaaaatgctcgagcgtatggagctcatcgcccctgcccacgttgataatccgttccactttagcttccgtgcgccggaaagcctgcccaatccactgctgaagatggaaaaagtcagcgccggctatggcgagcgcgtcattctcgattcgatcaagctgaatctggttccagggtcgcgcatcggtctgctggggcgtaacggagcgggtaaatccacgctgattaagctgctggccggcgagctacagccgctgcgcggtgaaattggcctggcgaaaggcatcaagcttggctactttgctcagcaccagcttgaattcctgcgcgcggacgaatccccgctccagcatcttgcccgcctggcgccgcaggagctggagcagaaactgcgcgactatctgggcggtttcgggttccagagcgacaaagtcaacgaagagacaaagcgtttctccggcggcgagaaggcgcgcctggtgctggcgctgatcgtctggcaacgccctaacctgctgctgcttgatgaaccgaccaaccacctcgatctcgacatgcgccaggcgctaactgaagcgttaattgattttgaaggcgccctggtggtggtctcccacgaccgccatctgattcgttccactaccgacgatctttatctggtgcacgatagcaaagtcgaacctttcgacggcgatctcgaagactaccagcagtggttgagcgactcgcaaaagctggaaagccaggcatcggaagaaccgaaagaaaacggcaacagcgcccaggcgcgtaaagatcagaaacgccgcgaagccgagctgcgtacgcaaacccagccgctgcgtaaagagattatccgtctggaaaaagagatggagaagctcaacgcccagctggcgcaggcggaagagaagctcggcgacagcggcctgtacgatcaaagccgtaaagcagagcttaccgaatgtttacagcagcaggccagcgcaaagtccggcctcgaagagtgtgaaatggcctggctggatgcgcaggaacagctggagcagatgctgcaggagggctag

SEQ ID NO: 256116 - DNA, 1023 bp, Klebsiella pneumoniae
atggttgatatcactcctacagaaatgacgcccccggaaaacgactcgcagcagtttcatccgatgcgcggcgtaggcaatcgtcatttgcaaaccatgttgccgcggctaatccgtcgcaaactccgtttcactccccactggcagcgtcttgaactgccggatggcgactttgtcgatctggcctggagtgaagatccttctcaggcacgccataaacccagactagtggtatttcatggtctggagggcagcctgcacagcccttacgcacacggacttatccatgcggcaatgcagcgcggctggctgggcgtggtgatgcattttcgcggctgtagcggcgaacccaaccgaaataaccgcatctaccattcgggcgaaacggaagacggctcctggtttctgcgctggctccagcgcgaatacggttcggccccgaccgcagcggtaggttattcgctcgggggcaatatgctgggctgcctgctggcaaaagaaggcgacgatattccggtcgatgccgcggtgatcgtctcggctccgtttatgctggaagcctgtagctatcatatggataaaggtttctcacgcgtttatcagcgctatttgcttaatctgctaaaagccaacgccgcacgtaagctaaaagcctatcctggctctctgcccgtcgatttacgtcagctaaaaagcatgcgccgtatccgcgaatttgacgacagcatcaccgcgaggatccacggttttgccgatgcgctggactattatcgccagtgcagcgccatgccgcgcttaagcgatatcacgaagcccacgctgattattcacgcaaaagacgacccttttatggaccatcactcgataccgccgcaggaacaattgccggcgaatgtcgagtatcagctgacggagcacggcgggcacgttgggttcgtcggcggtaccttgcgtaagccagagatgtggcttgaaagacgcattccggattggctaacccgctggttaggaggaaaattatga

SEQ ID NO: 256117 - DNA, 219 bp, Klebsiella pneumoniae
atgatcataccctggcaagagctcgctcccgaaacgctggatagcctgatcgaaagttttgtcttgcgcgaaggcaccgattatggtgaacatgaacgttcgctggttgataaagtctccgatgtaaaacagcagctaaaaagcggagaggccgtgctggtatggtcagagctgcacgagacggtcaacatcatgccccgcaagcagtttcacggctaa

SEQ ID NO: 256118 - DNA, 870 bp, Klebsiella pneumoniae
atgtctgccaaacatccggtgattgccgtcacgggctccagcggcgcgggtaccacaaccaccagcctcgctttccgcaaaatcttcgcccagctgaatctgcatgccgctgaagtcgaaggggatagctttcaccgctacacccgcccggaaatggacatggcgatccgcaaagcgcgggatcagggcaaacatatcagctacttcggcccagaggccaacgactttggcctgctggaacagacgttttctgagtatgggctaagcggcaaaggccagtcgcgcaagtatttgcatacctatgacgaagccgtgccgtggaaccaggttccggggaccttcacgccctggcagccgctgcccgagccgactgacgtcctcttttacgaaggcctgcacggcggcgtcgtgacgccgcagcacaacgtcgcaaaccatgtcgaccttctggtcggcgtggtgcccatcgtcaatcttgagtggatccagaagcttatccgcgacaccagcgaacgcggccactctcgggaggcggtgatggactcggtggtccgctcgatggaggactacatcaactttatcaccccgcagttttcgcgcacccatctcaacttccagcgcgtccccacggtggatacgtccaatccctttgcggccaaagccatcccttccctggatgaaagcttcgtggtgattcatttccgcaacctgaaaaatatcgattttccgtggcttctggcgatgcttcagggttcgtttatctcacatatgaacacgctggtggtaccgggcggaaaaatggggctggcgatggagctgattatggcgccgctggttgaacggctgatggaaggcaagaaaataagctag

SEQ ID NO: 256119 - DNA, 405 bp, Klebsiella pneumoniae
atgcaagcgcgagtgaagtgggttgaagggttaaccttcatcggtgagtcggcttctggccaccagattctgatggacggtaattccggggataaagcgcccagcccgatggaaatggtgctgatggcggcaggcgggtgcagcgcgattgacgtggtttccattttgcagaaggggcgtcataacgtcaccaactgcgaagttaagctgacctcggagcgtcgcgaagaggcgccgcgtctgtttacccatatcaatctgcactttatcgtgaccggtaaggagttgaaagacgcggccgtttcccgtgccgttgacctgtcggcggaaaaatactgctcggtggcgctgatgcttgagaaggcggtaaacattactcactcttatgaagtgatcgaaggataa

SEQ ID NO: 256120 - DNA, 960 bp, Klebsiella pneumoniae
atgagtctgaatttccttgattttgaacagccgattgcagagctggaagcgaaaatcgattctctgactgcggttagccgtcaggatgagaaactggatattaatatcgatgaagaagtgcatcgcctgcgtgaaaagagcgtagagctgacgcgcaagatcttcgccgatcttggtgcatggcaggttgcccagctggcccgtcatccacgtcgcccatacaccctggattacgtccgcctggctttcgacgaattcgacgaactggccggcgatcgcgcctacgccgatgataaagctatcgttggcgggattgcgcgtctggacgggcgtccggtgatgattatcggccaccagaaagggcgtgaaaccaaagagaaaattcgccgcaacttcggtatgccggcgccggaaggctatcgtaaagcgctgcgtctgatggaaatggcagagcgctttaaaatgccgatcatcaccttcatcgacacccctggtgcttatccaggcgtcggggcggaagaacgcggccagtctgaagcgattgctcgcaacctgcgtgaaatgtcccgtctgagcgtgccggttatctgcaccgttatcggtgaaggcggctccggcggcgcgctggcgattggcgtcggtgataaagtgaatatgctgcagtacagcacctattccgttatctccccggaaggctgtgcgtccattctatggaaaagcgctgacaaagcgccgttggccgctgaagcgatgggaattgttgctccgcgtctgaaagagctgaagctaattgactccatcattcctgaaccgctgggcggcgcgcatcgtaatccggaagcgatggcagcctcactgaaagaacagctgttggccgatctggctgacctcgacgtgcttggcgaggaagaactgctgaaccgccgctaccaacgcctgatgagctacggctacgcctga

SEQ ID NO: 256121 - DNA, 1791 bp, Klebsiella pneumoniae
atggcattgcacaaaaccgtcgcgataagcgccgtggccgcagggatcatgttaagcctgggggccgcacaggctgcaccgctgctgggcgcaacggaagcgacaaccatgaaagcgagcgacctggccgctaaagaaaaagccttaaccgactttccgctgatggagtcggttaaatcatcaattcaaaccctgcctaacagcgaagtggagaaaatcgcaccgggcctggcgagcaacccggcgaacgttaagcgtgtggaaagcatcctttcagaacaggattgggaatatctgttcccgatgcgcgccgcagaatatacctactctaattttctgaaagctattggtaaattccctgccgtgtgcggaacctataccgacggacgcgacagcgatgccatctgccgtaaatcgctggcaaccatgtttgcccactttgctcaggagaccggcggccatgaaagctggcgtgatattcccgaatggcgtcaggcgctggtttatctgcgtgaggttggctgggttgaaggtcagaagggcggctataacggcgaatgcgatccctctatctggcaggggcagacctggccatgcggtaaagataaagacggcgactacctgagctacttcggccgcggagcgaaacagctctcctataactacaactatggtccgttctccgatgcaatgtacgatggcgacgttcgtcctctgctggataaaccggagctggtggcggatacctggatgaacctggcgagcgccgtctttttcttcgtttatccgcagccgccgaagccctctatgctgcacgtcatcgacggaacctgggttccaaacgatcatgataaagcaaatggcctggtcgaaggctttggggtaaccattcagattatcaacggcggcgttgagtgcggcggggcggaagagaacgcgcagtctcttaaccgtattgcttactacaaagagttcgcaaactacctcaaagtgccgattgccgacgacgaagttctcggctgtaagaatatgaagcagttcgatgaaggcggcgcgggcgcattgccgatttactgggaagaggattggggatggagtccggacaccgctgacggcaagactaacgcctgccagttggtgggctatcagacgccgtataccgcttttaaagagggcgactatgcgaagtgtgtgcagagccacttcaacgtcaatatcgttgatgacagcggccagtccgaggatattacgccggtcaagcctgacgataccacacctgcgcaggagacgaacgtggcgccggtggctcgcatcgccggtccgattggcgcaattgaagctggtgccagggtttctctgagcgcggaaggttctaccgatgcgaacggcgacaagctaagctacacttggatgtctcaggacggccagacccttagcggacaggataaagccgtaattaccttcaccgcaccggaaaaagatcgcgatgcccagtatgtggttagcctgacggtaagcgacggttcgttgtccagcacggcaacttacactctgaacgtcaaggccaaagccgctgctgcggacgaaacgacggatggcaaagatagcgataccattagctatccttcctggagcagtacccagacatggaaagagggcgatatcgtcaataaccacggcgcgctgtatcagtgtaaaccgcttccggaaggagcatggtgcaacgtggcgccgacttactatgagcctggcgccggcattgcctggggcgatgcgtggaaggcgttgtaa

SEQ ID NO: 256122 - DNA, 390 bp, Klebsiella pneumoniae
atgctgggtttaaaacgggttcaccatatcgctatcattgcgacggattatgcgaagagtaaagcgttttactgcgacatcctggggttcaccctgcagggggaattttatcgcgcagagcgtgattcctggaaaggcgatctggcgctgaatggtgaatatgtcattgaactgttttcattcccgtttcctccctcgcgtccgagtcgccccgaagcctgcgggttacgccatctggcgtttagcgtcgatgatgtcgatgctgctgtggctcatcttgaggcgcacggagtgccttgtgaaggggttcgtatcgacccttttaccggtaagcgtttcaccttttttaacgatcccgacgggctgccgctggagatttatcagcagtaa

SEQ ID NO: 256123 - DNA, 1308 bp, Klebsiella pneumoniae
atgatgatgatcccggacattgcgcacacgcttcagccgcaccgccattttttagtggcctttagcggcgggctggattcgagcgtgcttttatatcgcctggtgctctggcgcgagcaggatcccaccgttcgcctgagggcgatacatattcaccacgggctcagcgccaacgccgacgactgggtggcgcactgccagcaaatgtgccagcagtggcaggtgccgcttctggtagagcgggtcgcgctcgccgatgaggggttgggaattgaggctcatgcgcgccaggcgcgctaccaggcatttcgttcggcgctggcgcccggcgaagcgctggtgaccgcgcagcatcttgacgaccagtgcgaaaccttcctgttagcccttaagcggggaagcggccctaccgggctctcggcgatggccggcgagtccgattttgccgggacgaaactgctgcgcccgctgcttcacgaaagccgtgactccctccatcagtgggcgatggcccgtcagctcagctggattgaagacgaaagcaaccaggatgacgcttacgatcgcaactttctccgcctgcggattctcccgctgcttcatgcacgctggccgcactttgccgaggccgtggcgcgcagcgccagcctgtgcggcgaacaggaacagctgctggatgaaatgctggccgccgagctggcaacgctggttgctgaggacagttcgttaactatcgctccgttgacgactatgagcgcgcctcggcgggccgcgctgctgcgccgctggctggctgggctcaatgcaccaatgccttcgcgcgaggtgccggagcgtatctggcgtgaagtggcgatggcgcgcgaggatgcgtttccctgtttgcgccttggcccgtttaccgttcgccgctaccagcagcgtctgtactgggtgagatatattccaggccagagtgagacaatgctggagtggcgcgatactgccagcccgctgccgttacctgacggtctcggcgagctgagtttactgtccggcgggccgttacgcgggccgcgcgagggagaagccgttactgttcgctttcgtgccagcggtaatctgcatatcgtgggtcgcaacggtggtcgcaagctgaaaaaaatctggcaggagctgggcgttgcgccctggcggcgcgatacgactccgctactgttctatggcgaaacgcttattgccgccgccgatggtctgtttattaccgtcgatgggaaagttcaggaaagtgaaggcttccagatgagatggaggaaaacgggcggctag

SEQ ID NO: 256124 - DNA, 261 bp, Klebsiella pneumoniae
atgtcaatgaatgatacttatcaacccatcaattgcgatgattatgacaacctcgaacttgcctgtcagcaccatctggtcctggcgctggagctcaaagatggcgaacagctgcaagcgaaggccaacgatcttatctcgcgcaaaaatatcgagtatctggtcgtagagctcgccggcaacgtccgcgaactgcgcctggataaaatcgccagcttcagccatccgcaaatcggtacggtagtcgttagcgagtcctga

SEQ ID NO: 256125 - DNA, 201 bp, Klebsiella pneumoniae; identical to SEQ ID NO: 172475

SEQ ID NO: 256126 - DNA, 546 bp, Klebsiella pneumoniae
atggcgctgaaagcgacgatttataaagcgacggtgaacgtagccgacctggaccgcaaccagtttctggatgccagtttgacgcttgcccagcatccgtcagaaacccaggagcgcatgatgctgcgcctgctggcgtggattaaatacgccgacgagcgtctgcagtttacccgcggtttatcttccgacgatgaagcggaactctggctgcttaacgatcatctgggcgtggatctgtggattgaactggggctaccggacgagcggcgaattaaaaaagcctgctcgcgggcccagcaggtggcgctgttcacctataatagtcgggcggcagaaatctggtggcagcaaaaccagaacaaaatggctcagttttcgaagctgacggtgtggtatttggatgatactcagctggcgcagctcagcgcttttgccgatcggaccatgtcgctgcaggcgaccatccaggacggcgctatctggttatctgacgctaagaataatctggaaattcatttaacggcctggcaaacacccgcatga

SEQ ID NO: 256127 - DNA, 414 bp, Klebsiella pneumoniae
atgattacgattagccgcagcgtcgcgattgcggaggacgagatttcactttccggcatacgcgcgcagggcgcgggcggtcagcacgtgaataagtcctcaacggctattcatttgcgctttgatattaaagcctcgagcctgcctgactattataaggaacgtctgcttaccgccagccaccacttaatttctgccgagggtgtggttatcattaaggctcaggaatatcgcagccaggaaatgaatcgtgaagcggcaattgcgcgtctggttgccctaatacaagaattaaccgcagtgcagaagagccgccgggagacgcgaccaaccagggcctcaaaagagcgccgactggcttcaaaggcgcaaaaatcctcagttaaagcgctgcgtggaaaggttcgccagtaa

SEQ ID NO: 256128 - DNA, 702 bp, Klebsiella pneumoniae
gtgaagaaaatcgtattttcagtcgtggcggcctgttcgctctttgccctgttcggttgtaaccatcgtacggaaatggaaacgttacagccggcgccgatggaagagctaaaaccgatgcagcagagctggcgcggcgtgctgccgtgcgccgactgcgaagggattgaaacctcgctctttcttgagaaagacggcacctgggtgatgaatgaacgatatcagggcgttagccgcgaaccttcctcttttgcttcatatggtacctgggcgcgcacggctgataagctggtgctgaccgacagcaaaggcgagaagtcttattatcgggcgaagggcgataagctggaaatgctcgatcgcgacggtaatcccatcgagtcgacgctgaactatacgcttgaatcagtcaaagccagtctgcccatcacgccaatggcgatgcgcggaatgtacttctatatggcggatgcggcgacctttaccgattgcgcgaccggcaagcgagtggctgtcgccaataatgctcagctcgagcgtgattatgccgctgcgcgcggtacggatactcgaccggtgctgctagtggttgaggggcactttacgctggaagcgaatccggattcgggagcgccggttaaagttctggcggtggattcacccggcaagttttatcaaaaagaagactgcaattctcgttaa

SEQ ID NO: 256129 - DNA, 822 bp, Klebsiella pneumoniae
atggctaaacgacgggctaatcatgtcctgctttttcccgtatcgttcttactttctgcctgcacggtagacgtcagccggtccgtgccttccgcttccactattaagcaaccatcgcagcaatgggcgattaagcttcagcgccagagctcggtggctaataacacgctgactgaaattaacgcacaagatctgctccccggcgatctccttttctcttccagctttggcgtgacgtccctggggattcgtgctcttagcacatcctccgttagccatgtcgctatctatatcggtgataaccaggttgcagaggcaaccggcgctggggtgcaggttgtgcctctccggcaagcgatgcagcacagcgataagctgtttgccctaagagcgcctgacctcacgccgcaacaggccgctggcattaaaaatttcgcctataaaaacagaaacagcgcctataactatcgcggcattattgaatttgtgccctttatggccaccaaacagctatgcaccctgaatcccttctcaaaagatttccgccagcagtgcgtgaacggtctggccaaggcccagctgagcgatgcagcatccggggacaaaaaaatgtggttttgttcggagtttgtcagcgatgccttcgcgaaggccggacacccgctgaccctggctcaaccgggctggattagcccatcagacttgcttcatatgcgtgagggggatgtggcaaactttaagcccgaaacacaattgcagtatatcgggcatcttaaattgggaatttatatcaagacaagccgcctcgtaggactcaattaa

SEQ ID NO: 256130 - DNA, 966 bp, Klebsiella pneumoniae
atgaccctggtcgatacgcctgacgctaaaaccatcgccgagctggttgagcagttcaatctgccgattgaaaaaaccgtgaaaaccctgctggtaaaagcagtagaagacaatgagtatccgctgatagccctgctggttcgcggcgatcatgaactgaacgaagtcaaagcggaaaaactgccgcaggtcgccagcccgctgaccttcgcaaccgaagaagagattcgcgcgctagtgaaagcgggtcccggttctcttggcccggttaatatgcctgttccggtgattattgaccgtaccgttgccgccatgagcgatttcgccgcgggcgcgaacattgacggtaaacactacttcggcatcaactgggatcgcgacgtcgccactcctgaagtggcagatatccgtaacgtagtggccggtgacccgagcccggacggtaaaggcacgctgttgattaaacgcggtatcgaagtgggccacatcttccagctgggtaccaagtactctgaagcgatgaaagcctccgtacagggcgaagatggccgtaatcagatcctgactatgggctgctacggtatcggggtgactcgcgtggtggcggcagccattgagcagaactttgacgagcgcgggatcttgtggccggaagctatcgccccgttccaggttgcgattctgccgatgaacatgcacaaatcctatcgcgtgcaggagctggctgagaagctgtatgctgagctaaccgcgctgggcatcgaagtgctgatggatgaccgtaaagagcgtccgggcgtgatgttcgccgatatggagcttatcggaattccgcataccatcgtgctgggcgaccgtaacctcgacaacgacgatattgaatataaatatcgccgcagcggcgagaaacagctgattaaaaccggcgatatcgtgaattacctggtacaacaaattaaaggttaa

SEQ ID NO: 256131 - DNA, 321 bp, Klebsiella pneumoniae; identical to SEQ ID NO: 191481

SEQ ID NO: 256132 - DNA, 1704 bp, Klebsiella pneumoniae
atgagtgagatttcacgtcaggcctatgccgacatgttcggccccaccaccggcgataaagttcgcctggcggacaccgagctgtggatcgaggttgaagatgatttgaccacctacggcgaagaggtcaaattcggcggcggtaaagtgatccgcgacggtatgggacaggggcagatgctttccgccgggtgcgcggatctggtgctgaccaatgccctgatcgtcgattactgggggatcgttaaagccgatatcggcgtcaaagatggaaggctcttcgccatcggcaaagccggcaacccggatattcaacccaacgtcacgatcccgatcggcgcggccacggaaattattgccgcagaaggcaagatcgtcaccgccggcggcgtcgatacgcatattcactggatctgcccgcagcaggcagaagaagcgctggtctccggcgtcactaccatgatcggcggcgggaccggcccggcggcgggtacccacgccacgacctgcaccccgggtccgtggtacatctcgcggatgctgcaggctgcggacagcctgccggtcaatgtcggcctgctgggtaaaggtaatggctcgaatccggatgcgctgcgtgagcaggtcgcggccggggttatcggcctgaaaattcacgaagactggggcgcgacgccagcggcaatcaactgcgcgctgaccgtagccgacgaaatggacgttcaggttgcgctgcacagcgatacccttaacgagtcgggattcgttgaggataccctggcggccatcggcgggcgcactatccatactttccataccgaaggcgcgggcggcggccatgcgccagatattattaccgcctgcgcacaccctaatattctgccctcgtcgactaatccgacgctgccctacaccgtcaacaccattgacgagcatctggacatgctgatggtttgccatcatctcgacccggatatcgccgaggacgtggcgtttgccgaatcgcgcattcggcgggaaaccatcgccgcggaagacgtcctgcacgacctgggcgccttctcccttacctcgtccgattcgcaggccatgggtcgcgtcggcgaagtggtgttacgtacctggcaggtggcgcaccggatgaaagttcagcgcggcccgctggcggaagagagcggcgataacgataacttccgcgtgaagcgctatatcgccaaatacaccattaatccggcgttaacccacggtatcgcccatgaagtcggttcgattgaagtgggtaaactggcggatctggtgctgtggtccccggcattcttcggcgtaaaaccggcgacgatcgtcaaaggcggcatgatcgccatggcgccgatgggcgacatcaacgcatctatcccgacgccgcagccggtgcactatcgcccgatgttcggcgcgctgggcagcgctcgtcaccgctgccgtttgaccttcctgtcgcaggcggcggcggaaaacggcgtcgctgaacggctgaacctgcacagcgcgacggcggtggttaaaggctgccgcacggtacaaaaagccgatatgcaccacaacggcctgttgcccaatattaccgtggattcacaaacctacgaggtgcgcatcgacggcgaactgataaccagcgaaccggcggacgtgttacccatggcgcaacgttatttcctgttttaa

SEQ ID NO: 256133 - DNA, 471 bp, Klebsiella pneumoniae; identical to SEQ ID NO: 172824

SEQ ID NO: 256134 - DNA, 675 bp, Klebsiella pneumoniae
atgccgacgccggaaaaacgtctgcggctgatgcagcttgccagcagcagcctcccggttggcggctacagctggtcccaggggctggagtgggcggtggaagcgggctgggtagcggataccgccgcctttgagcgctggcagctgcggcagatggagcagagcttttttaccgtcgacctgccgctgtttgcccggctctaccgggcctgcgaagcgggcgatctggagtgtgcccggcgctggaccgcttatctgctcgcctgccgggaaacccgcgagctgcgcgatgaagagcgcaaccgcggcgcagccttcacccggctgctggccgactggcagccggactgcccgcccgagtggcgcaagctgtgtcagcaaagccagttaaccggtatggcgtggcttggcgtacgctggcaaatagccattactgacctggccctgagccttggctatagctggattgaaagcgcggtgatggcgggcgtcaagctggtgcccttcggccagcaggcggcccagcagttgattctgcgcctgtgcgaccgctatgcggcggacatggacagcgcccttgcggccccggattgcgcaatcggttcggcgacgccgcttgcggctatcgcttcctcgcggcacgaaacccagtattcccgactattccgttcttag

SEQ ID NO: 256135 - DNA, 618 bp, Klebsiella pneumoniae
atgaacataattaagcaaccgctgcgcgtcggcgtcggcggcccggtcggctccggaaaaaccgcgctgctggaagccctctgcaaagccatgcgcgacacctggcagctggcggtggtgaccaacgatatctacaccaaagaagatcagcgcattctcaccgaagccggcgccctggagccagagcgaattgtcggcgtcgaaaccggcggctgcccgcataccgccattcgcgaagacgcatcgatgaacctggccgcagtggaagcgctaagcgagaaattcggcaatctcgatctgatctttgtggaaagcggcggcgataacctgagcgcgacctttagcccggagctggcggatctcaccatctacgtcatcgacgtggcggaaggggaaaagatcccgcgcaaaggcgggccggggatcaccaaatccgacttcctggtgatcaacaaaaccgatcttgcaccatacgtgggcgcgtctctggaagtgatggagcgcgataccctgcgcatgcgcggcgaacgtccgtggagcttcaccaacctgaaaagcggcgacggcctgcaaaatatcatcgcctttatcgaagacaaaggcatgcttggcaaataa

SEQ ID NO: 256136 - DNA, 1608 bp, Klebsiella pneumoniae
atgtcatcactggatataaaaactgatttacctgcgcaaaccagtgcctccggctccaaagaaacgctggaagactatacgcttcgctatgccccgctgagctttcgccgctggggaccaggggttgtcgcggtgacggcattaggcggtatcgcctacctggccgacttttctatcggcgccagcatcggcatggcctggggcaccaccaatgcgatttacgcgatcctgctggcggcactggttatttttcttaccggtattccgctggcgattaccgccgcgcgctataacatcgacctcgacttaatcacccgcagcgccggtttcggctactttggctcggtgatcaccagcattatctttgccggatttacctttatctttttcgccctcgaaggctcgattatggcgcaggggctgctggtgggcttagggatcccgctgtggatgggctacctcatcgccaccctgatggtattgccgctggtggtctacggcatgaaggcgctgactcgccttcaggtctggacgacgccgctgtggctggtcctgatggtggttccggtggcgtggcttatcgccaaagacccggatctggtggatgggtttatgaacttcgccggtaaaaaccacgccgcaacggtagatttaaccgccattatgctcggcgcgggggtatgcctgtcgctgatcatgcagattggcgagcagatcgactacctgcgctttatgccgccgaagaccgcagaaaacagcaaaagctggtggctggcggtgttctccgccggtccgggctgggtcgtgttaggtgcgattaaacagattatcggcgcttttctcgggttctatctgctgacccgcttcccggcggtgcacaacaccgaaccggtacagcagttcgtcagcgtcttcgataacctggtccccggctggctggcgctcaccctcgcggtggtgctggtggttatctcgcagataaaaataaacgtcactaacgcctattccggctcgctggcgtggaccagcgcctggacgcgcaccaccaaacgttatccggggagaattattttcgtcatcgtcaacctgacgattgctctcgccctgatggagggcgacatgtttagcgctctggcgtggatccttggcttctattctaactttgccatcgcctgggtggtggtagtcgccaccgatatcaccgtcaataaaggggtgctgaagctggcgccggcgcagccggagtaccgccgcgggatgatctacaacgtcaacccggtaggcgtggtctcttttgccctcgcggcaggcctttcgattagcgccttcttcggcctgttaggcgacaccctggcgccgttctcgccgctgatcgcgctggcggtagcgttcgtgatgacgccggtcatgggaatcgccacccgcgggcgctattacattaaacagcacgatgacggtatcgccgagccgcgctacgatgcgcagggtaatgcgtcgatcaccgtttaccgctgcctgagctgccgggaagagtacgaacgtcctgacgtgatgcattcgcataaacatcagggggcgatttgctcgctgtgtaagagtatggaataa

SEQ ID NO: 256137 - DNA, 1014 bp, Klebsiella pneumoniae
atgcgtgtactgggaattgaaacatcctgcgatgaaaccggcatcgccatttatgacgacgaaaaaggtctgttagccaaccagctgtatagtcaggtgaaattgcatgctgactacggcggcgtggtgcctgaactggcctcgcgcgaccacgtgcgtaaaaccgtccctctgattcaggcggcgctaaaagaggccgggatgacggcaaaagatattgatgccgttgcgtatacggcgggcccaggcctggttggcgcgctgctggtcggcgcgacggtaggccgctcgctggccttcgcctggaacgtgccggcgatcccggtgcaccatatggaagggcatctgttggcgccgatgctggaagataatccgccgcagtatccgtttgtcgcgctactggtttccggcggccatacccagctgattagcgtcaccggtattggccagtatgagctgttaggcgagtcgattgacgacgcggcaggggaagccttcgataagacggctaaactgctcggcctggattaccctggcggcccgatgctgtcgaagatggcctcccagggcaccgaagggcgttttgtctttccgcgcccgatgaccgaccgtcccgggctggattttagcttctcaggcctgaaaacctttgctgccaacaccatccgtagcaacggcgatgacgaccagacgcgcgccgatatcgcccgcgctttcgaagacgcggtcgtggatacgctgatgatcaagtgccgccgggcgctggagcaaaccggttttaaacggctggtgatggctggcggcgtcagcgctaaccgtacgctgcgcgcgaagctggcggaaatgatgaaaaagcgcggcggggaagtcttctatgcccgtcctgaattctgtaccgataacggtgcgatgattgcctatgcgggtatggttcgtctgcgttccggggcaaaagcggagctgggcgtcaccgttcgtccgcgctggccgctggctgaacttccggcggcataa

SEQ ID NO: 256138 - DNA, 216 bp, Klebsiella pneumoniae; identical to SEQ ID NO: 172819

SEQ ID NO: 256139 - DNA, 1743 bp, Klebsiella pneumoniae
atggctggacgaattccacgagtatttatcaatgacctgctggcgcgcaccgatatcgtcgatctgatcgacgcgcgggtgaagctgaaaaagcagggcaagaattatcacgcgtgctgtccgttccataacgaaaaaaccccctctttcaccgtcaacggtgaaaaacagttttaccactgctttggctgcggtgcgcacggcaacgctatcgacttcctgatgaactacgacaagctcgagttcgtggaaaccgtcgaagagctggctgctatgcataatcttgaagtgccgtatgaagccggaacgggcctgagtcagatagagcgccatcagcggcaaaatctctatcagctaatggaagggttaaatgacttttatcagcaatccttcaaccaacctaatgccgaacctgcgcgccagtacctggagcaacgcggcctgagtgccgaagttgtccagcagtttgctattggttttgcgccgccaggctgggataacgcattaaaacgtttcggcggtaatgtcgacaacaggaaactgctgctcgatgccggaatgctggtcaataatgaccagggaagaacttacgaccgtttccgcaatcgcgtgatgtttccgattcgcgacaaacgaggccgggtgattggatttggtggtcgcgtactgggtaacgatacgccgaaatacctcaactccccggagaccgatattttccataagggccgccagctttacggcctttatgaagcgcagcagcaccaggcagaaccaccgcggttgctggttgtcgaagggtatatggatgtcgtcgctctggcgcagtacggtattaactatgccgttgcatcgctgggtacatcgaccacggccgaccacatgcatatattattccgtgcgacgaacaacgtaatttgctgttacgacggcgaccgcgccggtcgagatgccgcatggcgtgcgctggaaacggcaatgccgtacatgaccgatggtcgtcagctacgctttatgttcctgcccgatggtgaagatccggatacgctggtacgtaaagagggtaaagaggcttttgaagcacggatggagcaggctcagccgctctccatgtttttatttaacagtctcttaccgcaggtcgatctgagttcgccggatggcagtacgcagctggccgcactagcgctgccgctcattagccaggtgcctggcgatgcgcatcgtattcagctgcgccagatgctgggcctgaagctgggcatttttgatgatacccagcttgatcgtttaatgccgaaacaggcagaaagtggcgtcgtacgcccggctcagcagataaaacagacgcctatgcgtatacttataggactgctggtgcagaatcccaatctggcgccgctggtgccgcctttgcaggggctggcgcagagcaaattaccgggactcagcctcttctccgagctggtgaacctctgtgtggcgcagccgggcctgaccacggggcagctattagagaactatcgcgggactagtgaatactcaacacttgaaaaactctcagcctggaacgatataagggatgagaatgttgaaaaaatgttcaccgacacgctaaaccgaatttttgatgcaatgcttgaacagcggcaagaagagttgatagctcgcgaccgcactcacggtttaagcagtgaagaacgccgggagttctgggaaatcagacaagccctggaaaaaaaatga

SEQ ID NO: 256140 - DNA, 498 bp, Klebsiella pneumoniae
atgacagattcggaattaatgcagctgagcgagcaggtggggcaggcgctgaaagcgcgcggcgcgacggtgaccacggcggagtcctgcactggcggctgggtcgccaaaaccctgaccgatattgccggcagctcggcgtggtttgagcgcggttttgtgacttacagtaatgaagccaagtcgcagatgattggcgtcagcgaagcgacgctgcttgaccatggcgcggtgagcgaaccggtggtcgtggagatggcgattggcgccctgcgcgcggctcgcgcggactacgcgatttcggtcagcggcatcgccgggccggatggcggcagcgcggaaaagccggtgggcaccgtctggtttggcgtggcgagcgccagcggacagggcgtaacccagcgcgaatgctttgccggagaccgggaggcggtgcgccgccaggccacggcctatgcgctaaatctcctctggcaacaatttctacaaaatacttga

SEQ ID NO: 256141 - DNA, 234 bp, Klebsiella pneumoniae; identical to SEQ ID NO: 173611

SEQ ID NO: 256142 - DNA, 882 bp, Klebsiella pneumoniae
atgaagcaacgtaccgggatatggctggcgctggcgctggggctcgcatcgcacggggtgatggcgaaaacgctgaatgtcgtgagtagtttttccgttttaggcgatatggtgcagcagattggcggcgaacacgtgcatgtcaacacgctggtggggccggatggcgatccgcatacctttgagccttcgccgaaagatagcgcgctgctgagtaaagcggatgtcgtggtggtcaacggtctggggctggaaggctggctggaccgcttaattaaggcatccggtttcaaaggtgagctggtggtagcttcccgcggagtcaaaactcacacgcttgaagaagatggcgcaacggtaaccgatccgcatgcgtggaacagcgccgccaacggcgccctgtatgcgcagaatatccttaacggcctggtaaaagcggacccggatgataaggctgcgctggagatttccggtcagcgctatatcagccagctcaacgatatcgatcgctgggcaaaaagccagttcagcgccattgcgctggagaaacgcaaagtgctcaccagccatgacgctttcggctattttggccgcgcctatggtgtgaccttcctcgcgccgcagggattatcgtcggagagtgaagccagcgcggcgcaggtagcggctttaattcaacaaattaaagccgacggcgtgcatacctggtttatggaaaaccagctcgacccaaggctggtcaagcagatcgccagcgcaacgggcgcgcagccgggcggtgaactctatcctgaagcgctctctaaacccggcggcgtggcggacagttatgtgaaaatgctgcgtcacaacgtcgagctgattgcggccagtatgcgatag

SEQ ID NO: 256143 - DNA, 864 bp, Klebsiella pneumoniae
atgatctggcacacctttattcaaccctttatcgagtttggctttatgcgccgcgcgctggtggtgtgcctggcgctctccctgagcactacgatgctcggcgttttcttacttttacgtcgcatgagcctgatgggcgatgcgctctcgcatgcgattttgcccggcgtggcggcgggctacctgcttaacgggatgtcgctgctggcgatgaccgtcggtggttttattgccggcattgcggtggcgctggtggcgggatgggtcagccgacgcacgcctttaaaagaggatgccagcttcgccgggttttatctcggctccctggcgctgggcgttacgctggtctcgctgcgcggttctaacgtcgacctgctgcatctgctgtttggctcgattctggcggtagaccgcgattcggcgctgtttgtctccgccgttgccagcctgaccctgatttgcatcgcgttgttttatcgcggcctggtcagtgaagccttcgatagcgtctggcttcaggtgaactcgcgaagattgccggcgctgctccacggcctgtttctcgccctgctggtgctcaacctggtggccgggtttcaggttctcggcacgctgatggcggtaggcgtcatgatgctgcctgccgtcgcggcgcgctgctgggcgcgaacgctgccgggcattctgctgctggcggcgtcgattggcagtttttgcgcgtggatggggctgagcctgtcgtgggcggcgaatttgcctgccggacccgcgatcgtgctgaccgccagcggcatcttttttgtatcggtattttttggcacgcgcagccggctggttgtcggctggcgtaaattaatggggtaa

SEQ ID NO: 256144 - DNA, 678 bp, Klebsiella pneumoniae
atgattaagctcgaccacctggtggctggctatgaagggctggcgatcacaccgtcccttagcggcacgattgcaacggggagtatgacggcgattgtcggccttaatggctgtgggaagtcgacgctgctcaagacgctggccggctttattccaccggttagcggccgtctgaactggtgcggtgaacgacccgttatcggctggctggcgcagcgtcatgccctggagtcgcagtttccgttgacggtgcaggatgtggtcagccagggggcctggccccgggtatcgctgttgcgcgggcttaggggagaggggcgtcagcgtatcgtcgcatccttagagcgggtgggactgttaacgatggcgaaaacgccgattgaggcgctctctggcggccagtttcagcgcatgctcttcgcaagggtcatggtgcaacgcgcgccgctggtaatgcttgacgaaccgtttaccggcatcgacgaagcgacctgtcgtgagctgatggcgctgatcctcgaaatgcaccagcagggacagacgattctggcggtgctgcacgataaccaacgggtcgccgactatttcccggaaacgctgctgctaacgtcgcagcacgcccgctggggctgtacgcctgatgtactgcccgccttttactccgcgaggctggcatga

SEQ ID NO: 256145 - DNA, 987 bp, Klebsiella pneumoniae
atggcgggcggcacgggcggttttttacttgagccgcagcataacgtgatgcagatgagcggtgatttcgcgaataacccggcggcggagcagttcatcgacaagatggtgagcaagcacggctttgaccgacagcagctgcatgagatcctctcgcaggctaaacgtctggactatgttctgcgtctgatggaccgccaggcgccgaccgggctgccgccgtcagggccaaacggcgcctggctgcgctataaaaaacagtttattaccccggataacgtgcagaacggcgtggcgttctggaaccagtatcaggatgcgctcaaccgcgcgtaccaggtttacggcgtgccgccggaaattatcgtcgggattattggcgttgagacccgctggggcagggtgatgggtaagacccgtatcctcgatgcgctggcgacgctgtcgtttaactatccgcgccgcgccgaatacttctctggcgagctggaaacgttcctgctgatggcgcgcagcgaacaggatgacccgctcgatctgaaaggctccttcgccggggcaatgggctatggtcagtttatgccctcttcttataagcagtatgccgtggactttaacggcgacgggcatatcaatctgtgggatccggtcgatgccatcggcagcgtggcgaattacttcaagcagcacggttgggtgagcggcgatctggtcgcggtacaggcgctgggccaggctccaggcctgaacaatgggtttaaaactaaatacagcgtctcgcagctggcggcggcaggattaaccccgacccagccgctgggtaaccatcagcaggcgagcctgctgcgtctggatgtcggtaccggctatcagtactggtacggcctgccgaacttctacactatcacccgctataaccacagcacccattacgcgatggccgtctggcagctgggcctggcggtttctcaggcccggatgcagtaa

SEQ ID NO: 256146 - DNA, 564 bp, Klebsiella pneumoniae; identical to SEQ ID NO: 173616

SEQ ID NO: 256147 - DNA, 978 bp, Klebsiella pneumoniae; identical to SEQ ID NO: 173617

SEQ ID NO: 256148 - DNA, 363 bp, Klebsiella pneumoniae; identical to SEQ ID NO: 173618

SEQ ID NO: 256149 - DNA, 780 bp, Klebsiella pneumoniae
atgaatcaggttgctgttgtcatcggtgggggacaaaccttaggagagtttttgtgccgcgggcttgccgcagaaggctatcgcgtggcggtagtcgatattcagagcgataaagcgacccgcgtcgcccaggccatcaacgcggagtatggcgaaggcactgcgtggggcttcggcgcggacgccaccagcgaagccagcgtggtcgcccttgctcgcggagtggatgaaatattttcccgcgtcgatctgctggtctatagcgccgggatcgctaaagcggcctttattagcgatttcgcgctgggggatttcgaccgttcgctgcaggtgaatctggtgggctacttcctctgcgcccgcgagttttcccgcctgatgatccgcgacggcattaaaggtcgcatcatccagatcaactctaaatccggcaaagtgggcagcaagcataactccggctatagcgcggcgaagttcggcggcgtgggtctgacccagtcgctggcgctggacctcgcggagtacggtattaccgtgcactccctgatgctcggcaacctgctgaagtcgccgatgttccagtcgctgctgccgcagtacgccaccaagctggggatccccgaagagcaggtcgagcagtattacatcgataaagtcccgctaaagcgcggctgcgattaccaggacgtacttaacgtgctgatgttttacgccagcccgcaggcttcatactgtaccgggcagtccatcaacgtcaccggcgggcaggtgatgttttaa

SEQ ID NO: 256150 - DNA, 360 bp, Klebsiella pneumoniae; identical to SEQ ID NO: 173620

SEQ ID NO: 256151 - DNA, 774 bp, Klebsiella pneumoniae
atgaaaccacgtcagcgccaggcagccattctcgagcacctgcaatcgcagggcaaatgctcggtcgaagagctggcgcaacacttcgacaccaccggcaccaccatccgtaaggatctggtgatccttgagaatgccggtaccgttatccgtacttacggcggcgtggtgttaaataaagatgaggccgatccgcccatcgaccacaaaacgctgattaacacccataaaaaagagcggattgccgaagccgccgtcagcttcattcacgatggcgactcgatcattcttgacgccggcagtacggtgctgcaaatggtaccgatgctcagccgcttcaataacattaccgtgatgaccaacagcctgcatatcgtcaacgccctctctgaactggataacgaacaaaccatcctgatgccgggcggcacgtttcgcaaaaaatcggcctcctttcacggccagttggcggaaaacgccttcgaacacttcagcttcgatcgactgtttatgggcaccgacggcattgatttaatcgccggcgtcaccacctttaatgaggtttatacggtcagcaaagcgatgtgcaatgccgcccgcgaagttatcctgatggccgactcgtcgaagtttggccgcaaaagtcccaatatcgtctgcggcctggagagcgtggacaaactgattaccgatgccgatatcagcccggaatttaagcgggcgctggaagacaaaggcatcgaagtcattattactggagaacatcatgagtaa

SEQ ID NO: 256152 - DNA, 966 bp, Klebsiella pneumoniae; identical to SEQ ID NO: 203910

SEQ ID NO: 256153 - DNA, 1392 bp, Klebsiella pneumoniae
gtgccgctggcgattgatggcctggcccaggacgtgcttggccggcgctttgcccttgaaggccacccgcggctggaggcgattgcccgggcgggggacgtggtgcggttcccggcggacagcgatttgccggacccttacgatgggctgatccccggtcaggagagcctgaaggtgcacgcctgcgtcggcctgccgctgtttgccggacaaactctgatcggggcgctcaccctcgacgggatggatgcggaccgttttgacagctttagcgacgaggagctgcgcctgatagccgctctggtcgccggggcgctcaataacgcgctgctgatcgccaggctggagaatcaaaacgtgctgccggaacaggctatcgtgtatccggtatccgaacgtcaggagatcattggcctgtcggcgccgatgctgcagttgaagaaggagatcgacatcgtcgcggcctctgacttaaacgtgctgattagcggcgagaccggcaccggcaaagagctggtggcgaaagcggtgcatcaggggtcgccgagggcggccaatccgctggtctatctcaactgcgcggccctgccggagagcgtggcggagagcgaactgtttggccacgtcaaaggggcatttaccggggcgatcagcaaccgcagcggtaagtttgaaatggcagataacggaacgctatttctcgatgaaattggcgagctttcgctggcgctccaggccaagctgctacgggtactgcagtatggcgatattcagcgcgtcggcgacgaccgcagcctgcgggtcgatgtgcgggtgctggcggccactaaccgcgatctgcgtcaggaggtcgtggaggggcgttttcgcgccgatttgtatcatcggctgagcgtgtttccgctgtcggttccggcgctgcgcgagcgggacaatgacgtggtgctgctggccggttatttttgcgaacagtgccgtgtgcgcatggggctggcgcaggtgattttaagcgaggcgacgcgcggcaggctgcttgcgtggtcatggccgggcaacgtgcgcgagctggagcacgcgattcatcgggcggtggtgctggcgcgggcgacgcaggcgggtaatgaagtggtgctggagccgcagcatttccagtttgccgaggaaacgccggccttgccgaccgttaccccgcagccgtcggtgggagcagtaagcctgcgcgaggcgacagaggcgtttcagcgcgaagcgatcgccagagcgctggcggataaccgtcgaaactgggccgcagccgcccgcgcgctggagctcgacgtcgccaacctgcaccggctggcgaaacgtctggggcttaaaggatcccggcctgataaaagttctgcaggttaa

SEQ ID NO: 256154 - DNA, 1098 bp, Klebsiella pneumoniae
atgctaaaagttattcaatctccagccaaatatctccagggaccggatgcatccacgctgtttggcgagtacgctaaaaacctggcggacagctttttcgtgattgccgatgacttcgtgatgaagctggcgggtgagaaagtgttgaacggtttgcatagccacaatatcagctgccatgcggagcgcttcaacggcgagtgcagccacgttgagatcaatcgcctgatcgccattctgaagcagcacggctgccgcggcgtggtgggcatcggcggcggcaagacgctcgatacggcgaaagcgataggctattaccagaagctgccggtggtggtgatcccgacgattgcctccaccgatgcgccaaccagcgcgttgtcggttatttataccgaagccggtgaatttgaagagtatcttatttacccgaaaaatccggacatggtggtgatggatacgacgattatcgctaaagccccggtacgcctgctggtggccgggatgggcgatgcgctttcaacctggtttgaagccagggcctgctatgacgccagagccaccagcatggccggcggccagtcgacggcggcggcgctgagcctggcgcgcctgtgctatgatacgctgctggcggaaggcgaaaaggcccgcctcgccgctcaggccggagtggtgaccgatgcgctggaacgcatcgttgaagcgaatacctaccttagcggaatcggctttgaaagcagcggcctggccgccgcgcacgccattcacaatggtttcaccatcctcgaagagtgccaccacctgtaccatggcgagaaagtcgcgtttggtaccctggcgcagctggtgctgcaaaatagcccgatggaagagatcgaaacggtgctgaacttctgccataccgtcggcctgccggtcacgctggcgcaaatgggcgttaaagagagcatcgacgagaaaattcaggcggtagcaaaagcgacctgtgcggaaggcgaaaccatccataacatgccgttcccggtcagcgcgcagagcgtgcatgcggcaattctgaccgccgacctgcttggacagcagtggctggcgcgttaa

SEQ ID NO: 256155 - DNA, 1914 bp, Klebsiella pneumoniae
atgactgcgcagactcagagctttcccctggtgataacccagtcgtggcatcgttgcagtaagtttatgcagcgggaaacctggcagacgccgcatcaggcgcaggggctgaccttcgaatcgatttgtcggcgtaagaccgcgctgctgacgattggccaggcggcgctggaagatgcctgggagtatatggataaccgcccctgcgcattgtttatccttgatgagtccgcctgtattctcagccgctgcggcgatccgcagacccttgaccagctggcggcgctggggtttcgtgacggtagctattgcgcggaaagcatcatcggcagctgcgcgctctcgctggcctccatgctcgggcagccggtcaaaacgacgggcgagcagcattttaaacatgcgctgcacggatggtcgtttagctctacgccggtgtttgataaccatgggcgcctgttcggttccatttctttgtgctgcctgacggaagaacaggcttcgccggacctctccctgaccctggctatcgcccgggaagtgggcaactcgctgctcaccgatagcctgctggccgagtcgaatcgccaccttaaccagatgtacggtctgctggagagcatggatgacggggtgatggcgtggaatgagcagggcattttgcagtttctgaacgtgcaggccgcgacgttgctacaccttgatgcccaggccagccaggggaaaaacatcaatgaactggtgacgctgccggctctgttgcgccgggcgatcaagcacgcgcgcgggctgaaccatgtggaagtcaccttcgagagtcagcatcagttcgttgatgccgtcatcacgctcaagccgatcgtcgaagagcagggcaacagtttcatcttgctgctgcatccggtcgagcagatgcgtcagctgatgaccagccagcttggcaaagtgagccatacctttgagcagatgtcggctgacgatcctgaaacccggcggttaattcactttggccgtcaggcggcgcgcggcgcttttccagtgctgctgtgcggtgaggaaggggtgggtaaagagctgctcagccaggcgattcacaatgagagcgagcggggtggcggaccgtatatcgcggttaactgccagctgtatgccgacagcgtccttgggcaggattttatgggcagcgcgccgacggacgaggaaaacgggcgtcttagccgtctcgagctggccaacggcgggacgctgtttctggaaaaaatcgaatatctggcgccggagctgcagtccgcgctgttgcaggtgatcaagcaaggggtattaacccgtctggatgcccggcgtttgattccggtggacgttaaagtcatcgccaccactaccgtcgatcttgccaacctggtggaacaaaaccgctttagccgccagctttactacgcgctgcactcttttgaaatcgttattccgccgctgcgggcgcggcgtaacagtattccttcgctggtccacaatcgtcttaagagtctggagaagcgtttttcctcgcggttgaagatggatgacgatgcgctggcgcagctggtggcctactcctggccgggtaatgattttgagctgaacagcgtgattgaaaatatcgccattagcagcgagaacggccatatccgtttgagtaatctgccggaatatctctttgccgagcggcccggcgccgacgcgggttcctcgctgctgcccgccagcctgaccttcagcgccattgaaaaagaggccatcatccatgccgcccgcgtgaccagcggacgggtacaagagatggcgcagctgctgaatattggccgcaccacgctgtggcgaaaaatgaaacagtacgatatcgatgccggccagtttaagcataaaaatcaggagtaa

SEQ ID NO: 256156 - DNA, 1164 bp, Klebsiella pneumoniae
atgagctatcgtatgtttgattatctggtgccaaacgtgaacttttttggtcccaatgctgtttctgtcgtcggcgaacgctgtaagctgctgggcggtaaaaaagcgctgctggtcaccgataaaggtctgcgggccatcaaagacggcgcggtggataaaactctcggctatctgcaggaagccggtattgaggtggtggtttttgatggcgtcgagccaaatccaaaagacaccaacgtgcgcgatggccttgcggtctttcgtcaagaacagtgcgatattatcgtcaccgtcggcggcggtagccctcatgactgcggtaaagggatcggtatcgcggctacccacgaaggggatctttaccgctatgccggcatagaaaccctgactaacccactgccgccgatcgtcgcggtgaataccaccgccggtaccgccagcgaagtgacccgccactgcgtactgaccaacaccaaaacaaaagtgaagttcgttatcgtcagctggcgtaacctgccctcggtctccatcaatgacccgctgctcatgcttggcaaaccggcgccgctgaccgccgcaaccggcatggatgcgttaacccacgccgtggaggcctatatttcaaaagatgccaacccggtcaccgatgccgccgcgatccaggccatccgcctgatcgccgggaacttgcgccaggccgtcgcgctgggcagcaacctgcaagcccgcgaaaacatggcctacgcttccctgctggcggggatggctttcaataacgccaacctcggttacgttcacgccatggcccatcagcttggcggcctgtacgatatgccgcacggcgtggcgaacgcggttctgttgccgcacgttgcgcgctacaacctgatcgccaatccggaaaagtttgccgacatcgccgaatttatgggagaaaacatccacggactttcaaccatggacgccgccgagtcggccattcgcgccatcgcccgcctctcttccgatatcggcattccgcagcatctgagcgagctgggagttaaagaggctgacttcccctatatggcggagatggccttgaaagacggcaacgccttctcaaatccgcgcaagggtaacgagaaagagattgtcgctatcttccgccaggctttctga

SEQ ID NO: 256157 - DNA, 426 bp, Klebsiella pneumoniae
atggataagatcaaacacatcgccactatcacgctggcggctgcgaaagaaatggctactgccgttgaggcgaaagcccttgaaatgaacgtgccggtggtctttgccgttgttgactgcggcggaaatatgctcctgatgcagcgtatggatgaggcatttataaccagctgcgatattgcgctcaataaagcctatacggcatgcggcctgcaaaaaggcactcatcaaattacagcgttagtccaaccgggcgcaccgctatatggattacaactcaccaaccagcagcgaatcattccttttggcggcggcctgccagttatttttaacgaggaagtcatcggcgccgttggcgtgagcggcggtaccgtcgaacaggacatgttattagccgaaacggctctgaagggtttctctaaataa

SEQ ID NO: 256158 - DNA, 300 bp, Klebsiella pneumoniae; identical to SEQ ID NO: 191494

SEQ ID NO: 256159 - DNA, 270 bp, Klebsiella pneumoniae
ttgtcaaaatatgagctaaattcagcagaagagcgttatcagcctgggtctggagatttagtactggctaataagctgggtattactgatgacgaagaaatggagacgctggaatcaggcctgttattgatgctttatgaacggttgtttatcgaaggtcagcctccttctgtgctggcatttgagcacgtcagtggatggcatcgccagtggctggggaatgtgtatgactgggccgggaaattacgtcatgctaacctggctaaataa

SEQ ID NO: 256160 - DNA, 507 bp, Klebsiella pneumoniae
atgatcaacgatattctggcgccggacctgcgggtggtcttttgcggcatcaatccggggaagtcttccgcccataccggttttcatttcgcccatccgggaaatcgcttctggaaggtgattcatcaggccgggtttaccgaccgtcttctgaaacccgaagaggagctacagctgctggatacccgctgcgggattaccatgctagtcgagcgcccgacggtacaggccagcgaggtcgcgctgctggagctccgcgatggcggaagagagctggtgaggaaaatggaagagtatcagccgcgcgcgctggcgatcctcggtaaacaggctttcgagaaagcgtttcaggtacgcggcgtaaaatggggcaaacagcaggtgaccataggcgcgacggaagtatgggtgttgccaaatcccagcgggctcaaccgggcgacgctggataagctggtggaggcctaccgggagcttgacgaggcgctggcaacgcgagggctttaa

SEQ ID NO: 256161 - DNA, 1128 bp, Klebsiella pneumoniae
atgataaagaaaatatttctgtccttactaataggtatgatagtggtttgcgcctgtgcctatcataaagcgaagcccctgcgcctgaccaaagatctttcactaccatttgcgctgccaaccgaacagcgccatatagtgtattacgcctcgctggcgccaaatgcgcataatactcagccctggcagattcgctataacccggacgcacggcgattcaccctggcgttcgaccgcagtaaagccctcccgcatatcgacccggcggggcgagaagccagtatttctctgggcgcgttcctggagaacttccgccaggcagccgccgcatttggcatgctggcggaaatagacattttaccggcgatggcgcgcaatggtgatgttgcccgcatgacgttaagccccctccaccgcgcctcttctctcaaacagcccgccgtgctgaagttaattgagcgccggcacaccgacaaacgtccgtttcaggatattgcccttgcgccccgcgatctcgctgccctgctcaaacagcaccagccgtatttaaattattatccacgcggcagcgccgggtttaataagcttgagagttttgccatccaggcagcaaaggctcaggcgctcgatgcggccaaaagagcggagttcgctcactggctgcgcttttccaacgaagaggcccgccggttgaaagacggcctgcccgcagaacagttaggcatcaccgggataaaaaaactgctctattactcatttttcgatcggcaaaaagcccagggagaagccttcgccgcggaaagcatcagtaaaacggccagcagcgtagcgcaaagcgccggattttttatcatcggcggagaggaaacctttccgctgatgatgcgcagcggcatgaatctgcaggccttctggctggatgccgtccgctacggcatctctgttcagccggtgagccagatgctggaggataaagcgttccgtagacagctggcggaaaccttaggcttaagccagccgccgcaaatgatccttcgcgcaggctacgttgacgactatggcgaaaataatagaattcgccgtcctatcggcgaatttacccgcctggaaccacccggggcgaattaa

SEQ ID NO: 256162 - DNA, 645 bp, Klebsiella pneumoniae
atgaatagcaaacgaaagattcagctggctgattttaatagaacggttattctggccaccgctaatacgttatttcttaaccatggtatagaaggaacgaccatggatgagattgcgcacgaagccggattcagtaaaaccacgctttatagctactttgacagtaaacaggatattgtcgatcaccttattctcgatggaatggagcgctttcaccaggaggtggtgaaaatagtcagccggcaggcccccttccgcgagttttatcatgagctttgccagtcgttggttgctatccacgactccggcatcgtctatttccccggcattaccgggaaaataggttgctctgaaaaagagatgaaaaataataaagtactgactaatatctatatgctcggcgaggagattaatcatattatcgccggagaaatttcccgcgcggcagcaaacaaagagcttcagttaaatgctccaatggcagacgtcatgatgctgttctggctctgcctgaccgggctgatagagaaatcagcaagtaaagaagcctatattttgcggcatcttgagaaggaccgaaaatcctttcttaacttcgcttttgacgctttattattaatgatagaaaaaggcgaaagtcgatga

SEQ ID NO: 256163 - DNA, 495 bp, Klebsiella pneumoniae; identical to SEQ ID NO: 138824

SEQ ID NO: 256164 - DNA, 717 bp, Klebsiella pneumoniae
atgttctctaaaaagtcactttctgcgctgtgcgtttgcgctgctattgtttctactgcaggtgccaatgctgccacggatgccaatcttacggtaaaaggaacttttactccggcagcatgtactccggaactaagcaacagtggcgtcgttgattatggctccatgaacaactcggttctcgagaaaacaattaacggtaactccttagttcagctgggaaaaaaatccattactttaacggtaagctgcgatgcggcgaccagcgtgggtattattgcgcaggataaccgcgcgagttctaaagtcacgctttcaagttcggcctatattgcagactatgtaccgggtcagaatatgtcgaatactaatgcagtatttggcctcggcaccgttaacaacgtgaacattggtgcttacaccgttacggcaatgaaggatgggttaactgccgatggtgcagcagtggatatgattgtgaaagatacggatgtagcaagttccgtatggaagaatgcgaacggtggtgggttatattatcctgatactacccgtatcgttaccgttgctgaaaccggcaaaaccaccccaatgttgtttaaagatttagtgatgccgctggatattgtttccgccgttcaggacaatggcgtactgggtgccggaacaaaaatcgagctcgatggtaatgccacgctgagtcttgtttatctctaa

SEQ ID NO: 256165 - DNA, 678 bp, Klebsiella pneumoniae
atgaaaaaaacgctgctgttgtcgatattgatattgacgacccgggccaatgccagcggcatggtgcctgagacgtcggttttactcgttgatgagcaaaaaggtgaggtgtcgatgaacctcaccaattcagatccgcatccgtccctgctttataccaaagtggttgatttagccgatagcgataaatctatccgcttaattgttacacaaccggtagtacgcgtagagcaaggggacacgcaaaagatccgttttattttgcaaacctctaaaccgctgcagcatgaggagtttaaacgggtcacctttgaaggcattccgccgaaggaaaaggaaaaactgaaaacaacggtcacaattcgtcaggatttaccggtcattatccatccggctggcctgccggaggagcccgcgccgtggaagcatctggtctggcgcaaaaagggcggccaggtggagatcagtaatccgagcgactatgtcgtcaggatgacggccatgtttaatactttgccgtcaggttctcccggcgagttagcgaaaacgtatctcctgccgcacaccagcgtcagcgtaaaattacctgctaaagcgggagcggatacgaaagtcgagttttatccggcaagccgctatggatataaaggagagcgctacatcacctcgttgcagtaa

SEQ ID NO: 256166 - DNA, 2379 bp, Klebsiella pneumoniae
atgctcaggaaaaagctgttggcctgtcttatcgggttgggaagcgctcaactggcggtagctgaagaggccaaaaagagcgcgatagaatttgatagtgaaaccttaacgtctttgggtatcgatccgcaaattgcgcattatttctcctcagaagccaaattcctgccaggggcgacctcggttatgctgggcgttaacggtaaggataaggggaatatcgttgcccactttgatgatgacggccagctgtgtttcgataaagcgtttatggaacaggccggtgttcaccagcccaggaacgatagcgagggctgctatgactatttacaggcccatcctgaaacgatcctaaaagcgtcgcccggaaaagggcgaatcgatctgatattaccgcaggagcaattagttagccaaagtaccgacctcagcggatacgacacgagcggtacggctggggtgctgaattacacctttttcgcttcgcgcaacgattatagcggcggtcattccgagtattcgcagctgatgctggacggtggtctaaacgtgaatacctggctgctgcgtagccatcagctattaagccgtgcgaataatcagtttaccagcgaaaattcgcagacctacctgcagcgcacctttacgcagataaaaagcaccgttaaggccggagaggtaggcatgaataatcctttgctcgacggcgccgagctatacggtatctcctttgtgccggagagcgcccttaacgatgccgggagcggcgtgctggtaaccgggatcgccagtaccccgcaggcgcgggttgagattcgccagcaagggatcatggtgtattccactttagtgcctgccggcccctttaccttaacggatattcctctgcgcaacgtcaccagcgatctgacgatcaccgttattgagaccgatggcagccagcatagccaggtggttcccgcctcattgtatcgctccgggctggggcctgcgggcggatatcaattttcattaggccgggtgggcgatgcatatagccagcagccctgggtagccagcctggctggcggctggaagctgaatgccaggcataatttaactagcggcgcgatcgttgcccagagctaccaggccttaggaatacgcgttgactcagcactgccgcaggaaatttcgctttcccttcagattaaccaggcgttcgatcgcgataatgcgcagcagggccagaagtacaatctatcggcctcctgtgcaacaccgtccggttttgggctgaatgcttcgttgagcaaatactctgaagagtatcgtgagttttctcaggctattgataagagttttagcgccaccaataaaatggagtactcattgggcgcgagctggggacaccctgttataggtacgatgagcgccagcttctatgatgtaacagggttcgatagccacaataattctcgctacgcgacgcttaactggggaaagagttttagcgcatttttcgtatcggcaagctggcagcgccagctcagcggcggaagtatcgaacaaagcaatgataatattttttacctgaacctgaatattcccttccagcagcattcggtcaacgcttacgcgcgcagtgaaaaagggcggaagagattcggtacttcggtaacgggcactatcagcgatgacaccacttataccctcggcgccgaacgtgaccagaccgagagtcggaacagcttcagcggcggggtaaatcagaatctgcattacacgcagctaagtatgaatgcgagtaccaacggttcgcagagccatagctattccggaacgctgcgcgggggaatggccgcccaccgccatggtgtgacttttacaccgtgggcgattcgcgacacctttgccattgccagcttggataagccggtttccggagtgcgcatcgagacatcgcaggggccggtgtggactgacttcagcggtcaggctgtcatcccttccgtttcggcctggcgagatgcagtcgttgaaatcaacaccgcgactttgccaaagaacatggatattggcaatgggctcagaatgctcaagcaaggccgaggggccgtaggcaaaatccgcttttctaccatcacggaacgccgggtattgctgagtgtcacgatggggaacggtgatccgctgccgaagggggtcgccgtaacggattcagcgggcaattacttaacgacttccgtcgatgacggcgtgctttttttgaacaacctcacagggagacaaacattggtggcgaaactggaaaagggaagttgccgcatctcgctaacgctgcctgaagcgccagacgcagatgcgttctatgaaaatgccagcggggtatgtcaatga

SEQ ID NO: 256167 - DNA, 531 bp, Klebsiella pneumoniae
atgattcgtctatggctgggccttagcctgctggcattttccggcgcccttctggccgaatgcgaattaaatagcacgcagcgttcggttgactatctgcccgttcgcccggcagaacgtcagcaggcgggagataagcctgtggtacttccggaaaagcagttcgtcctgcatgtacattgtgataagccacaacgtattcggcttttcttcggtagcgcctatgcgcaaaacggcaggttcgcacttggcaatcgtggggaaatgaatattaccgccgggcaagcggtggctgacgatcgcgacgtgatgctggtccctgtacggagcgccggggcgccgattaccgctgaagcagcaaagcgatcccgcattgtgctcaatcaagggatcgcctttgtacagggagaagagattgaagccagtcagctctctgtggttctgaacgtggcttcaatgatggagagccaggcgattacggatcgcgtaacgtatcgtgggaatctgcagatcagggtggtaactccatga

SEQ ID NO: 256168 - DNA, 696 bp, Klebsiella pneumoniae
atgaggtacgcctttgttttattcgcgcttttactcagtccgatccttcacgccggcgacaaccttagtattgattttaccgtgaccgcagaagcggcggcgtgcacgccaacgctgagccataacggcatcgtagatttcggtgaacggcatgtcgggtcgctatcaacgtccgcatttacccagctaggcgtgcgggatattaccttaacgattacctgcgaatcctccaccgggatcgctattacggcgagagatgcgcgatccagttccgctatcacgggaaaagatacacacggccatgagggagtgctttttcaggtcaatggcggcggatacataagcgacaaattacggctttttggtctaggtatgacgatggaaaataaacctattggcagctatgcgatgcaaatcgattccgccaataccatcgcggttgatgataaaaaagttgccgttgatatcgccggatcggccagcaaggagggaccgtgggaagtttcctcgcttttaccgctcccaacgggacaggactatttctatacctttgttaaaaaaggctcttcggtgccgcagccaatcacggcggcaacggtgcctctgcagataagcgcatcggtgggaagtaatctcaggagcgggcaaaaggtgacgttggacggcgaggcggtaatcagtattgtctatctctga

SEQ ID NO: 256169 - DNA, 1419 bp, Klebsiella pneumoniae
atgagtcagaatgtctatcaatttatcgacttacagcgagttgatccgcctaaaaaagcgctgaagatccgtaaaattgaatttgtggaaatttacgagccgttttcagaaggccaggctaaagcacaggcagatcgctgcctgtcctgcggcaacccgtactgcgaatggaaatgcccggtgcataactacatcccgaactggctgaagctggctaatgaaggacgtattttcgaagcggctgagctgtcgcatcagaccaataccctaccggaagtctgcggacgggtttgcccgcaggaccgcctgtgcgaaggttcctgcaccctgaacgatgagttcggcgcggtaaccatcggtaacattgagcgctatatcaacgataaagcgttcgaaatgggctggcgtcctgaccttagcggcgtgaaacaaaccggcaaaaccgtcgccattatcggcgcgggtccggcaggtctggcgtgcgccgacgtattgacccgtaacggcgtgaaggcggtagtcttcgatcgccatccggagatcggcggcctcctgacctttggtattccagcctttaagctggaaaaagaagtgatgacccgtcgtcgcgagatctttaccggtatgggcattgagttcaaactcaataccgaggtgggtcgcgatgtacagctcgacgatctgctgaaagggtacgatgcggtattcctcggcgttggtacctatcagtcaatgcgcggcggtctggaaaacgaagacgccagcggcgtctttgatgcgctgcccttcctgatcgccaataccaagcagatcatgggctttggtgaaacggcggacgagccgtacgtcagcatggaaggcaaacgcgtcgtggttcttggcggcggcgacaccgcaatggactgcgtgcgtacctcgattcgccagaacgcgactcacgtcatctgcgcctatcgccgtgatgaagagaacatgccgggctcgaagcgcgaagtgaaaaacgcgcgggaagaaggcgtggaattccagttcaacgttcagccgctgggcattgaagtgaatgccaacggtaaagtctgcggcgtgaagatggcgcgtacggagatgggccagccggatgcgaaaggccgccgccgcgcggaaatcgttgccggctcagaacatgtggtgccagcagatgccgtagtcatggcatttggtttccgtccgcacagcatggaatggctggcgaagcacagcgttgagctcgattctcagggccgcgtgattgcgccggaaggcagcgacaatgctttccagaccagcaacccgaaaatcttcgccggcggcgatatcgttcgcggctctgacctggtggtcaccgcgattgccgaaggccgtaaggcggctgacggcatcctgaactacctggaagtgtaa

SEQ ID NO: 256170 - DNA, 4347 bp, Klebsiella pneumoniae
atgcagcaccgcggcgcgattcttgccgatggaaaaaccggcgacggttgtggcttgctgctacaaaaacccgatcgtttcttccgaattgttgcggaagagcgcggctggcgtttagccaaaaattacgccgttgggatgctgttccttaataaggatcctgaactggcaaacgcggcgcgccgcatcgtcgaagaagaacttcagcgcgaaacgctgtctatcgtcggctggcgcgatgtgccaaccaatgaaggcgtactaggtgaaatcgccctctcctcgctgccccgtatagaacaaatctttgttaacgccccggctggctggcgcccgcgcgacatggagcgccgcttattcatcgcgcgccgtcgtatcgaaaagcgtctgcaggaagataaagatttttacgtttgcagcctgtcgaacctggtcaacatttataaaggtctgtgtatgccggcggatttgccgcgcttctacctggacctcgcggatctgcgcctggagtcagccatctgtctgttccaccagcgcttttccaccaataccgtgccgcgctggccgctggctcagccgttccgttacctggcacacaacggtgaaatcaacaccattaccggtaaccgccagtgggcccgcgcccgtacctataagttccagacgccgctaatccctgacctccacgacgccgcgccgttcgttaacgaaaccggctctgactccagctctatggataacatgctggagctgctgctggcgggcgggatggacatcattcgcgcaatgcgcctgctggttccgccagcctggcaaaataacccggatatggatcccgagctgcgctcgttctttgactttaactccatgcatatggaaccgtgggacggcccggcgggcatcgtgatgtccgatggtcgcttcgccgcctgtaacctcgaccgtaatggcctgcgtccggcacgctatgtgatcaccaaagataagctcatcacctgcgcatccgaggtgggtatctgggattatcagccggatgaagtcgttgaaaaaggccgcgtcggtccaggcgaactgatggttatcgatacccgcgaggggcgtattctgcactccgcggaaaccgacaacgatctgaaaagccgtcacccgtataaagagtggatggcgaaaaacgtccgtcgtctggtgccgttcgaagaactgccggacgaagaggtcggtagccgccagctggatgatgataccctcgccagctatcagaaacagttcaactacagtgccgaagagctggattccgtcctgcgcgtactgggtgaaaatggccaggaagcggtcggctcgatgggcgatgataccccatttgccgtgctctccagccagccgcgtatcatttacgattacttccgccagcagttcgcgcaggtcactaacccgccgatcgatccgctgcgcgaagcgcacgttatgtcgctggccaccagcatcggccgtgaaatgaacgtcttctgtgaagcggaaggccaggcgcatcgcctgagcttcaaatcgccgattctgctgtactcggattttaaacagctgaccaccatggaagaggagcactatcgcgccgacgtcctggatatcacttttgatgccgccgaaaccacgctggctgaaaccgtgaaggcgctgtgcgataaagccgaacagatggtgcgtaacggtaccgttctgctggtgctctcagaccgtaacatcgctaaaaatcgtctgccggtaccggcaccgatggcggtaggcgcgatccagacccgcctggtcgataagagcctgcgctgcgatgccaacattattgtcgaaaccgccagcgcccgcgatccgcaccactttgccgtgctgctcggcttcggcgcgacggctatctatccgtacctcgcctatgaaaccctggcgaagctggtcgataataaagccatcgacaaagagtaccgcgcggtgatgctgaactatcgtaacggcatcaacaaaggtctgtataagatcatgtcgaagatggggatttcgaccattgcatcctatcgctgctcgaagctgtttgaagcggtcggcctgcatcgcgaagtctccgatctgtgcttccagggcgttgtcagccgtatcggcggcgcgggcttcgatgatttccagcaggatctgctgaatctgtcgaaacgtgcctggctggcgcgtaaaccgctggatcagggcggtctgctgaaatacgttcacggcggcgaatatcacgcctacaacccggacgtggtgcgcaccctgcagcaagcggtacaaagcggtgagtacagcgattatcagcagtacgcgaagctggttaacgagcgcccggcggcaacgctgcgcgacctgctttccgtcaccccgaacggaaccacggtgaacctggacgacgttgaaccggcgagcgaactgttcaaacgcttcgataccgcggcgatgtctatcggcgcgctgagcccggaagcgcacgaagcgctggcggaagccatgaatagcctcggcggcaactccaactccggcgaaggcggcgaagacccggcgcgctacggcaccaataaagtgtcgcgcataaagcaggtcgcctccggccgcttcggcgtgactccggcttatctggtcaacgccgacgttatccagattaaagtcgcccagggtgctaagcctggcgaaggcggccagttacccggcgataaagtgactccgtatatcgccaaactgcgctattcagtacctggcgtaacgttaatttctccgccgccgcaccacgatatctactcgatcgaggatctggcacagctgattttcgacctgaaacaggtcaacccgaaagcgatgatctccgtgaagctggtctctgaaccgggcgtcgggactattgccaccggcgtagcaaaagcttacgcggatttaatcaccattgccggctacgacggcggcaccggcgccagcccgctatcgtcagtgaagtacgcgggatgtccgtgggagcttggactggtagaaacccagcaggcgctggttgctaacgggctgcgccataaaattcgtctgcaggtcgatggtgggctgaaaaccggcctcgatatcatcaaagcggctatcctcggcgctgagagcttcggcttcgggaccggaccaatggtggcgctgggctgtaaatatctgcgtatttgtcacctgaacaactgcgcaaccggcgtagcaacccaggatgacaaactgcgtaagaaccactaccacggtctgccgtttaaagtgaccaattactttgaattcatcgcccgcgaaacgcgcgagctgatggcacagctgggcgtgaagcgtctggtggatctgattggccgtaccgatctgctgaaagagctggacggttttaccgccaagcagcagaagctggatctgagcaagctgctggaaaccgcggagccgcatccaggcaaagcgctgtactgcacggagaacaacccgccgttcgataatggcgtcctgaatgcgcagctgctgcagcaggcaaaaccctttgttgacggtaagcagagcaaaacgttctggttcgatatccgcaataccgaccgttccgtaggagcctcgctgtccggctacatcgcccagacccacggtgaccagggcctggcagcagatcctattaccgcccacttcagcggtaccgcaggtcagagcttcggcgtgtggaatgccggcggcgttgagctgcatctgaccggcgacgcgaacgactacgtgggtaaagggatggccggcggcctgatcgccattcgtcctccggtaggctcggccttccgtagccatgaagccagcattatcggcaacacctgtctgtacggcgcgaccggcggtcgtctgtatgctgcgggtcgtgcgggcgagcgtttcgcagtgcgtaactccggggctatcaccgtcgtcgaaggtatcggcgacaacggctgtgaatatatgaccggcggcatcgtctgcgtgctgggcaaaaccggcgtcaacttcggcgcaggcatgaccggtggctttggttacgtactggatgaagacggcgacttccgtaaacgcgtgaactctgaactggtagaagtgctggacgttgactctctggccatccatgaagagcacctgcgcggtttaattaccgagcatgtgcagcttaccggttcacagcgcggtgaagagattctggccaactggccggccttctcggcgaagtttgcgctggtcaaaccgaagtccagcgatgttaaagcactgttgggtcaccgtagtcgttccgcagctgagctgcgggtgcaggcgcagtaa

SEQ ID NO: 256171 - DNA, 906 bp, Klebsiella pneumoniae
atggacaaagagaaagcgatgagtcagtcagaatccagttcgctccctaacggtatcggccttgccccctggcttcgcatgaagcaggaaggcatgaccgaaaacgagagccgtatcgtcgaatggttgcttacccccggcaatctcagcgatgcgccggccattaaagacgtcgcggaagcgctgtcggtatcagaagccatgatcgttaaggtttctaagctgctcgggtttagcggttttcgtaacctgcgcagcgcgctggaggcctacttttcgcaatctgagcaggtgctaccgaccgagctctcctttgatgaagcgccgcaggatgtggtgaacaaggtgtttaacatcactctgcgcaccattatggaaggccagtcgatcgttaacgtcgacgagattcaccgcgcggcgcgctttttcgctcaggctaaccagcgcgatctttacggcgcgggcggctccaacgccatctgcgccgacgtgcagcataaatttttacgtatcggcgtgcgctgccaggcctacccggacgcgcatatcatgatgatgtccgcctcgttgctgaaagaaggcgatgtggtgctggtggtttcacactccgggcgcaccagcgatattaaatccgcggtggagctggctaaaaagaacggggcaaaaattatttgcatcacccacagctatcattcgccgattgccaaattagctgattttattatttgttcgccagcaccagagacacctttattaggccgaaacgcctcagcgcgtatattacaactgacattattagatgcattctttgtttccgttgcccagcttaatattgaacaagcgaatttaaacatgcaaaaaaccggcgcaattgttaatttcttttctccaggcgcgctgaagtaa

SEQ ID NO: 256172 - DNA, 936 bp, Klebsiella pneumoniae
atgaataaatatctgaaacttttcagcggcgcggctatgggcgtaatgttatccaccagcgcctttgccgccgccgattatgccgtggtcttaaaaaccttatccaacccattctgggttgatatgaaaaagggtattgaagacgaagccaaaaccctgggcgtgagcgtcgatatttttgcctcaccttctgaaggggattttcagtcgcagctgcagctgtttgaagacctgagcaataaaaactacaaaggtatcgcctttgcccccctctcatcggtaaacctggtgatgccggtggctaaagcctggaaaaagggcatctatctggtcaacctcgatgaaaaaatcgatatggataacctgaagaaagccggcggcaacgtagaaggttttgtcaccaccgataacgtggcggtcggggcaaaaggcgcagagtttatcatcgacaaactgggtgctgaaggcggcgaagtcgctattatcgaaggcaaagccggtaacgcgtccggtgaggcccgccgcaatggcgccaccgaagctttcaaaaaagcgagtcaaatcaatctggttgccagtcagcctgccgactgggaccgcatcaaggcgctggacgtcgccaccaacgtgctgcagcgtaacccgaacgttaaagcgatctactgcgccaacgacaccatggcaatgggcgtcgcccaggccgtcgctaatgccggcaaaaccggcaaggtactggtagtcggtaccgacggcattcctgaagcgcgcaaaatggtcgaagccggacagatgaccgccacagtcgcccagaacccggcggatattggcgctacgggtcttaagctgatggtcgatgctgagaagagcggcaaagtcatccctctggataaagccccgcagtttaagctggtggactccattctggtgacgaaataa

SEQ ID NO: 256173 - DNA, 1533 bp, Klebsiella pneumoniae
atgctcacgccatatatttcaatggcggggatcggcaaatcctttggcccggttcacgcattaaaatcggttgatttaactatttacccccatgaaatacatgcgttattaggggaaaatggtgccggtaaatcaacgctgatgaaagttctgtcgggaatacatgaaccgaccaaaggcaccattacgattaataacgttaactacgacaagcttgatcataaattagcggcccagctcggcattggaattatttatcaggaactcagcgtcattgatgaattaacggtgctggagaatttatatattggccgccatctgacgaaaaaagtctgcggcgtcaacgtgatcgactggaaagaaatgcgcgtgcgggcggcgatgatgctgctgcgcgtcgggctgaagatcgacttagacgaaaaggtggcaaatctctccatcagccacaagcagatgctggaaatcgccaagacgctgatgcttgatgccaaagtcctgatcatggatgaaccgacctcctcgctgaccaataaagaggtggactatctgtttctgatcatgaatcagctgcggaaagagggcaccgccattgtctatatctcgcacaagctggcggaaatacgccgcatctgcgaccgctacacggtcatgaaagacggcagcagcgtctgcagcgggatggtcagcgaagtgaataatgatgacatcgttcgtctgatggtcggccgcgaactgcaaaaccgcttcaacgccatgaaagagagcaccggcaatatcgcccgtgagacggtgtttgaagtgaaaaacgtcaccagccatgacaagaaaaaggtacgcgatatctcgtttagcgtgaatcgcggcgaaattctcggttttgccggactggtcggttccgggcgcaccgaactgatggactgcctgtttggggttgataagcgtagcagcggtgaaatttacctcaacggcaaagcgatctccccccgctcgccgctggacgccttaaagaaaggcatgggctacatcaccgaaagccgccgggaaaacggctttttccccaatttttctatcgctcagaatatggcagtcagccagagcctgaagcgcggcggctacaaaggggccatggggctgttccgcgaaggcgacgaacgcaaaacggcggaagagcagcgcaagctgctggcgctgaagtgccattcggtcgatcagaacattaccgagctatccggcggtaaccagcagaaggtgctgatatcgaaatggctatgctgcagccccgaagtgatcatttttgacgagccgacgcgcggtatcgacgtgggcgcaaaagccgaaatttataaagtgatgcgccagctggccgatgacggaaaagtcatcctgatggtgtcatccgaactacctgaaattatcgccgtctgcgaccgcattgccgtgttctgcgaagggcgactgacgcaaatcctgaccaatcgcgacgatatgagcgaagaggagattatggcatgggcactaccacaagagtaa

SEQ ID NO: 256174 - DNA, 696 bp, Klebsiella pneumoniae
atgaaaattgctccctctttaatgtgtatggatctgctgaaatttaaagaacagatcgagtttatcgaccagcatgcagactattttcacatcgatatcatggacggtcattttgtgccgaacctgaccctgtcgccgtttttcgtcggccaggtcaaaaagctggccagcaaaccgctggattgccatctgatggtcacccgcccgcaggattacattagccagctggcgcaggcgggggcggattttatcaccctgcatccggaaaccatcaacggccaggccttccgcctgatcgaagaaattcgacgccacggtatgaaagtcgggctgatccttaacccggaaaccccggttgagaccatgaagtactacattcataaagccgacaaaatcacggtgatgaccgtcgatccgggctttgccggacagccatttatcccggaaatgctggagaaaatcgctgaacttaaagcctggcgcgagcgcgaagggctgaactacgagatcgaaatcgatggctcctgcaataaaggcacctatgaaaaactgatggcggcgggcgcggacgtctttatcgtcggtacttcgggcctctttaatcacgccgagaagattgaagaggcgtggcagatcatggtcgagcaaattctggcggcaaaaaacgaggtacagcctcatgcaaaaacagcgtaa

SEQ ID NO: 256175 - DNA, 912 bp, Klebsiella pneumoniae
atgcaaaaacagcgtaacgtcgtcgcgggcgtggatatgggagcgactcatatccgtttttgcctgcaaacggcgcagggcgaagcgctgcactgcgaaaagctgcgtaccgcggaggtgattaacgccgacggcctggttaacggcattaaaaacctgctacagcagcagctaaaccaacatgatgcccgctgctgcgggctggtgatggggtttccggcgctggtggcaaaagacaagcggacgattatctccacccccaacctgcctctggccgctgacgatctgtataacctggcggaccggctggaagcggcgctgggctgcccggtggagttttcccgcgatgtgaatctgcagctctcttttgatgtgcagcagaacggcctgcaggagcaggaggtgctggcggcctatcttggcaccggtatgggcttcgcggtctggctaaacggcgggccgtggaccggcgcccacggcgtggcgggcgagctggggcatatcccccagggcgatgacgccctcacctgcgcctgcggaaaccccgcctgtctggaaaccgtctgctccggcattgcgctaaagcgctggtatgaacagcagccgcgcgcgtacgaactgggcgagctgttcgttcatgccgcacaggagccgtttgtgcagcagttgctgaatcatgccgcccgcgccatcgccaccagtattaacctgttcgaccccgacgcggtgatcctcggcggcggcgtaatggatatgcccgctttcccgcgcgacgccctaatcaccagggttaaaacctacgttcgccgtccgctaccgtatcaggccgtacgctttatcgccgcttcctcctcggcgtttaacggcgcccggggcgcggcggcgctggcgagaagccgttatttgacctag

SEQ ID NO: 256176 - DNA, 420 bp, Klebsiella pneumoniae
atgaaaaaagtcgtcacggtttgtccgtattgcgcatcaggttgcaaaatcaacctggtggtcgataacggcaaaatcgttcgggcggaggcggcacaggggaaaaccaaccagggaaccctgtgtctgaaaggctattatggctgggacttcattaacgatacccagatccttaccccgcgcctgaaaacccctatgatccgtcgccagcgcggcggcaagctggaatccgtctcctgggatgaggcgctcgattacgtcgccactcgcctcagcgctattaaagagaaatatggcccggacgcgattcagactaccggctcgtcccgcggaacgggtaacgaaaccaactatgtgatgcaaaaattcgcgcgcgccgttattggtaccaataacgtcgactgctgcgctcgcgtctga

SEQ ID NO: 256177 - DNA, 1680 bp, Klebsiella pneumoniae
atgagtaatgccatcaccgagatcgacaataccgatctcgtgtttatcttcgggtataacccggcagattcacaccctattgtggcgaatcacgtgattaacgccaaacgcaacggggcaaaaatcatcgtctgcgatccgcgtaaaattgaaaccgcgcgcattgccgatatgcacattgcgctgaagaacggctcgaatatcgcgctgctcaacgctatcgggcacgtgattatcgaagaagacctctacgataaatccttcgtcgccagccgttctgagggcttcgaagagtatcgcaaaatcgtcgaaggctacacgccagagtcggtggaagagatcaccggcgtgagcgcccaggagatccgcgcctgcgcccgtatgtatgccagcgcgaaatccgccgcgatcctgtggggcatgggcgtgacccagttctaccagggcgtggaaaccgtacgttcgctgaccagcctggcgatcctcaccggcaacctcggcaagccgagcgtcggcgtcaacccggtgcgcggccagaacaacgttcagggcgcctgcgacatgggcgcgctgcccgatacctatccgggctatcaatacgttaagttcccggagaaccgcgagaagttcgccaaagcctggggcgtcgatagcctgccggcgcacaccggctaccgcatcagcgagctgccgcaccgcgcggcgcatggcgaagtgcgggcggcgtatattatgggggaagatccgctccagaccgacgccgagctgtccgcagtgcgtaaggcattcgacgatctggaactggttatcgtccaggatattttcatgaccaaaaccgcctcagcggccgacgttatcctgccgtccacctcgtggggcgagcacgaaggcgtctataccgcagcggaccgcggcttccagcgcttctttaaagcggtagagccgaaatgggacctgaaaaccgactggcagattatcagcgaaatcgctacccggatgggctacaagatgcactacaacaacacccaggagatctgggacgagttgcggcatctgtgtccggatttctacggcgccacctacgagaaaatgggcgagctaggctacgtcatgtggccgtgccgcgatgagtccgacgccgatcaggggacctcttatttgtttaaagagaagttcgataccccgaacggtctggcgcagttcttcacctgcgactgggtcgcgccgattgacaaactcaccgaagagtacccgatggtgctgtcgacggtgcgcgaagtcggccactactcgtgccgttcgatgaccggtaactgtgcggcgctggccgcgctggcggatgaacctggctatgcgcaaatcaacaccgccgatgccgaacgtttgggcattgaggatgaggcgctggtgtgggtgaactcgcgtaagggccgtattatcacccgcgcgcaggtcagcgatcgtccgaataaaggggcggtctatatgacctaccagtggtggattggcgcctgtaacgagctggtttccgagaacctgagcccgataaccaaaacgccggagtacaagtactgcgccgtcaacgttgagccgattgccgaccagcgtgccgctgagcagtacgtcattgatgagtacaacaagctgaaagcccgcctgcgcgaaagcgcgctgggttaa

SEQ ID NO: 256178 - DNA, 684 bp, Klebsiella pneumoniae
atgaaatacctctatttactgctggtgatagcaagcttcacctcaggcgccatggaaccaggtagccagtatagacagcaggccgaagctggcgatccacgtgcacaatattacctggcggatacttacgtcagcttcggcgattttccccaggccgaattctgggcgcagaaagccgcagacaacggcgatggcgacgcgctggcgctgctggcccagctcaaaatccgcaatcctcagcaggcggactaccaccaggctaaagtgctggcggaaaagtccgtacaaacaggcagcaaggcgggggaaattgttctcgcccgggtgctggtgaaccagcaggccggtacgccgaactacccccacgccatcactctgttacagcacgccgcgcaggatccggaaagcgattcagccgttgacgctcagatgctgctggggctgatttacgccagcggcgttcatcttgcggaagatgatgtcaaagcgacgcagtactttaaagagagctctgccctctcccgtaccggctacgccgaatactgggccgggatgcttttcctgcagggggaaaaaggctttatcgaaccgaaccggcagaaagcgctgcactggctcaacgttagctgtcaggaggggtttgataccggctgtgaagagttcgacaggataagtaaaagataa

SEQ ID NO: 256179 - DNA, 699 bp, Klebsiella pneumoniae
atgtcaaatacgccaatcgaacttaagggcagtagcttcaccttatctgtggttcatttgcacgatgcaaatcccgaggttattcgtcaggcgttagaagacaaaatcgcccaggctcccgcctttttacggcacgctcccgtggtggtgaatatcagcagcattgaagatgacgtcgactggcgccctctgcatgaggcgatcgcggctaccggcctgcgtattatgggcgtaagcggatgtaaacttccccggctgaaaacggaaattgaccgcgccgggatccctttattaaccgaagggaaagaaaaagtgactcgccaggccgcgcctgaacccgttgccccacctccagctgttaatcagatcacaaaaacgcgtttgattgatcagccggtacgttccggtcagcgaatttatgcgccacactgtgatctaattgttacaaaccatgtgagtgccggggctgaacttatcgccgatggtaacatccatgtatatggcatgatgcggggacgcgcgctcgctggcgcaggcggcgacagagacgcccaaatattttgtaccaacctctcggcggaactggtttccatcgcgggggaatactggctgagtgataacattccggccgaattttatggcaaagcggcccgtctacgtttagacgacagcgctttgacgattcaatcgttgaattaa

SEQ ID NO: 256180 - DNA, 282 bp, Klebsiella pneumoniae; identical to SEQ ID NO: 175431

SEQ ID NO: 256181 - DNA, 660 bp, Klebsiella pneumoniae
atgtaccaacatcataactggcagggtgcgctactggattatccggtaagcaaagtggtttgcgttggcagcaactatgcaaaacacatcaaagagatgggcagtgcgacgccggaagagccggtgctgtttattaaacctgagacggcgctatgcgacatccgccagccgttggtgctgcctgaggggctggggtcggtgcaccatgaagttgagctggcggtactgattggcggtacgctgcgccaggcgacggaagatcatgtgctgaaagccattgccggctatggcgtggcgctggaccttaccctgcgcgatctgcagggaaaattgaaaaaggccggtcagccgtgggagaaggccaaaggctttgataactcctgtcctgtttcaggctttattcccgccgccgagtttcacggcgacgcgcagagtactccgctgagtctgaaggtgaacggcgaagtgcgccagcagggttcgaccgccgacatgatccataagattgtgccgctcatcgcctatatgtcgcgcttttttaccctgaaagccggggatgtggtgctgaccggtacgccggaaggcgtagggccgctgagcagcggagacgagctggaagtcggttttaacggcttttcgctgactacccgcgtgctgtaa

SEQ ID NO: 256182 - DNA, 447 bp, Klebsiella pneumoniae
atgagcgaacaacctttctggcaacaaaaaacactggatgaaatgagcgatgcggagtgggaatcactttgcgatggctgcggtcagtgctgcctgcataagctgatggatgaagataccgacgaaatctactttaccaacgtcgcctgccgtcagctcaatatcaaaacctgccagtgtcgtaactatgagcgccgcttcgagtacgagccggattgcatcaagctaactcgcgacaatctgcctacgtttgaatggctgccgccgacctgcgcctatcgtctgctggcggaaggccagccgctgccgcactggcatccgctgttaaccggttcgaaggcggcgatgcatggcgaacgcatctccgttcgccatattgcggtgaaagaatccactgtggttgactggcaggatcatattctgaataaaccggactgggcgcagtaa

SEQ ID NO: 256183 - DNA, 345 bp, Klebsiella pneumoniae
atgtctcatttgcgtattcccgctagctggaaggtaaaacgctccaccccattctttaccaaacagaacgtacccgccgctttgctgacgcaccacaacaccgcagcgggtgttttcggccagctttgcgtaatggaagggacggtaacctactatggtttcgctgatgaacaggcgacagagcctgaggcaaaagtcgttatcaatgctggccagttcgcaaccagcccgccgcagtactggcaccgcattgagctaagcgacgacgcgcagttcaatattaacttttgggttgcagatgacgccgacggtgaaagcggactattccacgcgaagaaaggctaa

SEQ ID NO: 256184 - DNA, 531 bp, Klebsiella pneumoniae; identical to SEQ ID NO: 175427

SEQ ID NO: 256185 - DNA, 1563 bp, Klebsiella pneumoniae
atgtctgtcgtggaaatgtcttatggccgcgccctgtggcgcaattttcttggccagtccccggactggtacaaactcgctctcatcattttcttaattgttaatccgctggtcttttatctgcatccgtttattgccggatggctgctggttatcgaatttatcttcaccctggcgatggcgctcaagtgctatcccctgctgccaggcggcctgctggccattgaagcggtatttatcggcatgaccaccccggggcatatccgcgaagaggtggccagtaatcttgaagtcctgctgctgctaatgtttatggtcgcggggatctacttcatgaagcagctactgctgttcatcttcacccgcttgttgcttggcattcgtagcaagatgctgctgtcgctggcgttttgcgtcgcatccgctttcctctccgccttcctcgacgcgttgaccgttgtcgcagtggtgataagcgttgccgtcggcttctacggtatttaccacaaagtcgcttcggcgcggccggatgatgacaatatgctcgacgacagccatattgagcagcactatcgcgatgtcctggagcagttccgcggcttcttgcgcagcctgatgatgcatgccggggtcggcaccgcgctcggcggcgtgatgaccatggtcggcgagccgcagaacctgatcatcgccaaggcggcaggctggcacttcggcgaattcttcatgcgtatgctgccggttagcctgccggtgctggtatgcggactgatcacctgtctgctgctggagaaattccgcctgtttggctacggcgaaccgctgccgccaaccgtgcgcaaagtgctacaggattttgacgatcgcagccgccagagccgcagtcgtcaggatcgcctgcgtcttatcgctcagggacttatcggcgtctggctgattatcgcccttgcgatgcatcttgcggaagtcggcctgatcggcctgtcggtgattgtgctggcgacaacgttctccggcatcaccgatgaacacgctatcggcaaagccttcaccgaagccctgccgtttaccgccctactgacggtcttctttgccgtggtggcggttattattgaccagcacctttttgccccggtgatcgagttcgttcttcaggcatcgccgcacgcccagctatcgttgttttatctgtttaacggtctgctgtcgtcgatttctgataacgtcttcgtcggaaccgtctatatcaacgaggtcaagtccgcgctggagcagggtaccatcagtttgccgcagttcgagctgctggcggtggcgatcaataccggcaccaacctgccatcggtcgctacgccgaacggccaggctgcttttttgttcctgctgacttccgcgctggccccgctgattcgcctctcctatggccggatggtgtggatggcgctgccctatactctcgtcctgaccctcgtcggcctggcctgcgtcgagtttaccctgatgccggccacccagtggatgctggagcacggttggctggtgacgccgcagctgctgaaataa

SEQ ID NO: 256186 - DNA, 1533 bp, Klebsiella pneumoniae
atggctacgattgattccatgaacaaggacacaacccgtttaagcgatggacccgactggacttttgagctgctggagacctatctggcagaagtcgaccgggtggcgaagctgtaccgtcttgacacctatccgcaccaaatcgaagtcattacttccgaacagatgatggatgcctactccagcgtcgggatgccgattaactatccgcactggtcgttcggtaaaaaattcatcgagaccgaacaggcctataagcacggccaacaggggctggcttacgaaatcgtcattaactccaacccctgtattgcctatttgatggaagagaacaccattaccatgcaggcgctggtgatggcgcacgcctgctacgggcataactcgtttttcaaaaataactatctctttcgcagctggaccgatgccagctcaattattgactatctcatcttcgcgcggaaatacatcaccgaatgtgaagagcgctacggcgttgatgaagttgaaaaactgctcgactcctgtcatgccctgatgaattatggcgttgatcgctataaacgcccgcaaaaaatctcgctgcaggaggagaaagcgcggcaaaaaagccgggaagagtatctgcaaagccaggtgaatatgctgtggcgcacgctgccgaagcgagaagaggaaaaaaccatcgaagccgcgcgtcgctacccttctgaaccgcaggaaaatctgctctatttcatggagaaaaacgcgccgctgctggagccgtggcagcgtgagatcctgcgcatcgtgcgcaaggtcagccagtatttttatccgcagaagcagactcaggtgatgaacgaaggctgggcgactttctggcactacaccatcctgaatcacctttatgatgaaggtaaagtgacggagcgctttatgctggagttcctgcacagccacaccaatgtggtgttccagccgccatacaacagccagtggtatagcggtattaacccctacgcgctggggttcgccatgttccaggatatcaaacgtatttgtcagtctccgacggaagaggacaaatactggttcccggatattgccggctctgactggcttgaaactctgcacttcgcgatgcgcgactttaaggatgaaagctttatcagccagttcctgtcgccaaaaatcatgcgcgacttccgcttcttcaccgtgctggatgacgatcacaacaactatctcgaaatatccgcaattcataatgaagagggatatcgtgagattcgttccaaactttcagcgcagtacaacctgagcaacctcgagccaaacattcaggtatggaatgtggacctgcgcggcgaccgctcgctcaccctgcgctacgtgccgcacaaccgcgtgccgctggataaaggccgccgtgaggtgcttaagcacgttcaccgcctgtggggatttgacgttcttctggagcagcaaaacgccgatggcagcgtcgagttgctggaacgcaccccgccgcggcagaacccgctgtag

SEQ ID NO: 256187 - DNA, 810 bp, Klebsiella pneumoniae
atgattttcatcgcccgtccgctgtcggtattcgccggcctgctgccgtttcgcggctttaacctgcgcgagcgcatatttatcagctgggtgggtctgcgcggcgcggtgccgattattcttgccgtctttccgatgatggcgggcctggagaatgcgcgcctgttctttaacgtggctttcttcgtggtgctggtctcgctgcttttacagggtacgtcgctctcctgggcggccaaaaaagccaaagtagtggtgccaccggtcggatcgcccatctcacgcgtcgggctggatatccatccggaaaatccgtgggagcagtttgtctatcagctgagcgctgagaaatggtgcgtcggcgcggcgctgcgcgacctgcatatgccgccggaaacgcggattgccgcgctattccgcgataacgctctgctgcaccccaccggcagcacccgcctgctggaaggcgatattctctgcgtgattggccgcgaacgcgatttacccgcgctgggtaaactgttcagccagtcgccgccggtggcgctcgatcagcgcttcttcggtgattttattctcgatgccagcgccaggttcgccgacgtggcgcagatttacggcattgacgggggagaagagtttcgcgatcgtcagcagtcgctgggtgacgtcatacagcacctgttaggcgcagccccggttgtcggcgaccaggtggaatttgccggcatggtgtggacggtggcggaaaaagaagaggatcacgttctgcgggttggcgtacggatggcggaagatgaggcggagtga

SEQ ID NO: 256188 - DNA, 852 bp, Klebsiella pneumoniae
ttgccaactgtaaaactgaacaatggtattgaaatgcccctgctgggctttggtgtgtttcagatgtctgatcccgctgaatgcgaaagagccgttattgatgccatcgatacgggataccgcctgatcgataccgccgcgtcttaccagaatgaaacccaggtcggcaacgcactgaaacagagcggtatcgcccgtaacgagctctttgtgacgaccaaactgtggctgcaggatacgaattacgaaggcactaaagcccagttcgaacgctccctgaatcggctacaacttgattacgtggacctgtatctgattcaccagccttatggcgatgtccatggggcatggcgtgctatggaagaattgcagcaggcaggcaaaattcgcgccattggcgtcagcaacttccatcctgaccgactggccgatcttatcgccttcaacaacgtttccccggcggtaaaccaggttgaggttaaccccttcaaccagcagctgcataccgtgccatggatgcaaagccgtggcattcagccggaagcctgggctccgtttgcagaaggaaaaaatggtctgtttgagcatcccatgttaacggcgattggccagaaatacggtaaaagcgtgggccaggttgtgctgcgttggattttccagcgaggcatcgtttcactggcgaagtcggtgcgaaaagaacgtatggcagagaacatcaacattctcgattttgaactcagcgctgaagatatgctgcagattaccgctatcgataccgccaccagcgctttcttctcccacagcgatcctgccagagttgaatggttggccagccgcaaactggacgtttaa

SEQ ID NO: 256189 - DNA, 894 bp, Klebsiella pneumoniae
atgctcaaagaaaatttcaacgaactgcaaatctttcttgtagtagcaagggagcgaagtttcaccaaagcggcgggtaaactgggcgtttctcagtctgcactcagccacgcgatgaaggccctggaggaaaggctgaatatacgccttctgacccgtacgacccgaagcgttgcccctacagaagccggtgagagaattattgcctgccttgaaccgcgtattgccgatctcgagcaggagctggaatcgctggttcaactgaacggcaccgcctccggcaatattcgtttatctgccggggagcatgccgcgcgaagtctggtatggccgaagttaaaacccttcctcagggaatatccggaaatcaatctcgaactggtggtggataacggctttgtcgatattgttgaggggcgttttgatgccgggatccgcctgggcgaaagcgtggataaggatatgattgcggtaagaattggcccggacatgagaatggcagtggtgggagcgccgtcttattttgctgcaaacactgcacctgaaacgccgcacgagctacaaaatcaccggtgtatcaatatgcgcctgccgacagccggtggtctttaccactgggagtttgagaaggatggaaaaccgttacgggtcagagtagaagggcaggtcacgtttaatctgcaagcggaacgaattgatgcggcgttatccggttttggcattgcctgtatacccgaagacagggtgcaggattatatcaagtcaggagaacttattcaggttctgcaggactggtgtccgtctttccccggatattatctttactacccgagccgtaagcagcatccgcccgcttttgcgctgatgatcgatgcacttcgttaccaggaataa

SEQ ID NO: 256190 - DNA, 726 bp, Klebsiella pneumoniae
atgagaaaacgctttgttattgcaataatgttgctgagcagcctgatcgtcgcggggtgttccagctcatccgattccggttccacctacaccgtgaagcgcggcgacacgctgtacgctatttcacgttccactggcaccagcgtcagggatctcgcccgtctcaacaatatttcacctccctataccatcgaggttgggcaaaagctgaagctgaacagtggttcaggggccacggcgaaggcgggggcatccggcaagaaatcctccgcgaagcgcaccgctgccgtgacgccatcttcggcggtgccgcaatcctcctggccgccggtcgggcaacgctgctggcgctggccgaccagcggcaaagttatactgccgtactccaccagcgatggcggcaataaaggtatcgatattgccggtaagcgcggccagccggtgtatgcggcaggggcgggcaaagtggtgtacgtgggtaaccagctgcgcggctacggcaacctgattatgattaaacataatgaggactatatcagcgcctatgcacacaacgacaagctgatggtgaataacggccagagtgtgaagatcggccagcagattgccaccatgggcagctcggatgcggattccgtgcgcctgcacttccagattcgctaccgggcgacggcgatcgacccgctgcgctatttgccgccgcagggcagtaagcctaagtgctaa

SEQ ID NO: 256191 - DNA, 900 bp, Klebsiella pneumoniae
atgatggatttaaagcgcttacgctatttttgtcgggtggtggaacaaggttcggtgagccaggcggcgaagtcgctgaacatggcgcagccgccgctcagcaagcgaattcaggagctggaagaagagcttcaggtatcgctttttgttcgccggggaaaccgcattgagcctacggaagccggtttttttctctatcgaaaagcgtgtgaaatattacgccaggtagaggatacggcgcgggaaacgacggatattgcgcacaaaaacagaactgaattgagaatcggcttaactcatctctatcagaattattttaaagcattgctgatggaggtatatcgacgtcatcccgacacttccataaatatttccgttactgactccagccatctcgaaacgttattaaccgagggcgcaattgatttagccttaatccagcgcccctaccgtagcgaaggctttgattatgtctcttttgacccgattaagctggtcgcggtgatcaataaaagctgcctgccggagccgccgtctaatccgtatagctacacatcgctggcggcgctgccgctggtattacttcatagagcaaaagattcaggaacttacgagatgctaatggagctgtttcgtaagtccggggtcaacgcgaaggtgattatgcacattacgcagccgggcgtaattctcgactggctggagtccggactgcaggcagcgacgctgctaccttcttctgaagtggatgctgataagcttaaccagtgctacgtggtcgatgttttcccctcgccgcaaatattctacccggcgctggtaaaattgccgtctatgccttatctgcccgcgttgatggatattattacgcatggctatccgtttaatacttctgtatga

SEQ ID NO: 256192 - DNA, 549 bp, Klebsiella pneumoniae
atggccggggaacatgtcattttgctggacgagcaagataagcctacaggtatgctggagaagtatgccgcccacaccctcaatacccctctgcatctcgcgttttccagctggctgttcaatgaacaaggccaactgctggtcacgcgccgctcgctgggcaaaaaagcctggccaggcgtatggacgaactcagtctgcgggcatccgcaaaccggcgaaacctttgaacaggccgttgagcgccgctgccgctttgagctcggcgtcgagataacccgtatcgtcccggtctttcctgggttccgttaccgggccgtcgcgccgaatggcattgtcgaaaacgaggtctgtccggtctatgcggcacgagtagccagcgcgttacggataaatcctgacgaagtgatggattttcagtggagccatcttgaggatgttttaagcgcaattcgcgcgacgccctgggcttttagcccgtggatggtcatgcaggctgcggatgataatgcgcgtaatgccttaataagctttagccgccaggcataa

SEQ ID NO: 256193 - DNA, 690 bp, Klebsiella pneumoniae
atgatggaactctatatggcctatgcggactataaagacctgatcgagctgaccgaatccctgttccgcaccctggcgcaggacgttctcggccataccgaagtgccttacggcgatcagacctttgatttcggcaagccgtttgaaaaactgacgatgcgcgaagcgatcaagaagtaccgtccggaaaccgagatggccgatctggataacttcgattccgcgaaagcgatcgctgaatctatcggcatcaaagtggagaagagctggggtctgggccgcatcgtgaccgagatcttcgaagaagtggcggaagcgcatctgattcagccaaccttcatcaccgaatatccggcagaagtctctccgctggcgcgtcgtaacgacgagaacccggaaatcaccgatcgttttgaattcttcatcggcgggcgtgaaatcggtaacggctttagcgagctgaacgatgcggaagaccaggcgcagcgtttcctcgatcaggttaacgcgaaagccgccggtgacgacgaagccatgttctatgacgaagactacgtcaccgcgctggagcacggcctgccgccgaccgcaggtctcggtattggtatcgaccgtatggtgatgctgtttaccaacagccacactatccgcgacgtgatcctgttcccggcgatgcgtccggtaaaataa

SEQ ID NO: 256194 - DNA, 2196 bp, Klebsiella pneumoniae
atgcccgtcgctcatgttgccctgcccgttccgctgccccgcacttttgactatttgctgcctgaaggtatgccggtcaaagcgggctgtcgcgtgcgcgttccgttcggcaagcaggagcggataggtatcgtgacggcagtcagcgaacgcagcgagctgccgcttgacgaactcaagccggtggccgaagttcttgatgccgagccggtcttctcctcttcggtctggcggctgctgctgtgggcggcggactattaccaccatcccatcggcgatgttctgtttcacgcgctaccgatcatgctgcgccaggggaaacccgccagcgcggcgccaatgtggtactggtttgccaccgaacaggggcaagcggttgatatcaacagccttaagcgctcgcgcaaacagcagcaggcgctggcggcgctgcgtcagggaaaaatctggcgccatcaggttgccgaactggaatttaacgatgccgcgctgcaggcgctgcggggtaaaggccttgccgaactcgccagcgaagcgcccgctatcaccgactggcgaacaggcttctcggtgcccggagagcgcctgcggcttaatactgaacaggccaccgccgttggcgcgattcatagcgcctcggaccgtttttccgcctggctgctggccgggatcaccggctccggcaaaacggaagtttatctgagcgtccttgaaaacgtgctgtcgcaggggcgccaggcgctggtaatggtgccggaaatcggcctgacgccgcaaacaatcgcccgtttccgccaccgttttaacgccccggtagaagtcctgcactccgggctgaacgacagcgagcgcctctccgcgtggctaaaagccaaaaacggcgaagcggcgattgtgattggaacccgctcgtcgctatttaccccttttaaagacctcggggtaatcgtgatcgatgaagagcacgacagctcttacaaacagcaggagggctggcgctaccatgcgcgcgatctggcggtctggcgcgcccacagcgagcaaatcccgatcatcctgggcacggcaaccccggcgctggaaacgcttcataacgtccgccagggcaagtatcgccagctcaagctgacccggcgcgcgggaaatgcgcggccggctcaacagcatgtcctggatttaaaaggccagcagctgcaggccgggctgtccccggcgctgattagccgcatgcgccagcatctgcaggccgataaccaggtcattctgtttttgaaccgccgcggattcgcgccggcgctgttgtgccacgactgcggctggatagcagagtgcccgcgctgcgacagctactacacgctgcatcaggctcagcatcatctgcgctgccaccactgcgacagccagcgcccgatcccgcgccagtgcccctcctgcggctctacgcatctggtgccggtaggtttgggcactgagcagcttgaacaggcgctgggaccgctgttccccgatatcccgatttcccgtatcgacagagataccaccagccgcaaaggcgcgcttgagcaatatcttgccgatgttaatcgcggcggcgcgcgcattcttatcggcacacagatgctggcgaagggtcaccacttcccggatgtcaccctggtttccctgctggacgttgacggtgcgctgttctccgccgatttccgctcggcggaacgcttcgctcagctttatacccaggtatcgggccgcgcaggccgtgccggcaaacagggcgaggtgatcctgcagacccatcatcctgaacatccgctgctgcaaacgctcctctataaaggatacgacgcgtttgctgagcaggcgctggcggagcggcaaagcatgcagctgccgccgtggaccagccacgtgctgattcgcgccgaagaccataacaatcagcaggcgccgctctttttacagcagttgcggaatttactgcaggccagcccgctggcggatagcaagctctgggtgctcggtccggttccggcgctggcgccaaagcgcggaggccgctggcgctggcaaatactcctgcagcatccgtcgcgtagtcagctacagcatatcgtcagcgggacgctggcgttgatcaacacgctgccggaagcgcgaaaagtgaaatgggttctggatgtcgatcctattgaaggttaa

SEQ ID NO: 256195 - DNA, 1029 bp, Klebsiella pneumoniae
gtgaagcccaaaaaacagatcgttgccgccaccatgaaagacgtcgcccagaaggcaaacgtctctacggcaaccgtatcccgagcgttaatgaacccggataaggtttcgcagagcacgcgcaaccgggttgaacaggccgcgcttgaagtcggctatttaccgcaatcgctcgggcgcaacatgaaacgcaacgagtcgcgcaccattctggtgatagtgccggatatctgcgatcccttctttagcgagattattcgcggcattgaagtcaccgcggcggagcaggagtatctggtactgattggcgattgcgcccatcagaatcgtcaggaaaagacctttattgacctgattattaccaagcagatcgacggcatgctgctgctgggctctcgtctgcccttcgatgcgggcgtagaagaacagcgcaatctgccgccgatggtcatggccaatgaattcgctcccgagctggagctgccgacggtgcatatcgacaacctcaccgccgcgttcaacgccgttaactatctgcacgaactggggcatcgccgcattggctgtatcgccggtccggaagagatgccgttatgccattaccgcctgcagggctatgtccaggcgctacgccggagcggaataaccgtcgatccgcactatatcgcccgcggtaattttacctatgaagccggcgccaacgccctggagcagttgctgacgctcccggaaccaccgacggcgattttctgccatagcgatatcatggcgctgggcgcattatcgctggcgaagcgtcgcggcctgaaagttcctgaagatctgtctattattggttttgataacatctctttgtctgaattttgcgatccgccattgacgacggtctcgcaaccacgttttgatattggccgcgaagcgatgatacttttactggatcaactgcacggccacagcgtcagcagcgggtcacgattgctcgactgcgagcttatcgttcgcggcagtacgcgcaaaatccgaacataa

SEQ ID NO: 256196 - DNA, 855 bp, Klebsiella pneumoniae
atggtggcgatcgccgcggcagtgctggtggcctttatcggtggactgtacttcatcacgcaccacaagaaagaagaagctgaagcgctgcagaatcgccaggcggcgggcaatggcttgccgccgaaacccgaagaacgctggcgctatattaaagagctggagagccgccagcccggcgtccgcgcgcctacggaacccacggcaggcggtgaagtcatgaaaccggagcagctgactgacgagcagcgccagctgttagcgcaaatgcaggccgatatgcgtcagcagcctacgcagctgaccgaggtgccgtggaatgaacaaaccccggcgcagcgccagcaaaccctacagcgtcagcgtttagcgcaacagcaggtgcagcaacagcagttagcgcaggcccagacgcaggtacagcaaccgcgtacgcagcctcgggccgtcgagcaggccaaaccggtacagcagcagccgaagcaaacggcatcgaatcagcagccgtatcaggatctgctgcaaacgccggcgcataccagcaccgctcagcccaaaacgcaggccgccgcgccggtaacccgcgttgaagaagcgcctaaaaccgctaccgcggagaaaaaagacgatcgcagctggatgatccagtgcgggtcctttaaaggcgcagagcaggcggagaccgttcgcgcgcagctggcgtttgaaggcttcgcctcgcatatcaccaccaataacggctggaaccgcgtagtgattgggccgctgaagggcaaagaaaacgccagcaatatgattgaacggctgaagatggccggacacgcaaactgcattcgtctcgccgccaggggttga

SEQ ID NO: 256197 - DNA, 531 bp, Klebsiella pneumoniae
gtgactacaattgtaagtgttcgccgtaatggccatgtcgttattgccggtgatggccaggctacgctgggcaacaccgtaatgaaaggcaacgtgaaaaaagtgcgccgcctgtacaacgacaaagtgatcgccggctttgcgggcggcaccgctgacgccttcacgctgttcgaactgtttgaacgtaagctggaaatgcatcagggccacctggtgaaagccgccgttgagctggcgaaagactggcgtaccgaccgcatgctgcgcaagctggaagccttgctggccgtggctgacgaaaacgcatccctcatcatcaccggtaacggtgacgtggtgcagccagaaaatgatttgattgctatcggctccggcggtccttacgcccaggccgcggctcgcgccctgctggaaaataccgatatgggcgcacgcgatatcgcagagaaagcgttgaatattgcaggtgatatctgcatttataccaaccacttccataccatcgaagaattaccgtctaaagcgtaa

SEQ ID NO: 256198 - DNA, 1335 bp, Klebsiella pneumoniae
atgtctgaaatgaccccacgcgaaattgtcagcgaactggacaaacacattatcggccaggacgcagccaagcgctccgtcgccatcgctctgcgtaaccgctggcgtcgtatgcagctcaacgaagagctgcgtcacgaagtcacgccaaaaaacattctgatgatcggtccgaccggcgtcggtaaaacagaaatcgcccgtcgtctggcaaagctcgccaacgcgccgttcatcaaggtggaagcaactaaattcaccgaagtgggctatgttggtaaggaagtggactcgattatccgcgatctgaccgatgcggcgatcaaaatggtacgcatgcagtccatcgataaaaaccgctaccgtgccgaagagctggcggaagagcgcatcctcgacgtgctgatcccaccggcgaaaaacaactggggccaggctgaacagcctcaggaaccctccgccgcgcgccagtctttccgtaaaaaactgcgcgaagggcagctcgacgacaaagagattgagatcgacctcgccgccgcgccgatgggcgtagaaatcatgtcccctccgggcatggaagagatgaccagccagctgcagtcgatgttccagaacctgggcggacagaagcaaaagccgcgtaagctgaaaatcaaagacgcgatgaagctgctgatcgaagaagaagcggctaagctggtcaatccggaagagctgaagcaggatgccatcgacgccgttgaacagcacggtatcgtgtttatcgatgagatcgacaaaatctgtaagcgcggcggcaactcgtccggtcctgatgtctctcgtgaaggcgtacagcgcgatctgctgccgctggttgaaggctgcaccgtttccaccaagcacggcatggtgaaaaccgatcacatcctgtttatcgcctccggcgcgttccaggtagccagcccatccgacctgattcctgaactacagggtcgtctgccgattcgcgttgagctgaaagcgctgaccacccatgacttcgaacgtattctgaccgagccgaacgcgtccatcaccgtacagtataaagcgctgatggccaccgaaggcgtcaatatcgaattcacggatgacggcatcaagcgtatcgcgcaggctgcctggcaggtcaacgaaaccaccgagaacatcggcgcgcgtcgcctgcataccgtcctggagcgtctgatcgaagatatctcctacgatgccagcgaaatgaacggccaaaccgtcatcattgatgcggaatatgtcggtaagcatctggatgttctggtggcagatgaagatctgagtcgttttatcttataa

SEQ ID NO: 256199 - DNA, 927 bp, Klebsiella pneumoniae
atgaccgaacacgctatcactcgcactcaggcctggctggaaagcctgcgccccaaaacgttgcctctggcctttgccgccattattgtcggctccgctctggcctggcatcagggaagtttcgatccctgggttgccctgctggcaatcattaccgccggtttactgcaaatcctctccaatctggccaatgattatggcgacgcggtaaaaggcagcgataagcccgaccgtatcggcccccttcgcggcatgcagaaaggggcaattacccaggcgcagatgaaacgcgcgttgatactcaccgtagcgctgatttgcctttctggcctggcgctgctgttcctggcctggcaaaccatggccgactttatcggttttatggtgcttggcggactctcaatcgttgctgcaattacctataccgtcggcacccgtccttacggctacatcggccttggcgatatttcagtgctgattttcttcggctggctgagcgtcgtgggaagctggtatcttcaggcgcacagcgtggaagcggtcattttcttacccgccactgcctgcggtttgctggcgacggcggtgctgaatattaacaatctgcgtgatatcgacagcgatcgtgaaaacggtaaaaacacccttgcggtacgcctcgggccggttaacgctcgtcgctatcatgcctgcctgctgcttggcgcgctgctatgcctggcgctgtttaatctgatctcactgcgtaatccgtggggctggctgttcctgctggccaccccgctgctggttaagcaggcgcgttatgtcatgcgcgagcgcgatccggtcgccatgcgcccaatgctggaaagaaccgtaaaaggcgccctgttaaccaacctgctgtttgttatcggaattatttgcagccgactcgcggcttaa

SEQ ID NO: 256200 - DNA, 486 bp, Klebsiella pneumoniae
atgaaatacgatacttccgagctttgtgacatctaccaggaggatgtcaacgtcgtggaacctctgttctccaactttggggggcgctcgtcgtttggtggacaaatcatcacggtaaaatgtttcgaggataacgggttgctctacgatatgctcgaacagaacggccgtggccatgtcctgttagttgacggtggtggttccgttcggcgcgcattgattgacgctgacctggcgcgtctggccgtacaaaacgagtgggaagggctggtcgtctatggcgcagtgcgtcaggttgacgacctggaagatctggatatcggtatccaggcgctggccgccattcccgttggcgccgcaggggaaggcatcggcgaaagcgacgttcgcgtcaacttcggcggcgtcaccttcttttccggcgaccatctctacgccgataacaccgggatcatcctttcggaggatgctctggatatcgagtag

SEQ ID NO: 256201 - DNA, 963 bp, Klebsiella pneumoniae
atgattaagaaaatcggtgtgttgacaagtggcggtgatgccccgggcatgaacgcagcaattcgcggcgttgtgcgcgcggcattaacggaaggtctggaagtttttggaatctatgacggttacctcggcctgtatgaagatcgcatggttcagctcgaccgctacagcgtttccgatatgatcaaccgcggcggcaccttcctgggttcggcgcgttttccagaattccgcgaagaacatattcgcgccgtcgcgattgaaaatatgagaaagcgcggcctcgatgcgctggtagtcatcggcggtgacggttcttatatgggcgccgtacgcctgactgagatgggcttcccttgcatcggtctgccgggcaccatcgacaacgatattaaaggcaccgactacaccatcggtttctttaccgctctgagcaccgtggttgaggctattgaccgtctgcgtgatacttcttcctctcaccagcgtatttccgttgttgaagtgatgggccgttactgcggcgacctgaccctggcggcagccatctccggcggctgcgaattcatcatggttcctgaggttgagtacactcgcgacgatctggttgctgaaatcaaggcgggtatcgcgaaaggcaaaaaacacgcgattgtggcgatcaccgagcatatgtgcgacgtcgacgaactggctcactatattgagaaagagaccggccgtgaaactcgcgcaaccgtactgggccacattcagcgcggcggctccccggttccttatgaccgtattctggcatcccgcatgggcgcgtacgcgattgacctgctgctgcagggattcggcggccgttgcgtcggtattcagaacgagaagctggttcaccacgacatcatcgacgctatcgaaaacatgaagcgtccgtttaaaagcgactggctggattgcgctaagaagctgtactaa

SEQ ID NO: 256202 - DNA, 318 bp, Klebsiella pneumoniae
atgcagcgggcacgccacgaaaggccacccgttaatgttagcgaaatggagacaatgcatcgccttgtcaccgcagaaaattttgatgaaaacgctgtacgcgctcaggcagataagatggcgcaggaacaggttgcccgccaggttgaaatggcaaaagttcgcaaccagatgtaccacctgttaacgccagagcagcaagcggttttaaacgctaagcaccagcaacgaatgaaccagttgcgtgaggttgcaaggatgcaaaaaggctcagcgatgatgctttcgagtagtagcaataccctgcaaccccagtaa

SEQ ID NO: 256203 - DNA, 180 bp, Klebsiella pneumoniae; identical to SEQ ID NO: 75813

SEQ ID NO: 256204 - DNA, 1641 bp, Klebsiella pneumoniae
atgacgccaggagaattacggcgcctgtatttcatcgtccacacctttttgagctacgggcttgatgagctcattcctaaaatgcgtatcacgctgccgctgcgaatctggcggcggatgctgttctggatgccaaaccgccataaagaacgtcctcttggcgagcgcctgcgccttgcgctgcaggagctgggtccggtgtggatcaagtttggccagatgctctcgacccgtcgcgacctgttccctccccacattgccgatcagctggccatgctgcaggatcgcgttgcgccttttgatggtctgcaggccaaaaagcaaattgagcaagccatgggcggcttgccggtagaagcctggtttgatgatttctctgttgaaccgcttgcttccgcttctattgctcaggtgcataccgcgcgcttgaaagagaacggcaaagaagtggtcattaaagtgatccgcccggatatcgtgccggttatcaaagcggatatgaagctcatctaccgccttgcccgctgggtgcctcgtctgttaccggacggtcgtcgcctgcgcccgcaggaagtggtgcgtgaatacgaaaaaacgctgctggatgagctcaacctgctgcgtgaatcggctaacgctattcagctgcggcgcaactttgaagatagcccgatgctttatgtcccggaagtttactcggactactgcagtgaaggcatgatggtgatggagcggatttacgggatcccggtttccgacgtcgccgcgctggaagcgcaggggaccaacatgcagctgctggctgagcgcggcgtgcaggtcttctttactcaggttttccgcgacagcttcttccatgccgacatgcatccgggcaacattttcgtcagtcgtaaccacccggaagacccgcagtatattggtatagactgcggtatcgtcggctcgctgaacaaagaagataaacgctatctggcggaaaactttattgccttcttcaatcgcgactaccgtaaggttgcggaactgcacgttgattccggctgggttccggcagataccaacgtcgaagagttcgaatttgccattcgtaccgtctgcgagcctatttttgaaaaaccgctggcggaaatctcgtttggccatgtgttgttgaacctgtttaacacggcgcgacgtttcaatatggaagtgcagccgcagctggttctgctgcagaagacattactttacgtagaaggagtaggtcgccagctctatcctcagttagacttgtggaaaacggcgaaaccgttccttgagtcgtggattaaagatcaggtgggcattccggctctggtgcgggcttttaaagagaaggcgccgttctggattgagagaatgccggaaatacctgagctggtgtatcagagcctgcagcaaagcaagcagttacagaatagcgtcgataccatcgtgcgcgacatccaggtgcggcacgtgcgccaggggcagtcccgttatctgtttggtataggcgcggttttattactgagtggtacgctgctgttcatccaccgccctgagtggggcatgatgcccggctggctgatggccgctggcgtcgtaacctggcttatcggctggcgtaagacgaactga

SEQ ID NO: 256205 - DNA, 252 bp, Klebsiella pneumoniae; identical to SEQ ID NO: 176471

SEQ ID NO: 256206 - DNA, 540 bp, Klebsiella pneumoniae
gtgttcgatatcggttttagtgaacttctgctggtattcgtgattggcctcatcgttttggggccacaacgactaccggtagcggtaaaaacggtagtcagctggatccgtacgctgcggtcgctggcggctaccgtacaaaatgaaataacccaggaattaaaactgcaggagtttcaggaaagccttaagaaggtggaaaaggccagtctggataacctgacgcctgagctaaaagcatctatggatgagctgcgagaagcggctgaatctatgaagcgatcctattccgcccacgatcctgaaaaagccagcgacgaagccaacacgattcataacccggtcgtaaaagggagtgaagagcagcgcaaggacgtgacgccagcaacggctgaacatcaggccagcgcgcctgagcacgtacctgaacccgtgtctgaagagctccccgtttcgcagagtgaaatcccggcagagaaagtaaaagttgccgtggcggcttccgattcctcctcccccgtatcgagtgataaacagtaa

SEQ ID NO: 256207 - DNA, 774 bp, Klebsiella pneumoniae
atgggcgtagacgatactcaaccgctaattacgcatctgattgagctgcgcaagcgcttaatcaacagcattcttgcgattctggtcattttcctggcgttggtttatttcgccaatgacatctatcagctggtttctgcgccgcttattcggcagatgccggttggcgcgaccatgatcgcaacggatgtggcctcgcctttcttcacgccgatcaagctgaccttcatggtatcgataattttgtcggtgccggtcattttgtatcaggtttgggcctttgtggcgccagcgctgtataagcacgaacgtcgattggttatgccgctgctggtctccagtacgttgctgttctatatcggcatggcttttgcctactttgttgttttcccgctggcgtttggttttctgacccatgcggcgccggaaggcgtacaggtctcgaccgatattcgcagttacctcgactttgtgatggcgctgtttatcgcctttggcgtctcatttgaggttcccgtggccatcgtcctgctgtgctggatgggcgtcaccacgccggaagacctgcgtaagaaacgcccctatgttctggttggcgcatttgtcgttgggatgctgctgacgccgccggatgtgttctcgcaaacgctgctggcgattccgatgtactgcctgtttgaagtcggggtcttcttcgcgcggttctataccggtaagcgcctgacgcgtgacgaggatgccgcagccgaagaggcgcagggcaaagaagaataa

SEQ ID NO: 256208 - DNA, 795 bp, Klebsiella pneumoniae
atgggggtgatgatgtttgatatcggcgtgaatctgaccagctcgcagttttcccgcgatcgggacgaggttattgcccgagcccgggcggcgggagtcacaggaatgctgttgacggggaccaaccttcatgaaagcgcgcaggcgcagcagctggcgcatggttattccggatgctggtcaacggccggtgttcatccccacgacagccgcagctggacggaatcggccgcggcagcggtctacgagctggcccgcgagtcagaggtcgttgcgattggcgaatgcgggctggatttcaaccgcaacttttcaacgcctcacgagcaagaggcggcgtttagcgcccagctggcgctggctgcggaactgtcgatgccggtatttttgcactgccgcgatgcgcacgaccgtttcctggccctgctaaccccgtggcttgataagcttccgggggccgtggtgcattgctttaccggtagccgcgaagagatgcgcgaatgcgtggagctgggattatttattggcattaccggctgggtatgcgatgagcgtcgggggctggagctgcggactctcctggccgatatcccggccgatcgcctgctgattgagaccgatgcgccgtatctgctgccgcgggatatgcagccaaaacccgcttcccgccgcaacgagcctgcatatctgccgcatattctgtctcgtatcgcggagtggcgcggagaagaagcgccgtggctggaagagattaccgatgctaacgtcagaaggctctttggcgtgcgtttttag

SEQ ID NO: 256209 - DNA, 489 bp, Klebsiella pneumoniae
atgcaagcctggtatttactttattgcaaacgtgggcagcttgagcgcgcccaggaacatctcgagcggcaggccgtcaattgcctgatgccaacgatcgaactggaaaaaatcgtccgcggtaaacgcacgacggtcagcgaacccctgttcccaaactatctgtttatcgagtttgacccggaagtgattcataccaccaccatcagcgcaacgcgcggcgtgaacagctttgtgcgtttcggcgcgctgcccgcgatcgtgccgtctgcggttattcatcagctctccatctacaaaccggaaggtattaccgacccggaaacaccgcatgaaggcgacagcgtgctgatcaccgatggcgcctttgagggtctccaggctatctttaccgaaccggacggcgaagcccgctctatgctgctgctgaatctgcttaacaagcaggtattacaaagcgtcaaaaatactgacttttataaaatctga

SEQ ID NO: 256210 - DNA, 1470 bp, Klebsiella pneumoniae
atgaaataccacgatctacgcgaatttctgacattactggagcagcagggggaattgaaacggatttccctgccggtcgatcctcatctggaaattaccgaaattgccgaccgcaccttgcgcgctggcggtccggccctgctatttgaaaatcctaaaggctacgcgatgccggtgctgtgtaatcttttcggcacgccgcggcgagttgcgctggggatgggacaggagaatgtcagttctctgcgcgaagtgggtaagctcctggcattcctgaaagagccggaaccaccaaaaggtttccgcgatctgtttgataagctgccgcagttcaagcaggtgctgaatatgccgactaagcgtctgcgcggggcgccatgccagcaaaaaattattcagggcgatgatgtcgatctgggccgcatcccgatcatgacctgctggccggaagatgccgcaccgctgatcacctggggcctgacggtgacgcgcggcccgcataaagagcggcaaaatctgggcatttatcgccagcagctgattggcaagaacaagctgattatgcgctggctatcgcatcgcggcggcgcgctggatttccaggagtggtgcgcagcgcgtcctggcgagcgtttcccggtctccgttgcgctgggtgccgatccggcaaccattctcggggcggtgactccggttcccgacaccctctccgagtatgcatttgccgggctgctgcgcggtacgaaaaccgaagtcgtgaagtgcatctctaacgatctggaggtgcccgccagcgcagagattgtgctggaagggtatattgaagtcggtgaaatggcgccggaagggccgtatggcgatcatacgggctactacaatgaagtggataatttcccggtctttaccgttacccatattactcagcgtgaagacgctatctaccattcgacctacaccggacgtccaccggatgaacccgcggtactgggcgttgcgctgaacgaagtcttcgtccctattctgcaaaagcagtttcctgagattgtggatttctatttaccacctgaaggctgctcctatcgcctggcggtggtcacgatgaagaagcagtacgccggtcacgcgaaacgcgtcatgatgggagtctggtccttcctccgtcagtttatgtataccaagtttgttatcgtctgcgatgatgatgtcaacgcgcgtgactggaatgatgtgatttgggcgattactacccgtatggacccggcgcgtgatacggtaatggtagaaaatacgccaattgattatctggattttgcctcaccggtttccggtttgggttcaaaaatggggctggatgccacaaataaatggcccggtgagacccagcgcgagtggggtcgtccgattaagaaagatcccgaggtgacggcgcgcgttgacgccatctgggatgaactggccatcttcaaataa

SEQ ID NO: 256211 - DNA, 702 bp, Klebsiella pneumoniae
atgacaaccttaagctgtaaagtgacctcggtggaggcgattaccgatactgtgtatcgcgttcgattagtgccggaagcggcgttttctttccgggctggtcagtatctgatggtcgtgatggacgaacgcgataagcgcccattctccatggcttctacgccgtcggaacaggagtttatcgaactgcatatcggtgcatctgaacttaatctgtatgcgatggcagtgatggatcggatcctgaaagagcgtgaaatcgaggtcgatctgccgcatggcgaagcctggctgcgcgatgacgaagaacgcccgctgattttaatcgctgggggaacgggtttctcttacgtgcgttcgattttgcttaccgcgctggcgcgcaatccgaaccgcgatatcgctatctattggggcggacgcgaagcgaagcatctctatgatctggcggaactggaagcattaagcgtgcagcatccgggcttacgcatcgagcccgtggttgagcagcctgacgctgagtggcgtggccgtaccggaaccgtactcaccgcggtcctgcaggattacggtacgctgggcgatcatgatatctatattgcaggtcgcttcgagatggctaaaattgcccgcgatctgttctgcaacgagcgcggcgcccgcgaagagcgtctgtttggcgacgcgtttgcctttatctga

SEQ ID NO: 256212 - DNA, 312 bp, Klebsiella pneumoniae
atgaaaacactccctttcatacttctgctcaccgcattctctggcgctgctcttgccagcgaacaggataacgctcaggcatgcctctcatggggaatcaataaaatggcgcagaatccggaaagcgagcggctcaaggacctgaccatcaccaatattaataccgaacgctatgatgagaagataggcagccagcatatcgcgacgcagttagccgccacgctggaaaaagaagggaaccccgtagggaaaatgctctgtttgctggaaaacgatcgaccgctgtacgtttactttagcgatgcgcgctag

SEQ ID NO: 256213 - DNA, 1164 bp, Klebsiella pneumoniae
atggaacaggttgtcattgtcgatgcagttcgtaccccgatgggccgttcgaagggcggcgcttttcgccatgtgcgcgcggaagatctctccgcgcacctgatgcgtagcctgctttcacgtaatccatcccttgaagcaagcgccattgatgatatttactggggctgcgttcagcagacccttgaacagggtttcaatattgcccgcaacgcggcgctgctggcagaaatcccgcattccgtgcccgccaacacggtcaatcgactgtgcggttcttccatgcaggcgcttcacgacgcggcccgcatgatcatgaccggcgatgccagcgtatgcctgattggcggtgtagaacatatgggccacgtcccgatgagccacggtgtggattttcacccgggcctgagccggaacgtcgctaaagccgccgggatgatggggctgaccgcagaaatgctggcgcgcctgcacggtatcagccgggaaatgcaggatcagtttgcagcccgctcccacgcccgcgcctgggccgcgacgcaatctggcgcattcaaaacggagattgttccgaccggcggtcacgacgccgacggcgtactgaagtcatacagctatgatgaagtgattcgcccggagacgacggtagaagcgctggctgcgctgaggcccgcgttcgatcccgtcaccggtaccgtaacggcgggtacctcttctgccctctccgatggcgccgcagccatgctgttaatgagcgaaagccgcgcccgcgagctgggcctgaagcctcgcgctcgcgtgcgttcgatggccgtcgtcggctgcgacccgtcaataatgggctacggcccggttcccgcgtcaaagctggcgctgaaaaaagccgggctcaccaccagcgatatcgatgtgttcgagatgaacgaagcttttgccgcgcagatcctgccgtgcattaaagatctgggactgatggaacagatcgacgagaagatcaatctcaacggcggcgcgatcgccctgggccatccgctcggctgttcaggcgcgcgcatcagcaccacgctcatcaaccagatggagcgcaaagacgcgcagttcggcctggcaacgatgtgtattggtttaggtcaggggatcgcgacggtattcgagcgggtttaa

SEQ ID NO: 256214 - DNA, 2058 bp, Klebsiella pneumoniae
gtgctcgaaaaacaaaaagatctgcaagggctactgctgcgctctgagaaagcagcctttatcgtcggtgcggatatcactgaatttctttccctgttcctggttccgcaagaacagttaagccagtggctgcatttcgccaatagcgtatttaatcgcctggaagatttaccggttcccactatttccgccgtcaacggctatgcgctgggcggcggctgcgaatgcgtgctggcgaccgattatcgcctggcgacgccggatttgcgcattggcctgccggaaacgaagctgggtatcatgccgggctttggcggctcggtgcggatgccgcggatgcttggcgcggacagcgcgctggaaatcattgccgcaggtaaagacgttggcgccgaacaggccttaaaaatcggcctcgtcgatggcgtggttaaacatgaaaaactgctcgatggcgcgatagcaattctgcgtcaggccattaaaggtgacctggactggaaggcgaagcgccagccgaagctggagcctctccacctgagtaaaattgaagccgcgatgagttttaccatcgccaaaggcatggtggcgcaaaccgccgggaaacactaccctgcgcccattactgccgttaaaaccattgaagccgccgcccgctttggccgcgaagaagccttgaatctggaaaacaaaagttttgtcccgctggcgcataccaacgaggcgcgggcgctggtaggtatcttccttaacgatcagtatgttaaagcgaaagcgaagaagctgactaaagataccgacacgccaaaacacgcggccgtactgggcgcggggattatgggcggcggcattgcataccaatcggcatggaaaggcgtgccggtagtcatgaaagatatcaacgacaaatcgctgacgctcggcatgaccgaagcggccaaattgctgaataaacagcttgagcgcggcaaaatcgatggtctcaaaatggctggcgttatttccactattcagccaaccctggattacgccggctttgagcgcgtggacgtcgtggtcgaagccgttgttgagaatccgaaagtgaaaaaagcggtgctggcggaaacggaagacaaagtccgtccggataccgtgctggcatcgaatacctccaccattcccatcagcgagttggccagcgtactgaagcgcccggaaaacttctgcggaatgcacttctttaatccggtgcaccggatgccgctggtcgagattattcgcggtgaaaaaagctcggacgaaaccattgcgaaagtggtcgcctgggccagcaaaatgggtaaaacgccaatagtggtcaacgactgccccggtttctttgttaaccgcgtgctgttcccctacttcgccggtttcagccagctgctgcgcgacggcgcagacttccgcaaagtcgacaaagtgatggaaaagcagtttggctggccgatgggcccggcctatctgctggacgtcgttggcattgataccgcgcatcacgcgcaggcagtcatggcggcgggcttcccgcagcggatgcagaaagattatcgcgatgcgatcgatgcgctgttcgacgctaaccgtttcggccagaaaaatggcctcggcttctggcgctacaaagaagacagcaaaggtaagccgaagaaggaagaggatgccgcagtcgataacctgctggcagaagtcagccagccgaagcgtgatttcagcgatgaagagattatcgcccgcatgatgatcccgatggtcaacgaagtggtgcgttgtcttgaagagggcattatcgccagcccggcggaagccgatatggcgctggtctatggtctcggcttccctccgttccacggcggcgcgttccgctggctggataccctcggtagcgcaaaatatctcgatatggcgcagcagtatcagcatctcggtccgctgtatgacgtgccggaaggattgcgcagcaaagcgcgtcataacgaaccgtactatcccccggttgagcctgcccgtgcgccaggcgagctgaaaacggcttaa

SEQ ID NO: 256215 - DNA, 1110 bp, Klebsiella pneumoniae
atgagttcgcaatcccaggccaaatcccccgaacgtctacgcgcgatggtcgccgggaccctggctaatttccagcacccaaccctgaaacataacctcactacgctgaaggcgctgcatcacgtcgcctggctggacgaaaccgtgcatattgaaattcagatgccgttcgtctggaacagcgcctttgaagctctgaaggagcagtgcagcgccgagctgctgcgcattaccggtgccaaagctatcgactggaagctgacgcacagcatcgccacgcttcagcgggtaaaaaatcagcccggtatcaacggcgtgaaaaatattatcgctatcagctccggtaagggcggggtgggtaaatcatcgacggcggtcaacctggcgctggcgctggcggcggaaggggcgaaagtcggcattctggatgccgatatttacggcccgtcgattccgaccatgctcggcgcggaagatcagcgtccgacctcgccagatgggacccatatggcgccgattatgaagttcggtcttgccaccaactccatcggttatctggtgaccgacgataacgctatggtgtggcgcgggccgatggccagcaaggcgctgatgcagatgctgcaggaaaccctgtggccggatctcgattatctggtgctggatatgccgccgggtaccggtgatattcagctgacgctggcgcaaaatatcccggttaccggcgcggtagtggtgaccacgccgcaggatattgccctgatcgacgccaaaaaaggcatcgtgatgtttgaaaaagtcgaggtaccggtgctgggtatcgtggaaaacatgagcatgcatatttgcagcaactgcgggcaccacgagcctatcttcggtaccggcggcgcgcaaaagctggcggagaaataccacacccagctgctgggccagctgccgctgcacatcactctgcgcgaagacctcgacaaagggaccccgacggtagtggcgcgtccggaaagtgagtttaccgagacctatcgtcagctggcagaccgcgtcgcggcgcagctgtactggcagggggaagttatccccggtgagatcgccttccgcgcggtatag

SEQ ID NO: 256216 - DNA, 330 bp, Klebsiella pneumoniae
atgaataatattgctctaatcgttaagttgcgggaacttctggtcatctttatgcattcgcgcacgctgccggagaaagccgctgacgcgctgcgttattgtcaggaaaatatcccgctggctgaccttccgattggcgcttatggcgaatattgtgaaatttatgaacagatagtttttttatcggatgataaaagtcgcactgcgccggatgatttactgcgcagcggcggggatctgatactcagtattttaatgctctacgaacaggtcgctgcctatattgccgtcgaggagtttatgcacaaacaaaaccgctttaacgaatag

SEQ ID NO: 256217 - DNA, 318 bp, Klebsiella pneumoniae
atgcgtaaaacaaaaatgatgcttctgggcgtactgttggcatgcaccagcggagcgtgggcggcgaccggcgacggcattcagaaatatgagctggacggagtgaccgcagactttaaacaattccacatcggcgataccgttccgccgctgtacctgacgccagaatacaatatcaaacagtggcagcagcgcaatctgccggcgccggatgccggcacgcgctggacctacatgggcgggagctacgtcctgattaccgaaaccgaggggaaaatcctcaaaatctacgatggcgaaattttctatcatcgctaa

SEQ ID NO: 256218 - DNA, 921 bp, Klebsiella pneumoniae
atgttaaggctggaagatctggctctgtttgtccgcgctgcggcgctaagcagcttcagcgatgcggcgcgagaggccgggctgcagccggcgcaggttagtgcggcgatcaagcgtctggaaacgacgttgaatattcgtctttttgcccgttcaacgcggagcctgcgcctgacgccggaaggtgaggcctggctgccctacgccacgcagatgctcgatacgctgcacgccgggctgcaaaaaatccgcacgccggatgacgaagttcgcggtacgttacaaattgccgtgccgtccgatctcgggcgcaacctgcttctgcgcgtttttcgcggctttcgccagcgtcatcctgcgctgcgtctgcggatcctgttttccgatcatcggaccgacgtgtttaaagatccggtggacgtggcctttcgctacggcgataacgacgatgcttcgtttatctccctgcccgtcgcgcccgataaccgacgagtgctggtggcttcgcccggctggatagccgaaaacggcgagccgcaaacgctggaagagctggcgcgacataatgcactcacctacgtgctgcgcggcagggcgtttgaccgctggccgttgagccgggaagggaaagtacaccacgtgcaggtttccggtactatcgtgagcgatgatgcggaggtgattcgccgcctggcgattgccggtgaggggattgcgtacaaatctgaactcgacgtcggcgacgatattcgtgcagggcgactccaggtgctgctgccgcactaccagggcgacgtggtgccgctgaatatgatttgcccgcaccgcaaacagctttcgcctgcggtacggctgctgtatgaggcggtgaaagaggcgtgcgaagcggttaattccagcgcgctctctgcgggccggtag

SEQ ID NO: 256219 - DNA, 1344 bp, Klebsiella pneumoniae
atggccgacaatacccttaactcatccgcgcagggaagctggctggagcgccgttttgccttgtattcccgcggcagcacgctgcgcaccgaatgcctcgcgggcatcaccggttttctcgccgccgcctatctactggtggttatccccggcctgctggcggtgggcgggatggataaaggcgcggcaaccaccggcacgattctggtgttcgtcggcggcacgctgctgatggcgttttatgccaacctgccgtttatcgtcgggccgggcatcggcggttcggtgctggtcggcgtcacgctggcgggcagcgaaggcattggctggcagatcgggcttggtatcgcctgctggtcggggattctgtttttcctgctgaccaaattcggcctgcgtgaagtggtaacccgttcggtgccgcagtcgatcaagctcggtctgacggcgtccattgggctgttcgtcgcggtattgggcttccgtaacgccggactggtgctggctaacgccaaaaccaacgccctgatgctcggggatttcctttcgccgggggcgctggttgcgctctgcgggctgtttctggccattgccctgcaggcaagaaaaatccccggctcgattctgtgggcgattctctttgcaaccctggtcggtattccgatgggcgttaccagactcccgggcagttttatcgatatgccgcattcgctgacgccggtgctggggcaaatcgatatgctgggcgcgctgaatatcgcctttctgccgttcctgttcgtctttttcgcctcagagttcttttccacgatgggcaccactctggccgtgggcggcgaagcgggtctgctggatgaagaaggcaatatgccgcatatcaatcgcccgtttatggtcgactcgatcgctgcggctataggtccctggctgggtattccggcggcgaccgcgctgattgaatcctcggcggcagcggaagccggcggtaaaaccgggttaaccgcgctatcggcggcggtaatgtttctcctgatgctgctgtttacgccggtggcgctgatgatcccgaaagaggcgaccgcacctgcgctgatcctcatcggcctgaatatgttcagcggcctgcgcaaagtggatctggcaaacttcaccgacggcctgccggtgctgatgatggtaatgattacgctgattgccaatagcttcggtaccgggattgccggcgggctgctgttttatgtcgtgatcaaaaccatcgccggcaaatggcgggaaatccccatcggcctgtggatccttgcgattccgctggtctactactttgccacgctggtgaagcattaa

SEQ ID NO: 256220 - DNA, 1812 bp, Klebsiella pneumoniae
atgtccagcagtgctgaaacccgccgccgcgccgtccaggccgcgcgcggagaatccccgttcgatttattattaaccgacgcgcagattgtcgacatggccaccggagaaatccgcgaggccgacgtcgggatcgtcggtgaaacgatcgccagcgtgcatccgcgcggcagccgctccgatgccctcgaacgccgctcgctggcgggatgtttcctgtcgccggggctgatggatacgcacgttcaccttgaaagctctcacctgccgcctgaacgctatgccgaaatcgtgctggctcaaggcaccacggcagtattctgggacccgcacgagctggccaacgtactgggcgtcgaaggcgtgcgctacgcggtcgctgccagccgccatctgccgctgcaggtgatggttgcggcgccttccagcgtgccgtcgacgccgggactggagatgtccggcgccgatttcgccggcgcggagatggaaaccatgctggcctggccggaagtctgcggcgttgctgaagtaatggatatgcacggcgtgctgcacggcagcgagcggatgcaggagatcgttcaggccgggttgaacagcggcaagctgatcgaaggccacgcgcgcggtttgagcggcgcggatctgcaagcctatcttgccgccggggtcacctccgatcatgagctcacctcggcggacgatgcgctggaaaaactgcgcgccgggctgactatcgaaattcgcggctcgcacccttacctgctgccggatatcgttaacgcgctgaaaacgctgccgcatctctcctcgcaaatcaccgtctgcaccgacgatgtgccgccggatatgttgctggaaaaaggcggcattatcgccctgctcaacctgctgattgagcacggactgccggctaccgacgtcctgcgcttcgccaccttaaacgcggcgatccgtctgcagcgtaacgatttggggctgattgctgccggacgccgcgccgatctggtagttttcgattctttatcccgactcaacgcgcaggaagtttacgtcgccggtaagctgattgcccgcgatggcgccctgcttcaacccattccgtcggcggcgggcgttaccccgccgcgcgataccctgcagatgccgccgctcagccctgacgattttatcctccgcgttggcgccattcgccacggcgtcgcccgtctgcggcatattcgcggcgcgcgctttacccagtggggagaagttgaggtgcaggtccgcgatggccgggtgcaaatcccggaaggatttagcctgatttgggttaagcaccgccacggtcgtcaccaggcgacgccgcaaattgcgctgctggaaggctggggcgaactgcgcggcgccatcgccaccagctactctcacgattctcacaacctggtcgtgctcggacgcgatgccgacgagatggcgctggcggcgaaccgcctgatcgaatccggcggcggcatggcgctgtcgcagcagggaaaaatccttgcccacgtggcgatgccgattgccgggatgctttctgacttacccgccccggagctggccagacagttccgccagcttcgcgacctgagcgcggaagtcgccgactgggagccgccctatcgcgtgtttaaggcaatcgagggtacctgccttgcctgtaacgccgggccgcatttaacagatttaggtttgaccgacggcagcacccgccagatagtcgagccgctgatagactgccgggaaatcccggaacacacagaacacaacaataaacatcagggagcctga

SEQ ID NO: 256221 - DNA, 936 bp, Klebsiella pneumoniae
atgctcaccgttgacgaaaacatgatgaccgaaccctggcagcggctgcccgcgctctctctcaagcagattcagtactttgtgaccctggcccagctgcgtcacttcaccgacaccgctaaccggctggctatcagccagccggcgctaagcagcgcgctgcggcaaatcgagacggtgctcggcggcaagctggtcaaccgtaccgcttcggcggtgaccttaaccgagctgggggcggcgattttgccccgcgcccggcgagtgttgagcgtggcgcagctggcttttcaggatatgcagcagatagtcgaagccggcggcgacggaacggtgcgtattggcttagtgccttcggtgagttcgctgctgtttccgctgctgccgcaaacgctggcccaggcgtttccgcgcctgagggtggagtttcacgatcagaccaacgacgccctgttttgcgagctgcagtcgggaaagatagattttgccgttggcgcaatagacagttcgttaccgcctgagctgcaggtttatcctctgcgcgaagatccgtttgtggcggtgctgcacggcgacgatccgctggccgggcagccgcatctgccgtggaagctgctcgcggggcgcgatatcgcggtgttttcaaagggcaatattcagcgtctggtcggcgcgctggccgagagccatcgcctcacgctgaatacgcgttatcaggttgactatatcgagacgctttacggcctggtgcgctcgcggctggcggtggcgattctgcctgagctttatactacccaccttcaggatccggcgttaaaggtggcgcagcttcagcagcccgcgctgacgcgaaccgtggcgctgatgcgcggaccggagcctctgccgccgctgatcgaggaatgttttgcactattactgagttcgctgcgctga

SEQ ID NO: 256222 - DNA, 1977 bp, Klebsiella pneumoniae
atgaaattaacaccgattatgaaaagtctggctctggcaggaattatctcgactctccctgcgaccagctgggccgaaacgtcgcctaaagaagccgctgcggcgaccaaacaggcaaacgacgcgctgtataaacagctccccttctccgacaacaccgactttaccaacgcgcataaaggttttattgccgcgatccctacggaggtgattaaaggtgaacagggcaacgttatctggaacccgcagcagtacgactttattaaagagggtgaaaaggcgccggatacggtcaaccccagcctctggcggcaatcccagctcatcaatatcagcggcctttttgaagtgaccgaaggcgtgtatcagatccgtaacctcgatctctccaatatgaccatcatcgaaggtaaagaaggcgtcacggttgtggatccgctggtatcggcagagaccgccagggtaggaatggagctgtattacaaaaatcgcggcaataagcccgttgttgcggtgatctacacccacagccatgttgaccattacggcggcgtgcgcggcgtggtcgatgaagctgatgtcaaatccggcaaagtcaaaatctacgcgccttccggttttatggaagccgccgttgctgaaaatattatggccggtaacgtgatgagccgtcgcgccagctatatgtacggcaacctgctcaaaccggatgccaccggccaggttggcgcaggtctcggcaccacgacttctgccggcaccgtcacgctgattgctcccacccatatcatcgagaaagatggccagaaagagactatcgacggactgacctacgattttatgctggcaccgggctcggaagcaccgtcagaaatgctgtggtatatcgaagagaagaagctgattgaatccgccgaagatgtcacccataccctgcataacacctactcgctgcgcggggcgaaaattcgtgaaccgctaccgtggtcgaaatatatcaacgctgccattgtgcgctggggcgacaaggctgaaatcattatggcccagcaccactggccgacctggggtaacgagaacgtggttaacctgctgaagagccagcgcgacctgtatcggtacattaatgaccagactctgcgcatggccaacgagggcctgacccgcgatgagatcgccgctaaattcaagctgccggacagcctggctaatacctgggccaaccgcggctactacggttccgtcagccatgacgtgaaggctacctacgtcctctatctcggctggttcgacggcaatccggctacgctggacgagctgccgccggaagaagcggcgaagaaattcgtggattatatgggcggcgccgacgctatcctcaagaaagccaaagatgattacaaccagggcaactaccgctgggtagcgcaggtagtcagcaaaattgtcttcgccgatcccggcaatctggaagcgcgtaatctggaagccgatgctctggagcagctgggctatcaggcggaatcaggaccgtggcgtaatttctacctgaccggcgcgcaggagctgcgtaacggcgtcgtgaaaggcccgacgccgaacaccgccagcccggataccgtgcgggccatgaccccggaaatgttttttgattaccttgcggtccatatcaacggtgaaaaagccggaaccgccaaagcggtgttcaatatcgaccttggtagcgatggcggtaaatataagctggagctggaaaacggggtgcttaatcacaccgccgatgccgaagcgaaagatgccgacgccactatcgccctggatcgcgccgcgctgaacaaaatcatcctgaaagaggaaacgctaaaacaggcggaggataagggtgaagtcaaagtgaccggcgacggcgcgaaactggatgagatgctgggctatatggataaatttgagttctggttcaatatcgtgacgccgtaa

SEQ ID NO: 256223 - DNA, 339 bp, Klebsiella pneumoniae
atgtctgacctgctgaaccccgcgcatattgcccatctgcggcacctttttcaccgccattctccccttgttcactgcatgaccaacgacgtggtgcagacctttaccgccaacgtcctgttagcgattggcgcatcgccggcgatggttatcgatccgggcgaagccagccagtttgccgccattgccgatgcgctgctgattaatgtcggcacgctgaccgttgagcgtgcggaggcgatgcgcgcggcggcgcgtagcgcaacgcaggcgggcaaaccctggacgctggacccggtagcggtcggcgcgctgaccctgtctcttatacacatctga

SEQ ID NO: 256224 - DNA, 369 bp, Klebsiella pneumoniae
atgtggttactggatcagtgggcagaacgccatattcttgatgcacagcgcaaaggtgaatttgataatcttccgggaagtggcgaaccactgattctggatgatgattcacatgtgccgtccgagctacgcgcaggttatcgactactcaagaatgcgggttgtttacctcccgaacttgaaaatcgtaaagaagccgtgatgctaaatgacttacttaaaggcgttcaggagtgcgatccccgctatgctgagctgagccgtcgtcttgcgctgctcgagttaaagctgcggcaggcgggcttaaatactgacttcctgcgtggggattacgctgataagttgctgcataagattaatgaggagtaa

SEQ ID NO: 256225 - DNA, 426 bp, Klebsiella pneumoniae
atgtaccgcataggtgaactggctaaattggctgacgttactcctgataccatccgctattatgaaaaacagcagatgatggagcataacgtgcgtacggaaggtggatttcgtctctattcggataacgacctgcagagactgcgttttatccgctatgccaggcagctgggttttacgctggaatcgatccgcgaacttctctcgatccgcatcgatccggaacatcatacctgtcaggaatctaaaggcatcgtgcaggctcgtttgagtgaagtggaatcccgtattaaggagctccaggctatgcgtcgttccttacagcggctcaatgatgcttgctgcggcacagcgcacagcagtgtctattgttccattcttgaagcgctcgagcagggcgccagtaacagaaataccgggcgttga

SEQ ID NO: 256226 - DNA, 207 bp, Klebsiella pneumoniae
atgagccgctatcagcacactaaagggcagataaaagataatgccatcgaggccttgcttcatgacccgttattcaggcaacgagttgaaaagaataagaaggggaaaggcagttatcaaagaaaagcaaaacatgcggggcgggatggtcgggaggccagtggcaagaaagtgattacttttttaccactggccttctggttttaa

SEQ ID NO: 256227 - DNA, 414 bp, Klebsiella pneumoniae; identical to SEQ ID NO: 177091

SEQ ID NO: 256228 - DNA, 1377 bp, Klebsiella pneumoniae
atgaaaattatcatattgggcgcaggacaggtcggcggaactctggcggaaaatctcgtcggggagaacaacgacattactctggtcgacacgaatggcgaccgccttcgtagtcttcaggataaatttgatctccgggtggttcagggacatggctcgcatccacgcgtgttacgtgaggccggtgcggatgatgccgacatgctggttgcggtgaccagctccgatgaaaccaacatggtggcctgccaggttgcctattcgctgtttaatacgccaaatcgtattgctcgcatccgttcgccggattatgttcgcgatgccgacaaacttttccactcagaagcggttcctatagatcaccttatcgcacctgagcagctggtaattgatagtatttaccggctgatcgaatatccaggcgctttgcaggttgtcaattttgctgaaggaaaggtcagcctggcggtcgttaaagcctattatggcggtcctttggtgggaaatgcgctttcgactatgcgcgaacatatgccgcatattgatacacgcgtagcggccattttccgccacgatcgtcctatcagaccccagggctcaacaattgtagaggcaggggatgaggtgttctttatcgccgcttcgcagcacattcgagcagtcatgagcgagcttcagcgtctggaaaagccttataaacgcatcatgctggtcggcggcggaaacattggcgccgggctcgcccataagctggagaaagattacagcgtcaaactcattgaacgtaatcaacagcgtgccgcagagcttgcagaaaagctgcagaataccatcgtcttctacggcgatgcttcagatcaagaattactggctgaagaacatatcgatcaagttgatctttttatcgctgtcaccaacgatgatgaagccaatatcatgtctgccatgctcgcgaagcgaatgggcgccaaaaaagtcatggtactgatccagcgacgggcttacgtcgatcttgtccaggggagcgtgatcgacattgcaatatcaccgcagcaggcaaccatatccgcgctgctcagccatgtccgcaaagcggatattgttggtgtttcctcgctgcgccgcggcgtcgctgaggccattgaagcagtggcgcacggagacgaaagcacttcacgggttgttggacgttcgattgatgagattaaacttccgccaggaacaattattggcgcagttgtacgcggtaatgatgtcatgatagcgaataacaatctgcgcattgagcaaggggatcatgtagttatgttcctgactgacaaaaaattcatctctgatgtggagaggctattccagccaagtcctttctttctgtag

SEQ ID NO: 256229 - DNA, 1290 bp, Klebsiella pneumoniae
atgaaaaaacaactcaatttacgtagcctggcagcgcaggccgttgaacaggttctcgaacaagggcaatcattaagcaacgttctgccctcactgcagcaaaaagtatccgataaagataaagcgctgcttcaggaactatgctttggcgtgctgcgtacgctttcgcaattagactggctgatcaataagctaatgtctcgtccgatgacgggtaagcagcgtatcgttcactacctgattatggtgggcttatatcaactgctctatacgcgtatcccaccgcatgccgcactggcggaaacggttgaaggcgcagtcgctattaaacgtccacagcttaaggggttgattaacggcgtattgcgccagtttcagcgccagcaggaagagctgttgtctgaattttctcgtagcgacattcgcttcttacacccaggctggttattaaaacgcctgcagaaagcgtatccagcgcggtgggaagccatcgtggatgcgaacaaccagcgtccgccaatgtggttgcgcgtgaaccgtctccatcacacgcgcgacagctggctggcattgctggaagaggcgggtatgtcagggtttacgcattccgcttatcctgacgctgtacgcatggaaacaccggtaccagtccatgcactgccagggtttgaagaaggctgggttaccgttcaggatgcctccgctcagggttgcgtcatattcctcgcccccaaaaacggcgagcaaattctggatctctgtgccgctccgggcggtaaaaccacgcatattctcgaagcggctcccgaagcacaagttctcgccatcgatattgacgagcagcggctctcccgcgtctatgacaacctgaagcgactgggaatgaaggcaaccgtcaaacagggtgatggacgccatccatcacagtggtgcggcgaacaacagttcgatcgtatcctgctggatgcgccttgttccgctagcggtgttattcgccgtcacccggatatcaaatggctgcgccgggatcgcgatatcgaagaacttgcccagcttcagtcggaaattctggatgccgtatggccgcacctgaaatccggcggaactctggtttacgcgacgtgctccgtattaccagaggagaatagcctgcaaattaaagcctttctgcaacgaacggcggatgcggtactcagcgaaaccggaacgccagagttgccaggccaacaaaatttgcctggtgctgaagaaggtgacggcttcttttacgctaagctaatcaaaaagtga

SEQ ID NO: 256230 - DNA, 807 bp, Klebsiella pneumoniae
atgcccagcccggttaaagtactggcgcaggagaaaggcataccggtattccagccagcttcgttacgcccgcaggataatcagcaattagtttctgacctgcatgcagacgtcatggtggtcgtagcctatggtctgcttttgccgaaagcggtgctggatatgccgcgccttggctgcattaatgttcatggttcgctgcttccacgctggcgcggagcggcgccaattcaacgttcgctctgggctggtgataccgagaccggtgtaacaatcatgcagatggatgtcgggcttgatacgggcgacatgctgtataagcttgcgtgtcccatcaccgcagaagataccagcggaacgttatatgacaaactggctaacctggggccgcaagggcttattgaaacccttaagcagcttgccgcgggtaccgcaaaaccggtcgttcaggatgaagcgctggttacccatgcacaaaaactcagcaaagaagaggcgcgtatcgactggtctctttccgctgctcagttagaacgctgcattcgcgcctttaatccgtggcctatgagctggatagaaattgatggccagccgataaaagtctggcaggcatcggttatcaatacggccacagctgccgtacccgggaccatcattgaagcgacaaaacaggggattcaggtagcaaccagcgacggtattctgaatctactctcgctgcagccggccggtaaaaaagcaatgagcgcccaggatcttttaaactcgcgccgggaatggttcgctcctggcaaccgtctggtctga

SEQ ID NO: 256231 - DNA, 1125 bp, Klebsiella pneumoniae
atgacgccgaaggaaatttggatacgtttgatgagagtgagcagcctgtatggcgacagtgctgtcaaagccgctcgtcagctatgttcatctccgacgttagatcatgagaatttgcgagcctgtggtttgaatctggcgcaatcgaagcaatttcttagcgttaaccaatgcgagattgattccactctgcagtggctcgagcagccgagttgctatctactcaccgtcgaagatctgctttacccacctcaattgcgggctattgtggattttcccggtgccctttttgtctatggagatacttcgctacttagtagccgacagctttcagtcattggaagtcgagcgcattcgtggtatggcgcccgctgggggaaattatttagcgaagctttagcgggttatggcattacgatcactagcggtctggctcttggcatcgatgggatcgcccatcgtggtgcgctggaaggcaagggtaaaacggttgccgttttagggaacgggttacgcgaaatctatcctcgtcgccatcaggcgctggcggagcagataattcgcaacggtggagccgtaatttctgaatttccactttttactccgcctttgccggggaattttccccggcgtaatcggattatcagcggcctgagcgccggtgtgttagttgttgaggccgcactgaaaagcggttcgctagtgacagttcgttatgctctggagcagggaagggatgtatttgccctgcccgggccaattggcagtcctggctcggaaggaccccattggctcattaagcagggagcgattcccgtaacggcgcctgaagacatcattgaatactggcgggatgagctacagtccattgttcttgagccggatggcgcaaataattgcgcgaatctgccttctgtagcattgccatttccagagctcctggctaacgtaggagatgaggtaacacctgttgacgttgtcgctgaacgtgccggccaatctgtgccagtaaccgtagcccagctacttgaactggagttagcaggctggatcgcagctgtacccggcggctatgtccgattaaggagggcaagccatgttcgacgtactcatgtatctgtttga

SEQ ID NO: 256232 - DNA, 474 bp, Klebsiella pneumoniae
atgttcgacgtactcatgtatctgtttgaaacttacatccataatgaagcagaaatgcgcgtggatcaggacaagctgactcgggatcttaccgatgccggttttgaacgagaagatatctataacgccctgatgtggcttgagaaactggctgattatcaggaggggttggttgcgcctatgcagcttgcttccgatcctctctcgctacgagtatatacggacgaggagtgtcagcgtcttgatgcgagttgccgggggttcttactgttccttgagcaaattcaggtgttgaacctcgaaacacgggaaatggtgatagagcgtgcgctggcgctggatacggcggagttcgatctggaggatctcaaatgggtgattctgatggtgctgttcaatattcccggttgcgaaaatgcctaccagcaaatggaagaattactctttgaagtaaatgaaggtatgctgcattaa

SEQ ID NO: 256233 - DNA, 543 bp, Klebsiella pneumoniae
atgaccaaaacagcgctgttttcggtgcgtaaaaacgaaccctgcccgcagtgtggggctgaactggtgatacgctccgggaagcacgggccttttctcggctgttcgcattatcctgactgtgactatgtccgtccccttaaaagccaggcggacggacatatcgtcaaagttctggaggggcaaacgtgtccgtcttgcggctctgtgctggtgctacggcagggacgttttggtatgtttatcgggtgtagtagctaccctgattgtgaacatactgaattgattgataagccagatgaaaccgcaataccctgcccgcaatgcggacaagggcatctggtgcagcgccgttcacgttttggtaaaaacttccattcctgcgatcgttaccccgattgccagttcgtcattaatttcaaaccagtagcgggcgagtgccccgagtgtcattacccgttgctaatcgaaaagaaaacggctcagggcgttaagcgcttttgtgccagcaaacaatgtggaaagccgatatcggcggaataa

SEQ ID NO: 256234 - DNA, 573 bp, Klebsiella pneumoniae
gtgaataataacctgccctccgaagccatcgttcgtgctgtggagcttctgaataatcaacatgtcatcgcctatcctacggaagccgtttttggcgtcggttgcgatcccgatagcgaaaaggccgtcatgactctgcttgcccttaaacagcgtccggttgaaaaaggattgatcctgatcgccgctagctttgaacaactcaagccatacattgacgatacgcggcttagtgatgagcagctcgcggctattttttcctgctggcctggtccggtgacgtttgtcttccccgcctgtgcttcaacgccgcgttggttgactgggcgcttcaattcattggctgtcagagttaccgatcatccgctggtcgttgaactgtgcaaggcttacggtaagccgctggtttcaaccagcgcaaatttatcgggccagccaccttgccgcacgaccgaggaagtttatacgcagtttggcgctgactttcccgtcattgatggggcaacgggaggacgtcaaaatccatctgaaattcgtgatgccttgacgggcgaactcttccgccagggataa

SEQ ID NO: 256235 - DNA, 819 bp, Klebsiella pneumoniae
atggaaacttatgccgtcttcggacatcctatcgcccatagtaaatcgccgtctatccatcagctttttgcacagcagctgcaaattgcgcatccctatggacgtatcctggctccgctcgatgattttgttaccacgcttgacgccttctttaatgagggtggcaagggcgctaacatcaccgtaccttttaaagaagaggcctttgcgcgagctgacgagttaaccgaacgtgcagcgctggccggcgcagttaatacgcttaaacggctggaagacggccggctgcttggcgacaatacggatggcatcgggctcttaagcgatctggaacggcttgagtttatcaaacctggatgccgggtattgcttattggcgcgggtggcgcttcacgtggggtattgctgccccttttatctctggattgcgccgttactattgtcaatcgtaccttttctcgcgctcatgaactggctacgttgtttgctcatactggcagcgtccgtgctttggatatagaagcatcaggcaatgaggaatttgatctcatcattaatgcgacatccagcggcattgacggggacgttcctgcaattcctgtgagtttaattaaccctcatgtctgctgctatgacatgttttaccagaaaggtagtacgccttttttatccttatgccagcaacacggtgcgacaaaatgcgctgatgggttaggaatgctggtggcgcaggctgctcatgcggtgctgttgtggcacggcattctgccagatataactccagtcattgccgctttacagaaggagctgaatgcatga

SEQ ID NO: 256236 - DNA, 258 bp, Klebsiella pneumoniae
atgaaccagtctattcagtttcctgacagggaagtgtgggatgaggcgcaccagtttatcgcttttccggtattagtaaacggtatgcagctaacctgcgccttaacgtcatcggtgctcaagacgcgttttggtggggaagaacctacacaatggctggccgcatttcgtgaacatcgctgggatctggaagatgaagctcaggttctgattctcgaccagcaggaagatgctcaaggttggatctggttttcctga

SEQ ID NO: 256237 - DNA, 555 bp, Klebsiella pneumoniae
atgaccaacagtttgcgtcgctataaagagttattcccgaaaacgggtcaacgggtaatgatcgacgccagtagcgtagtgatcggggacgtcagaatagctgatgatgtcagtatctggccgctggtcgcgattcgcggtgatgtgaattatgtagaaataggcgctcgaactaacatccaggacggtagtgtcttacatgttactcataagtcttcatcaaacccgcgaggcaatccacttatcattggcgatgatgtcactgtcggccacaaggtcatgctacacggctgcaccatcggtaaccgtgtgctggtcggcatgggttcgattctgttggatggcgtgattgtagaagacgatataatgattggcgcaggcagcctggtaccacagaataaacgccttgagagtggctacctttactttggcaaccctgtaaagcagatacgccccctgacggaggcggaaatcgccggactcatatattcagcgaataactatgtaaagtggaagggtgactacctgactcaggaaaaccagatccaaccttga

SEQ ID NO: 256238 - DNA, 1140 bp, Klebsiella pneumoniae
atgaaagtttggcctgtcaaacatagcccactactgcgccagcctgagcgctttatcgcccgcaatgaactgcaggcgctgattcagaaggtcacgcaaaatctggtcaacattaaagatgaaagcgggcaatttttactgcggctggacgacgggcgcatcattgatacgaaagggtggaacggctgggagtggactcacggcgtcggcctgtacggcatctggcagtattaccagcagaccggcgatatcgcgatgcgcgatattatcgatagctggtttgccgatcgctttgccgagggggcgaccaccaaaaacgtcaacaccatggcgccgtttctcaccctcgcttatcgctatgaagagacgggcaacgccgcgtatctgccctggctcgatagctgggccgagtgggcgatgaacgagatgccgcgcacggagtctggcggcatgcagcacatcacgctggcggaagaaaatcatcagcaaatgtgggacgacacgctgatgatgaccgttctgccgttggcgaaaattggtaagctgcttaatcgccccgaatacgtagaggaggcagtgtatcagtttctgctgcacgtgcagaatctgatggaccgcgagtccggtctgtggtttcacggttggaactacgaggggcgacataatttcgctcgcgcccgctgggcgcgcggcaatagctggctgacgatcgtgatcccggatttcctggagctggtggatttacccgaacacagcgcggtgcgacgttacctggtgcaggtgttggatacgcagattgcggcgctggcccgctgtcaggacgatagcggcctgtggcatacgctacttgatgaccctgactcctatctggaagcctcggcgaccgccggttttgcgtatgggatcctcaaggcggtacgcaagcgctacgtgagtcaggcgtatacggaggttgcggaaaaagcgattcgcggcattgtggcgaatatctctgcgcaaggggaactgctgcaaacgtccttcggtaccgggatggggtcggatctcgatttttatcgcgacatcccgctgacgtcgatgccgtatggccaggcgatggcgatcctgtgtctgacggagtatctgcggaagtatttttga

SEQ ID NO: 256239 - DNA, 1584 bp, Klebsiella pneumoniae
atgaaaacacgtaaaatcggtttggttaactaccttgcctatggatcgggcgattttcttggtgcgggaacaactgcactcacggcagcatggctgctctacttctacaccaccttttgcggactttcgcctatcgaggcgacgctcatttttgccactgccagagttctggatgcggtaatcagcccgctgatgggctttctgacggataactttggctcgacctggctgggaaaacgttttggcaggcgtaagttttttatcctgctcggcatcccttgcgtgtttagctactccattatgtgggtaggggatatggggttctggtactacctgctgacctatctgctgtttgacatcgtctataccatgattctggtgccgtatgaaacgctggtgccggaaatgaccgacgattttaaacagaaaaccaaattctccggcgcgcgtatttctatggcgcagatgtcggcgatcctggcttctttcctgccgggcattctgctgaccatcttcggcaaagacaacgccgtctctttcttctacgccagcctggtgttctcggtgctgtgcgcaatgatgttaacttttgtctggttctttacctgggagcgcccgcgtgaagagtggacggaggctgcgctgcgcgccgaagaggagaaacagaacctgagcttgtctcagagtcttaatcgcctgtttattgaattaagttcgaccctgcgcattaaaattttccgtcagcatttggggatgtatctggggggctatatcgcccaggatgtcttcaatgcggtctttacttactatgtggtgtttgtcctgatgcaggaagcctcaatggcctccaacctgctggggaccatggcgatcttccagtttattgcggttattgcgatgatcccgctgtgtattcgcttcggtccggcgccatcgtaccgcatggtggtagtgttgttcgggctgagttcgctctcttacgcggtgctgtactacgctggcctcagcgatgtttattcgctgctgctgctgatttccgcagtggcgggtctgggccgcggcggcatcaactatgttccgtggaacacctatacgtatattgccgacgtggacgaagtgatcactggccagcgtcgcgaaggcatcttcgccgggattatgactctgacgcgtaaggcttcccaggccggggcggtgatgctggtagggatcatcatgcagatgtccggctttgtctccgggcagaaaacgcagccttatgaagtgagccataccattctgctgatcctcagcgtcggcactttgctggtgctggcctgcggcttcctcgtttccctgcgctttaagctcaatctgcaaacccacagcgtcctgcgtgcggaaacgctcaaaatgcgtgaatccggacgcgctcagccggaactggccagcgcccaggatcgtgaagtagtcgagatgctggccgggatgccgtacgactccctgtggggaaacaacaatattggttatctgaatcgtaataaacccgccgcgccatcgctgaaacagcgttctgccatgaattcgacatataacagaggttaa

SEQ ID NO: 256240 - DNA, 429 bp, Klebsiella pneumoniae; identical to SEQ ID NO: 176107

SEQ ID NO: 256241 - DNA, 1425 bp, Klebsiella pneumoniae
atgagtcgcttagtcgtagtatctaatcgtattgctccgccggatgacaaaaaggccagcgccggtggccttgccgtggggattatgggggcattaaaagcagccggaggtttgtggttcggctggagtggggaaatcggtgacgaccaacagccgttaaaaaaagtgactcagggcaatatcacctgggcctctttcaatcttagcgagcaggatcacgacgaatattacaaccgcttttccaatgccgttttatggcccgcattccactatcgtcttgacctggttgattttcagcgtgaagcctgggagggctatcagcgcgttaatgcgaccctggcggataaactgctgccgctgattgaacctgacgatatcgtctggatccacgattatcacctgctgccgttggccagcgaactgcgccagcgcggcgtcaataatcgtatcggcttctttttgcatattccgttcccgacgccggaagtgtttaacgcgttaccgccgcatgcggaactgcttgaacagctttgcgattacgatttactgggtttccagaccgaaagcgaccgactggcgtttctggattgcgtatcgatgcaaacccgcctgacgacgcgcgacggcaaaaagcatgtggcctggggaaaacctttccagaccgaagtttatccgatcggtatcgatccggaagagattgcgcgcagtgctaaagggccgctgccgccgaagctggcgcagctgaagagcgagctcaaaagcgtccaaaatatcttttccgttgaacggctggactattcgaaagggctgccggagcgttttcttgcttatgaagccctgctggagaactatccgcagcatcacggcaagattcgctatacccagattgcgccgacttcacgcggggacgttcaggcctatcaggatattcgtcatcagctggaaaacgcagccggccgtatcaatggccagtatggccagctgggctggacgccgctttactaccttaaccagcactttgaacgcaagctgctgatgaaaatcttccgctactccgacgttggtctggttaccccgctgcgcgatggtatgaacctggtggcgaaagagtatgttgccgcgcaggacccgcaaaatccgggcgtgctggtgctgtcgcagtttgccggcgcggccaacgagctcccgacggccttaatcgttaatccttacgatcgcgatgaggtcgctgcggcgctggataaggcattaaccatgcctctggccgagcgtattgcccgccattcggccatgctggcggtgattaaggaaaacgatattcatcgctggcaggagcggtttattgccgatctaaaggagattgagccagggagcgaggagagccacttagagcgcaaggtcgccactttccctaaactcgcctga

SEQ ID NO: 256242 - DNA, 804 bp, Klebsiella pneumoniae
gtggctgaccagatttatgtaccgcctgcgttaaccggaaactacgcttttttctttgacctcgatggtacccttgccggtatcaaatcccatcccgatcaggtggtcatcccaaccgatgttctgcagtcgctgcgccagcttgtgcagcagcaaaacggcgcggtggcattgatttcagggcgctcaatggttgagctggatgagcttacccgtccttaccggctaccgcttgccggtgtccacggggctgaacgccgtgacatcaatggtaaaacgcatattgtctctttaccggattcacttctgaaggcgctctctgcgcagttgacgacggaactggatgctttgccgggatgcgaactggaaagtaaggggatggcttttgctttgcactatcgacaggcgccggagcagcagcaagcggtgctggcgctggcgcaatctatcgtccagcgccatcccattctggccctgcagccgggtaagtgcgtggtggagatcaaaccgcgtggagtgaataaaggtgaagcgatagccgcttttatgcaggaagctccattcaaaggacgcaagccggtgtttgttggtgatgacttaaccgatgaagctggttttagcgttgtgaatcaattgaatggcgtatcggtcaaagtgggcggcggcgaaacgcaagcgcgttggcgtttgcctgacgtgcccgccgttcatctttggattagtaacatcgcgaatcatgggcaacaaccagatgcgctaaccgacaggagagatggctatgagtcgcttagtcgtagtatctaa

SEQ ID NO: 256243 - DNA, 981 bp, Klebsiella pneumoniae
atgtcatcagttaccacttcaggtacttcccggtcggcttttagtttctcccgtatctgggatcagttcggcatgctggttgttttcgcggtgctgtttattggctgcgtaatttttgtgcccaattttgcctcgtttattaatatgaaaggtctggggttggctatttctatgtccggaatggtcgcctgtgggatgctgttttgcctggcgtccggcgatttcgatctgtcggtcgcctcggttatcgcctgcgctggcgtgaccacggcggtggtgattaatctgactgaaagcatgtgggttggcatcggcgccggtctgctgcttggcgcagtgagcggcctggtcaacggttttgtcattgcccgcttaaagattaatgctctgattaccaccctcgccacgatgcagatcgtccgcggtcttgcctatatcatctccgacggtaaagcggtagggattgaagatgagcgcttttttaccctcggctacgccaactggtttggtctgcctgcgcctatctggttaaccgttgcctgcctgattgtattcggtctgctgctgaataaaaccacctttggccgaaacacgctggcgatagggggtaatgaagaagcggctcgtctggccggcgtcccggttgtgcggacaaaaattattattttcgtcctttcagggctggtttccgcggcggcgggcattatcctggcatcccgtatgaccagtggtcagccgatgacgtccattggctatgagctgattgtcatttcggcctgcgtgctcgggggcgtatcgctgaagggcgggatcggcaagatctcctacgtggtagccgggatcctgattctgggaacggtggagaatgcgatgaacctgctgaacatttcgccgttctcgcagtacgttgtgcgcggcgtgattttgctggctgcggtgatcttcgaccgctataaacagaaagcgaagcgtgcggtttaa

SEQ ID NO: 256244 - DNA, 1515 bp, Klebsiella pneumoniae
atgcaacagtctaccccttatctctcattccacggcatcaccatgacattcccgggcgttaaagcgctgtccgatattagctttgactgctatgccggacaggtccacgccctgatgggagaaaacggcgccgggaaatccacgttgctcaaaatcctcagcggcaactacgtacccactgccggcagcctacagatccaaggccagcagatgacctttacccacaccaccgaggcgctgaacgccggggtggcgattatctatcaggagctgcatctgatcccggaaatgaccgtggcggaaaatatctacctcggccaattgccgcacaagggcgggattgtgaatcggtcgctgctgaattatgaagccggcctgcagctgcagcatctggggctggatatcgacccggaaacgccgttgaagtatttgtcgattggccagtggcagatggtggagatcgccaaggcgctggcgcggaacgccaaaatcatcgcttttgacgagcccaccagctcactgtcggccagggaaatcgacaatctgtttcgggtcatccgcgagctgcgccaggaagggcgggtgatcatttacgtttcccaccggatggaagagatctttgcgttaagtgacgccatcacggtcttcaaagatggtcgctacgtgcgcacctttgacaatatgcaagaggttaaccacgacgctctggtacaggcgatggtcggtcgcgagctgggcgatatctacggctggcagccccgtgaatatggcaaagagcgtttgcgcctcgatcgggtgaaggcgcctggcgtacggcaactcgttagcctttcggtgcgtagcggagaaatcgtcggcctgtttgggctggttggcgccggacgcagcgaactgatgaaaggcctgttcggcggcagcagaataaccgccggtcaggtttatatcgacggcgaggccattgatatccgcaagccggctcaggcgattcaggccgggatgatgctctgcccggaagaccgcaaagcagaggggattattccggttcactcggttcgcgacaacatcaatatcagcgcccgccgcaagcacattctcgcgggctgcgtcatcaataatgcctgggaagcgcagaacgccgaccagcatattaaatcgttgaatatcaaaacgcccggcgcagagcagctgattatgaatctctccggtggcaatcagcaaaaggcgattctcggccgctggctgtcggaggaaatgaaagtcatcctgcttgacgagcccacgcgcggcattgatgttggcgctaagcatgagatctataacgttatttacgcattagcggcatcgggcgtcgcggtggtctttgcctccagcgatttaccggaagttctcggcgtagccgatcgcatcgtggtgatgcgcgagggtgagattgccggagagctgctgcatgaacatgccaatgaacagcaggcattgagccttgccatgccaaaagtgagccaggcagtcgcctga

SEQ ID NO: 256245 - DNA, 981 bp, Klebsiella pneumoniae
atgcacaaatttactaaagcgctggcggcgatcggtctcgccgcagttatgtcacaatcagctatggccgagacgcttaagctgggttttctggtcaaacagcctgaagagccatggtttcaaacagagtggaaatttgccgataaggccggtaaaaatttaggtttcgacgtcatcaaaattgccgtccccgacggtgagaaaacccttaacgccattgatagcctggcggctagcggagccaaaggctttgttatctgtacgcccgatcccaaactcggggcggccatagtcgccaaagcgcgcggctatgatatgaaagtcattaccgtcgatgaccagttcgttaacgccaaaggcaaaccgatggagagcgtaccgctggtgatgatggcggccagtgagatcggcgcacgtcaagggcaggagctctataaagagatgcaaaaacgcggctgggacgtgaaggataccgccgtcatggccatcacttccgacgagctggacaccgcccgtcgtcgcactagcggatcgatggacgccctgaaagctgccggtttcccggagcaacaaatctaccgtgtgccaacgaaatctaacgacattcccggcgcttttgatgccggtaactctatgctggttcagcatccgaacgtcaaacactggctgatcgtcggcatgaacgacaataccgttctgggcggcgtacgcgccaccgaaggccagggctttaaagcgcctgacgttatcggtatcggtattaatggcgttgatgcagtgaacgaactctctaaagcgcaggccaccggtttctacggctctctgctgccaagcccggatattcacggctataaaaccagcgagatgctttataactgggtgacaaaagatgtcgaaccgccaaaattcaccgcggtgaccgacgtggtgctgattacccgcgacaattttaaagaagagctggctaaaaaagggctgtaa

SEQ ID NO: 256246 - DNA, 150 bp, Klebsiella pneumoniae
atgaacctggttatcgcgtccgccgtcgacgccgatcgctttaccgcccagtttctcaacctcttcgctggcgcctttataggcttcgcgatcccagaagtgctgcgtgccgacgacggcaataccgatggtttttccctgaagcgataa

SEQ ID NO: 256247 - DNA, 2310 bp, Klebsiella pneumoniae
atgagaaaacaacataatctgaccgtaatgcactggggaacctggcgggtacaggccggtgacggcaaaattgaggcggtgacgccggtgccctgggataaaaatccctcgcgcattggtcagtcgctccctgatgcggtcaccagcaagacgcgcattcgccgtccggcggtgcgcgccggctacctgcaaaatggcccggcttcccgcgacgggcgcggtaaagagccgtttgttgaggtgagctgggaagtggcgctcgatctgctggctcgcgagctgcagtcggtcaaagcgcgctgcggcaatgaggcgattttcggcggttcctatggctgggccagcgctggccgttttcaccacgcgcaaagccagctgcaccgtttcctcaaatgttttggcggctataccgccagcaccaatacctacagcagcgcggcgggggagcgtatcctgccgcatattctcgggccgctgagcccgctgcaccgtcagcatacccatttttccgagctggcgcgggagtgccagctgttcgtcgcattcggcggcctgccgctgcgtaatgcgcaggtcaacggcggcggcgccaacgaccatatgctgaaatactggctggaaaagatgcaggcgcaggggacacgctttatcaatattagcccggtgcgcaacgatctgagcgccgtggagagcgccgagtggctcgccgtccgtcccggaaccgataccgcgctgctgctggcgctgtgctacgtgctgattaatgaatccctctacgacagtggttttatcgccagccataccgtaggtttcgcaccttatcgcgcctacctgatgggggagagcgatggcgtcgcaaaaacgccggagtgggcggcggcgataaccggtattgacgcgcagcggattgtcgcgctggcgcgtgagatggccagccagcgtacgatggtcaatatctcctggtcgattcagcgggcgcgccagggcgagcaggcctactgggcgacggtggcgctcaccgcgctgctggggcaaatcggtacgccgggcggcgggctgggatttggctatgcctgcactaatctggcgggggcggggcgtaaggccttttccgggccgcgccttcccgccggagagaacgcggtgaaccaggtgattccggtggcgcgcctctccgacatgctgctgcatccgggcgaagcgtacgagtttgacggccagcatctgcgctatcccgacatccgcctcgtctactgggccggcggcaacgcgtttcatcatcatcaggatattaaccgcctgtgcgaagcctggcggcgaccagaaacggtggtggtgcacgaacagtactggaccgcgcaggctaaattttccgatatcgtcctgccggtcaccacgtcgctggagcgggaagatattggcagcggcggtcacgacggttttatgatcgccatgagcgcacagatcccgccggtgggcgacgcgcgtgatgattacgccatcttttgcgatcttgccgaacggctgggctgcagcgaacgttttagcgaggggcgcgatgccgggcagtggctgcgggagatttacgaagcctcgcgaccgcgcgcgcaggaagaggggattacgctgccgtcatttgaggcgttctggcagcagggagtgctggagtacagcacgcctgagcaaccgcaggtttttctggcggattttcgcgccgacccgcagcgctatccgctgtctacgccttccggcaagattgagctcttttctgaaaccattgccggctttggctatcgcgagtgcccgggccatccgtggtgggatgagcaggaagcggcctggcagcggcaggaagctgcgcgctggccgctgcatctgctctccagccagccgcgcacccgcctgcacagccagtacgatcacggaagcgtcagccgggcgacgaaaattcagggacgcgagccgctgtggatgcatccgcaggatgcacaggcgcgggacatcagcgaaggcagcgtggtcaaggtctttaacacgcgcggagcgattctcgccggcgtgcatctcagcgagcagattttgccgggagtggtgcagatgtcgaccggggcctggtacgatccgctggacccgaatgaaaaagactcgctggataagcacggcaatcccaacgtgttaaccgaggatcgcggcagctcgcgcctggggcagggctgtagcgctcaaagctgctgggtggagatcgaaccgtggcgggacgcgctgccgccggtgaccgctttcgatccgccgaggtttattgagggttag

SEQ ID NO: 256248 - DNA, 543 bp, Klebsiella pneumoniae
atgagcgcattaaccatattttccgtaaacgacccgcaaaactctctctggcacagtactaacgccgaagagatccagcagcagctcaatgctaaaggcgtgcgttttgagcgctggcaggccgaccgcgatttaggcgcggcgccaacgtcagaagcggtcattgccgcctatcagcacgcgattgataagctggttgcagaaaagggctatcagagctgggatgtgattagcctgcgcgccgataatccgcagaaagaggcgctgcgggagaagtttctcaatgagcatacccacggagaagacgaagtgcgtttcttcgtcgagggcgccggtctgttttgcctgcatattggcgacgaggtgttccaggttctgtgtgaaaagaacgacctgatttcggtcccggcgcacacgccgcactggtttgatatgggctcggaacccaacttcaccgccatccgtatcttcgataatccggaaggctggattgcccggtttaccggcgacgatattgccagcgcctacccgcggctggcgtaa

SEQ ID NO: 256249 - DNA, 690 bp, Klebsiella pneumoniae
atgatccgcgctatcgtgaccgatattgaaggcaccaccagcgacatacgcttcgtccacaacgtcctgttcccgtacgcccgcgaacgtctggccggttttgtgaccgctcagcagtttggcgagccggtcaagaccattctcgataacctgcgccaggagatcgcccagccggcggctggcgccgaacagcttattgctaccctgttcacgtttatggatgaagaccgcaaatccaccgccctcaaggcgctccaggggattatctggcgcgaaggctacgtcaacggcgacttcaccggccatctctatccggacgttttgccggcactggaaaaatggaagtcacagggtattgatttatatgtatattcctcaggctctgtcgctgcgcagaaattgttatttggctacagcgatgaaggtgatattactcatctgttcaacggctattttgacaccctggtaggggccaagcgtgaagtacagtcctaccgcaatattgctgaacaactggggcagcctcctgccaccatcctgtttttgtccgatatccatcaggagctggatgccgctgaagaggccggtttccgtaccctgcagctggtacgcggcgaccgcgacccggccagccatcatccgcaggttcagcgtttcgacgatattcacccggagcagatcccagcatga

SEQ ID NO: 256250 - DNA, 1161 bp, Klebsiella pneumoniae
atgagcaataagccactgattcctgagagtaaactcccttcactgggcaccactatctttagccagatgagcgccctggcccagcagcatcaggcgattaatctgtcgcagggttttccggatttcgatggcccgcgctatctgcaggagcgtctggcgtatcacgtcgcgcagggggccaatcagtacgcgccgatgaccggcgtcgccgcgctacgcgaagcgattgtcaataaaaccgaagagctgtacggctatcgccccgatgccaatagcgacgtaaccgtcaccgccggggcgacggaagcgctgtatgcggcgattaccgcgctggtccgttccggcgacgaagtcatttgctttgaccccagctacgatagctacgccccggcggttgagctgtcgggcggcgtgctgaagcgcattgctctgcagccgcctcattttcgcgttgactggcagcagttcgccgctaccctcagcgacaaaactcgtctggttattctcaatacgccgcacaacccgtcagcgacggtgtggcagcgtgaagattttgccgcgctgtggcaggcgattgccgatcgcgaaatctacgtacttagcgatgaagtttatgaacatatctgctttgctgccgaagggcatgccagcgtgctggcgcatccgcagctgcgcgagcgcgcggtggcggtctcttcattcggtaaaacgtttcatatgaccggctggaaggtggggtactgcgtggcgcctgccgctatcagcgccgagctgcgtaaagtgcatcagtatctgaccttcgccgtcaacacacccgctcagctggcgatcgccgatatgctgcgcagcgagccggagcattatcgccagttgccgacgttttaccgcgagcgtcgggacctgtttattgatgcgctgcgttccagccgtctggaaattttgccctgcgaagggacttacttcctgctggcggactacagcgcagtctccgatctggatgatgtcaacttctgccgctggctcaccaccgagatcggcgtcgcggcgatcccgctgtcggtgttttgtgccgatccgttcccgcataagctgatacgcctgtgcttcgccaaacagccagccacgctgctggctgctgcggaacgcctgtgccgtctgtag

SEQ ID NO: 256251 - DNA, 630 bp, Klebsiella pneumoniae
atgcaacgacaattaatccaggaaatagaacgctatctgcaatcgctggaaaatgaagaagaaaagattactgcgcttaacgcctttcgccagattctgcatgaatatagccccttcaaatcccaaccggttgattgcgtactgtgggtaaaacaggaagccgtttcgcctaatgattacaacccaaataaccttgcgccaccggaaaaacgcctgctgttcacctcgctggagacggatggcttcacccagcctatcgtagtgttgaaacaggggcgggagcactattcgattgtcgatggttttcatcgtcatgaactggccaacggcaaggcggcgctgaaaaaacggctgaaaggctatctccccgtcacctgtctggaaaggagcagcgccaggcgtgattcactgatggccgccaccatccgccataaccgggcgcgcgggcgtcaccagattcatgcgatgtcggaaatcgttcaggaactggcgcgtctcggctggaccgatgagaaaatcggcaaagagttagggatggacgccgacgaagtattacgcctgaagcaaatcaacggtctggtagagatgttcggcgaccgtcaattttctcaggcgtggaccgttaaataa

SEQ ID NO: 256252 - DNA, 1155 bp, Klebsiella pneumoniae
atggaaaacttctcccgcgtttgcgtctctttttctggcggtaaagattcaacaaccatgctgcatctcacggcgcagcatgcccgccaggcaggtaaaaagatttgcgtcctgtttattgactgggaagcgcagttctcctgcaccattgctcattgtgaaaagatgcgcgaggagtatcgcgacgttatcgagcaatttttctgggtggcgctacctctcaccacccagaactcgctaacccagttcacgccggagtggcagtgctgggaacccggcgccccctgggtgcgccagccgccggaggatgccatcaccgatcccgactatttcccgttttatcaacctggaatgagttttgaaaccttcgtccgcgaattcgccgattggttctcgcaaaatcgtccggctgcggtaatggtcggcatccgcgccgatgagtcgcttaaccggtttatcaccatctcctcgcagcgcaaactgcgctttgccgacgacaaaccctggaccacgtcggcgccgggcggacacgcctggtatatctatcccatctatgactggaaaaccgccgatatctggacctggttcggcaaaagcggtctttcctataacccgctctataacctgatgtatcaggcgggggtaccgctgcgttatatgcgcatctgcgaaccctttggcccggagcagcgccagggtctgtggctctaccacgtcctggagcctgaacgctgggccgccatgtgccagcgcgtcagcggcgttcactgcggcggggtttacgccggtcacgacaatcagttctacggccatcgaaagctggataaacccgaacatcatacgtggaaaagctacgccctatttttactcgacagcatgccggagaaaacggcagagcattaccgcaataaaatcgccgtctatctccactggtatcaaaaaaagggcatgctggatattccggacacccagccggcggatattggctccaaagacgtcccgtcctggcggcgcatctgtaaagtgctgttaaacaatgattactggtgccgccagctctctttcagcccaaccaaagcgactcaatataaacgctatcgcgagcggatgaataaaaagcgccagcaatggggaatactatgcaacgacaattaa

SEQ ID NO: 256253 - DNA, 912 bp, Klebsiella pneumoniae
atggctaatctttacgatctcaagaagttcgatctgaacctactcgttattttcgaatgtatttaccagcatttaagtatcagtaaggctgcagaaacgctatttattacgccgtctgcggtaagccagtcgcttcagcggctacgcaaccagctcaacgatccgctattcgtgcgttcagggaaagggattaccccaaccaccgtcggcgttaatttgcatcaccacctggaaaataaccttaatcagttagaacaaaccatcaatctcaccaatcgttctgaattaaggaagcgcctcgttgtttatgcgccgcagctttttataacgcccaaaaccaccagcctgattcatatgttattagatgattcaaatctgcaggttgaacatcatgatctgctcgcttcaggtgaatcgatagagagtttgttatcctaccggaaggccgatctgatatttagcaccacggcgctgtcatcacgagcgaccgtctgtaaacgcattcaggagctggacatttcattagtgtgtaatgaaaaccatccgcgactggcgtcgctaacgacgacaaaagccatcatgcaggaacgcttcacctattatatttgtaacgatcagggaacaaaatcctttcaaagccaaaccgcaggtatgctttctgacagaaaaatctctttcagcagcgattcatacatagctattcttaatgttattcaacaaactgatataattggtttcgttccgacatgtattttagaacatattagtttccagaataaatttaaaatcattgaaacgcctttcaaaatcccgaccattaatatttatatgatttacaatcgcgtgaaccttgatgaccccaactttgcgaactttatcgatgagtgcgaaaaaaataacattattgaatag

SEQ ID NO: 256254 - DNA, 747 bp, Klebsiella pneumoniae
atgttaaaacgactgttctttctgagcttattacctttttactgctctgcagatgagcttcccgcccccgtaaaagcgattgaaaaacagggaattaccattattaaacccttcgaggcacccggtgggatgaaaggctggttagggaagtatcaggatatgggcgtcgccatctacctcacgccggacggcaaacacgccatctcgggctatatgtacgacgaaagcggtactaatcttagcgaacaactcttccagcaagagctctatacccccgcgggccaggagatgtggaaaaagctggaaagcgctcgctggctgcttgacggtaacgaaaacgcgccgacgattctgtacgtttttgccgatcccttctgcccctactgccaacagttctggcaacaggctcgtccgtgggtagaatcagggaaagttcagctgcgcaccctgctggttggcgtcataaaaccggaaagtcccgcagccgcggcggccatcctggccagcaaagacccggcgaaaacctggcatcactatgagcagtctggtggcaaagcagcgctaaatattcccaccagtattcagccagagcaaatgaagatacttaatttcaaccaacagctgatggacgaactcggcgccagcgtcacccctgctatttattacatgaataaagaaaatatgctgcaacaagcgatcgggcttccagataaagaaaaactacagattatgatgggggcaagataa

SEQ ID NO: 256255 - DNA, 243 bp, Klebsiella pneumoniae
gtgccacgctttgtgggtgaagtgggtgtcggtagagacggagtaaacgtctacgcccagcttctgcagttcttcataatgatctgccacgtcgcccagttcagtcgggcaaacgaaggtgaagtcagccgggtagaagaagaagacgctccagcggccttcagtatctttctcggttacttcgatgaattcaccgtttttgaatgcctggtttttaaaaggtttgattttggtattaattaa

SEQ ID NO: 256256 - DNA, 315 bp, Klebsiella pneumoniae
atgaaatggttcaaagcaataaccgcgttttgcgcgacgctgctggtggccgtatcgctggtgggctgtgccggttcgtccacaaaggagagtaccggtggttacattgacgataccgtcattacgactaaagtaaaaaccgcgctcttcaatgacaaagagataaagtcttcagaaattagcgtccagacctttaaaggtcgcgtacagctcagcggctttgtctcatccgcagacagcgctaaacgtgcggtcgaagtcacgagaaaagtgcagggcgttcgcgtggttgagaacgatttaagaatcaaataa

SEQ ID NO: 256257 - DNA, 567 bp, Klebsiella pneumoniae
atgtacgaacgttatgcaggactgatttttgatatggatggcacgatcctcgataccgagccgacgcatcgtaaggcatgggacgaggttctgggacgttacggcatgcgtttcgatatgcaggccatggtcgcgcttaacggatctccaacctggcggattgctcaggccattatcgaattaaatcaggctgatttagatcctcatcttctggcgcaggaaaaaactgccgctgtgaaagcgatgctgcttgatagcgtccgtcctttaccgctaattgaggtggtcaaagagtggcacggtcgtcgtccgatgtcagtcggtaccggcagcgagagcgccgttgctgaagcgctgctggctcatctgggtctgcgtcactacttctcggcggtagttgccgcggatcatgtcgccaaccataaacccgcacctgatactttcttactttgcgcagagcgcatgggcgttgcggcggagaagtgcgtggtctttgaagatgcggacttcgggctgcaggcggcgaagcgcgccggaatggatgccgtggacgtgcgattgctgtga

SEQ ID NO: 256258 - DNA, 429 bp, Klebsiella pneumoniae; identical to SEQ ID NO: 173603

SEQ ID NO: 256259 - DNA, 1557 bp, Klebsiella pneumoniae
ttgatcccggacgtatcacaggcgctggcctggctggaaaaaaatccgcaggcgctgcagggtattcaacgcggtctggagcgcgaaacgctgcgcgtcaacgctgatggcacgctggccactaccggccatccggaagcactgggttcagcgctgactcataaatggattaccaccgattttgccgaagctttgctggagtttattacgccggttgatggcgatattcagcatatgctcaccttcatgcgcgatgttcatcgctataccgcgcgccatattggcgacgagcggatgtggccgctgagcatgccgtgctatatcgcgcccggccaggatattgagctggcgcagtacggcagctcaaatatcggccgtctgaaaacgctgtatcgcgaaggattgaagaatcgctacggcgcgcttatgcaaacgatctccggcgtgcactataacttctctctgccgatggctttctggcaggccaggtgcggcgtcgaggatgctgaaagcgggaaagaggccatttctgccggctatttccgatctattcgcaactactatcgttttgggtgggtcatcccgtacctgttcggcgcttccccggctatttgttcgtcgttcctgcaagggaagccgaccacgctgccgtttgagaaagccggcaacggcatgtactacctgccttatgcgacctcattgcgcctgagcgacctcggctataccaataagtcgcaaagcaatctcggaattacgtttaacgatctgcatgagtatgtggcaggattgaagcgggcgattaaaacgccatccgaagagtacgagaatatcgggctggagaaagacggcaagcgtctgcaaattaacagcaacgtgctacagatcgaaaacgagctgtacgcgccgattcggccgaaacgcgtgacccgcagcggtgaaacgccttccgacgcgctgctgcgcggcggcattgaatatatcgaagtccgctccctggatatcaacccgttctcgccgattggcgttgacgaacagcaggtacgtttcctcgatctatttatggtctggtgcgtgctggccgatgcgccggaaatgagcagcgacgagctgctgtgcacgcgcactaactggaatcgggtgattctggaaggccgcaagccgggcctgacgttgggtattggctgcgaaaccgctcagtacccgctggctcaggtcggcaaagatctgttccgcgatttacgccgcgtggcgcaaacgctggatagcatccacggatgccaggcttatcagcaggcctgcgatgagctggtcgcctgttttgacaacccggaattaaccttctcggcgcgcgttctgcgttctatgcttgaagaggggattggcggtaccggcagagagctggccgatcggtatcggacgttgctgcgcgaagagccgctggaaattttaagcgaagcggattttgctgccgaacgcgaagcgtcggtacagcgtcagaagaaggtggaagcggcggacagcgagtcgtttgaagcgctactggcgaggcatgcgtag

SEQ ID NO: 256260 - DNA, 516 bp, Klebsiella pneumoniae
atgccgttgttagatagtttcacagtcgaccatacccgaatggaagcgcctgcggtgcgcgtggcgaagaaaatgaacacgcctcacggcgatgaaatcaccgttttcgatctgcgattctgcgtaccaaaccaggaagtgatgccggaaagaggtattcacacccttgagcacctgtttgccggctttatgcgcgatcacctgaacggcaatggtgtggaaattatcgacatctctccgatgggctgccgtaccgggttctatatgagcctgatcggtacgccggacgagcagcgcgtcgcggatgcctggaaagcggcgatggccgacgtgctgaaggtgaaagatcagaaccagatcccggagctgaacgtttaccagtgcggaacctacaccatgcactcgctggaagaagcccaggaaatcgctcgccatatcattgagcgtgatgtccgcgtcaatagcaacgacgagctggcgctgccgaaagaaaaactgcaagagctgcacatctag

SEQ ID NO: 256261 - DNA, 768 bp, Klebsiella pneumoniae
atgtcgacgactttaaccctcaactttcagcatcgctcactggtgccttttgcccatgattatgcccatggcgatagcgaaccctggcatcagcacgattgcgctcagctgttacatatcctcagcggcgtagtacgggtggaaaccgcgcagggttattgggttgtgccgccggggcgaggcgtctggctgcccgccggtacgccgcatacgctacggattaccggcgcggcggctgcgcgaaccctgtttatcgatccccttgcccgcgccgatctcccttcaacctgccagatagtacagatcactccgctgctgcgtgaactgattgtcgcgtcgctgacgctggcggaatcttacgcgccgggcagccgcgatgaacgaatctacgaactgatcctcgatgagattcgcggtatggcggtgctgccgtttggcctgccggagccgcaaagcgaagcgctgcgccgtttatgccagaaggtacgagaagcgccaggagagccgtggggcagcgccgcggcggcgaaagagagcagcatgagcgagcgcacgctgaatcgccattttcagcagcagaccacgctcacctggagcgagtgggtgcgccgggcgaagctgatggaagcgctggttcgcctggcgcaggggcattcggtactgcgggtggcgctggatctcggctacggcagccacagcgcttttagcgccatgtttcgccgggtgttaggcgtgacccccagcgattacttccgctcgccggagtga

SEQ ID NO: 256262 - DNA, 1677 bp, Klebsiella pneumoniae
atgctgactcaacccggtgaaaaataccgcccctatccgccgatcgccctgcctgaccgccgctggccagagcagcaaataacccgcgccccgcgctggctctctaccgatctgcgcgacggcaaccaggcgctggccgagccgatggatagcgcgcgcaagctgcagttctgggatttactgctggagtgtggttttaaagagattgaggtcgcctttccctccgcctcacaaaccgacttcaactttgtacgtcaactgattgaagagcagcgcattccgcaggatgtgacgattcaggtactgacccaggcgcgggaggatttgatcctgcgtacgtttgccgctctgcgcgatgcccaccgcgctaccgtacacctctataacgccaccgcgccgctgtttcgcgagctggtttttggaatggacaaagcgcaggtgatcgacctggcgacccgcgcgacccggcttatccgtcagcagtgcgagcagcagccgctgacccgctggcaatacgagtactctccggaaaccttttgcttcaccgagccggaattcgcactggagatttgcgaggcggtggcggaaatctggcagccctgcgccgaacggccgatgattatcaatctgcccgcgacggtagaagtgagcacgcccaacgtatatgccgatcaaattgagcatttttgccgtcacttttcgcgccgtgccgatgtgtgcatcagcgtccatccgcataacgatcggggtaccggcgttgccagcgcggagctggcggtgatggcaggcgccgaccgcatcgaaggctgcctgttcggcaacggcgagcgcaccggtaacgtctgcctggtgacgctggcgatgaatctctacagccagggcgtcgatccccggctcaaattctccgggatgaagcgggtggtcgaaatcgtcgaaagctgcaatcagatcccggttcatccgcgccatccctgggcgggcagtctggcctacaccgccttttccggctcgcatcaggatgccattaaaaagggattcgatgcccgccggcccggcgaacgctgggaaatgccctacctgcctatcgatccgcaggatatcggctgcagctacgaggcggtgatccgcgttaacagccagtccggcaaaagcgggagcgcatggctgattgaacagaatcatggcctcaagcttccgcgtgcgctgcagcaggattttagcctgcacgtccagcacgaaaccgacgctcacgggaaagagatgacccagaatgcgctatggcagctgtttcgcgcgcgctacggactgctcccccagccgccgcttgcgctgctggattaccaaagcgatagccagcaggacggccagctttctctgcaggctaccctgcgcatcaccggtgaaacgcgacgactgcagagccgcggcaacggcctgctgtccgccgccgccgccgggcttagcgtcctgttaaggcaaaacttcgtgattaaagattatcatgagcacaccctgggtgaacgcagcgacagccgttcagtggcctatattcgctgcatcttcccgaatggcgagagccgttggggggtcggaattgataacgatgtggcgcgcgcctcgctgcaggcgctgtgcaacgcgatgagcgaaaaccatcactccggcgagcggaagtaa

SEQ ID NO: 256263 - DNA, 432 bp, Klebsiella pneumoniae
atgcatatgcagggaaaactgctggaaaaccgtaacaagatgctgaaagcgcaagggattaacgagacattgtttatggcgctgatcacgcttgagtctcaggaaaaccacagcattcagccttccgagctgagctgcgcgctgggctcttcgcgaaccaacgccacgcgcattgccgacgagctggaaaaacgcggctggatcgagcgccgcgaaagcgataacgatcgtcgctgcctgcatctacagcttaccgaaaaagggcatcagttcctgcgcgaagtcttaccgccgcagcacaactgcctgcatcagctctggtcctctttaagcaccagcgaaaaggatcagcttgagcacatcacccgtaagctgcttggtcgccttgaccaaatggaagaggatggcgtgcttgcggagtctctgcgctaa

SEQ ID NO: 256264 - DNA, 540 bp, Klebsiella pneumoniae
atgaaaatgaatgcaataactctggctaaaatagtcgccttctcggcgggctgctcactggtgacaatggcgcaggcggataacaccattacttttaccggcacggtctctgatactacctgtacagccactatcgataacggcgtctcatccattgagatggggacctcctccgtcgcggatctgaaggcgaatacctatggcgcggctaagagtttttctttcaccctgaccggttgcccgaaagtggctgatggcggtaacgctaaggccagagtcacctttggcggtgaagccgatgaaactaacagcgattactttaagaaccaggcttccgcatcgcctgcgacgggcgttgccgtggctatttttgataaccagggtgcgctgcttaaaaataatactgaaggcgccgatgtggatatttcctccggcgctgcgaccattcctttcaccgtaaaaatggcgaaagcaggcagtgctgaaccgactaaaggcgccgttcagacaacggtaacctacaacgttacgtactattaa

SEQ ID NO: 256265 - DNA, 687 bp, Klebsiella pneumoniae
atgaacagattattctactttatttgtttttatttgtgtgcgtttgcggcgcaggcaagcgtagtcgtgggcggcacgcgggtgatattcgatggcacacaaaagtcgacgacggtatctgttcaaaataaggataatgtgaccaatatcgttcagtcctggatctccgttgtcgatgcggcctcgccagcgaaagattcattcatcacaacgcctccgctatttcgcctgaaatccggagagcaaggatttgtacgcattctacgttcgggtaaacctttagcggaggatcgggaatccatgttctggttgaatattaaagggattcccgccatggagaacgcaccggacaaaaatatggttcagtttgcgattaattccaggataaagcttatttttcgacccgccgcattgaaaagcgccataccagaaaattttgctgaaaagctgcagtggtctgctgaagggcgagatataaaagtgaaaaatgtttctcctctatatatgaatttctctgaagttttggttaacggcaaagcagtacctgaagcgtggtttgttgcccccttttcaacaataaaaataccggtagcaaatgcctcttctgcgggcaaaaagaaaatcacatggagcgtgatcaatgattatggaatgcctggaccgaaatataccgccatcattcaataa

SEQ ID NO: 256266 - DNA, 2592 bp, Klebsiella pneumoniae
atgattatggaatgcctggaccgaaatataccgccatcattcaataacgttggaaagagttatacctttttattgaccagcggctatgccgccctcattttcagctttgccacaatacctctcccggcgatggcaggtgagtacttcaatccccacctgctggaggtaaacgaaaccggtacctccgccgttgacttaacctatatttctgaagagaccattccgccaggtgactacaacctggatgtctatattaaccatacgtttgtggcttctgagtccgtcatttttacgcgacaggatcaaaataacgccgcttcatcccggccatgtctttccgtcgcgcgcctgaaagagtggtcgataaaaaccgaagattatcctgagcttaccgtggcgggttcggagtgcgcaaaactgtctgcgatccccggatgggagacggcggtacagctctcgcaacagcgaatcgactttaccttaccccaggtggctttagtgcaccgtccgcgggggtatgtcccggaaagccgatggcagcagggcattaccgccgggctattgaattacaacatttccgggcaaaaaaccgatccgcgagatggaggcgtttccacctccagccagtttgtcagcctgcagccgggattgaacgttgggccgtggcgtttacgtaattacagcaccctcaatcataatgacgatggcagccagtgggactccgtctatagctatatttcacgcgatatccacgccctgaaaggtcagctgatagtggggcaaacctatacttcttcggcggtgtttgacagcatcagcttcaccggcctgcagctgaactctgataaagagatgctcccggacagcctgaacggcttcgcaccggtcataaaaggtatcgcgcgctcgaccgcagacgtgacggtttatcaaaacggatacagcatatataaaacaacggtctctcccggcgcctttgagataaacgatctttatcccacgggaagcgcgggcgatctctacgtgacggtgaaagaatcagacggtagtgagcagagctttgtggtgccgtttgcttcactggcaatattacaacgtgaagggcaggttgattacgctttcagcggcggcaagacgcgctcgggaagcgcgggcggaaaggagtatcagtttctacaatccaacgttgcctggggagcgttgagcaacgtcacgctgtacggcggctttcagcaattagaggataaatacagtaatctcctgctgggggccgggtttaatttgggttcagtcggggcgctctcttttgatgcttctcagtcctgggctgacataaaagaaaattcctcatcggataacgcctcatccagcgaagggcagtcataccgcgtgcgctttagtaaagattttccacagacggggacaaacttttccgttgccgggtaccgttactcaacgcatggttattattctctgcagaactttatcgatcgggcggactctcatcgcgcctgctgttcgtcatccggtcggactaaagaccgctttgacgcttcagcgtcgcagattttctccggattcggttcactctccctttcgctggtcagtgagtcttactgggataactcgcggatggagtcgctgggcgtgagttatagcaatacgtttggccggatgtcctacttcattaactacgcctataaccgcaatgtgcagagcagcggccagaatgaaaatagctcgccttccagcgacagcattatttcgctaaccgtgagtattcctttcggcgccgatatatcagccagctacaacatgaacagcagccgggtgggagacaccactcacagtcttggtttaaatggctccgctttcgccgatcgttctctgaactggaacgtgcaggagggatataacgccagcgataaaagcacctcagggaacatcaacctcaactaccagggctcaaaaggtgaagtcaccgccggatacggttatgacagcaacagcgcccactataattattcgctacgcggtgggatgctcgcccattccggcgggatcacgctgtcacgctatctgggcgagagcgttgcgctgattgaagcgcctggcgtcagggatatcgcggtacgcgggcagactaacgtcatgaccgattctgccgggtatgctgtagtgcctttcgttcgcccttatcatgaaaacaatctctcccttgatgaacagcaggtctcgggagcggaaatagataatatcgtcagaacggtggtcccgacgcgcaatgcgatcgtaaaagttaaatatgatacctggattggctataaggccatgatgaccttgcaatttcatcataaagatgtgccgtttggcgcggtgattacgctagaggatgaaagtcaggagtataaacaaaaacgcagcgctattgttggcgattccgggcaggcctatttgaccgggctgccagaaaaaggccgtttatatgtgaagtggggcgatagccaaaatacccagtgctctgttaactacgatttatccgccaataaatcggttgatgatatcgttttttatgcagcggattgccgatga

SEQ ID NO: 256267 - DNA, 570 bp, Klebsiella pneumoniae
atgagcatcaataatatcaggcgattggcaatatatgcaggatggttgagcctcaccagcacctttatttttttgtacagtatgatgccggcccgggcctacgaagcgaatagtaccgtcaatttaaatattaccggtaatattgaagagcccgtctgcgaggtgtcggttaagccttccagtgcaatcgatctgggaaccgtctcttaccaacgtctgaccgggaagccgggctcgagcagcgatagcactgcgctttcccttgtgtttgataactgttcaactggcacttcttccgtaacgattactttcagcggtttatcttttgataatacttttaaatcgatttatgtgaatgaaattatctatggtgccaaagaggttgggctacagcttttgagcgcccaggatcagcaatcgttggggccgaacgatcggtacacctatgtattcaacgatagtgctgatgggaatgtttttaatatgctcgccagaatgtatacacctactggaagggtggcagccggtaaagtcgcctttaccgtcacctttaacgtgtcatataagtga

SEQ ID NO: 256268 - DNA, 1098 bp, Klebsiella pneumoniae
atgaaaaaatatattttattattgctggcctgtctcgctccgatctatagctgggcgtgtgagacaggaacgaattatggcgatgtttcaatggctaatttgcccgcgaaaatattgattaatgccggcagttattcgaccgggaccgtactttatgattccgggaagctcacgcatcctacaactttttttatcaactgtcagggatcaatatattcaaatttagcatggagttcgggtaatgccggctcgttgattggcgataatatatatacaacctctgtaccgggtatcggtatcagagttaaggtctggctgaatattaccggcgaatataatggtgataacaacgattttactccggattataacgagcatcatatcggtgatgcggatttttatcttggaaagccaaccgggcttttagatttttgggcaggcacatattatgcgccaacatatcaggtgcagctcgtggcaactggcggagccattgccagcaacagcacgctgacgctgggggagccgatatccactgtgtcggttagagacgatcacggaacgatggtcatttcccaactgcacgtcaccggaagcaccaaaatccagctgacgccgatgggctgcaacgtgagttcgaccacgctgaatttccctatgggctccgtgaaaacgagtgagttttctctttcctcgacagtcggctccgcccagcaaacgctgacgctttcctgcgaacccggaaccaatatatcaatgcgtgtgacggcgactgaagccgaaggcgataatccgaacaggagcgttattgcgttaacggcgggggaaaacgtagcaaccggtgtgggtgtgcagttaagcctcaacgggaaggtcataccgttaaacaccagtttttatttaagtacatccagcagaagtgtaacgttgaatgccggagctgaggccagctacgcaaccttcacctatccgaataatcccggcggcgctgccgcatcgaactcgctcatcttttcaaccaactattacaaaaccggggctgaagtgacgcctggaacggccaacgccagcggaacgataacatttatctataactag

SEQ ID NO: 256269 - DNA, 1650 bp, Klebsiella pneumoniae
atgaagaaagtcctgacggcgctcgccgccacgctccctttgaccgtcaatgccgcagatgccctcaccggcgcggtacagcgccagccgaccaactggcaggcgatcatcatgttcctgattttcgtcgccctgaccctgtatatcacttactgggcgtcaaaacgcgtacgttcacgcagcgactactacaccgctggcggcaacattaccggtttccagaacggtctggcgattgccggcgactttatgtcggcggcctcgtttctcggtatttccgcactggtttacacctccggctacgacgggctgatctactcgctcggtttccttgtcggctggccgattattctgttcctgatcgccgaacgcctgcgtaacctcggccgctacacgtttgccgacgtggcctcctatcgtctcaaacaggggccgattcgcaccctttccgcctgcggttcgctggtggtagtggcgctctacctcatcgcccagatggtcggcgcgggtaagctgattcaactgctgttcggcctcaactaccacgtcgcggtagtgcttgtcggcgtgctgatggtgctctacgtcctgtttggcggcatgctcgccaccacctgggtgcagattattaaagcggtcctgctgctgttcggcgccagctttatggcctttatggtgatgaagcacgtcggcttcagcttcaataatctgttcaccgaagcaatggcggtgcacccgaaaggctcggcgattatgagccccggcggactggtaaaagatccgatatcggcgctctcactcggcctcgggctgatgttcggcaccgcgggtctgccgcatattctgatgcgtttcttcaccgtgagcgatgccaaagaagcgcgtaagagcgtgttctatgccaccggctttatgggttacttctatattctgacctttatcatcggcttcggcgccatcatgctggtgggggcgaatccggcgttcaaagacgcggccgggcagcttatcggcggcaacaatatggcggcggtgcatctggcggatgcggtcggcggcaacctgttccttggctttatctcagcggtcgccttcgccacgattctggcggtggttgctggcctgacgctggcgggcgcatcggcggtgtctcacgacctgtacgctaacgtgttccgcaaaggcgcgaccgagcgtcaggagctgaaggtgtcgaaaattaccgtactgatcctcggcgtggtggcgattctgctgggtatcctgttcgagaatcagaacatcgcctttatggtcggcctggcgttctccatcgccgccagctgtaacttcccgattatcctgttgtcgatgtactggtcgaagctgaccacgcgcggggcgatgattggcggctggctgggtctgctgaccgcggtgattttgatgatcctcggcccgactatctgggtgcagatcctcggtcacgaaaaggcgatattcccgtatgaatatccggcgctgttctctatcgccgtggcctttatcggtatctggttcttctcggctaccgatagctccgcggaaggcgcgcgcgagcgtgaactgttccgcgcccagtttattcgttctcagaccgggatcggtattgagaaaggtcaggcgcattaa

SEQ ID NO: 256270 - DNA, 318 bp, Klebsiella pneumoniae
atgatgaacgatcagatttgtcagcggatagaaaatagtgcgcattttaaggagcttgttgcagcccggcaaaggtttgccgccatcctgtcactgattatgctggtgatttatgtgggctttattctgcttatcgcctttgcccccggctggctgggcacgccgctgcatgcgggaaccagcgtcacccggggtattccgattggtatcggcgtgatcgttatctctttcgtattaaccggaatatacgtctggcgggcaaatggtgaatttgatcggctgacaaaaagcattctcagcgaggttaaagcatcatga

SEQ ID NO: 256271 - DNA, 1959 bp, Klebsiella pneumoniae
atgagccaaatacataaacactctattcccgctaatattgcggaacgctgcctgattaacccggaacagtacgaggcgcagtatcagcagtccgtcaccgacccagatgccttctggggcgaacagggcaaaattctcgactggatcaagccctacacgcgcgtgaaaaacacctcattcgcgccgggtaatatctccatcaaatggtacgaagacggcacccttaacctggccgctaactgtctcgatcgccatctggcggagcgcggcgaccagacggccatcatctgggaaggcgacgacgccagccagagcaaaaatatcacttatcgcgaactccaccgcgatgtctgccgctttgccaacgtcctgctcgacctcggcattaaaaagggcgatgtcgtggctatctatatgccgatggtgccggaagccgcggtggccatgctggcctgtgcccgcatcggcgctatccattcggtgattttcggcggcttctcaccggaagcggtcgccggacgtatcatcgattccaactcccgtctggtgatcacctctgatgaaggcctgcgcgccggtcgcgcgatcccgctgaagaagaacgtcgacgacgcgctgaaaaacccgcacgtaaagagcatcgaaaacgtggtggtgtttaaacgtaccggcggcaaaatcgactggcaggaaggccgcgacctgtggtggagcgatctgattgagaaagccagcgcggaacaccagcctgaagagatgaacgctgaagatccgctgtttattctttatacctccggctcgaccggtaagccaaagggcgtactgcatactaccggcggttacctggtctatgcggcctcaacgtttaaatacgtttttgactaccatccgggcgacatctactggtgcaccgccgacgtcggctgggtcaccggccacagctacctcctgtacggtccgctggcctgcggcgcgacgacgctgatgttcgagggcgtaccgaactggccaaccccggcgcgcatgtgccaggtggtcgacaagcatcaggtcaacattctttataccgcccccacggcgatccgcgcactgatggcggaaggcgataaggctattgaaggcaccgaccgctcttccctgcgcattctcggctccgtcggcgaaccaattaacccggaagcctgggagtggtactggaagaagatcggcaacgagaagtgcccggtgatggacacctggtggcaaacagaaaccggcggctttatgatcaccccgctgcccggcgccattgagctgaaggccggttccgcgacgcgtcccttcttcggcgttcagccggtgctggtggataacgaaggcacgccgctggaaggcgccaccgaaggtaacctggcgatcgccgactcctggccgggccaggcgcgtacgctgtttggcgaccacgaacgcttcgaacagacctacttctcgacttttaaaaatatgtacttcagcggcgacggcgcgcgccgtgacgaagatggctactactggatcaccggtcgcgtcgatgacgtgctgaacgtttccggccaccgtctcggaaccgccgaaatcgaatcggcgctggtgtcgcatccgaaaatcgccgaagcggcggtggtcggtattccgcataacattaaaggccaggccatttacgcttacgtcactctcaaccatggcgaagaaccgacgccggagctctacgccgaggtgcgaaactgggtccgtaaggagattggcccgctggcgacgccggacgtactgcactggaccgattcgttaccgaaaacccgttcgggcaaaatcatgcgccgtatactgcgcaaaattgccgcgggcgataccagtaatctcggcgatacctcaacgcttgccgatcctggcgtggtggaaaaactgctcgaagagaagcaggccatcgctatgccatcataa

SEQ ID NO: 256272 - DNA, 747 bp, Klebsiella pneumoniae
atgaaaaagcgtgttcttgccctttgcctggccagtttcttctccgttaacgcctttgctctggttccccccgggaacgatgtcaccaccaagcccgatctctactatctgaccaatgcccaggccatcgacagcctggcgctgttgccaccaccgccggcggtgggcagtatcgcatttttaaacgatcaggcgatgtatgagcaaggacgtctgctgcgcaataccgagcgcgggaagctggcggcagaggatgccaacctcagcgcgggcggcgtggccaacgccttctccagcgcctttggttcgccgatcaccgagaaagacgcgccgcagcttcacaaactgctgaccaatatgattgaagacgccggcgacctggcgacccgcagcgcgaaagagaaatacatgcgcattcgcccgtttgcgttctatggcgtctccacctgcaacaccaccgaacaggacaagctggcgaaaaacggctcttacccgtccgggcatacctctatcggctgggccaccgccctggtgctggcggagatcaacccgcagcggcaaaacgaaattttgaagcgcggctatgagctcggcgagagccgggtgatctgcggctatcactggcagagcgatgtcgatgcggcgcgcatcgtcggctccgcggtggtcgctacgctgcacaccaacccggccttccagcagcagttgcagaaagccaaagacgaattcgcgaaaaggcagaagtaa

SEQ ID NO: 256273 - DNA, 1044 bp, Klebsiella pneumoniae
atgagcgagcaagccattcgtttaacgcaatacagccacggagccggttgtggttgtaaaatttccccgaaagtgctggaaactatcctgcatagcgagcaggcgaagtttgtcgatccaaacctgcttgtcggcaacgaaaccagcgatgatgccgccgtttacgatctcggtaatggcacctcgatcgtcagcaccaccgatttctttatgccgattgtcgataacccgttcgactttggccgcatcgccgccaccaacgccatcagcgatattttcgctatgggcgggaaaccgattatggcgattgccatcctcggctggccaatcaacaccctggcgccggaaatcgcccgcgaagtggtggagggcgggcgctttgcctgccagcaggcggggatcgcgctggcgggcggccactccattgacgccccggagccgatcttcggtctggcggtcaccggcgtggtgcccaccgagcgcatcaagaaaaacagcaccgcccaggcgggttgcaaactgtatcttactaaaccgctggggatcggcgtactgaccaccgcggagaaaaaatcgctgctcaagccagagcatcaagggttagcgacggagaccatgtgccagatgaacctcgccggcgccgcgtttgccgccatcgacggggtgaaggcgatgaccgacgtcaccggctttggcctgctcggccacctcagcgaggtgtgccgcggggccggcgtgcaggcgcagctgcgctatgccgatatcccaaaactgccgggggtggaggactatatcgccgccggcgcggtgccgggcggcaccgggcgcaactttgccagctacggccatctcatgggcgagatgccgacggagtggcgggatctgctgtgcgatccgcagacctccggcggtctgctgctggcggtgaccccggaggcggaggcggaagttcaggccgccgcggcggagttcggcattaagctggccgccatcggcgagctggtgaccgcccgcggcgggcgacccatgatcgagatccgttga

SEQ ID NO: 256274 - DNA, 222 bp, Klebsiella pneumoniae
atgacagcccttgataatgcaattcgaattgcgggttctgccaacaaattagctgtagccatcggcgtttcgggtatggcagttagccagtggaaaactaaaggtacggttccctcatcgcgtgtacttcaggtcttcaaagcaactggagtttccccccatgaacttcgccccgatctatacccaaatcccactgatgggatgccgaatgaagaggcttaa

SEQ ID NO: 256275 - DNA, 555 bp, Klebsiella pneumoniae
atgcaatccatcaacttcgaaaatcatacctcgcgtatcgctattcaactgaaatctgaaaatcagtatgcaccgcggcgccgggaccgcgttaaatgccagaccatctttgcagcggttcaggagtgggaggcaaccttacccgggcgtgcgcaagacactattgcgcagctggtggccgaacagtgggaaaagcaaaacgggagagggatcagcgtcaataagcagaatctctaccgatatctgaaaaatgaaggggcgtctgagaagtacaccagttatgtgattcgactgtcatccgccattgctgacgccatgcctatagagatagccagaaagcatgatcttaaaaggggattaactgaaaccgagctggtggccagcgctattaaagaatgtaacgaagcgcaccaggccaaattacttggagctccacttcaaaaactggaacgtgaaatccgcgatgcggcaatagcgctttttaatctgctacctgcagatgtggcgggaccactactggcgagcattaccgccgtagcgccacagtgtttctaa

SEQ ID NO: 256276 - DNA, 984 bp, Klebsiella pneumoniae
atggcagcgctgccctacatgcaactttatattgctgattacctggcggacaccatgcatctgtcaactgaggagcatggcgcatacctgctgctgatgttcaattactggcaaacagggagggctatccctaaaagtcggctttcgagaattgcacggctaaccaacgaccgttgggcttccgttgaagcctcgttaaaggagttttttaacgataacggcactgagtgggtacatgagcgtattgaaagggatctggagatggttcgttcatctcagcgacagaaatctgatgcgggaaaagcctctgcaagagccagaaaagttaaaaaaacagcagaagggaaacggaatggtaacgaccgttcaacgggcgttgatgagccgtttgaacagaatgataacggcaatccaactaataaagatccagatatagatacagatctaaaagaaaacccctctctacgcgggcgtgaaactccagcgattcaggaaccgcaatacctggctggacttgatattccgatcggtaaattcacgatgcacgacatgtggctaccgtcacaggactggccgcagctggctgctacctggggaatagcgctccctgaaccggcatacctgtcgacagagctggctgagtttaccgcgtactggaaatccgaagggaaggtattcacacaagtccagtgggaacagaaatttgcccgcagcgtgataaacgccagagctaaatccaaatcaaaaccagcaaccggaggtaacggcaatgcaggaattcaaccagttaacaccgcatcctgggcagttcaggagattcaggcagccagagaacgctgggagcagaaacacggacttactggcggcggatacggcatggaggctctggactgtcatgggggagattttttcgaaccgctggacccagaagaacggggcggcgccatcggatatgtggatagctcagatcggttcgatgactga

SEQ ID NO: 256277 - DNA, 441 bp, Klebsiella pneumoniae
atgaccaaaaaaaccaaagaacgagttacccaggcacagatggtaatcgtcatcgtgcacagaactccgggctgcgtactacaggatatctgcgatgtgctggatttaccctccagctctgcgggaaatcaccttcgccgactgtatgctgctggcaagttaagtcgaattcataacggagttcagtatgtttatcgcgttactgccggcgtggatattccggacgttaaattgcccgaaccggctatcagagctacgccggagaaaacgcagaaagtgaaagatgccatcgtccaagctcgccagctcgaagaaagggggctctaccgccgggcggctacggcttacactgccattttgggaatggtcagtaacgccagcgaaatgtggaacatcgcccgccagcgtagccgctgtctccgcaatgctgcgaggtgctga

SEQ ID NO: 256278 - DNA, 267 bp, Klebsiella pneumoniae
atggctaacaaatcacgtgagcagcagcaggcgtgcattcagaaaattgttgatcttacatggaagaaagggcgcctgacggtgaaagaagcttgtgccgaattacgcatgtgccgggataccgcaggtcgatatttccaagctgcagttagaaccgggaaggtcattcgctacgggcgtcttggattgttccgcgatcagcgggcgaccattgattttgaccttcagagatttagtcatcggaaaaccgcaggagctgccaaatga

SEQ ID NO: 256279 - DNA, 354 bp, Klebsiella pneumoniae
atgagtaaatcactaaatgcacgctgtatccgtcgctgggaagtggagtttaaacctctctgtgattcaaaggtaaacccatattggcgcaagcgtgacctccgcgggtatatccgcgaagcggcgctaactaccgctgatagcatggttgagagcatggcctacaacaacgcaatgcatgattttttcgctgatgtaggtgataggcatgactggtcgcaagagttctcagcatggtacgacgggcgccgggagcattatctcaaagaagctcgcgactacctgaatgaagaaaccaccatcgacgagatcgacgaagagattgagaacgagctggaggcctggaatgactga

SEQ ID NO: 256280 - DNA, 237 bp, Klebsiella pneumoniae
atgagcactttactgcaaatactctgcatcaaagacaccgagggatactggactgagggcgaaatgtacccggcccgtgtagtcgctggcggttttgttcaagttggtgacgatgacgatcccaaaggggaaggctggagcgctgcaccgatggaatatcgggaagatggttcgatcgtttatcaggtcggtgggattgagggggatgtgttattcgaggaaaccagccatgactga

SEQ ID NO: 256281 - DNA, 549 bp, Klebsiella pneumoniae; identical to SEQ ID NO: 203145

SEQ ID NO: 256282 - DNA, 576 bp, Klebsiella pneumoniae; identical to SEQ ID NO: 203146

SEQ ID NO: 256283 - DNA, 234 bp, Klebsiella pneumoniae; identical to SEQ ID NO: 203147

SEQ ID NO: 256284 - DNA, 393 bp, Klebsiella pneumoniae
atggcgcaaaccaccgaagtatcaaaatcccatcagactggtgctccttcgtcgagcgccggtttaatttcgtcttcaaaactaacttttcgccagcaggaagtattcgatctgctggtgacctacatcaatcagcatggctacccaccgacgctatctgaactggccgatatgctcggcgttagctcgtctaatgctgttctgttgcatttgcgtgcgttagagaaaaaaaaatacataaaactatctcgccgtgtctcccgcggaatttctatcgtcgggcgaaaggagcccatgctcgccgtgcagctgctgcaggaaatgatcgctgacgaacccggtgcgcgtgaaagagcgattgagtttttgcgactgttcggtgagcagccatga

SEQ ID NO: 256285 - DNA, 1032 bp, Klebsiella pneumoniae
atgcgcgcattactaaatgttgatgttgcccggcacttgggaattgtgttgcttaaacccggtagagagttgatgtctttattcagcggtgggcgcgtgctggtggagactctgccagaaaaaatgaaggctctcccaagcgggcgcattcctgacgccgggcaacctttacgagatgatcccgacattcgcccattctttatgaaagagcgggtagtgagggcagctggtggtgtgaatagtctcgaatcttggttgcttaagagggtcaagcattgccagtggccacattccgattatcaccattcagagctggtaacgttccgccattcaacaggggcaatcgtcgcatgctggcattgtgataacgagctgaagcaccagaccgatcaaatccttgatagcctggtcggtatcaataacgcggatctgataatcgatgctgcccgtatcgcactgggatttgatcctgaacgttccctgtcacttgctgaattgtgctggtgggctgtcagcgttggaataggggacgaaatcacagaagagatggcgcgccgttccctccggcttaaagaagaggttttccagtcagtctacaaagaaaacgaaatcgtcccatcggtgccagccaccagcattctttccccgcttgtcgctaaagttgctaggcatcctgaaccaccagccccggtaaaaccagaggtggcagtggttgttgatcccgtggcaccagcgactttattcaccaggcctaaacggatccgctgggtgtcagatggttttatttcctgggtaaagactcagccatgtatgtgctgcggtcagtcggcagatgatgctcatcaccttatcggatggggtcagggaggcgttggtaccaaggcacacgatattttttcaatccctctttgccgcaagcatcaccggacgcttcatcacgatccagttgctttcgagcgtgagtacggcactcagccggaattgattattaaattgctggaccgagcctatgcgctcggcgttctggcgtaa

SEQ ID NO: 256286 - DNA, 603 bp, Klebsiella pneumoniae
atgacaccacgtcaacgccggctgcagcgcgcaggattagaaacagtggccgcagcacctcgtaaaagctggttaggccggtttacgcccctgaatgggattcagtctgcctggattaaatcgctacttacaatatggggagagaacatgcgtgggggaacagctccccgcaagcccacagaccactcctgctggcgatgtttgaaaggggaccgctggtcagataaagcgctggagcgatttactgcagcgatagaacaggcgagggaggagggatatcgaggccagcaagccttaaaccgagcacatgcgattttatggcctcagcctgtcatcggcctgatagattccgctattcatgatgatgatgctgaattcgtagaacgctgtgttctcggcgcatttgaagcgggggatccggtttatctggtaggcgttagttattacaccacacgcaaaaaaatctctgacataacccgggaattacagctggtggccccgtggctaacagatggtgaagcccgcaagcgcgtgcgatggtgccttgaaatattcagagcaaaaacatttctgtcggtacgaaaggaaattcatgctgattaa

SEQ ID NO: 256287 - DNA, 516 bp, Klebsiella pneumoniae
atgctctttggctgcataagcggcagtcagcagagcctgatggatcaggtcttccgggaatcccgggcccgaggcaatggtatgaatcgtatgcccgctggcctcttcaaacggcataatgttcgcgtccggcggcggaggcaaaatacgttttccggtttcaatctcccagtcgcaggagtagacaatgcccatggctgtcgcgaccgggccttccattcgtgccatcagatcgatccactggcctacgccggagtcctgcttaaagaaacgcggatcgaccagattcatactgccggtataggcaatatagttatcgatcatgaccattttgcggtgctgacgcaggtccatacggcgcagaaagacgcgcatcaggttaaccttcagcgcttcgacgacttcaattccggcattacgcatcatggcggcccaggggctgcggaagaaagccacgctccccgcggagtccagcatcagccggcagtgcacgccgcgccgcgctgccgccattaa

SEQ ID NO: 256288 - DNA, 174 bp, Klebsiella pneumoniae; identical to SEQ ID NO: 176644

SEQ ID NO: 256289 - DNA, 1101 bp, Klebsiella pneumoniae
atgagtcaactttttagtccgctgcgaatcggtaagctggaacttgagaatcgcattgtcattgctccaatgtgtcagtattccgccgacaatggcaaggcgacggcatggcatcgtatccatcttggacaactggctttttccggcgcaggtttactgattatcgaagccagcgctgtcgagccagcagggcgaatcaccccggctgatataggcttatgggatgacgaaacggaagccgcattacacaccgtactgaaagatatacgccagtactcttcaatccccatcggcatccaactgggccatgccgggagaaaagcatcttccgcagccccctggctggggggacaacagctggcacatgatgctggcggatgggacgcggttgcgccatcagcgctggcctatggcgagggcgatcgtcctccggttgagcttactcaggaccagatgaaacgcatcaagcaggcattcgcagacagcgccagacgcgctgagcggatgggtatcgagttgattgaaatgcatgctgctcatggttacctgcttcatcagttcctttctccgctcagtaaccagcgcaccgacgagtatggcgggtctctggagaaccgcttgcgtttcccgctcgaagtctttcaggccattcgcgaggctgtcggtcaggacatcgcggtgggagtgcgactttctgcgaccgattgggttgatggcggctgggataatgcacaatcaattctcttcagccagaagcttgaggctctcggctgcgactatattcatgtttccagcggtggattgtcgcctcatcaggcgattcaggttggcccgggctatcagttgccgttcgcccgtgaaatccgggagagggtgaatatcccggtgattggggtgggcttagtgacggaaccccagcaggcggaagatgcgttaagccatggcgacgccgatctcatcgccattgcccgcgcggcgctctacaatccgcactggccctggcaggcagctgccgctctgggagcccatgtgagcgttccgccacagtatcttcgctcggaaccacatggtctcaaaggcacgctgcactccaatagctaa

SEQ ID NO: 256290 - DNA, 297 bp, Klebsiella pneumoniae; identical to SEQ ID NO: 176646

SEQ ID NO: 256291 - DNA, 750 bp, Klebsiella pneumoniae
atgagcgcaatgacctttgatttacctcgccgctttccgtggcctacgctactgtccgtggttatccacggcggtgttgtcgcggcgttgctctatacttcggtacatcaggttattgaacggccttcgccatcgcaacccattgagatcactatggtagccccggcagatctggaaccgcctcaggcggcgcagccggtcgtagaacccgttgttgaaccggaacccgagcctgagccggaagcgcttccggaaccgccaaaagaggcgccggtggttatccataaaccgaagcctaaaccgaagcctaaaccgaagccaaagcctaaaccaaagccggaaaaaaaagttgagcaaccgaagcgggatgtaaaaccggcggagacgcgcccggcctcgccgtttgaaaatgcaaatacggcgccagcgcgtaccgcgccgagcacttcaaccgctaccgctaaaccaaccgtcacggcgccttcgggaccgcgggcgttaagccgcggagagccgacctatccggcacgtgcccaggcgctgcggattgaaggaagcgtacgggttaagtttgacgtgacagcggatgggcgcgtggataacgtgcagatcctttcggcccagccagccaatatgtttgaacgtgaagtgaaaagcgccttacgcaaatggcgctatgagccgggtaaaccggggagcggtattaccatgactattcagttccgcatgaaaggtgttcaaattaactaa

SEQ ID NO: 256292 - DNA, 873 bp, Klebsiella pneumoniae
atgtggcaagcgatcggcaaattattaagcgatttgcataccgaagcagctgaaatcgaactgcgcaacgaactacccggtggcgagatccacgcggcctggcatttacgcttcggcggcagggattacttcgtaaagtgcgacgaacgtgagcttttacccatcttcacggccgaggcagaccagcttgagctactgtcacgcagcaaaaccgtgaacgtaccgcaggtttttgccgtaggcagcgaccgggattacagctttctggtgatggaatacctccctcctcgcccgctggatgcgcacagcgctttcctgttaggccagcaaatcgcccatttacaccaatggagcgaccaaccgcagtttggtctggattttgacaacgacctttccacaacgcctcagccgaacgcctggcaacgtcgctggtctacgttcttcgccgaacaacgcataggctggcagctggagctggccgccgagaaaggtctgcattttggcgatatcgatagtcttgtcgataccgtccagcagcggttgagcaatcatcaaccgcagccgtcgctgctccacggcgatttatggtccggtaactgcgcgctcgggcctgacgggccatacattttcgacccggcctgctactggggcgatcgcgagtgcgatctggcgatgctgccgctgcatccggaacagccgccgcaaatctacgatggctatcaatccgtttcgccgctgccgtccggttttctcgagcggcagccaatttaccagctctatacgctgctgaatcgggctatcctgtttggcggccagcacctggtgacggcccaaaaagcgcttgatgacgtcttaatggaaaaggccccgtaa

SEQ ID NO: 256293 - DNA, 285 bp, Klebsiella pneumoniae
atgagtagcgaaattactgcctgggtggtcacggttcgttttcacgaagagacgttaacggaaattaatgagcttagtaatcacctgactcgcgccggatttaccctggttttaaacgatgatgaaggcaacccccacgagttgggaaccaacgtttttggtctgctttccatgcagaatgccgaagaggtcaaagccttgagcgcgggtttagccgaaactgcgctgggaagaaccgtcgacgttaccgttgccacattcagcgagtggttaaaagctcaataa

SEQ ID NO: 256294 - DNA, 930 bp, Klebsiella pneumoniae
atgaccaaaatctatacgctcacgttagccccctcgctcgacagcgccacgcaaaccccgcaaatttacccggaaggcaagctacgctgtagcgcccccgtatttgaacccggaggcggcggtattaacgtggcgcgagccatcacgtttcttggcggcagcgccaccgctatctttcccgtaggcggcgcaacgggtgaacatctgaccgcgctgctgacggatgagcatgttcccgtcgatacggtagaaacccatgactggacgcgacagaatcttcacgttcacgtgaacgccagcggcgaacagtatcgtttcgtgatgccgggcgcggcgttaaccaaagaagagcttcatcttctggagcaaaaagttctcgccattgctccaggctcgttgctggtgattagcggaagcctgccgccgggcatcagcgtcgaaaacctgacacagctggtcaaaaacgctcagcagcatggcctgcgctgtattgttgatagttccggcgacgcgcttgccgccgcgcttgatgtcggcaatatcgagctggttaagccgaaccagaaagagctcagcgcgctggtacagcgggacctgagccaaccggatgatgtgcgtcttgccgcgcaggagcttattcggtcaggcaaagtccagcgcgttgtcgtctctttgggcgcacagggggcgctgggtgttgatatgaatggaagtgtccaggtcgtaccgccgccgatgaaaagccagagcaccgtcggcgccggcgatagcatggtcggcgccatgacgttaaggctggcggaaaatgcctcacttgaagatatggttcgctttggggtggcggcgggtagcgcggcaacgataaatcagggcacccgcctttgctcgctggaaaatacgcaaaaaatctacgactacctgcgcggttga

SEQ ID NO: 256295 - DNA, 726 bp, Klebsiella pneumoniae
atgctggcgggggggctctttgcgtctgcatacgcaatggccgatgattccgtttttactgtcatggatgacccttcttctgccaaaaaacctttcgaaggaactgttaacgccggctatctggcgcagtccggcaatacgaaaagttcctcaatgaccgcagactccacgttgacctggtatggcaatacgaccgcatggtcgctgtggggaaatgccagcaatacatcgtcaaacgatcagcgctcttcggaaaagtacgcgttgggtggacgtagccggtataacctgaccgatcagaactatatctttggccaggccagctggctgaccgatcgttacaatggctatcagcagcgtgatgtgttcaccgcgggttatggtcggcagatcatgaatggtccggtacacagcctgcgttttgaattcggtcccggcgtgcgttacgacgagtataccgatggagataacgatacccagcctctgggctacgcttccggcacttatgcctggcagatgaccgataacgcccgatttacccagggcgtttcggtattcggcgctgaagatacgacgctgaactcggaaagtgcattgaatgtggcgatcaatgcgcattttgcgctcaaagtggcctataacctgacgtggaactcggaaccgccatcctcggcgccggaacacaccgatcgtcgtacaacgctatcgctcggatataaaatgtaa

SEQ ID NO: 256296 - DNA, 234 bp, Klebsiella pneumoniae; identical to SEQ ID NO: 176652

SEQ ID NO: 256297 - DNA, 324 bp, Klebsiella pneumoniae
atgcggtccacggcacatatcgacatattcttcatgatgatacaaaccgggtttgtcatcatgagcaatgttttcatcaagaatggagactttatagctctcgccgcgcttcacgaaggtttcacgcgcttcgtgccagctgactttcttcttaatgacgtcgtagtttttctcggcgagctcgtgcatacgcttttcgagcgcgtcgatatcttcctgggtcagggtatggtccagatcgacatcatagtaaaaaccattgtcgacaaccgggccgatcgccattttggtatttggccacagctgtttaattgcgtgccctaa

SEQ ID NO: 256298 - DNA, 462 bp, Klebsiella pneumoniae
gtgacctcgatacgtactgaaccgacctaccggctctatgccacttttgacaatatcggcggtctgaaagcgcgctcaccggtgcgaattggcggcgtggtcgtaggacgcgtggcggatattaccctcgatcctaaaacctacctgcctcgcgtggctctcgatattgatgagcgctataaccatatccccgataccagttcgctggcgatcagaacttccggtctgctgggcgaacagtacctggcgatgaacatcgggtttgaagatcctgagctgggaacggctatccttaaagatggcggcaccattcaggacaccaaatccgccatggtgctggaagatttgataggccagttcctctacaacagtaaaggtagtgacaataagaattctggcgatgaacaggctgctggagagagtcatactgacgctacgccgcctgccggcacgacgcattaa

SEQ ID NO: 256299 - DNA, 636 bp, Klebsiella pneumoniae
atgtttaaacgcttactaatggtcgccatgctggtgattgccccattgactgcggctaccgccgcggaccagtccaatccgtataagctgatgaacgaagcggcgcagaaaaccttcgaccgcctgaaaaacgagcagccgaagattcaggctaatccgaactacctgcgcgaaatcgtcgatcaggaattgctgccgtacgttcaggtaaaatacgccggtgcgctggtgctggggcgttattacaaagaagcgaccccggcgcagcgtgaagcctattttgccgccttccgtgaatatctgaagcaggcctacggccaggcgctggcgatgtaccacggtcagacctaccagatagcgccggagcagcctctgggcgatgcgactattatccctatccgcgtcacgatccttgacccgaatggccgtccgccggtgcgcctggatttccagtggcgtaaaaatacccagaccggcaactggcaggcgtacgacatgattgcggaaggggtgagcatgatcaccactaaacaaaatgagtggagcgacctgctgcgcaccaaaggcgttgatggtctgacggcgcagctgaaggcaagctccgcgcagccgattaccctggaacagaaaaaataa

SEQ ID NO: 256300 - DNA, 291 bp, Klebsiella pneumoniae
atgaccgggcagctgagctgggctcgcgatggtgagacgctggcgctgcgcggagagctggatcaggatctcctggtcccgctgtgggatgcacgcgctcaggcgacggatggcgtgtcggcaattgacctgagcgcagtgacccgcgtggataccgccggactggcgctattggtgcattttatcgcgctgattcgtcggcagggtcgggaagcgaaattgatcggtaagagtgaaaatctgcaaaccctggtcaggttatataaccttcctgctgatatgatcccataa

SEQ ID NO: 256301 - DNA, 255 bp, Klebsiella pneumoniae
atggaaaatcatgaaattcagaccgtgctgatgaacgcactctcccttcaggaagtccacgtctctggcgatggcagccactttcaggttattgctgtgggtgagatgttcgacggcatgagccgggtcaagaagcaacaggctatctacgccccgctgatggaatatattgccgataatcgcatccatgctctgtcgattaaagcgtttactccgcaggagtgggcgcgagaccgcaaacttaatggcttataa

SEQ ID NO: 256302 - DNA, 993 bp, Klebsiella pneumoniae
atgcgcgcgtctatttgggcgctggggccgctggtggcccgctttggccagggtcaggtatctctgcctggcggctgcgctatcggcgcgcgccccgttgatttacacattaccggccttgagcagctgggcgcggaaatcaaactggaagaagggtatgttaaggcgtcggtcaacggccgtctgaaaggcgcgcatatcgtgatggacaaggtcagcgttggcgcaaccgtgaccatcatgagcgcagcgacgctggcggaaggcacgaccgttatcgaaaacgccgcgcgtgagccggaaatcgttgataccgcaaacttccttaatacgctgggcgcgaaaatcaaaggtcagggtaccgatcgtatcaccatcgaaggcgtagcgcgcctcggtggcggcgtgtaccgcgttctgccggatcgtattgaaaccgggacgttcctggtggcagcggcgatttctggcggtaagattctgtgccgcaatgctcagcccgataccctggatgcggttctggcgaagctacgtgatgccggcgcggatatcgaaacgggcgaggactggattagcctcgacatgcatggcaaccggccgaaggctgtcaacgtgcgtactgctccgcacccgggcttcccgaccgacatgcaggcccagttcacattactgaatctggttgctgagggaacaggggtgatcaccgagacgatcttcgaaaaccgttttatgcatattccggaactgatccgtatgggtgcgcatgcggaaatcgaaagcaacacggcgatttgccacggcgtgcagcagctttctggcgctcaggtaatggcgacggatctgcgcgcgtcagccagcctggtactggcgggctgtatcgcggaaggtacgacgattgtcgatcgtatttaccacattgaccgcggctacgagcgtatcgaagacaaactgcaggcgctgggcgcgaatatcgaacgcgtcaaaggcgaataa

SEQ ID NO: 256303 - DNA, 273 bp, Klebsiella pneumoniae; identical to SEQ ID NO: 172694

SEQ ID NO: 256304 - DNA, 972 bp, Klebsiella pneumoniae
atgaatttagaaaaaatcaatgagttaaccgcgcaggatatggcgggcgtcaatgcgacaattcttgagcaactcgactctgatgttcagcttatcaatcagttaggctattacattgttagcggaggcggtaaacgcattcgtccgatgatcgccgtactggccgcgcgtgccgttggatataagggcaacgctcatgtcgccattgccgcgctgatcgaatttatccacaccgccaccctgctgcatgatgatgtcgtcgatgagtctgatatgcgccgcggaaaagccacagcaaacgccgcttttggtaatgccgctagcgtgctggttggtgatttcatctacacccgcgcctttcagatgatgaccagccttggctcgctgagagttctggaagtgatgtcggaagccgttaacgttatcgctgaaggcgaagtgctgcagttgatgaacgtcaacgatccggacatcaccgaagaaaactacatgcgggtcatttacagcaagactgcccgtctgtttgaagctgcagctcagtgctccggtattctggccgactgtaccgcggaacaagaaaaagcgttacaggattacggacgctatctggggaccgctttccagctgatcgatgatttgctggactacagttcagacggcgagcgtctcggtaaaaacgtcggtgacgatctgaatgaaggcaaacctacccttccgctgctgcacgcgatgcggcacggcaacgccgaacaatccgccatgatccgcggagcgattgaacagggtaacggtcgtcatcttcttgaagccgtgctggaaaccatggccacctgtggttcgcttgaatggacccaaaaacgcgcggaggaagaagctgataaagctattgccgcgcttcaggtccttcccgattctccatggcgggaagcgctaattggcctcgcccacatcgctgtacagcgcgatcattaa

SEQ ID NO: 256305 - DNA, 312 bp, Klebsiella pneumoniae; identical to SEQ ID NO: 172696

SEQ ID NO: 256306 - DNA, 258 bp, Klebsiella pneumoniae
atggcacataaaaaggctggcggctcaactcgtaacggtcgcgattcagaagctaaacgcctgggcgttaagcgtttcggtggcgaatccgttctggcgggtagcatcatcgttcgtcaacgtggtaccaaattccacgctggcactaacgtaggttgcggtcgtgaccacactctgtttgctaaagcagacggtaaagtgaaattcgaagttaaaggcccgaacaaccgtaaatacatcagcatcgttgctgagtaa

SEQ ID NO: 256307 - DNA, 969 bp, Klebsiella pneumoniae
atgaagcagcaggccggcatcggcattattttagcgctcaccacggcgatgtgttggggcgctttgccgatcgcaatgaagcaggttcttgaagtgatggaaccgccgacggtggtgttttaccgctttttgatggcaagtattggtctcggcgccattctggccatgaaaagaaaactgcctccgctgcgtatttttcgcaagccgcgctggttgatactgctggtcattgcgacgggtggtttgttcggtaacttcattctgtttagctcttccttgcaatatcttagccccaccgcttctcaggtgattggccagctgtccccggtcggcatgatggtggccagcgtttttatccttaaagagaaaatgcgcggcacccaggttgcgggagcgctaatgctggtgagcggtctggtgatgttttttaacaccagcctgattgagatatttacccgcctgacggactacacatggggggtaattttcggcgtaggcgccgcgacggtgtgggtgagctacggcgtcgcgcaaaaggtgttattacgccgtctggcatcgcagcaaatcctttttttgctgtacactttatgtacgatatcgctattgccattagcaacgccttcacaggtgctggcattaagcgactggcagctggcctgtctggttttttgcgggctcaataccctggtgggctacggtgcgctggcggaagccatggcgcgctggcaggcggcgcaggtgagcgcgttgattaccttaacgccgttatttacgctgctattttcagatttattatcactggcctggcccgacgttttcgccagaccgctgttgaacctgatgggttatctcggtgcgtttgtcgtggttgcgggcgcgatgtattccgccgtcggccaccgtctttggggacggtggcgtagtaagcgagaagcggttgtgccgctcccccgctcaggcgaatga

SEQ ID NO: 256308 - DNA, 1173 bp, Klebsiella pneumoniae
atgaagtttgttgatgaagcaacgatcctggtcgtagcaggtgatggcggcaatggttgcgttagcttccgccgcgaaaaatatatcccgaaaggcggccccgacggcggcgacggcggcgacggcggtgatgtctggctcgaggcggacgaaaacctgaataccctgatcgactaccgttttgagaagtctttccgcgccgaacgcgggcagaacggccagagccgcgattgtaccggcaaacgcggtaaagacgtgacggtgaaagtgccggtagggacccgcgtgattgaccagggcaccggcgagacgatgggtgatatgaccaaacatggtcagcgcctgatggtcgccaaaggcggctggcacggtctcggcaacacccgtttcaaatcgtccgttaaccgtactccgcgccaaaagacgatggggacgccgggcgataagcgcgatctgcagctggagctgatgctgctggcggatgtcggaatgctggggatgcctaatgcgggtaaatcgaccttcattcgcgccgtttccgcggcgaagcctaaagttgctgactacccgttcactacgctggtaccgagcctcggcgtggtgcgtatggacaacgagaagagcttcgtggtggccgacatccctgggctgattgaaggcgcagctgaaggcgcaggcctcggcattcgcttcctgaagcacctggagcgttgccgcgtactgctgcatctcatcgatatcgagccgattgacggttccgatccggttgagaatgcgcggatcatcatcggcgagctggaaaaatacagtgagaaactggcttctaagccgcgctggctggtctttaacaagattgacctgatggataaagctgaggcggaagagaaagcgaaagccatcgcgcaagcgctgggctgggaagataagttctatctgatttccgccgccagccagcagggcgtaaaagacctgtgctgggatgtcatgacctttatcatcgaaaacccgatagtgcatgcggaagaagcgaagcccgcagaaaaagtcgagtttatgtgggatgactaccaccgtcagcagcttgaagaagctgaagtggaagatgatgaagactgggatgacgattgggacgaagacgacgaagaaggtgtcgaattcatctataaacgttaa

SEQ ID NO: 256309 - DNA, 1434 bp, Klebsiella pneumoniae
atgcgatttcccagatttatcatcggattgactgccggtatagcgattagcgctcatgcggcgaatattgacgagtacatcaatcagcttcctgcgggcgcaaaccttgcctttatggcgcagaaggtaggctccccgacgccggagatagactaccatagccagcagatggcgctacccgccagcacccaaaaagtgatcaccgcgctggccgcactgctgcagctgggtccggatttccgcttcaccacgacgctggaaacgaaaggcagcctcagcggtggcatcctgaaaggagacctgattgcgcgctttggcggcgaccctaccctcaagcgccaggatattcgtaatatggttgccacgctgaagaaagcaggcgtccagcgaattgaaggcaatgttctgatcgatacctccattttcgccagtcatgataaagcgccaggctggccatggaacgatatgacgcaatgctttagcgcacctccggcggcggcgattgtcgatcgaaactgtttctccatctcgctttatagcgcgcaaaagccgggcgatttggcgtttatccgcgtggcgtcttattacccggtgaccatgttcagccaggtgcgtaccctcgctcgcggctcttctgaagcacaatactgtgagctggacgtggttcccggcgatctcaaccgctacaccctgaccggctgtctaccgcagcgcagcgagccgctgccgctggcttttgccattcaggatggcgccagctatgccggcgcgattctgaaagcggagctgaccgacgccgatatcacctggagcggtacgctgctacgtcagacgctggcaaacgagccgggtaccgtactggcgagtacgcaatctgcgccgctgcacgatttgctgcgtattatgttgaaaaaatcggacaacatgatcgccgatacggtgtttcgcaccattggccatgctcgcttcggcgtgccgggaacctggcgagccggatccgatgccgtacggcagatcctgcgtcagcaggccggtgtcgatctcgggaatacaatcattgccgatggctcaggcctgtcgcgtcataacctgatcgcgccagcgacgatgatgcaggtgctacagtacatcgcccagcatgataacgcgctcaactttatctcgatgctgcccctggctggccacgatggctctctgcaataccgcgcgggtctgcatcaggcaggcgttgacggcaaagtttcggcgaaaacgggctcactgcagggggtgtataacctggctggattcattaccacggccagcgggcagaagatggcgttcgtgcagtatttatcaggctacgccgtgcctccggccgaccagcgtaaccgacgtattccgctggtgcgcttcgaaagccgcttgtataaagacctgtatcagaataattaa

SEQ ID NO: 256310 - DNA, 477 bp, Klebsiella pneumoniae
atgcaagctattccgatgaccttacgtggcgctgaaaaactgcgcgaagaactggatttcctgaagtccgtacgtcgtcctgaaatcatcgcggctatcgctgaggcgcgcgagcacggcgatctgaaagaaaatgctgagtatcacgctgcccgcgaacagcagggtttctgtgaaggacgcatcaaggatatcgaggcgaagctgtctaacgcgcaggtcatcgatatcaccaaaatgcctaacaatggccgagtgatttttggttccacagtcagcgttctgaatcttgataccgatgaagagcaaacttatcgtatcgtcggcgatgacgaggccgattttaagcaaaatctgatctctgtaaactcaccgattgcgcgtggtttaatcggtaaagaacaggatgatgttgtcgtcatccgtacaccgggcggcgaagttgaattcgaaattatcaaggttgagtacctttaa

SEQ ID NO: 256311 - DNA, 645 bp, Klebsiella pneumoniae
atgattcatatgaataatttcttcaggttactatgcctgagcctgtctctggttattgtagccgtcacggcggctcccacttatacgcctgtagttgaaagcatactccataatgggtttccaactcagcctgacgtgttagcaaaaactactcaatctctatccgatgagttcaaaaagaccggaaatattgcttcgctggttttttatgcctacgggatgttgaggcaagcaaactattttttggccactaatgatattattaaggcttcagagtatgctaaaacaggcttcttttatctcgatgaagctgtggatttaaatcaaaacataccactcatcagatatctgcgtgccaaggtcgatgcgtacctacccgccgagttgggacgctgcgttattaccctcgaggacacagacatactgctaaaacaagaattaagtagcagaattcgagataacgtcaatgatatgcgctacagagcattttataactgtaaactttatcaacaggctggccaattattatcaatattacaggtggataatccaaataaaaaaattgatatggcttataacggttcatctacctgggaacttgatgaagttacgcaaattattataccccttatgagggccaaataa

SEQ ID NO: 256312 - DNA, 708 bp, Klebsiella pneumoniae
gtgagagctaatattaaagaattgccagctatttctttgcatggtatttataaaaattatggaatgggcgagaacgaggttgttgcgcttaaaaatatcaatgttgatatcgctgctggcgagtttatggctttatgtgggccttctggtagtggtaaaagcacattgttaaatatattatccggaattgataaaccctccgcagggcatgttttctttctcaataaaaatatgaatgcattgtcagagagaaatctcgcagcaatacgtagtaagcatctgggatttattttccagttctttaatttaatcccggtacttaacgtgtttgataatgttttttatccattgatacttaatggccatttcgatgccagaactgcaaaggagcgaaccctccattttctgaatagcgtgggtttatccggcctggaagaccggaaaccggggcagctatctggcgggcaacaacagcgtgtcgccatagcaagagcactcgcacatgaacctcagattgtcgttgcagatgaaccaacaggaaatctcgacctggcgacgggagacgcaattctggatcttttactagatatcaatcatcaaacgggcaccacttttattatatcgacccactccacccagctaacggagcgtgcgcgacgagtggtggaaatccgtgatggagaattagcttatgattcatatgaataa

SEQ ID NO: 256313 - DNA, 963 bp, Klebsiella pneumoniae
atggatgatgcaatgcatttattatcgttgtctcttatggagcccgaggcacctttatttttatatagtcccagttggctaaatgtttgggaagcacattcctatgatatggctttgaaaaataccgatacaaatagctgggcttttaaacgatttggtactcgcgcagatgcctatgacaaagaaatagtgaacagaactaattacatggcgtatatctccgcgttagaaaaagtatccgatgccgcaatgcaggcgctgcctcagaaggaacgtatgctattgatgaaatcacgaactgcctttatctatgttgactcatggggagaagcggctggctttgaatatgatataagtacgctgcatttatctaccattgatacactaccaaaaaatttagtaaaaaagttttctgtagataatgtgacatgcaaaatccgtggggaaaaaaatgcgctgattcaggcaatgcgcctggcgcaagactatttaagctgggatatctttgattttgtcattgtttgtggtggttatcgtgccataccattgttagcgtttaccgcaacaaatattaatcctcgtagtaaaatgaaagaatctcgaaaaattcccgggatgaatttatcaatcgaacgagtaggatgttttattttcagtcagacaactggtgatctaaaagtaaactgcgggccctattttagcgcagactcatcacagtatcaaaaaaattatgcatcagatattgatctggttgcattttccggcagagccagttcgataacgccattttttaaccatcctgtaaaattactcgatcttgaaaagaaatatggttctagtggctgtataacgcctgctttgagctggcattatatttttcagcacgcttttaagggcggtcgcatgagaacaattttgcccggttataatggcggattaacttattttgatacctggtattaa

SEQ ID NO: 256314 - DNA, 1221 bp, Klebsiella pneumoniae
atggacaggaagtctattatttctggttatagcgttcatttaccatttgccgatgatggttcacagctcattgcaaatctgaaacagggaaagcgtgtcaaaaccgcgccttggttcaagtcgaatgatgaagctattaaatgtgggcttcgtggtaatgtcaatgttgcaaagatgaaatatagtaatgatagcattcctgaattactctatcgcctaattgatgaggccttaaggcagtcaatgctggatgagaattgtcttcgagaagataatatcagagtctatattactggtatagggcctcgagttgatgctatagattatcgttctttcgctacttataatgatattgaagatctcgcgctgactccttcaataaccaatttatgcgccaaaaatatgtctcaggatataattgcagagcttttggctaaaaaatatcgtttgcggtatctaccaccgaatattaattgcaccagtaactccgggcttacagccgttcatctggcaagccatgcaattgagcgcggtggtatagagcttgcgctcattattaatatatcccagataaaatctcaggatatttggtttctctcaactcaatcaatgctggatacggatcttgttcaaccgtttggtgtaaatagcaaaggggtgatctttgctgaaggttatagcgttctggtacttgaaagtgaccatcatcgcctggcccgacaacttgttgatggagtgagtatcaagacggcttataaacagattaatgccagtagaagtaacgatgtttactggcagagtacctgtatattaaaactagtcaaccaactcttgaatgatacgagagttaaaattgaggacgtgtgcgcttttatccctcatggtaatggtacagcgttcagtgacagcattgaagcgaaagctattgctattctggcaggggagaatatgctaccagtcctcgcttacaaagggcaaataggttataccgctactggttctggattggtagatttaataattggtcatcattcagtaagttgtcatgagttaataaaatcggtaattaatgaacccattattaatggtatagctcaccactttcttatcgggccgggagtaataaaacatcacaaaagccatttacttaaaaccggcttaggggtagatggttctattatcgcagttttgctgtccaataccgccagggaagctagctaa

SEQ ID NO: 256315 - DNA, 2562 bp, Klebsiella pneumoniae
atgaaaacaaacaggaaaagggtagttatcacagggatgggcatcctgtcatctcttgcggataatattgagggtttcaggctagccctgctacagaaggaaaatggtattactgatagcgcgcgtttctcggaatggtttgaaaacgcacgggcggccgaggtactacatgaaatcgattgtcctgaattatctgaggagattattgcctcgctcgataacgctgcgctgtgggcatataaggttggcagggacgcgttgatacaggccgacctggttaactgccctcgttgccttgatgagatgggcttagtagttggcgtttcctctgcgggtacagaagccttcctgccgcttttcgagcagcgaattcaggacttttccttgcgtaaggcgctgtattccggtggtttctcttcctgttgttccagcgtttcgacattgttagggctgaaaggtggggtcgaactggttgccacggcctgtacagcgagccctaatgccgtaggtatggcattcgattatattcagaatggcaagagtagcgctatgctggcagttgggacggaaccgatctatttaccgacctttgctggcttttatgctctcaatgtcatgcatcccgtatcctgttcacctttctccggccaatccggtatgtcaattggcgagggggcgggggctattgtactggaagagtatgaacacgccattgcacgcggcgctaccatctatggcgagattctttcttatgccacatcctgcgacgcttaccacgaaacagggcccgatccgcgagccagcggagcagtacaggttatgttaagggccatggctaatgcggggattacacccgatcaggttgattatattaatgcgcacggcacgggtactgaagctaacgatcaaatcgaaacgttggcgatgaagaaagtgtttcgcaacattgaaaatattccgatcagttctacgaaatcctactttggccataatattggcgctgccggaatcgttgaacttatagcttgcctggtcactttgcctgaccaacaggtactacctacccttaatttcactgaggcacggcctaactgcgatctggattatgtcccgaatgagttcgtgaaaaaagatattaatatctttatgaaaaataactatgcattcgggggtaacaactgctgcatgatcgtaagcaccaggccgggttcggttccggtgacttcatatgaggccaaaagggtagcgataactggcataggagctgtatccgctattgggcatcgtatcaatgaaatacttgcgaacattagtcaaattgaaagcagcgccgtcgagcttgaggagatcgttttccctcaagatgtattaaatgaagctgaagagctgctgcatgttttaataaagagcaggcagtttgaggagctttttggggaaaattatggcattgccagctgtgaagcatcgcatgaaccatccacctttaaaactttccaggtcaaagggcttgagccgcgtaaacacctgcgtcgcttcgattcgcgtaaggctactcgcggcggtacttttgcgctaattgcgcttacggaagcgctaaatatggctaagcgacgtattaagcgcgatggagaagaactcggtctggttatgggcatggcgcgcgggccacaagagacgacttataaatatttacagagtctgaagccagaccctggaaaggtacgtacgtcggagtttcctggttcactgatgaatgcgattgcaactttttgcggtatttctgaaggggtaaaagggtacaccactactcttgcaaccggtgaaaatgcggctcttggtgcattaacttatggttatgaaatcattcgccagcagcttcaaccgcaagttattgtcgggggcgctgatgagtatttcccttccatgtctctatacatggatggggtgacgcagaagattcacgcggcatctgatgtcagggactatcaggtctatgctaaagaagcgaagggctacgtacctggcgaaggcgcctgtatgttaatgctcgaagatccgcttgcggccgctgcgcgcggcgctgaggttttagcggaagttgtcgggtatggtaaatcatgcaacaacagctattttgatgttactcaaattgatgaaaaatccagcgcaatggccttagccatcaaacgcgcgcttaatgatgcaggaatttgtgccagagatatcgatttggtgtgtggcaccagcaacggaagcattgagaattcaacaattgagttgaatgccatatatgaatcatttcgtcaggttaatccaatagtcccggtagtcaactacaacgccttttttggcttcgtggcttcgtgtgcaggcttgttgaatctgatcatacttcttgattgtattaaaaagcaggcagttcctgctataccgtataccagtgactttgttgatcagcgtataaattttgtgcgtcagcctctgaatatcaaaattaaatatgtattgctggtaggggcgacggaaggcggcaactattacgcaattattatcaaaggataa

SEQ ID NO: 256316 - DNA, 1161 bp, Klebsiella pneumoniae
atgagctcgcttttcgatttacatttaaaagataatgctgtgatgggcaattataacaaccggagcataccttcatcctatcatgatattttagatgaatataaagcggtgagagagaatgctttgctggtcgactactctcatatggccattgttagcgtaacaggcgaagatgcatggattcttgtaaatcacattgcctctgctgacatttcaattgtacgagatgaacaaggaatttattcactcgtcttgaatgacgacgggactatccttggtgatatgtatgtgctgtgtgccatggatggttattatatattgtctgaaaatatttctgttgccaggattatagaagtccttaatttcgcagcggaaaaatatgatgatttaggtattcaggagatcccggaaataaaatccatggaagacgataactggggggctatcatgcttgaagggccatattcctgggagttgatgtccgagatctatggatatgatatcatcggtcttccttattgcgaatacatgaatactgaagatgacttaattgtcttccgctgcggtaagcatggggagtttgcctatcaagtaattggccctcaaagtttactcgttgaactatgggttaaattacaaaagataggagttaagtacttacttaaaactggcggtttggattaccagcgtatagttcgcgtagagaatcctggctgggatcaaagcatttacgcagaatattcaacaaaccctgtcgaattacaattgcagtgggctatccagtatgacaaggaagatttcatcggcaaagctgctgttgagctgatgtctgcccagagtgctgctcgcaaagttgttggcattgttccgtgcgttaattgcgcgtcgcttagcaaggatgataaaatccttgttaatgggcagaccgttgggtttattattaatgctgtatattctccggctgcgcaaagttggatagcgttggcgtttattaataccccttatgcactatcagacatcgacggttacataataaaaacagcgcacggtgatattgcggcaaaaactaaaactttaccatttatatataatttcagtttgctggttaacccgacaacgcatagctatattgatccatcgaaagcgaaaagtgttttataa

SEQ ID NO: 256317 - DNA, 282 bp, Klebsiella pneumoniae
atgactgatattaatgagaagatcgatcaaagaaaatcaatacttgtgactataaaagcggagcttattcatcggcttaatattcaacgtgaagagcatcaaattgatgacgatactcctttgtttggcaatggactgaagctggactctgttgatgcgacggagattatcgtcatgcttgataaggcttttaacattcaagtgcatgaaggggatgatccatcatatatgagaagtattaatagccttgcttcatttattattcagaaaaaacattcctga

SEQ ID NO: 256318 - DNA, 549 bp, Klebsiella pneumoniae
atgtcaaaatttaagatcccgacaaaagtttttctggctatgggtgggtggcgccagccattgttaatggtagatagaatcgatgattttaagtatggcgagaatgggtatgttaaagtgataaagcatatcacttataatgaaccgtatcttcttggccattttcctgaagatcctatcatgccaggggctattatttcagagatatttggccaggctagtgaatatttctcttttttgtgtgatatttgcgatatttatcaactacgcacagggcgagaatttctgtctctgcgtgatatccatacatatatagatcaacctgatatgcttgaagttatacataagcgtcgggcacaggtacgtggagtactggctgcacaaaatttgaagtttaaagcctcagcttatccgggggatactattgaagtggtaagtaaactcacgttttctgacaatcatggctttaagcattactcggtaattgccaatgtaggaaagaaaattattagccagggcaccattatcaattttcgggaagttttataa

SEQ ID NO: 256319 - DNA, 756 bp, Klebsiella pneumoniae
atgtataattataatgacctcgttgataaaaccgtattagtcactggcgccagcggtgatatcggtcacgctatttgcggcaaatttcttgagcaaggatgcgtcgtttatgcactttactgcacgaataaagcgcagttgatggagcttcaatcaaatcatcctgctggaaaaaaacttcatctcctgcagggggatctatcgaatcaggaagatgttgcggccatatgtgcacaattatccagtgataaaggaaaactggatgttttagtgaacaatgcaggaatagtgaaagataacctctttgctgctatgacttttgatgattttagctctgttattaatactaatcttctggggctttttcgtatgactaaagaggtcttacttttgttacggtcggcccagaatcctacaatcattaatgttgcatctattgctgctattgttccgagtattggtcaggttaattatagcgcttccaaaggtgccattttaagtttcacacgaacgctggccgctgagcttgcgccgcggggcgtacgagtaaatgccgttgcgccgggaatgatcgaatcaaaaatggttaaaaaagtgtctcgtacggtagtgcgtgaagtcactaattcaattccgcttaagcgccttgggaaatgtgaagaagttgcaaatactattgtttatttgagctcttctgcttcaagttatattgtcgggcaaaccatcgtcattgatggtggtatggttatgcggtga

SEQ ID NO: 256320 - DNA, 1257 bp, Klebsiella pneumoniae
atgggcgatacgttttcaatttcacgacggcgtttattacagacgggggcggcgctaggcggcgcgatgctgctgcccggcatgatgcaggcggcatgggcggcggggacggataagccggaacagaccaccgtgcgggtgggttttattccgctgaccgactgtgcccccttagccatcgcttccctaaagggattcgataaaaagtacggcatcaccctcgtcccgagcaaggaggccagctgggcggcagtgcgcgacaagctggttgccggagagctggacgccgcgcacattctgtacggcatgctctacggccttgagctggggatcgccagtaaaccccatgcgatggccaatctgatgactcttaaccgcaacgggcaggcgattacgctctccagcgagctgcaggagaagggcgtcaccgacctgggcggactgaaaaaacggatcgaccagcaggcgccgggcagctacaccttcgcccatacctttccaaccggcacccacgcgatgtggctctattactggctggcgagcggtggaattaaccctttcgacgatatccgcaccgtcgttgtgccgccgccgcagatggtgatgaacatgcgtatcggcaatatgagcggtttttgtgtcggcgagccgtggaacgcgcgcgccattaacgatcgcatcggcttcaccgtcgccacttctcaggatatctggccggaacatccggaaaaaattctcggcacccgcagcgaatgggttgagcgtaacccgaatacggctcgggcgttggtggcggcgctgatggaggcccaacgctggattgatgcttccgtggagaatactcgcgaaacggcgcggatactcgccagacgcgcgtggctgaacacgaaagagcagtacctcaccgggcgcatgctcggcgcatacgacaatggtatcggtcgccgctggcaggatgcgcacccgatgcgcttctacgaacagggggaggtgagctttccatggctctcggacggcatgtggtttttgacccagttccgccgctggggattgttgaaggcgtcgccggattatcaggcggtggcgcagcgcattaatcgcattgacgtctggaaagaggcggcgctggctgtcggcgggatcggcgcggcgaagcagccgatgcgcagcagcacattgctcgacggcaaggtctggaatggggccgacccggaaggctatgccagcagtttcgcgattcaacgtaaaggggcatga

SEQ ID NO: 256321 - DNA, 1197 bp, Klebsiella pneumoniae
atgaataatacggctggcattaggcctgaggtggtcgactggtttgcgcgcgcgcggcgacgccagaaacagcagctacgtcagctgtcgcagctggggtcgctggcaggagagataagttcgctggtgcatatgctgcagtgcgaacgcggcgcgtcgaatatctggctgtgctcgggcggcagactgtactcggcggagtgccgggcggcagcggcgctggtcgatgagcaattcacacgtttcaacgccgcgctggaacccgcccgtgatgccgccagcagcgcgctctgctggcgcattgcctgcgcggcgtggtatttgacgcagcttgcggcgctgcgccaacgcgtgcgcgcccggaacattcctgccgaagaggcgaccgggcagtttagtcgtattattcgccatctgttgaatattgttccgcagctcaatgacagtatcgacgacccgcaaatcgctggacgtatggtagcgctctatagctttatgcagggaaaagagctggccggacaggaacgtgcgctgggcgcgctaggctttgcccgcgggcagttcagcgatgaactgcgtcaacaactggtggaccgcattgatggtcagcagccctgtttcgatagttttcaggccttaagctatccgcccctcaccactctgtttgccagccagtgcctggccagcctggagattgaacagctgcggcgggttgcctgtacccgccagcctccagtagacgagggagaaacggcgctccgctggttttacgcacagacccagcgccttgagcagctccgtggcgtggaagagcggctgatcgtcgacctgctcaacgccaccgccgccctgctggaaggcgaagagcagagcatgcagttgccgcccgcaaactgggatgaggctgaggacagtatcgccctgcggctggacaaacagctgctgccgctggtacgccagcaggcccttgagcttcagcaactctcctgccagcttgcatcgttaaaggaagcccttgaagagcgcaaactgattgagaaggcgaaaagcgtgctgatgacccatcaggggatgccggaggaacaggcctggcagacgctgcgaaaaatggcgatggataagaaccagcggatggtggagatagcccgtgcgctgctaacggtaaaatcactctggcagacaaccccaaaggagtag

SEQ ID NO: 256322 - DNA, 354 bp, Klebsiella pneumoniae
atgcaacgtattgtgattatcgctaacggtgccgcctacggcagcgaatctctgttcaacagcctgcgtctggcgatcgccctgcgcgagcagcagtccgaccttgaactcaaactgtttttaatgtccgatgcggtcaccgccggcctgcgcgggcagaagccagcggaaggctacaatattcagcagatgctggagatcctcaccgcgcaaaatgtgccggtaaagctgtgtaaaacctgtaccgatggccgggggatcagcgcgctgccgctgattgatggcgtggagattggcaccctcgttgagctggcgcagtggacgctggcggcggataaagtcctgaccttctaa

SEQ ID NO: 256323 - DNA, 243 bp, Klebsiella pneumoniae
atggcaatggtaaaagcaagtttgacgttgtttggcggtgacacattggtggtgcgttgttctgaacgctgccatattcacctgatgagtgccaaagtgcctggcgatagtcacgctgatgttctgagcgtacaggacagagatagcgcgtatctgaccgtgccttacagcggcacctggaacgttctcatcgacagccacagccagtcgctggaacactctatcagctacgttcccgcctga

SEQ ID NO: 256324 - DNA, 681 bp, Klebsiella pneumoniae
gtgttaactcgtgatttcttactgaatgcagattgtaaaacggcgtttggcgctattgaggaatcgcttctctggtcggcagaacaacgggccgcctctttggcggcgaccctggcctgtcgtccggatgacggctcggtgtggatctttggttacggttcgctaatgtggaacccggcgctggaatatcgcgaatcctgtaccggtacgctaccgggctggcaccgcgcgttctgtttgcggctcaccgccgggcgcggtagcgccatgcagccgggccgcatgctggcgctgaaagaaggtgggcgcacgaccggcgtcgcctaccgcctgcccgatgaatcgctggaagaagagctgacgctgctgtggaagcgggagatgattaccggctgctacctgccgacctggtgtaagctggagcttgacgatggtcgcaccgtcaatgcgctggtctttattatggacccgcgacatccgctgtttgaggcggacaccagcgcgcaggtgattgcgccgctgatagcgcgcgccagcgggccgcttggcaccaacgctcagtatctgttcgcgctcgatcaggagttgcgcaaactcggcatgcacgacgcttgcctcgacgatttagtcggtaaggtacgtcatctgcttggggagaatagccagccggggctggcgtaa

SEQ ID NO: 256325 - DNA, 231 bp, Klebsiella pneumoniae
atgccctatagcaacaaaagtgaattgcccgacagcgttcagcacgtactgcccgcccacgcccaggagatttacaaagaagcctttaatagcgcctgggagcagtataaacataaagaggaccggcgtgatgacgccagccgcgaagagacggcgcataaagtggcctgggcagcggtgaaaaatgaatatcaaaaaggtgaggatgataagtggcataagaagaaataa

SEQ ID NO: 256326 - DNA, 855 bp, Klebsiella pneumoniae
atgaaacaaaaagtggttagcattggtgatatcaacgtagcaaacgacctgccattcgtgctgtttggcggcatgaacgtgctggagtcccgcgatcttgcgatgcgtatctgcgaacactacgtgaccgttacgcagaagctgggcattccttacgtgttcaaagcctcttttgataaagctaaccgttcttccatccactcctatcgcgggccgggtctggaagaagggatgaagattttccaggagttgaaacagactttcggcgtgaaaataatcaccgacgttcacgaagccagccaggcgcagccggtcgctgacgtggtggatgttattcagctgccagcgttcctcgcccgtcagaccgatctggttgaagcgatggcgaaaaccggcgcggttatcaacgtgaaaaaaccgcagttcgtgagtccgggccagatgggcaatatcgtcgataagtttatcgaaggcggcaacgacaaagtgatcctttgcgatcgcggcgcaaacttcggctacgacaacctggtcgtcgatatgctgggctttggggtgatgaaaaaagcctccaataactcaccggttatcttcgacgttacccacgccctgcagtgccgcgacccgtttggcgcggcctccggcggccgtcgcgctcaggttgccgaactggcgcgcgccgggatggcggttgggatcgcgggtctgtttattgaagcgcatccggatccggagcacgcgaaatgcgacggtccttccgcgctgccgctggataaactggagccgttcctcaagcagatgaaagccatcgacgatctcgttaaaagctttgatgagctcgataccagcaagtaa

SEQ ID NO: 256327 - DNA, 813 bp, Klebsiella pneumoniae
atgaggtcgttagctgatttcgaatttaataaagcgccgttatgtgacggcatggtcctcatttctgaattaatccgcgacgattttccgacgcactatgtgcaggatgagctggagcggctgctggccctggcgcgtgaggagattgcctcctcgtgggaccaggagcgccagatagagcgtttgctggagcttttctacaatgactggggctttagcgattcgcgcggcgtttaccgtctgtccgacgtgctatggcttgataaagtgttgaataatcgccagggtagcgcggtgtcgttaggcgcgatcctgctgtggattgctcagcgtctggcgctaccggtggtgccggtgattttcccgacccagatgctgcttcgcgccgaccctgaagagagcgaggagatgtggctcattaacccgtttaacggcgaaacgctcaacgagcatacgctggaagtgtggctgaagggcaatattagcccagttgccgagctgtttaacgaagaccttgatgaagcggataacgcggaggtgatccgcaagctgctcgatacccttaaatcggcgctgatggaagagcggcagatggagctggcgctacggaccagcgaagcgctgctgcagttcaatccggaagacccgtacgaaattcgcgaccgggggctgatatacgcccagctggattgcgatcacgtggcgctgcaggaccttaattacttcgttgaacagtgcccggaggatcccatcagcgagatgatccgcgcgcagatcaacaccatttcgcacaaacaaattacattgcattaa

SEQ ID NO: 256328 - DNA, 393 bp, Klebsiella pneumoniae; identical to SEQ ID NO: 175369

SEQ ID NO: 256329 - DNA, 840 bp, Klebsiella pneumoniae
atgacttttcagcaatggctgacgcaggccatcgctcgtctgagccaaagtgaaagcccgcgccgggatgccgaaatcctgctgggtcacgtgaccggcaaagcgcggacctatattctcgcctttggcgaaacggcgctgacggcggagcaggccgtcgagctggaaacgctgctgagccgtcgcgcacggggcgagccggtggctcacctggtgggccagcgcgaattctggtcgctgccgctgttcgtttctccggccacgctgatcccgcgtccggataccgaatgccttgttgagcagacgctgatgcggttacccggcaagccgtgccgcattctcgatctcggtaccggcaccggcgctatcgctctggcgctggccagcgaacgccccgattgccacgtcaccgccgttgactttatgcccgatgcggttgcgctggcggcgcgtaacgttgagcacctcgccatcaagaatgttaccgtgctgcaaagccactggtatagcgcgctcgccgcacagccgttcgacatcatcgtcagtaatccaccctatattgatgaaaccgacccgcatcttgcgcagggcgatgtgcgctttgagccaaaaacggcgctggtcgccgccgatggcggcctcgccgatctggcttacatcattcgcgaaggccgccgcttcctgactcccggcggtttgatgctgctggaacacggctggaagcagggggaagcggtgcgcgcaatctttcgcgaggcgggttatggcaatattgctacctgccgcgactacggcgacaacgagcgtctgacgctcgggcaatatcagggaggcgtatga

SEQ ID NO: 256330 - DNA, 135 bp, Klebsiella pneumoniae
gtgaccgatcaccgcatcaacctgacgctttaccgtctggatgaagcgatggaaggcaagctggatatgctgattgagccgatcgttcaggagtatcaggccgatcagctggcagccctttccgagcaggaatga

SEQ ID NO: 256331 - DNA, 1512 bp, Klebsiella pneumoniae
atggagttcagtgtaaaaagcggtagcccggagaagcagcggagcgcctgtatcgtggtcggcgtctttgaaccacgtcgcctctcccccatcgccgaacaactcgataaaatcagcgacggctacatcagcgccctgctgcgtcgcggcgagctggaaggcaaacctggccagacgttattgctgcaccatgtgccaaacattctgtctgagcgcattctgctgattggctgcggcaaagagcgcgagctggatgagcgtcagtataagcaggtcatccagaaaaccatcaataccctgaatgataccggctcaatggaagccgtctgcttcctgaccgagctgcacgtcaaaggccgtaacaactactggaaagttcgccaggcggttgaaaccgccaaagagacgctgtacagcttcgaccagctgaagaccaacaaaagcgagccgcgtcgcccgctgcgtaaaatggtctttaacgtgccgacccgtcgcgagctgaccagcggcgaacgcgccattcagcatggcctggcgattgccgccggcatcaaagcggcgaaagatcttggcaatatgccgccgaacatctgtaacgccgcctatctggcttcccaggcgcgtcagctggccgatacctacagcaaaaacgtcatcacccgggtgatcggcgaacagcagatgcgtgagctggggatgaacgcctacctcgccgtcggcaatgggtcgcagaacgagtcgctgatgtcggtcatcgaatataaaggtaacccggctgaggacgcgcgccctatcgtgctggtcggtaaaggcctgaccttcgactccggcggtatctccatcaagcctgccgaaggcatggacgagatgaagtacgacatgtgcggcgcggcggcggtgtacggcgtgatgcggatggttgccgaactgcagctgccgctgaacgtcatcggcgtgctggcgggctgtgaaaacatgcctggcggccgcgcctatcgtccgggtgacgtcctgaccacaatgtccggccagacggtggaagtgctgaacaccgacgccgaaggccgcctggtgctgtgcgacgtcctgacctacgttgagcgcttcgagccggaagcggttatcgacgtggcgacgctgaccggggcctgcgtgattgccctcggccatcacatcaccggcctgatgtcgaaccataacccgctggcccatgagctgatcggcgcctccgaactggcgggcgaccgcgcatggcgtttgccgctggccgacgagttccaggatcagctggagtccaattttgccgatatggcgaacattggcggccgtcctggcggcgcgatcaccgccggctgtttcctgtcgcgcttcacccgcaagtacaactgggcgcacctcgacatcgccggtactgcctggcgttccggtaaggccaaaggcgcgaccggtcgtccggtggcgctgctgtcgcagttcctgctcaatcgcgcgggttttaacggcgaagagtga

SEQ ID NO: 256332 - DNA, 945 bp, Klebsiella pneumoniae
atgatcatcgttaccggcggcgcaggctttatcggcagcaatatcgttaaggcgctgaatgacaaaggcattaccgacattctggtcgtagataatctgaaagacggcactaaattcatcaacctggtggatttgaacattgccgattacatggataaagaagacttcctgatccaaattatggcgggcgaggagttcggcgatatcgacgccattttccatgaaggcgcctgctcgtccactacagagtgggacggcaagtacatgatggataacaactatcagtattccaaagaggtactgcactactgcctggagcgtgaaatcccgttcctgtacgcctcttccgccgcgacctacggcggccgcaccagcgactttattgaatcccgcgaatacgaacagccgctcaacgtttacggctactccaagtttctgtttgatgaatacgtccgtcagatcctgccggaagcaaattcgcagatcgtcggcttccgctatttcaacgtctacgggccgcgcgaaggtcataaaggcagcatggccagcgtcgcgttccacctgaacactcagctgaataatggcgaaagtccgaaactgttcgaaggcagcgatagcttcaagcgcgacttcgtctacgtcggcgacgtcgcggcggtaaacctgtggttctgggaaaatggcgtttccggcatctttaaccttggcaccggccgcgcggagtctttccaggccgttgcagacgcaacgctggcttatcataagaaaggcagcatcgaatacattccgttcccggacaagctgaaaggccgctatcaggcgtttacccaggcggatctcactaacctgcgcgcagcgggctatgataaaccgttcaagaccgtcgccgaaggcgtaacggaatatatggcctggctcaatcgcgacaatcatgcgaattcataa

SEQ ID NO: 256333 - DNA, 1194 bp, Klebsiella pneumoniae
atgcgtggtgatttctacaaacagttaaccaatgacctcgataccgcgcgcgcggaagggttgtttaaagaagagcgtattattacttcggcgcagcaggcggatatcaccgtcggcggtagccaggtcattaacttctgcgccaataactatctgggtctcgcgaaccatccggatctcattgccgccgcgaaaagcggtatggatagccacggttttggtatggcctccgtgcgctttatctgcggcactcaggatagccacaaagcgcttgagaagaagctggcggattttttaggcatggaagatgcgattctgtactcctcctgcttcgacgccaacggcggactgtttgaaactctgctcggcgcagaggatgcgattatctccgatgccctgaaccacgcgtcgatcatcgacggcgtgcgcctgtgtaaagcgaagcgcttccgctatgccaacaacgacatgcaggagctggaagcccgtttgaaagaggcgcgtgaagccggcgcgcgtcatgtgctgatcgccaccgacggcgtgttttcgatggacggcgtgatagccaacctgaaaggcgtttgcgacctcgcggataaatacgatgcgctggtgatggtcgatgattctcatgctgtgggtttcgtaggggaaaacggccgcggttcccatgagtactgcgacgtgatgggccgcgttgacattatcaccggtacgctgggtaaagcgctgggcggcgcgtccggcggctatactgccgcgcgcaaagaagtcgtcgagtggctgcgccagcgctcgcgtccgtatttgttctccaactcgctggctccggcgattgtcgccgcttcgatcaaagtgctggagatggtggaagccggcagcgaactgcgcgaccgcctgtggtcgaacgcgcgcctgttccgcgaaaaaatgactgcggcagggtttaccctcgcgggcgccgaccacgccattatcccggtaatgctcggtgaagccaccgtggcgcagcagttcgcgcgcgagctgcaaaaagaaggtatctacgtcaccggattcttctatccggtggttccaaaaggccaggcgcgtatacgtacccagatgtctgcggcgcatacccctgaacaaattgaacgtgcggtggaagcctttacccgcatcggtaaacaactgggcgtcattgcctga

SEQ ID NO: 256334 - DNA, 1026 bp, Klebsiella pneumoniae
atgaaagcgttatccaaactgaaggcggaagaaggcatctggatgaccgacgtaccggaaccggaagtcggccacaacgatctgctgattaaaattcgcaagaccgcgatttgcggtaccgacgtacatatctataactgggacgaatggtcgcaaaagaccattccggtaccgatggttgtgggccatgaatacgttggcgaagtggtgggtatcggtcaggaagttcgcggctttaagctgggcgaccgcgtttccggcgaggggcatatcacctgcggccactgccgtaactgccgcgccggccgtacgcatctgtgccgcaatacgacgggcgtcggcgtgaaccgtccgggctgttttgccgaatatctggtgatcccggcgtttaacgcttttaaaattccggacaatatctccgacgatctggcatcgatttttgacccgtttggcaacgctgtacataccgcgctttcattcgacctcgtgggtgaagacgtactggtttccggcgcaggccccatcggcgtgatggcggccgcggtggcgaaacacgttggtgcgcgcaacgtcgtgattaccgacgttaacgaatatcgcctggaactggcgcgcaaaatgggcgtcacccgggcggtgaacgtggcgaaagagaaccttaacgatgtgatggccgagctgggcatgacggaaggcttcgatgtgggcctcgagatgtccggtgcgccgccggcgttccgcaccatgctcgataccatgaaccatggcgggcgcatcgccatgctgggtattccgccgtcggatatgtccatcgattggaccaaggtgatcttcaaggggctgtttatcaaagggatttatggtcgcgaaatgttcgaaacctggtacaagatggccgcgctcatccagtccggcctcgatctgtcgccgatcatcacccaccgctttggcattgatgatttccagcagggctttgacgcgatgcgctccggtcagtctggcaaagttattctcagctgggattaa

SEQ ID NO: 256335 - DNA, 798 bp, Klebsiella pneumoniae
atgcttaaactctctgtatgcttattgacctgtaattcatcccgcttattacgggaggttttaccacctttgcttaaggtggccgatgaatttatcgtcatcgactcaggcagcacggatgccacgctgcagatttgccaacagttcgggctcaccgttcaccatcatccctatacttctcacggcgcgcagatgaactacgcgacctctctggcctgccacgattgggtgctgtgtatggatagcgatgagattcttgacgacgaagtggtggcggctattctggcgctgaaggcgggggacgatcctgacccggcccgcgcctggcgactgccgcgttactggttcgtactgggcgaggaggttcgcaccatttatccggtatcatcgccggatttcccggttcgtttgtttaatcgctccgtcgccaggttcaacgatcggcctgtagacgatcaggtcgtgggctttcagcactccagcaagctaccgggcttcgtgcgacatgacaccttttactccctgcatgaggtgtttaataagctcaatagctacactacgcggctggttaaataccagaagatcaggccatctctcgcacgcggagcgatcagcgcgattggcgctttctttaaatggtatctgttcagcggggcctggcgaaagggtaaggtgggcgtggtcaccgggctctatgcgaccttttatagctttctgaaatactttaaagcctggtatgcccatcaggataagccggaatccgcggcggataaacgccgggactccaggacggtttag

SEQ ID NO: 256336 - DNA, 888 bp, Klebsiella pneumoniae
atggcgtcgccggtttttgccggcaaactctccattgttatcgacgactttggctatcgtccacaaacggaaaatcaggtgctggcgctgccagcgacgatctccgttgccgtacttcctaatgcgccccacgcccgcgaaatggcgacgaaagcgcataatctcggccacgaggtgctaattcacctgccgatggcgccgatcagtaaacagccgctggaaaaagataccctccgcccggatatgaacagcagcgagatagaacgcattatccgcgaagcctacggtaaggttccgtacgccgtggggctgaataaccatatgggcagcgccatgacgtcgaatctcttcggtatgcagaaagtgatgcaggcgcttgagcgctacaatctctactttctggatagcgtcaccatcggcaatacccaggccatgcgggcggcgcagggcaccggcgttaaggtgattaagcgtaaggttttcctcgacgatacccaaaacgaagcggatattcgctatcagttcaaccgcgccatcgctttggcgcgacgcaacggttccgcaattgctatcggccacccgcacccgacgacggtgcgcgtgctgcagcagatggtgtataacctgccgccggatatcaccctggttcgcccgagcagcctgctcaacgagccgcaggtggacacctcaacgccgaacgctgccccgccgccgaaacagccgccgcgcaacccgttccgtggcgtgaagcagtgcaaatctaagcgccctccggagccgatcaacgccagccgcttctttaccattctgagcgaaagcatcagcaagagtacgctgatgcagtattaccagctgaagtggcagggctgggatacccccaccaactaa

SEQ ID NO: 256337 - DNA, 1272 bp, Klebsiella pneumoniae
atgaggggaaaggcgacttattcaactacatggatcgcaacggcagttcgatccgtcctttacgccagcgcgcttagcgctggcgtattgctgtgcgccgcatctgctcacgccgacgatcgcgaccagcttaaatccattcaggccgacatcgccgctaaacagcgggcgattaaacagcagcagcagcagcgtgcttccctggttgcccagcttaaagcgcaggaggaggccatctccgccgccgcgcgcaagctgcgcgaaacccaggaaacgctgaaccagctaaataagcagatcgacgaaatgaacgccgcgctcgcgaagctggagcgtcagcgcacctcgcaggagcgcaacctttccgcccagctcgatgccgcgtttcgtcaggggccgcacaccggcatccagatgatcctcagcggcgaagaggggcagcgtaatcagcgtctgcaggcctactttggctatctgaaccaggcgcgtcaggaaaccatcgcccagctcaagcaaactcgcgaagacgtggcggtgcaaaaatccatgctggaagagaaacagagccagcagcaaaccctggtgtacgagcagcgcgcccagcagagcaagctggagcaggcgcgcaacgagcgtaaaaaaaccctcgccagccttgaatcctctattcagcaaggccagcagcagctcagcgaaatgcgggctaacgaatcacgcctgcgcggtcgcatcgcccaggcggcggcggcggccaaagcgcgagcggatcgcgaagcccgcgaagcgcaggacgtacgcaatcgccagcaggaagcctcacgtaaaggcaccacctacaaacctaccgaaagcgaacgctcgctgatgtcccgcaccggcgggcttggttcaccgcgaggccaggcattctggccggttcgcggctcaattctccatcgctatggcgaacagctgcaaggtgaactacgttggaaggggatggttatcgctgcgtctgaaggcaccgaggtcaaagccgttgccgatggtcgggttattcttgccgactggctgcagggctatggcctggtggtggtcgttgaacacggcaaaggcgacatgagtctttacggctataaccaaagcgcgctggtcagcgtcggcactcaggtccgggcgggccagccgatcgctctcgtaggcagcagcggcggtcagggccgcccgtcgctctatttcgaaattcgccgccagggtcaggcggtcaatccacagccgtggttgggaagataa

SEQ ID NO: 256338 - DNA, 1545 bp, Klebsiella pneumoniae
atgtcggtttctaaaaaacctatggtactggtgattcttgatggctatggctaccgtgaagaccagcaggataacgctatttacagcgccaaaacccctgttatggacgcactgtgggcaaaacgtccgcatactctgattgatgcgtcaggcctggaagtcggtctgccggatcgtcaaatgggtaactccgaagtgggccacgtcaacctcggcgcgggccgcatcgtgtatcaggacctgacccgcctggacgttgaaatcaaagaacgcaccttcttcgccaacccggtactgaccggcgcggtggataaagccgttgccgctggcaaagccgtgcatatcatgggcctgatgtctccgggcggcgtccacagccacgaagaccacatcatggcgatggtggagctggcagccgaacgcggcgcggataaaatctatttgcacgctttcctcgacggccgcgataccccgccgcgcagcgctgaaaagacgctggcgaaattcgaagataaatttgccgcactcggcaagggccgcgtcgcctcaatcattggccgctactacgccatggatcgcgacaaccgttgggatcgcgttgagcaggcttacgatctgatgactctggcgaaaggcgagttccaggccgataccgccgttgcgggcctgcaggccgcttatgcacgcgatgaaaacgatgaattcgtgaaagcaaccgttattcgcgctgaaggccaggccgatgcggccatggaagacggcgatgcgctgattttcatgaacttccgtgccgaccgcgctcgcgaaatcacccgcgccttcgttaacgccgatttcgacggatttgcccgtaagaaagtggttaacctcgatttcgtcatgctgaccgagtacgccgcggacattaaagtcgcctgtgcttatccgccggcatctctggtgaacaccttcggcgaatggatggcgaaaaatgacaaaacccagctgcgcatctccgaaactgaaaaatacgctcacgtcaccttcttcttcaacggcggcgttgaagagccgttcaaaggcgaagagcgcattctgatcaattcaccgaaggtcgcaacctacgatctgcagccggaaatgagctccgctgagctgaccgaaaaactggttgccgccatcaagggcggtcagttcgataccatcatctgtaactacccgaacggcgatatggttggccacaccggggtgatggaagccgccgttaaagcggtagaagcgctggatcgctgcattgacgaagtgagcaaagccgttgaatccgttggcggacagctgctgatcaccgcagaccacggcaacgccgagcagatgcgcgatccggccactggccaggcgcacaccgcgcacaccaacctgccggttccgctgatttacgttggcgataaaaacgtcaaagcggtcaacggcggcaaactttccgacatcgcgccgaccatgttgacgctgatgggaatggaaatcccgcaagagatgactggcaagccgctgttcatcgtggaataa

SEQ ID NO: 256339 - DNA, 432 bp, Klebsiella pneumoniae
atgcaagaaattatgcaattcatcagccgtcaccccgtcctgagcatcgcgtgggtcgcgctgctggcggcggtgctgttcaccacctttaaagggctgatgtcgaaagttaaagtcatcacccgcggtgaagcgacgcgcctgatcaacaaagaagatgccgtggttgtcgacctgcgtcagcgtgacgatttccgcaaaggtcatattgcgggttctattaacctgctgccgagcgatatcaaagcaaataacgtcggtgagttggaaaagcacaaagcacaacccattatagtagtagacggctcaggtatgcaggcgcaagaacccgccagcgcgctgaacaaagccggttttgaaaaggtcttcgtactgaaggaaggcatcgcaggctggagcggcgagaaccttccgctggtacgcggtaaataa

SEQ ID NO: 256340 - DNA, 252 bp, Klebsiella pneumoniae
atggccaatattgatatctataccaaagcgacatgtccgttttgcgtgcgtgcgaaagccctgctgaacagcaagggcgtcacgttcaacgagttgcctatcgatggcgatgctgcaaagcgtgaagagatgattaagcgcagcggtaggacgacggttccgcagatttttattgatgcgcagcacattggcggctgtgacgacttgtatgcgcttgattcacgtggtggactcgatcccctcttgcgctaa

SEQ ID NO: 256341 - DNA, 720 bp, Klebsiella pneumoniae
gtggcgggtaatgtcggcggttacgttcgggttgccgtcgcggtcaccgcccatccacgaggtaaagcggaccgggacaaaatccaccggcagccgatagttgaggttatcttccagctgctcattcagctcacgcaggtagtttggtacgccttcccacaggctattttcgacaaccgcgaagccccatttggcttcatccaccggggtagggcgatgcttacggatttcatcggtatgccaggactgggcaatcagctggcgaagacggcgcatgacctggtggcgctcatagtcagcaatatcgttattatcgagcagcttcaggcagttgttgatctcgcccatcttgtggatcagcgtacgacgcgtgatttctgtcgggtgtgcggtcagcaccagttccagcgacagggattcaacggcttgtttaataatcgtttcgttgagattcggttgctctttgagctttctcagggtgcgggcaatcacttcaggattactggccgcttcgccttttggcgaaatgctgtggtattgctcagcggtattggccaggttcagaaactggctaaaggcgcgcgccaccggcagcagctcgtcgttggacaagttttgcagcgtggtgagcagctcctggcggttggcttcattgccagcgcgagaagatttggacaacttacggatagtttcgacacgatcaagaatgttttctcctag

SEQ ID NO: 256342 - DNA, 1152 bp, Klebsiella pneumoniae
atgaaaaacaatttaccgccctttatcgagatttaccgcgcgctgatcgccacaccttccatcagcgcaaccgaagaggcgctggatcaaagcaatgagtctttaatcaatttactggcgggctggttccgtgatatcggctttaatgttgaagttcagccggtgccggatacgcgtaataaattcaacctgctggcgagtaccggccacggcgcaggcggcctgctgcttgccgggcacaccgataccgtcccgtttgatgatggccgctggactcgcgatccttttaccctgaccgagcatgacaataagctatacggcctgggcactgcggatatgaaaggcttcttcgcctttattctcgatgccctgcgcgacgtcgatgtggctaaactgaaaaagccgctctatattctggcaacggccgatgaagagaccagcatggccggcgcgcgctatttcgccgaaacgacccaactgcggccggactgcgccattatcggcgaaccgacttcgctgcagccggtacgcgcgcacaaaggccatatctctactgccgttcgcgttcaggggcagtctggccactccagcgacccggcacgcggcgtcaacgccattgagctaatgcacgatgccatcggccgcatcatgcagctgcgcgatgacctgaaagagcgttatcactacgccgcatttaccgtcccgtatcccacacttaaccttggggccattcacggcggcgatgcctccaaccgcatttgcgcctgttgcgaactgcatatggatattcgcccgctgcccggaatgaccctcaacgatcttaacgggctgctgaacgaggcgctggcaccggtgagtgagcgttggcctggtcgcctgaccgttgctgaactgcatccgccgatccctggctacgaatgcccaccggaccataagctggttgaggtagtcgaaaaactgctcggcgcgcagaccgacgtggtcaactactgcaccgaagcgccgtttattcagaccctctgtccgacgctggtattaggcccgggctcgattaaccaggcccaccagccggatgagtatctggaaacgcgctttattaagccaacccgcgagctcattacccaggtggtccaccatttctgctggcattaa

SEQ ID NO: 256343 - DNA, 1005 bp, Klebsiella pneumoniae
atgttgaacacgctgattgtgggcgccagcggttatgccggcgcagagctagtggcctatgtaaatcgccatcctcatatgaccataaccgctttgacggtctccgcgcaaagcaatgatgcgggaaaattagtttccgatttgcatccgcaactgaaaggcattgtcgatctgccgctgcagccgatgtctgatatccgcgagtttagcgccggagtcgatgtcgtttttctggctaccgcccatgaagtgagccacgatctggcgccgcagtttctcgcggcgggctgcgtggtgttcgatctctccggggcgttccgcgtgaatgacggcgccttctatgaaaaatattatggtttcactcatcagcaccctgaactgcttgaacaggcggtttacggcctggccgagtggagtgtcgaaaagctaaaagaggcaaatctgattgccgtacccggctgctacccgacggcggctcagctatcgttaaaaccgctgatcgatgcgggactgctggatcttaaccagtggccggtgatcaacgcgaccagcggggtcagcggcgccgggcgtaaagcctctctcggtaacagcttctgcgaagtcagcctgcaaccctacggcgttttcaatcaccgccatcacccggaaatctccacccacctgggcgcggacgttatttttaccccgcatctgggcaattttaagcgtgggattctggaaaccattacctgtcgtctgaagcccggcgtcagtaaagaacaggtcgcggcggtgttccagcaggcctatgcggataaaccgctggtacgtttatacgatcgtggggtccctgcattgaaaaatgtcgtgggtctgccattctgtgatatcggttttgcagtccaggatgaacatatcatcgtggtggcggcggaagataacctgctgaaaggtgcggccgcgcaggccgtacagtgcgctaacattcgtttcggcttcgctgagacgcagtctcttatttaa

SEQ ID NO: 256344 - DNA, 774 bp, Klebsiella pneumoniae
atgaatcctttaattatcaaactcggcggcgtcctgctggacagcgaagaagcgctggagcgcctgtttactgccctggtgaactaccgtgaatcacatcagcgcccgctaattattgtgcacggcggcggctgcgtggtggatgaactgatgaagcagctcaatctgccggtgaacaagaaaaatggtctgcgggtcaccccggcggatcagatcgacattattaccggcgcgctggcgggaaccgccaataaaacgctgctggcgtgggcgaagaaacacggcctggcttccgttgggctattcctcggcgatggcgatagcgtcaaagtgacgcagcttgatgaagagctcggccatgtcggatttgctcagccgggttctccggcgctgattaacacgctgctggcgggcggttatctgccggttgtcagctccatcggcgttaccgatgacggtaagttaatgaacgtcaacgctgaccaggcggcgaccgcgctggcggcaacgcttggcgcagacctgattctgctgtcagacgtgagcggcattctcgatggcaaaggtcagcgtattgctgaaatgaccgccgggaaagctgaacaactgatcgagcagggcattatcaccgacggaatgatcgtcaaagtgaatgcggctctggacgcggcgcggacattaggccgcccggtcgatatcgcctcctggcggcacgcagagcagctccctgcgctgtttaacggtacgccgatcggcacgcgtattctggcataa

SEQ ID NO: 256345 - DNA, 1374 bp, Klebsiella pneumoniae
atggcactttggggtgggcgttttactcaggcagcggatcagcggttcaaacagttcaacgactctttgcgctttgactatcgcctggcggagcaggatatcgttggctctgttgcctggtccaaagcgctggtgacggtgggcgtactgaccgctgatgaacagcagaagctggaagaggcgctgaacattctgctggaagaagtacgggctaatccgcagcagatcctcgaaagcgatgcggaagatattcatagctgggtagaaggtaaactgatcgacaaggttggccaactgggcaaaaagctgcacaccgggcgcagccgtaatgaccaggtcgcaacggacctgaagctgtggtgcaaagataccgtggtggagctgctgtcggcgaatcgtcagctgcaaagcgcgctggttgagacggcggaggctaatcaggacgcggtcatgccgggctatactcacctgcagcgcgcgcagccggtgacgttcgctcactggtgtctggcctatgtcgaaatgctggcgcgtgatgaaagccgcctgcaggatgcgctgaagcgtctggacgtcagcccgctgggctgcggcgcgctggcggggaccgcctatgaaatcgatcgcgaacagcttgccggctggctgggtttcgcaacggcgacccgcaatagcctggacagcgtgtccgatcgcgatcacgtcctggaactgctgtccgatgcctcaatcggcatggtccacctgtcgcgttttgccgaagatctgatcttctttaataccggcgaagcgggctttgtggagctttctgaccgcgtgacgtcgggttcatccctgatgccgcagaagaaaaacccggatgcgctggagctgatccgcggtaaatgcggccgcgtgcagggtgccctgaccggcatgatgatgacccttaaagggctgccgctggcctacaacaaagatatgcaggaagataaagaaggcctgtttgacgcgcttgatacctggctcgactgcctgcatatggcggcgctggtgcttgacggtattcaggtgaaacgcccgcgctgtgaagaagccgcgcagcagggatacgcgaatgccaccgagctggcggactatctggtagctaaaggcgtaccgttccgtgaggcgcaccatattgtgggtgaagcggtagtagaagccattgcccagggcaaaccgctggaagatctccctctggccaatttacaaaaatttagcggcgttattgctgatgacgtctatccgattctttcgctgcagtcgtgtctggataagcgagcggctaaaggcggcgtttctccgcagcaggttgctcaggcgattgccgacgctaaatcgcgcctggtttga

SEQ ID NO: 256346 - DNA, 918 bp, Klebsiella pneumoniae
atgaatattcgcgatcttgaatatctggtagcgctagctgaacaccgccacttccgccgtgcggcggattcttgccacgtcagtcaacctacgcttagcgggcagatccgtaagctggaggatgaactcggcgtgatgttgctggagcgcaccagccgtaaggttctgttcacccaggcagggctgctgctggtggatcaagcgcgtaccgtgctacgcgaagtcaaagtgcttaaggaaatggcgagccagcagggagagaccatgtccgggccattgcatatcggactgatcccgaccattggcccttatctgctgccgctgattatccccatgctgcaccagacctttccgaagctggaaatgtatctgcatgaagcgcaaacccatcagctgctggcccagcttgatagcggtaagctcgactgcgcaattctggcgctggtcaaagagagcgaagcttttattgaggtgccgctgtttgatgagccaatgatgctggctatctatgaagatcatccgtgggcaaaccgcgagtgcgtgccgatgtcggatctggccggtgaaaaactgctgatgctggaagatggccactgcctgcgcgatcaagcgatgggcttttgctttgaagccggtgccgatgaagacacccacttccgcgcgaccagtctcgaaacgctgcgtaacatggtggctgccggtagcggcatcaccctgttgcccgccttagccgtgccgcaggagagaaagcgcgatggtgtggtctatgtgccttgcattaagccggaaccgagacgtaccgttgggctggtttatcgcccgggttctccgctgcgtagccgttatgaacatctggcggaggccatccgcagtaaaatggatggccatttcgacgcggcgttaaaacaggcggtttaa

SEQ ID NO: 256347 - DNA, 1401 bp, Klebsiella pneumoniae
atgtcacactcttgggattatgatgcaattgtgattggttccggtccgggcggagaaggtgccgccatggggctggtgaaacagggagcacgcgttgccgtcatcgagcgctaccataacgtcggcggcggttgtacccactggggtaccatcccgtcaaaagccctccgccatgccgtcagccgtattatcgagtttaaccaaaaccccctctacagcgaccattcccgtcttcttcgttcttccttcgccgacatcctgaaccatgccgacagcgtcattaaccagcaaacccatatgcgtcagggtttctacgagcgcaaccactgtgaaatcctgcagggcaacgcccattttgttgatgaacacactatcgcgctggaatgccacgacggtaccgtggagacggtgacggcggaaaagttcgtcattgcctgcggttcacgcccctatcacccggcagacgtcgactttcatcatccgcgcatttatgacagcgactcgatcctcagcctgcatcacgaaccgcgccatgtgatcatttatggcgccggggtgatcggctgcgaatatgcgtcgatcttccgcgggatggaggtcaaagtggatctgatcaacacccgcgatcgtctgctggcgtttctcgatcaagagatgtctgattcgctctcctatcacttctggaacagcggcgtggtgattcgtcacaacgaagagtacgaaaagattgaaggcgttgatgacggcgtcatcatgcatctgaaatccggcaaaaagctcaaggcggactgcctgctctacgccaacggccgtaccgggaataccgactctctggcgctggaaaatatcggtctgcagaccgatagccgcggtcagctaaaggtcaacagcatgtaccagaccgccctgccgcacatctatgccgtcggcgatgtgattggctatccgagcctggcctccgccgcgtacgatcaggggcgcattgcggcccaggcgctggtgaaaggcgaagcatctgcgcatctgattgaggatattcctaccgggatttacaccattccggaaatcagctcagtcggcaaaaccgagcagcagctgacggcaatgaaggtgccttatgaggtcgggcgcgcgcagttcaagcacctggcgcgagcgcagattgtcggtatgagcgtcggtacgttgaagatcctgtttcatcgcgaaacgaaagagatcctcggcattcattgtttcggtgagcgcgcggccgaaattattcacatcggccaggcgataatggagcagaaaggcggcggtaacaccattgagtacttcgttaacaccacctttaactacccgacaatggcggaagcctatcgggtagccgcgttgaatggcttaaaccgcctgttttaa

SEQ ID NO: 256348 - DNA, 402 bp, Klebsiella pneumoniae
atgctgaatttcacgcgccacggcggcacgaaacgccgcggatgtaccggagcgttcacgcagcagcagacggaaggcattcgggttgttaccgatgaattccataaaggtggaaacagaggtacgaatgacgctgccccctttggcgatacgctgccgcgcctgacgcatcagctgacgcagcatcagcccgctttcatccaccatggtcaaacccagctcatcgacatcgcggaaatggcgatagaaggacgttggggcgatcccggcttcccgcgccacttcgcgcaggctcaagctggcaaaactccgttcagcactcagctggctaaatgctgcttccaccagcgaacgccgggttttttctttttgttgcgctcttacgcccatcacgttgtctga

SEQ ID NO: 256349 - DNA, 942 bp, Klebsiella pneumoniae
atgaaccgccaacacatcggacggcgttttcgccatcgagatcacgtaggcggcgatcgatccgcgcggcgcctcggcgatcaccttgcaggtgtcgagaacttcacgcgtctcttcgcttggctcccactggcgcggcagcagcggacgtttggaattcagttcgcggatcaggaaagcctgtttgtcggcttccgaccagctttcgtagtcgccgatcccgaggtaacgggtcatttcacccagcgcttcggtatggcgggtgctttcctgacgaatatcaatacgcaccagcggtacgccgaaagacttcacgcggcgcagggtgtcgagcagttcgccgttggcgataatgcccatgccgcaggcctgcagcgatttatagcaggcgtacagcggctcccacagctgctcgttctgagtgatcagtcccgccggtttcggcagcttctgacctttcagacgcgcttccagccaggcctgggtctccatcagctgagagcgcagttttttcatcagataacggtaaggttcctgagcgccctcggcgccagccagggcgcgcagctcgtcggtacactccaccatcgacagctcggagatcagcacctgcacgtctttgaggaacaggtcggtcgctttccagcggctgagcagcagcacgtggcgggtgatgtcggcagtcacgttcgggttgccgtcgcggtcgccgcccatccacgaggtgaaacgcaccgggacgaagtccaccggcagctgatagccaaggttggcttccagctgttcgttcagctcgcgcagatagttaggcaccccttcccacaggctgttttccaccaccgcgaagccccatttggcttcatcgaccggggaagggcggtgcttacgaatttcatcggtatgccacgactgggcgatcagctggcgcagacggcgcattag

SEQ ID NO: 256350 - DNA, 1104 bp, Klebsiella pneumoniae
atgactccacgcaattatctgctgctgacccccggcccactgaccacttcccgtacggtaaaagaggcgatgctgttcgacagctgtacctgggacgatgactacaatctcggcgtggttcaggccatccgccaacggctggtggaactggcgacgcccgccgacggctacacttcagtactgctgcaaggcagcggtagctacgcggttgaggcagtgctcggcagcacgatcggcgtgcaggacaagattttgattatcagcaatggtgcctacggcgcgcgcatgatcgagatggcgaaactgttgaacattgcgcaccacccttacgactgcggtgaagtcgcgcgaccggacgctgcagcgatcgaacggatcctgcaaaccgacccggcgatcacccatatcgctatggtccattgcgaaacgacaaccggtatgctcaacccgatcgaagcggtggcggcgctggcaaaacggtacgacaaacgctacatcgtcgatgccatgagcagcttcggcggcattcccatggacgtcgccgcgctgaacattgactatctgatcagctccgccaacaaatgcattcagggtgtgcccggcttcgccttcgtcattgcccgggaggcggaactggcaaactgtcagggccgctcgcgctcgctgtcgctggatctctacgcccagtggcgctgcatggaggataaccacggcaagtggcgctttacttcaccgactcataccgtgctggcctttgcccaggcgttaaaagaactggcggaggaaggcggcgtgagcgcgcgtcaccagcgatactgcgctaaccagcagcgtctggtggccggaatgcgcgcattaggctttcagccgctgctcaacgatagcctgcactcgccgatcatcaccgcgttttactccccggatgcgccgcagtatcgctttaaggatttctatcagcggcttaaagagcagggtttcgtgatctacccgggcaaggtgtcgcaaagcgactgcttccgtatcggcaacattggcgaagtgtacgacgccgacatcaccgccctgctggcggccattaaaaacgccatgtactggcaacgctaa

SEQ ID NO: 256351 - DNA, 870 bp, Klebsiella pneumoniae
  misc_feature (278)..(287): n is a, c, g, or t
atgaaccgtattaacgccgttattcttgattgggcaggcaccaccgtcgactttggctccttcgcgccgacgcagattttcgttgaggccttccgtcaggcttttgctgtggagattacactcgaagaagccagggtgccgatgggtctcggcaaatggcagcatattgcagcgctggggaaactcccctccgtggacgcccgctggcaggcgaagtttggccgcgcgatgaacgctgccgatatcgatgcgatctatgccgcgtttatgccgctgcnnnnnnnnnngatgaacgctgccgatatcgatgcgatctatgccgcgtttatgccgctgcagattgctaaagtcgtcgatttttctgcgccaatcgccggggttgtcgacaccattgccgcgctgcgcgccgaaggtataaaaattggctcctgttccggctatccgcgtccggtgatggaaaagctggcgccggccgccgccgcgcagggctatgcgcctgaccactgggtagcgacggacgacctcgccgtcgggggacggccgggaccatggatggcgttgcagaacgtcattgtcctcggcatcgactcggtagcccactgcgtcaaggttgatgattccgctcccggcattaccgaaggattaaacgccgggatgtggagcgtgggtctggcggtttccggtaacgaattcggcgccagctgggaggaatatcagcagatgagcgccgaagagatcgccgcccgccgcgagcacgccgccgggaagctgtccgccgccggggcgcattacgtcgtggatacgctggcggatttaccgggcgtcattgccgacatcaaccgtcgcctggcgcagggcgaacgcccgtag

SEQ ID NO: 256352 - DNA, 1182 bp, Klebsiella pneumoniae
atgactccttcgaatgcttctgcgccgcaggctaatcaggcggcgcgacccaactggtcggcggtttttgcggtggccttctgcgttgcctgcctgattaccgttgagttcctgccggtaagcctgcttacgccgatggcgcaggatttgggcatctcagaaggcgttgccgggcagtcggtcaccaccaccgcgtttgtggcgatgtttgccagcctgtttatcacctcgatcatccgcagtaccgatcgtcgctacgtggtgattctgttttccgtcctgctgaccgtctcttgtctgctggtctcctttgccaacagtttctccttgcttctggtggggcgcgcctgccttgggctggcgctgggcggtttttgggcgatgtcggcgtcgctcaccatgcggctggtgccgatgcgcgtggtgcccaaagcgctgtcggtcattttcggcgcggtatcgatagcgctggtgatcgccgcgccgctcggcagcttcctcggcgggattatcggctggcgtaacgtctttaacgccgccgcggtaatgggcgtggtctgtacgatttgggtgttgaaggcgctgccctctttgcctggcgagtcgacctcggcgcagcaaaatatgtttggcctgttaaagcgccccggcgtaatggccgggatgtgcgccatctttatggccttcgccggccagttcgccttctttacctatattcgcccggtgtatatgacgctggcgggctttgacgttgacggcctgacgctggtgctgttgagcttcggcatcgccagcttcgtcggcacctcgctctcttcgatgctgctcaagcgatcggtgaaagcggcgctggcggttgccccggtggtgctggccatcagcgcggcggtgctggtgctgtggggggagagtaaaatcgtggcgtcggcggtggccgttatctggggttttgccttcgcgctggtgccggttggctggtcaacgtggatcacccgttccctgtccgatcaggcggagaaagccgggtcgattcaggtggcggtgatccaactggccaatacctgcggcgcagcggtgggcggcgtggcgctggaccaccttggtctgctctcgccgctggtcctctccggtacattaatgctgctcaccggtgtactggtggcgacgaaagtacgggtgtaa

SEQ ID NO: 256353 - DNA, 360 bp, Klebsiella pneumoniae
atgcgtatttttaaaacaaaatggtttaccagggaagcccgggctcatgcgattgatgacgacgaactttgcaaagcgattgaagccactctccagggaaaagtagataaccttggtggcggcgtttacaaaaaacgccttaataaaaatcgcgatcgcgcaatcatcctggcaaagggtgctgagcattggttttacacatttttatacgccaaacaggatatcgccaatatcgataaccgagaactcgcggcgttccgtgagttagccaggcattattcccttctcagcgaggagaaaatggcggcattggttaagagaaaagaattggtggagatttgtcatgactgcaaaaactaa

SEQ ID NO: 256354 - DNA, 324 bp, Klebsiella pneumoniae
atgactgcaaaaactaaattcaaaagccccgcctttgaagctatccatagcgctgccgcaggtttatacagtgttgatgcgatcgcgcaggagacgatgcgcagctttgatgaaacatgcatcagccgcgtaagcgatttccaacctggtgaaattaaggctctacgtgaccaactcaacgtcagtcagccggtatttgcccgctatctgaacaccagcgtgtccacggtccaaaaatgggaaagcggggcaaaacgccccggtgggctggcattgaaattactcaatatcgtgcaaaaacatgggttagaagtgctggcatga

SEQ ID NO: 256355 - DNA, 453 bp, Klebsiella pneumoniae; identical to SEQ ID NO: 174044

SEQ ID NO: 256356 - DNA, 1392 bp, Klebsiella pneumoniae
atgctggccttcttaaaccaggtgcgcaagcctaccctggacctgccgctcgaagcgcggcgcaaaatgtggttcaaaccgttcatgcagtcgtatctggtggttttcatcggctatctgaccatgtacctgatccgcaaaaactttaatatcgcgcagaacgacatgatctccacctacgggttgagcatgacgcagctggggatgatcggcctcgggttctctatcacctatggcgtgggtaaaacgctggtttcttactacgcagacggtaaaaacaccaagcagttcctgccgtttatgctgatcctctcggccatttgtatgctcggcttcagcgccagcatgggcgcggggtcgaccagcctgttcctgatgatcgccttctacgccctgagcggctttttccagagcactggcgggtcgtgcagctattcgactattaccaagtggacgccccgccgtaaacgcggcaccttcctcggcttctggaatatctctcacaacctcggcggcgccggcgcggcgggcgtggcgctgtttggcgcgaactacctgttcgacggccacgtgatcgggatgtttatcttcccgtcgattattgcgctaatcgtcggttttatcggcctgcgcttcggcagcgactccccggaatcttacggtctcggtaacgccgaagagctgtttggcgaagagatcagcgaagaggataaagagacggaagagaacgccatgaccaaatggcagatctttgtcgagtacgtgctgaagaataaagtcatctggctgctgtgtttctccaacatctttctgtacgtggtgcgcatcggcattgaccagtggtccaccgtttacgctttccaggagctgaagctctccaaagaagtggcgattcagggctttaccctttttgaagtaggcgcgctggtcggcacgctgctatggggctggctgtcggatctggcaaacggtcgtcgggcgctggtagcctgcattgcgctggcgctgattatcgccacccttggggtttatcagcacgccagtaaccagtacgtttatctcgcatcgctgtttgcgctgggtttcctggtttttggcccgcagctgctgatcggcgttgccgcagtaggctttgtgccgaaaaaagcgattggcgcagccgacgggatcaagggcacctttgcctatctgatcggcgatagcttcgccaagctcggcctcgggatgatcgccgacggaacgccgatttttggcctcaccggctgggcggggacctttgcggcgctggatgcggcggcaattggctgcatctgcctgatggccatcgttgcggtgtttgaagagcgtaaaatccgccgtcagaaaaagacacaaactttgcagactgcctga

SEQ ID NO: 256357 - DNA, 1320 bp, Klebsiella pneumoniae
atgtttgcctttttgaaatctccgcccgatgctccgccgattaccgataaacaggcgctggacgagcgctaccgctactggcgtcgacatattttgctgaccatctggctgggctatgcgctgttttattttacgcgtaaaagctttaatgccgccgtgccggaaatcctcgccagcaacgtactgacgcgtagcgatatcggtctgctggcaacgctgttctacatcacctacgggctatcgaagtttttctccggtatcgtcagcgaccgctctgatgctcgctattttatggggattggtctggtcgccaccggcgtagtgaatatcctgtttggcttttccacttcgctgtgggccttcgcgctgctgtgggccctgaacgccttcttccagggctgggggtcgccggtgtgcgcgcgtctgctgacggcctggtattcgcgtaccgaacgcggcggctggtgggcgttgtggaacacggcgcataacgtcggcggggcgctgatcccgatggtggttggcgcggcggcgctgcactacggctggcgaacgggaatgatgattgccggcatgctggcgatcctcgccgggctgtttctctgctggcggctgcgcgaccggccgcaggcggtagggctgcccgcagtaggcgactggcgtcacgatgaactggagattgcccagcagcaggaaggggtagggctgacccgcaaagagatcctcaccaaatacgtgctgttgaatccctatatctggctgctctcgctgtgctacgtgctggtatatgtagtgcgcgcagcgattaacgactggggcaatctctatatgtcggaaacgctcggcgtcgatctggtcacggcgaattctgcggtcaccatgttcgaggtaggcggttttatcggcgcgctggtggcgggctggggctcggataagctgtttaacggcaatcgcgggccgatgaacctgattttcgccgccgggattttgctgtcggtcggcggcctgtggctgatgccgttcgccagctacgtgatgcaggcggcctgtttctttaccgccggctttttcgtttttggcccgcagatgctgattggcatggcggcggcggagtgctcgcacaaagaggcggcgggggcggcaaccggctttgtcgggctgtttgcctatcttggcgcgtctctctccggctggccgctggcgcaggtcatggagatctggcactggagcggttttttcgtggtcatcgccatcgctgccggcatctccgctctgctgctgctgccgtttctaaatgcccaggcgccgcgagaagcgtga

SEQ ID NO: 256358 - DNA, 1503 bp, Klebsiella pneumoniae
atgaacgcctttctctcccggctgctctcggttatcggctgttgctttatcttttccgccgcgtggttttgcctgtggagcatcagcctgcacctggtagagcgtgccgatcttgcggtgctgctgtttcccttcgggctgcgtcttggcctgatgctgcagtgcccgcgcagctactggccggttctgctgggcgcggagtggctgctgatcctctggctggcgcaggaagttgcgctggcgcacccgataatattgatgaccggaagcctgttaaccctgctgccggtggcgctgatctcgcgctatcgtcagcagcgcgactggctcaccctgctgcgccaggggggcgcgctgatcgccgctgcgctgcttcagtcgctgccgtggctgctggagggtaaagaggggctgaacgcgctgctgctgaccctgaccggcggcctgacgctggcccccacttgcctggtgatttggcactatctcaccagcaccgtctggcggccgctggggccatcgctggtctcgcagccggtgaactggcgcgggcggcatcttatctggtacctgctgctgttcagcgtcagcctctggcttcagctggggctacccgccgagctctcacgatttacgcccttctgcctggcgctgccgattatcgctctggcctggcattacggctggcagggcgcgctgatcgcgaccctgatgaacgctatcgcgctgatcgccagccagacctggcacgaacacccggtggatttattgctttcgctgctggcgcaaagcctgacgggcctgttgctgggcgccggcattcagcggctgcgcgagctgaaccagtcgctgcaaaacgagctggtgcgtaatcagcggctggcggaacgcctgctggaaaccgaagagagcgtacgtcgcgaggtcgcccgcgagctgcacgatgatatcggccagaccattaccgccatccgcacccaggcgggaatcgtccagcgtctggcgccgaacagcgccagcgtcaggcagagcgggcagctgattgaacagctttcgctcggcgtctatgattcggtgcgccgcctgctgggccgcctgcgcccgcgccagctggacgatctgacgcttgagcaggcggttcgctcgctgatgcgcgaaatggagctggaggatcgcggtatggtcagtcatctggagtggcgtattgatgagtcgctgctgagtgaaaaccagcgagtcaccctgttccgcgtttgtcaggaggggctgaataatattgtcaaacacgccagcgccagcgccgtcacgctgcatggctggcagcaggagcagcggctgatgctggtgctggaggatgacggctgcggcctgccgccgggctccggtcagcagggctttggcctcaccggcatgcgcgaacgcgtcagcgcgctgggcggcaccttaaccatctcctgcacccacggcacccgcgtttgcgtcagcctgccgctgcgctacgcctga

SEQ ID NO: 256359 - DNA, 531 bp, Klebsiella pneumoniae; identical to SEQ ID NO: 177196

SEQ ID NO: 256360 - DNA, 501 bp, Klebsiella pneumoniae
atgaaatggactcatgcaccctggctgctggcggtaatgatggccttcgccagcgccccccgcgccgccgacgtgaccattaccgttaacggtaaagtggtggccaaaccctgcaccatcgccacgccgaaggccaccgttgaccttggtgatttatacacctttaacatgctttcacccggctcggcatcaggctggcatgacgtcaccctcgatctcagcaactgtccggtcggcacctcgcgggtcaccgccaccttcagcggaacggcggacagcacgggctactacaaaaatcagggaacggcgggcaacctccagctggaattgcaggataccagcggcgcccggtttaacaacggcacaagcaaaacggtggccgtcaacgatgccacgcaatccacccgctttccattgcgcgtcagggcgctgacggttaacggcggaccaacgcaaggaacaatccaggcggtgattaacgtcacctacacctggctataa

SEQ ID NO: 256361 - DNA, 963 bp, Klebsiella pneumoniae
atgaatcagcggattaccgctccccgtagatgtcgtatggcgctggtcaacgcgctgtggctggcgcttgtgttagcgggcttttccaccagcgtcagggcttatacctgctacgactccaccggcaccatattaaacagcgataccggcgggaaagtatccaacgtctacgttaacctgcagccaagcctcggagcggggcagaaccttgtcgtcgacttatccagctcgattttttgtaaaaatgacgcgccggacaggcgaaacgacatggtaagcatgctacagggctcggcctatagcggcctgctgaccaattttaccggttctttaaagtactacggagttagctatagcttcccgctaaactccccgaccgccagccataattttacttccggcaactacaccagctggaatacccagctctacctgacgccaatatccaccgcctccgggctggcgataagcgccggctcgcatatcgccacgctggtcatgtatcaggtgggttcggatatcaacggcggcggtaacgttcgtacctctaaatttacctggaacatctatgccaacaatagcgtgattatccccacgggcggctgcgatgtttccgctcgcaacgtcacggtaacgctgcctgagtacccgggttcgaccgctgttccgctcacggtacgctgcgggcaaaatcaaaagataggtttttacctctccggcaccacggcggatagcgccaacagcgtgttcaccaatacctcttccgcctcaccggcccaggggataggcgttcagctattgcgcaatggcactattctgcgctcaaacagtaccgtctctatgggaaccgtgggcacctccgcggtcaacctcggactcaccgcaacctatgcgcgaaccagcggccaggtcaccgcgggcaacgtgcaatccattattggggtgacctttgtttaccagtaa

SEQ ID NO: 256362 - DNA, 1437 bp, Klebsiella pneumoniae
gtggactatatcctttcgccctgctcgctggtcgccgatggattagtcaaagtgatgatggccagcggcatgcggcccgttgtgctgccgtcggatacgcagatgcttcccggcgacacgggcattcgccgccttatcgtttttctgccggaaaccccggccaggctgctcaccaccctgcagcaggccgctgcgtttcttgaacactccgcgacgccgctgccgatgctgatcctcagccgcagcccggccagctggctgtggcatacgctgctgcatcaggtcatcgatcaccgtttgcttgccgaagtgcgcaccgccgcctcggacctgcccgtccccagcctgaccgcggtgctgcaggactatattttgcaaagatatccttcgcttaaacagctggccgacgaagagatacgcctcggcggaaagcgccctggcgggctcacccggccggagctaaatgccattctcggtctactcagcggatacagcgtcaacgcccaggcaaagcgccgcggcattagccacaaaacgctttataaccagcgaacggcaggactgaaaaaaatggtggaacatcatcctcagctggcaacccgattccccggcagccagaccaaagggcagaagatccaaccggatgctgcgctttccgccttcgagcgcgaatttgtccacgccattcactgtcggcaaattttcccggtattccagcccatcaccgatggtcggatgcagctaaaagggttggagatactctgtcgctggcggcaaaagggacaggttatgctgccgggcgagtttttgccgcaggtacattccgcgtatgcctggctggtgttgaccgcctttgtgattcgcgaggccgtggagaatattaatctgcactccggagagttttatttctcggtcaatattcccgctgctatcgccagcaatgacaacctgctccggatggtggagaccgcgcgccagcagctgcgtcagccccatatgtcttcgaggctggtactggaatttgctgaaaccctggacctcaacctgcagagtaaaattgccgacaatatttcccggctacgcaagcagggctttaccattatgctggatgactgcttttcacaaagcagcgtcatgtttccggtacgatcggtcaggttcagcgcctataagctggatatgagcatcgtcaacgacatgcagcgcgatcctcacgctctggccctaatcaaaagtctgctctactactgtcagctaaccggtagccgctgtgttgccgaaggcgtggacagtctggataaattcaaccgactgaaggcgctggggatcgaccgttttcagggttatttcatctcgccgccggtggagcgggaaaacgtcagtgaccttatccaccagcttttatccggccgcgatctgaaccttatcgccgggtaa

SEQ ID NO: 256363 - DNA, 273 bp, Klebsiella pneumoniae; identical to SEQ ID NO: 177192

SEQ ID NO: 256364 - DNA, 231 bp, Klebsiella pneumoniae
atggataaagaattactgcaagcgggctatcgcgcctataccggagagaaaatagatgtctactttaacaccgatatctgccagcactcgggtaactgcgtacgcggtagcgcgaagctcttcaatctgaaacgcaaaccgtggatcgtcccggatgaagtggacgtggccacggtggtcaaggttattgatacctgcccgagcggcgcgctgaagtatcgccaaaaataa

SEQ ID NO: 256365 - DNA, 273 bp, Klebsiella pneumoniae; identical to SEQ ID NO: 177190

SEQ ID NO: 256366 - DNA, 1029 bp, Klebsiella pneumoniae
atgacccaatcccgctcaagcgttatccgcaaaaaatggcccctgctggcgctcgttctcgccgcgatcgtggcgctgattctggttatctggcagctgcaaacctcgccggaaaccaacgatgcttacgtttatgccgacaccatcgacgtggtgccggaagtgagcgggcggatcgtcgaaatgccgattcgcgacaatcagcgggtgaaaaaaggcgatctgctgttccgcatcgacccgcgtccctaccaagcgatgcttgatgatgccaaggcgcggctgaccacgcttgatgcgcagattatgctgacccagcgcaccatcaaagcgcaggagtacaacgcgcagtcggtcaacgccgccgttgaacgtgctaaagcgctggttaagcagaccacctcttcacgcatacgccttgagccgctggtaccgcaggggtttgcctcacaagaagatctggatcaggcgcgaacggccgaaaaagcggcgcgcgccgaactggaggccaccctgctgcaggcgaaacaggcttccgcggccgtgaccggcgttgatgccatggcggcgcagcgcgcggggatcctggcgcaaattgcgctggccgagctgcatctcgaatttaccgaagtgcgcgcgccgtttaacggcgtggtggtggcgctgaagacgacgatcggccagtacgcctcggcccttaagccggtctttaccctgctggatgacgaccactggtacgtggtggcaaacttccgcgaaaccgacttgcagagtgttcggcccggcgttccggccagaattaccgtaatgaccaaccatggccgcaccttcgagggcgtagtcgactcggtcggcaccggcgttctgcccgacggcggcagcgtcattgaaggcctgccggttattcagaagagcatcaactgggtccatgtctcccagcgcttcccggttaaaatcgccgtcaaagatcccgacccgaacctgtttcgcatgggcgcttccgccagcgccattctccagccgcaataa

SEQ ID NO: 256367 - DNA, 1944 bp, Klebsiella pneumoniae
atgcaaagcttgtggccgtttctgacccgggaactccgcgatgcgccggggcgggcgaactataccctgcgcctgacgctcagctgtgcggtgctgattgtgctgtttatgacgctgcatattcccttcctcgccgtggcgctgatcgtggtgttttacgtcagccagcctaacgtcctgatgattaagctggtcagcgtggttttcgtggtgaccgtcagcgtcgccctgggcggcgtactgctgattattaagtggacctatgactatccgctaattcgcctggttgcctcggtgatcctgttcttctgtgcgatttacctgatgcgggtcctcggcaagctggggctggcgtttttcgtggtggcgctggcagtcatctacgcccagaccttcccgtcgatgaccagccagagcgaaattctggtacgcctgctgctgtggctatgggtggcgattaacaccgccattctggtgacgttgctggtcaacgcctgcttccaacaggcgttccccggctatcagtttaaagcccggctggtggtcatgctgcgccagacggcgcggattcttagccaaccggatagcggggcgccgcaacccgcctttaaagagatcgccggccagtttaaccagttgcagtccctgtaccagcaagccgcccgcgccacgccggagattgccgccagcccgcaggcctggcaatcgctgatggccgccgcgctgcgctgctaccatttaacggcgctgctacaaccgggccgcgaccattccgatgcgcgccagcggatagcccgcgagctgaacgcgctggcggataatctgcccagccccacagcggcggatatggagccgttgatggtcccgcgcgatagcgataacagcgccattttgcaggagatcgccgaggtgctggcgcggctggcgcgcggcgaaaccatcgcgttaccgcagggtgaagtggaaaaagcgccgctgctgctgccggacgcgtggtccaatccggtctatctgcactttgccctgaaaacgctgctggcgacgctgctgtgctacgttttctataccgccgcagactggcagggtatccacaccattatgctgagctgcgtcattgtcgcccagccgggtctgggcgctaccatgcagaaaacgtggctgcgcatcggcggcgcgctgctggcgacgctgattgcgctgctcctgatcgtctttgtgcagccctggaccgactcgctgagcggcctgctggcgatgaccctgccggtgttcgcgctggccgcgtggattgcggcaggctcagagcgcatcgcctacgccgggatccagataggtttcacctttgcgctggcgttcctcagctggtttggcccgctcagcaaccttaccgaactgcgcgaccgggttatcggtatcctgctcggcgtgctggtctcctcgattgtacatctctatctatggccggatagcgaagccccgcagctcaaagcgcgtctggcgcagctttatcgccagctggcgcagaccctctcctcaagcgacgatgaggttcagctggtaccgctatttgccgcgctgaccgagagcgaaaccttaatcaaccgggtagccgccgagccgctgggaacctacgcccacccgtggccggaagccaaaaactggccggtgcgggcgacgttccatcaggcggaagagatcctgcgcctcagcgaaggctatcgtctgtacgccgcgccgggggatacttttttaccccgctgcgcccggcggcttgaaggctacgctgccgatatcgacgcgcagcaaactgccgtagaacgccctcaggcgcttctcccggacccggcgaatccatttggcgcgccgctggtcaacgcgctggccgctctgccggcgtggccatttgcgtcttccgatattccgcgacaggcaatgcaatcatga

SEQ ID NO: 256368 - DNA, 1485 bp, Klebsiella pneumoniae
atgattaaaacctctactctcccgcgcgcctcgcgatccccggtgtttgccttcgccctgacgctgttaaccgggtgcgcattaattcaggacgatcccggccaggttccgctggtcaatccgcagcaggccgagctggcgcaggtgatccatctggcgaatagcggctggccgacggcgcgctggtgggaaggctatcaggatccgcagctaaatatgctggtcaatcgcgcgctgcagaactcccccaccatgcaggcggcgcggctgcgtatttcgcaatcgcagtccacggtcgagctggcgcagtcggcaatgggcgtgcaggccaccgccgtggcggcgcaaaaccgtctgcgggtcaccaataaacagttcacctggccctactctttctccctgccggtggataaaaacggcccctggtacacgctgaatacggttggcgtcggggcgacgctgaatatcgatttatggggcgccgaccgcgcccgcgttgccgccgcgattggcgaaaagaacgcccgccaggcggagaccgccggcatcgagctggatcttgccagcagcgtggcccagctctatttcgcgatgcaggcaacttcccagaaaatcgcattacttaatcagctggaggccatcgccaggctctcggtgcaggcgcatgagcatcgtaccgcgcgcggcgtggaggatagcgtcgatgtcgccaacgcccaggcagagctgctggcggcgcagcagcaggtgattacggcgcaggggacgctgacgcagtatcgggaaacgctgcgggcgctgattggcgccgatgcgcatagcatgccggagattcatcccgtgccgctgccggcgctgcaggaaacgctcccggattcgctttcgtttgaactgctggcccgtcgcccggatctgcaggcgctgcgcggctacgtcagcgcttcgatgaaccaggtggacgcggcaaaagcggcgttttacccgcacttcgatatcaaagccttctggggctacaacgcgctgagcgtcggcgatctgtttaagtcctcattccagcagatcaacctgctgccggggctctatttgccgttgtttgacggcgggcgcttaaacgccaacctgaaatcgacgcgtacggcgagcaatattttaattaagcagtacaaccaggcggtgctggacgcggtgcgcgacgtggcgattagctccagccagttgaacgatttgaaccagcaggccgcgctgcagcagcagaaagtcgcggcggcgatgataaccacccgcagtgccagcgcgcaccatcagcgcggactggtcagctactatgcggcgcaggaggcgcgtcgtccggccatcgcgcagcagcttttgctgctggatatcgaggcccagcggctcagcaccgatatcaccttgattaaagccctgggcggcgattaccgcggcccggcggtggcgtccgcagggaaagaagtggcgcaatag

SEQ ID NO: 256369 - DNA, 435 bp, Klebsiella pneumoniae; identical to SEQ ID NO: 175399

SEQ ID NO: 256370 - DNA, 1440 bp, Klebsiella pneumoniae
atgtctcttattatgaatctgaacctacagcagagaaaacgactacaccagataaccctggttgcgacatttggcggcctgttattcggttatgacaccggcgttattaatggcgcattttcctctctgaaacaatatatggctttgacgccgaccactgaaggtctggtcatgagcgtattgctgatcggcgctgcgctaggcagcgtgttcgggggaaaattcgccgatttctttggccgaagaaaatacctgctttttttatcctttatttttttcatcggcgcactgatgtccgctctggcgccagatatcaccgtactgcttatttcacgtttcatcctcggctatgccgtcggcggcgcttcggtcaccgcccccacctttatatctgaagtcgcgccaacggaaatgcgcggaaaactcactggcttaaatgaagtcgcgattgtcatcggccagttagccgcatttgccatcaacgccattattggcatcctctggggccatctgcccgacgtctggcgctatatgctgatggtacagaccattcccgctatctgcctgtttatcggcatgctgcgttcgccggaaagccctcgctggctcgttagcaaaaaccgccatgaagaagcgctggaaattttaaagcaaatccgcccgcttgaacgcgcaaccaaagaattcaacgatatcaccaccttaattaaggccgaagccgataaaaagctccattcgcaaaacgcctttatcaccatccttcagacgccatggattttcaaactcctgctggtaggggtgatttgggcggcgctgcagcagaccaccggggtcaacgtcattatgtactatggcactgagatcctgagcagcgccggattctccgaaagaacctccttgatctgtaacgtgctgaacggcgtgttctccgtcggcggcatgttatttggcgttctgttcctggtcgatcgttttaagcgtaaaaccatcattatttatggtttcgcgatcatggctaccctgcaccttatcattgccggcgtagactacaccctggtcggcgacatcaaagccacggccatctggctgctcggcgcgatgttcgttggcgtaatgcaggggacgatgggctttatcacctgggtggtgctggcggaactctttccgctcaagttccgcggactgtcgatgggcatatcggtatttttcatgtgggtgatgaacgccatcgtcagctatctgttcccattattgcaggccaagctcgggttaggcccggtgttcctgatttttgccgcgattaactacctggcgattatttttgtcgtcacggcgctacctgaaacatcaaataaatcgctggagcagctggaagaagagctgtcggccaataaatcttcagcacgattcaatgcagcaacaaaggaaagcggattatga

SEQ ID NO: 256371 - DNA, 3213 bp, Klebsiella pneumoniae
atggatacagtgcttgttggcagtgaggtgccccgcgtagacgggctcgccaaggtgacgggtaaagctgtctacggcgatgacatcaccatgaataatatgctgtatggcgtatgccgctacgtcgatatccctgccgggcgtattgattctctcgacctgtcggaggcggaaaaagtcccgggggtcgtgcgcatcgccacctgggacgatatacccggccagcgcaaactgggggcgattgttcccgatcatccgccgattattgacaaggagatcgcttaccgcggcgacgtggtagccgtcgtggcggcggaatcctatgaggcggcctgcattgccgtcgataaaatcaaaatcacctataccccgtgggaaccgattacttcgccggaagaggctatgaagcccggggcgcgccttatccacagcgaactcgatagcaatatcatcaatcgccaccacacggcgaagggcgatatagaagctggctttgccgcctccacccatatctttgaacgtgaatatgaagtgggttttcaggagcatggctatattgagccggagtccattactgcctatctggacaataatgaacagatcatgaccattgaagggtcgattcagaacgctcaccgcacccgggcggtgattgccaaatatctcgacctgccccaggcgaaagtcaatattaagcgttcggtcctcggcggctccttcggcggtaaggatgacattatcgataacgtctcctgccgcgcggcgctgctggtgcacctgaccggacggccggttaagatctcctataaccgtgaacagtcgatgcgcgagagctacaagcgccatccttataagatgaaataccgcattggcgtggacgacgacgcgcgtattcaggcgattaaaattgacatcatcgccgatggcggcagctactgcggccagacggtgtttgtcacctggcgcagttccgtccaggcggcgggcccctataatattcctaacgtgcgcgtcgatctggtgggggtgtataccaacaacaactacacctcggcctatcgcggctacggcgcgccgcaggtcattttcgccaacgaatcgctgatggatgacgtggcgggcgaactgggcctgtcgcccgtcgaattccgtttgcgcaatattctcaagcagggcgataccagcatggccgggcaggtcttcagcgaacacaccgtctccgcgcaggaggtgctggagaagacgctgctcaaggccgaatatgaggccaaacgcgagcactataaaaaacttaacgcggaaggcggcccgatccgctacgggattggcttcgcgctgagccatcgcggctgctctctgggggcggaggggctggatgcgtcctcggccctgattcaggtgaatgccgacgccagcgtgaacatttccacttcggtatccgagaacgggcaggggctgcagaccaccatgtcgctgctggcggcggaagcgttcggtattgcgctcgatcgggtgatgtttagcgaaccggccaccgcgatgatcgccgacggcggctcaacggtcgcttcgcgcggtaccctgatgggcgggcaggcgattctgagcgcggcgaacaaaattaaacaacgcatggcggacgccgtcagggaaacgctaaaagcgcagagcattgacgatattgcctggcaaaatggcaacgtgttcaaccgccacaacccggagctgagtctcagtttccagcaggtgtgcgatatgacccgggctaccggggcaaacctctccgcctacggctggcacgtggcgccgaatattcactgggatgaagagaaaggctgcggcagcccctatttcacctgggtgtacggctgccagctggccgacgtggcggtggatatgcgcaccggtaaaattaccgtcaataacgtcgtcgccactcacgatgtgggaaaagtcattaacccggttggctttagcggccaggtttacggcggcgtgctgcaggggatgatcggctacggcatgctggaggatttcaacaccgagcacggcgtggtgaaatcggaaaacttcgatacctatctgctgccgaccatcaaggatatgccgcacatcgatatcatcgcggtggaaaactatgataaagcggggccgatgggggcgaaggttatcggcgaaccggtgctcgaactgggcgctgcggccctcaacaacgcggtgagcttcgccatcgaccgacccaaccggaccctgccgctgacgcttgaacaggttcgcctcggctataaccttaagaagccggaacgccagagcgagcagatgctggaatcgggcgataagaaacaggttcaccgcctcaataccctgtcgctgcgcgtcccgcaaaccctgaaagaggctctgacgctgatggccgagaagggggcaatgcctattgccggcggtaccgatgtgctggttcaggcccggatgctgtccggcgaagtgccgcttgttaatattgccgggctggcggagctgaaggagatttttgacgttgagggtggcgtctcaattggttccggcgtctgctttaccgatctggttaagcatccgttgattcagcagcgctatccgctactggtcactgcctgtaaaaccgtcggctccctgcagctgcgcaatcgggcaacgatcggcggcaatatcgtcaacgctgccccgtgcgcggactccatgccaccgctcattatctatgatgcggaagtcgagctgcgcagcgcgcgcggaacgcgccggatgccggtcagcgaattcgtcgtgggcggctatcgcacccttcttgaacccgaagagctggtggtccgctttatcctgccggcgccgacgcagcaaccgctgatcaatcgctatctgcagcttggccggcgcaatgcgttgaacattacgcgccagagcttaaccgggcagttcatggtcgataagggcgtggttcgcctgtgccgtctggtggatggcgcgctgatggctaaaccgcagcggctgactgaggttgagcaggcgctcaccggtaagacgctagacgccgccaccatcgactatgcggccggcgtgcttcacgacaaggtagaaaaagccatcggcggacgctggtcagccccctataaagtccccgtatttatcgatatgttccggcagatgctgcaggaagtcatgacagagcagaagaaataa

SEQ ID NO: 256372 - DNA, 459 bp, Klebsiella pneumoniae
atgaaccatattgagctaaaagtgaatggcatccgcattgcccgcgatgttaaagacaatgtccgcctgatcgattttctacgtgaagatctcaagttaaccggcaccaaagagggctgttcggtgggtgagtgcggcgcctgcaccgtcattctggacggaaaatcggtctgctcctgcctgctgctggccgcccagtgcaacggggcggaggtcaccaccgtcgaagcgctgcatcacgatccggtcggcaaaaaattgcagaatgcctttattcgtcacggcggcgttcagtgcggcttctgcacccccggcgtattgatgagcgctaaagcgctgctggatgccaacccggcccccagcgacgatgagctgaaagaggcgctggagggaaatatctgccgctgtacgggatatcagccgatcatcacctcgattaaagccgtgctgaaatcctga

SEQ ID NO: 256373 - DNA, 606 bp, Klebsiella pneumoniae
atgagcaaaaaagtcgataagcagtgcattatgctggccgccgggctctcaagccgcatgggcaagtggaaaatgatgatgccgtggggcgaaggaacgattctggatagcgccctggccagcgccctggcgttctgcgatcgggtggtgctggtcacggggtttcgcggcgatgagttggccgcgtgctatcaggaccatccgggcattgaggtggtctttaacccgcgatatcaggagggcatgttctcttcgattcagtgcggggtgagccatatccgcgcttcgcgtttctttctggcgctgggcgatatgccggaggtcacgccgggcgtataccgcaggctatgggccaacgccgacgcggaaagctgcctcattccggcttacgatcgcggtaaaggccacccggtacttctgccgcagcgggcgatatctttgattaaccacgcggcggaagaggccaccctgagggaggtcatcggtcagatggcagtgcgcgttatcccggtggagaatcagggaattcactgggatgtagacactccgcagcagtatcttgcggtcgcgcgccgctgccgcaaggatctgacggctgtcggatag

SEQ ID NO: 256374 - DNA, 1680 bp, Klebsiella pneumoniae
atgagtaatgccatcaccgagatcgataataccgatctggtgtttatttttggctataacccggcggattcgcacccgatcgtggcgaatcacatcctcaatgctaaacgcaacggggccaaaatcatcgtctgcgatccgcgcaaaatcgaaaccgcgcgcattgccgacctgcatctggccctgaaaaacggttccaatattgcgctgctcaacgccatcgggcaggtgattattgcagaggatctctacgataaatcctttgtcgccgggcgttccgaaggtttcgaagcgtatcgcaaaatcgtcgaaggctatacgccggagtcggtggaagccatcaccggcgtcagcgccaggcagattcgcgaatgcgcgcggctgtatgccaccgccggaaacgccatgattctgtggggaatgggcgtgacccagttctggcagggcgttgaaacggtgcgttccctgaccagcctggcgatcctcactggcaatctggggaaaccgcacgtcggcgttaatccggtgcgcggccagaataacgtccagggcgcctgcgacatgggggcgctgccggacacctatcccggctatcagtacgtgaaatttccggagaaccgcgagaagttcgccaaagcctggggcgtcgggagcctgccggagaaccctggctaccgcatcagcgagctgccgcaccgcgtagcgcacggcgaagtgcgggcggcgtatatcatgggagaggatccgctccagaccgatgccgagctttccgccgtgcgtcaggccttcgaagagatggagctggtcatcgtccaggatatctttatgaccaaaaccgccgcggcggccgatgtgattctgccctcgacctcatggggcgagcatgaaggcgtctataccgcagcggaccgcggcttccagcggtttttcaaggcggtagagccgaagtgggatctgaaaaccgactggcagatcatctgtgagatcgccacccgtatgggttatccgatgaagtacgacaacactcagcagatctgggatgaactccgccacctgtgccccaatttcttcggcgcgacctacgagaaaatgggggaactgggctacgtgcagtggccgtgtcgcgacgagtcggaggcggaccagggcacttcgtatctgtttgcggaacgtttctccaccccgaacgggctggcgcagttcttcacctgcgaatggcaagcgccgatcgataagctgagcgacgagtatccactggtgctctccacggtgcgcgaagtgggccactactcctgccgttcgatgaccggcaactgcgcggcgctggccaaactggcggacgaaccgggctacatccagatcaacaccgccgacgcaaaacgtctcggcattgaggacgaagaactggtgtgggttaactcgcgcaaaggcaaggtgatttcccgggcgaagatcagcgacaggccgaataaaggggccgtctatatgacctatcaatggtggatcggcgcctgcaacgagctggtcaccgagaatcttagcccaatcaccaaaaccccggagtacaagtactgcgccgttaacgttgagcgcattgccgatcggcaagccgccgaaaggtacgtcattgaggaatacagcaagctgaaagcccgcctgcgcgaaagcgccgcggggtaa

SEQ ID NO: 256375 - DNA, 225 bp, Klebsiella pneumoniae
atgatccgccgccagcgcggcggcaagctggaatccgtctcctgggacgaagcgctcgattatgtggcaaatcgcctcagcgacatcaaggcgaaatacgggccggacgcgattcagaccaccggctcttcgcgcgccaccggcaacgaaaccaactacatcatgcaaaaatttgcgcgcgccgttattggtaccaataacgtcgactgctgcgcacgcgtctga

SEQ ID NO: 256376 - DNA, 777 bp, Klebsiella pneumoniae; identical to SEQ ID NO: 176157

SEQ ID NO: 256377 - DNA, 645 bp, Klebsiella pneumoniae
atggaacaaaataaaggtttttggtatgccgactggtcgttcccgatctttgttggtctgctctccgccggcgtttttgccgggacgcatatgtactacctctacggcatcggcgcgtttaacgaagtcgccttcgtggcgatgctgaaagcgggaattgataccggtgcctacggcgcggtcgcggcgttcggcgccagcttcctgttcgcgcgtattattgaaggctcactggtggggattctggatatcggcggggcgatccagaccggcgtcggcttaggcgttccggcgctgctgctcggcgcgggctttgttttcccggtcgccaactttgccgcctcactggtcactggcctggtgctggggctcgccattggctacatcattatcctggcgcgcaaattcaccatcaaccagagcgactccacctacggcgcggacgtcatgatgggggccggtaacgcctcaggccgcttcctcggaccgttgattatcctcagcgccatgaccgcttctattccaatcggcatcggttccctggtgggcgcgctgctgttctacatctggcagaagcctatcaccggcggcgcgatccttggcgccatgcttcttgggtcaatcttcccggtggcgattagttaa

SEQ ID NO: 256378 - DNA, 1152 bp, Klebsiella pneumoniae
atgccaaccgctcgtcacctgcttgttgcttcactctctctgctcgccgccggcgccgctgcgcaaacccagtacgcctgggtcggtacctacaaccccaatggggaaggcctgtatcgctttaccgtcgataaccagactggggaactgcgcgataaagcgctggtcgctaagctacctaacctggcccagctcaccgtttcggcggatggcaaaaccctgtacgccgccagcgaagtggaaaagggtgtggtgcaggcgtggcgcatcggcagtaacggcgaactgagtgagctgaatcaggtcgcttccggcggcgccgggccggtttatctctccctgacttccgatggacgccatctgctggtggcaaactacgtcagcggtagtatcgccgtgctgccggtgaaagaagatggtaacctgggcgaggcggtggacgtgcatcaggatcaaggccctgcgggtgcggaacgcccggcggcagccgttgaaggcagttttgccattagcgatcataacggcccccacgcccatatgatcgccgccgatcccagcggtaagttcgtttactccaccgacctcgggctggatcggatctatcagtaccggctggataacgccaccgggaagctaacgccgaacgatccgccgtttattgcggcctcatctcccggcgccggaccgcgccattttgtgtttacgccgcagggcgacgggctatggttaattaacgaagaggcgtcgacgctcactttctatcatctcgataagcaaagcggcctgttgcgcgaggggaaaacggtctcggcgctgccggaagcgtataagggcaccagttttgccgccggtctggttctgagccgcgacggcaagcagctgtacgttgccaatcgactgcataacagcatcggccactttacggtgctggcagacggtagcctgcgccatcaggacgatatctggacccgcggcgactatccgcgcacgctgacgctcgacagtcaggggcagtggctgtacgtcatgaaccagcgtagcgacaacatcacccgctttcgcgtcgcgccgaaggatggcaggctgacgttctctccggactataccccggttggcagcccgtcgcagatggtgatatccgctcaaccctga

SEQ ID NO: 256379 - DNA, 420 bp, Klebsiella pneumoniae
atgtgtataagagacagcgatgtggagaagaaggtgaacccgtacgataaaatcgattttgaagcgccttacccgccactggctaacgggggctttatttgctacggcgagtacccgaatattcagcacaacctgcgggcgctggaagacgtgtgggattatagctatcagcacgtgccctattacgggaccaatacgcctatcgatgagtgctacgagtgcagttttaccggtgagttcgagtgtaccagcaaaggcttcacctgcccgaaatgcggcaaccacgatgcctctcgcgtgtcggtaacccgccgggtatgcggttatctcggaagcccggacgcccgcccgttcaacgccggcaagcaggaagaagtgaagcgccgcgtgaagcatctgggcaacgggcagatcggttaa

SEQ ID NO: 256380 - DNA, 963 bp, Klebsiella pneumoniae
gtggatcgtatagaccagcgcggaaatggcgctaccgatccagatgccgagcgggccgatcagcagaatcgacagcggagcggcgatcaatacgatcagcatcggtttaaggaagttttttgtcaccgccggggtgatacggtcgacccagcgttcgatataagagaggcaccaggtcatcaccagcgccgggatcacggtataggtgtatttcaccgccgtcaccggaataaaggcaaactccacgtgctcgccctgggcggctttggccatcagttcgataaagctcgggtgcaccagcaccccggcaatggcaatcgccagcgacatattggttttgaacttcaccgctgcggaagcggcgaccatcagcggcaggaagaagaacgcgccgtcgccgatcaccgtcagaatagtcagcgttggcgcgcctttgggcagagcgccggtcatctcgaggatcattgccagcagcttaaccatcgatccaccgataatcgccgggatcagcggcgacatggtgccgatcagcgcgtcgaggatcccggcgccgatgcgtttcagggtaataggcggtttcccctgcggttcggccgggcgcagatcccccggcagcagcgcgaccacttcgcgatacgcctgggagacggtattgcccacgatcacctggcactggttatcgctacgcaccacgccgagcacgcctttcagccctttgagggtggcgctgtcgacccgctcgttgtctttgaccacgaaacgcaggcgggtcatgcagtgggtgacggcggcaacgttatctacgccaccgattgccgcgataatctgctgcgccagagctgcataatttttagacatcggattttatcctgtttatcaatggggtactggcttttcaccgcgccggaaagcggagcggcatcatgcatacataggaaaccggttccacaaaatcatgattag

SEQ ID NO: 256381 - DNA, 1014 bp, Klebsiella pneumoniae
atggcaacgatgctggaggtagcgaagcgcgcgggggtgtcaaaggccaccgtttcgcgggtgctgtcggggaacggctatgtcagccaggagaccaaagatcgcgtcttccaggcggtggccgaaagcggctaccggccgaatctgctggcgcgcaacctggcgacgaaaaagacgcagaccctcgggctggtggtgaccaacaccctttatcacggcgtctatttcagcgaactgctctaccacgtcgcgcggatgaccgaagacaaagggcggcagctgatcctcgccgacggtaagcacagcgcggaggaggagcgcgaggcgattcagtatctgctcgatctgcgctgcgatgcgataattatctatccgcgctttctcagcgttgatgagatggatgagattatcgaaaatcatgagcggcccatcatggtgctcaaccgccgcctgcgccgcaacgccagccactgcgtctggtccgatcaaaaagcttcggcgatgatggcggtggaaaagcttatcgcgctgggccatcgggaaatcgcgtttattaccggttcgctggattcgccaaccggcgttgagcgtctctcgggctataaagacgcgctggcccgccacggcattgccctgaataacgatctgatcgtcgaaggcctctggacgccggaaaccggcgcggcgggggtcgaaacgctgcgtcagcgccgcgtcggctacagcgcgctggtggcgagcaacgacgatatggcggttggcgcgatgaaacagctgcatcagatcggcgtcaaggttccggagcaggtctcggtcgtggggtttgacgatatcgcgctggcgccgtatatggttccggcgctctccagcgtcaaagttccggtgacggagatgatcaaagagagcatcaaccggctgatctttatgctcgacggcggcgattttaaatttcagcaactcttccccggcgagctgattgaacgcgactcggtggtccctggcccgcatgcctga

SEQ ID NO: 256382 - DNA, 528 bp, Klebsiella pneumoniae
atgaaccgtttcattatcgccgacgcaagcaaatgcatcggctgccgcacctgtgaagtggcctgcgtggtctctcatcaggaaaatcaggactgcgccgcgctgacgccaaaaagctttttaccgcgtattcacgtgatcaaaggcgttaacgtgtcgacggccaccgcctgtcgtcagtgcgaagacgcgccgtgcgccaacgtctgtccgaacggcgcgatcagccgcgaccagggcttcgtccacgtgatgcaggagcgctgtattggctgcaaaacctgcgtggtggcctgtccgtacggcgccatggaagtggtggtgcgtccggttatccgccacagcggcgcggggctgaacgtgatggcggaaaaagccgaagccaacaaatgcgacctttgccaccaccgtgaggaaggcccggcctgtatggatgcctgtccgacccacgcgctgatttgcgtcgaccgcaacaagctcgaacagatgaatatcgaaaaacgccgccgtaccgcgctggcctggtag

SEQ ID NO: 256383 - DNA, 3150 bp, Klebsiella pneumoniae
  misc_feature (2006)..(2015): n is a, c, g, or t
atgaacggggtgcagatccgcattcgcggtaaagtgcagggggtgggattccgccccttcgtctggcagctggcgcagcagctggggctgcgcggcgacgtgtgcaacgacggcggcggcgtgctggtgcgccttgtcggcggtgatgcgccatttctcgccgcgttaacccggcgctgcccgccgctggcgcgtatcgatagcgcggcagcggcgccttttgtctgggacgccgcgccgccaggctttaccattcgccaaagcggggccggaagcatgcgcacgcagattgtgcccgatgccgctacctgcccggcatgcctggcggaaatgaacaacccgcaggagcgccgctaccgctatccgtttatcaactgcacccactgcgggccgcgctttaccattattcgcgctatgccctacgaccgtccactgacctctatgtcgccgtttccactctgcacctcctgtgcggcggagtatggcgaccccgccgatcgccgtttccacgcgcagccggtagcctgcgccgagtgcgggccacggctggagtggcgcgggccgcaggcgcattcatttggcgaggcggctcttgaagcggcgacggctcgcctgatggcgggcgatatagtggcggtgaaagggctgggtggtttccatctgttgtgcgatgccggaaatcctgaggccgtcgcgaggctacggacgcgtaagcatcggccggcgaaaccgctggcggtgatgctggcgacaacggcggggctcgatgaaccggcggtgacgctgctcacgtcccccgccgcaccgatcgtgctgctggataaaacgcaggtggccgggctgtgcgaccagattgcgccagggcttgcggaagtaggggggatgctgccgtctaatccactgcagcatttacttgcgcaggcgctggcgcgcccattagtgatgacctccggcaaccttagcggtcgcccaccggctttaaccaacgcagaggcgctggcggatttagccgggattgccgacggttttctgctgcataaccgcgagattgtgcagaggatggatgattccgtagtgcggcaaagcggcgagatgctgcgtcgcgcccgcggctacgtgccggacgcgctggcgctgccgccggggtttcacgatgcgccgcccctgctggccctgatctacgcttttacgccgcagcgggtggttgccgacgcccatcccggctaccgcgcttcgcggtgggcggcgtcgcttatgctgccggtggagcgggtattgcatcatcatgcccacgctgccgcgtgcctggccgagcatcgctggccgctggagggcggcgacgtgattgccctgacgctcgacggcatcgggatgggggagaatggcgaactgtggggcggcgagtgcctgcgggtcaactatcgcgagtgtgagcatctcggcggtctgccgtcggtggcgctgcccggcggcgacctcgcggcgcgtcagccgtggcgcaatctgctcgcccactgcctggcgtttgtccctgaatggcagaattatgccgacaccgccgcgctgcgccagcaaaactggccgctgctggcgcgagcaatcgagcgtggtattaatgcgccgcaggcatcgtcgtgcggccgtctgtttgacgccgtcgcctgcgcgctgggctgtgcgccgctagccctgagctatgagggggaggcggcatgccgtctggaagcgctggcggcgacctgcgaaggcgtggatcatccggtgaccctaccgtggcgcgaaggtaaactggacctggcgacgttctggcagcggtggctgagctggcaggcgggcccggcgcaaaaagcctgggcctttcatgatgcgctggcccgcgggctggcggcgatgatgcgcgattgcgcgagcgcgcgcaatattcgcacgctggccttcggcggcggagtgctgcacaaccggctgctgacggcgcgattgaccttttatctggccgattttactcnnnnnnnnnnccttttatctggccgattttactctgctctttccgcagcagctgcccgccggcgatggcgccattgccctcggccaggcgatcgtcgctgcggcccgcctgcaggcttaaaggatacctatatgatagtgacgattttgcgtcagcagccgcgcgcagcggcgctggtgctggcattaattgccgccaatttgctggcctggggctgggcgtttgcggcgttcggcggcagcggcgcgctgatggctgccagcctgctggcctggggatatggtctgcgccacgcggtggacgccgaccatatcgcggcgatcgacaacgtgacccgcaaaatgatgcagcaggggaagcggccttttgccgttggcgcgtggttttctctgggacactcgtcgattgtggtgctggcttcggcggcgattgccgcgaccgccaccgcgtttggccagcagatgagctggtttcacgagaccggcagcgttatcggcaccgccgtatcggcgctgttcctgctggtgatggctcttatcaacctggtcattttgcgcagcgtctggcgcagctttcaggcgtggaaacagggcgaaaaggtgagcgatgagattatgaccggcggcggtatgatgagctggctgttcgcgaaaacattccgcctgattagccgcagctggcagatgtatctggtgggctttctgtttggcctcggctttgatacggcgacggaggtcggcgtgctggggatctccgccgccagcgcgtcgagcggggtgtcgatttggtcgattatggtttttccggcgctgttcgccagcggaatggcgctggtggatacgcttgataacgtgctgatggtcggcgcctacggctgggcgttcagcaagccgcagcgcaagctctattacaatatgactattaccggtacctcggtggtggtggcgctatttatcggcggcctggaggcgctggggctgttgatggataagttctctctgagcggcggcgtctggcgctgggtcggcgcattgaacgaccatctcggcgacgccggttttgcagtggtcgggctgttcgtggcctgctgggtgctgtcggtgctcaactaccgctggcgcgggtacgataacctggcgcggtag

SEQ ID NO: 256384 - DNA, 1134 bp, Klebsiella pneumoniae
atgagtgatggcatcgtcatcatcggctcgggcttcgcggcccgtcagctggtgaaaaatattcgcaagcaggacccgaacatcccgctgaccctgatcgccgccgacagcatggatgagtacaacaaaccggatctcagccatgtggtcagccgcgggcagaacgccgacgacctgaccctgcaaacggcgggtgagtttgccgagcagtacaatctgcgcctgtttccgcatacctgggtcagcgatatcgacgctgataatcagcgggtgaagagccaggaccgcgaatggcgctatgacaaactggtactggccaccggcgcgacgccgtttatcccaccggtgccgggccgcgagctgatgctgacgctgaatagccagcgagaatacggcgcggcgcaaagccaactgcgcgatgcaaaaagggtgctgatcgttggcggcggtctgattggctgcgagctggcgatggatttctgccgcgccggcaaagcggtgacggtcgtggataactccgccagcgtgctgtcggcgctgatgccgccggaagccagcagtcgactgcagcatcgtctgaccgacatgggcgtgcatctgatgctgaagacccagttggaaagcctggagcagagcactgacgggattcgcgtcaccttcgaccgccagcgtacggtgatggtggatgtggtagtggcggccgccggtttgcgcccggaaacggcgctggcgcggcatgcggggttgaagacgcgccgtggcgtggtggtgaacagccagctgcaaaccagccatccggcgatttacgccctcggcgattgcgcggaaatcaatggcatggtcctgccttttctgcagccgattctgctaagcgccatgtgtctgggtaaaaacctgttggcccggcagggcgagctcaagctgccgccgatgctggtgaaggtcaaaacgccggatttaccgctgcatctggcgggcgatacccggcgtgaggatctgacgtggaatatcgttgccgccaaagatggcctggtcgcgaaaggcgttgacgccgaaaaccggctgcgcgcgtttgtggttagcgaagatcgcatgaaagatgcttttgccctgctcaggcagctggtgagttaa

SEQ ID NO: 256385 - DNA, 1446 bp, Klebsiella pneumoniae
atgtctattctggttaaaaataacattcattgggttggccaacgcgactgggaagtgcgtgatttccacgggactgaatacaaaacgctgcgcggcagcagctacaacagctatcttatccgggaagaaaaaaatgtgctgatcgataccgtcgatcataaattcagccgtgaattcgtgcaaaatctgcgcggcgaaatcgatctcgccgatatcgattacatcattatcaaccacgcggaagaggaccatgccggcgcgctcaccgaactgatgacgcaaattccggacacgccgatttactgcaccgccaacgccatcgactccatcaccggacaccatcatcacccggagtggaatttcaacgtggtgaaaaccggcgacagcctggatatcggcaacggcaagcagctgattttcgtcgaaaccccgatgctgcactggccggatagcatgatgacctacatgaccggcgacgcggtgctgttcagcaacgacgccttcggccagcactactgcgatgaacatctgtttaatgatgaagttgaccaggttgagctttatgagcagtgccagcgctactacgccaacattctgaccccgttcagccgtctggtgacgccgaaaattaccgaaatcctcggctttaacctgccggtagatatgattgccacctcccacggcgtggtctggcgcgataatccgacgcaaatcgtcgaaaaatatctcgagtgggcggcggattatcaggaagaccgcatcacgattttctacgataccatgtccaacaatacccgcatgatggccgatgcgatcgctcagggcattaccgacgtggatccgcgcgtggcggtgaaaatcttcaacgtcgcccgcagcgataaaaacgacattctgaccaacgtgttccgctcgaaaggcgtgctggtcggcacctcaaccatgaataacgtgatgatgccgaaaatcgccgggctggtggaggaaatgaccggcctgcgttttcgcaataagcacgccagcgccttcggttcccacggctggagcggcggcgcggttgatcgcctgtccacgcgtttacaggatgcgggctttgaaatgtccctgagcctgaaggccaaatggcgtccggatctcgacgcgctggagctgtgccgtgaacacggtcgcgaaatcgcccgccagtgggccctctccccgctgccggcgagccaggccaaacacgccgcgactgaggtaacgccctgcgcagcgccagcggcagccgatctcggcccgaaaatgcagtgcagcgtttgccagtggatttacgaccccgaacagggcgaaccgaaccaggacgtccagccgggtacgccgtggagcgaagtcccggataacttcctctgtcctgaatgttctctgggtaaagatgtatttgacgtactggcatcggaggcaaaatga

SEQ ID NO: 256386 - DNA, 255 bp, Klebsiella pneumoniae
atgaccatcggcaccagggccatatggggtgcaaagttgtctcgttcgccactgtatgacatttccgtctcctggagtaattttaaaatacctgctgcactgattgtaaccttacggacggattatcagccacagtttctatccgctgaatgcgtcaccgcctcttcaatacgcgtgcgattgcggatgcagttgcctcccccggtaatggggatggtgttgccatatttcaagcataacaagcttttgctgtaa

SEQ ID NO: 256387 - DNA, 450 bp, Klebsiella pneumoniae
gtgattggctactgcgcggttaccggtgattttgacagcggtgccgcgattctgctggcgattttcagcctgtggcagatgccccactcctacgctatcgcgatcttccgctttaaggattatcaggcagcgaatattccggttctgccggtggtgaaaggcatttcagtcgccaaaaatcatattaccgtttacatcatcgccttcaccgtggctacgctgatgctctctctgggcggctacgccggatataaatatctggttgtcgctgcggccgtgagcgtctggtggctcggtatggcgctgcgcggctataaagtggcggatgataaagtctgggcgcgtaagctgttcgtcttttcgattgtcgccattaccgcgctgtcggtgatgatgtccgttgactttatggtgccggattcacatagcctgctggcttatgtcagctaa

SEQ ID NO: 256388 - DNA, 333 bp, Klebsiella pneumoniae; identical to SEQ ID NO: 179684

SEQ ID NO: 256389 - DNA, 759 bp, Klebsiella pneumoniae
atgcaaaaccagattcattcccgcgatctaatcgtcggcctgcaaaaggggctggcgctgatccagctattttcgaaagagtttccgcgtctcacggtgccgcaggcggcgaaaatgagcggtctgacgcctagcgccgcacgccgttttttcctcacgctgctgcatgagcgctatctgcagaccgacggacgtcactactggctgacgcccaaagcgttaaggctggggcaggcgtatgtggattcggcgcagtttccgcggatggtgcgaccgatcgtggagtacatcgccagccgaacggaagagcatgcttcggtaggtgtgattgatgacgatgagctggtttatattgcccgcagcaagcatacgccgtttaactcgacttcagtgcgtctgggagaaagggtgccgatttactgtaccgccggagggcggctctggctggcttcgttagcggaagatgaatgtgaaaccgttttgcagcggatccgccgcgaacagcgcacgccctatacggtaacggacgtagcggctttaatggaaaagatcgctcaggtgcgtcggcagggctatgccgcgattgagcaggagtttgaaattggcatgctggtgctggcggtgccgctatccgacagggaagggctctactggggggcgctgagcttaaccagccatcagtcgagaacgtcgctggaggcgctgtgtcgcgaccatctggatttactctatagcgcccaggcgatgctggtggggtga

SEQ ID NO: 256390 - DNA, 822 bp, Klebsiella pneumoniae
atggtcagtggattcactcaggtcgttgccgttatcggccacccgattacccaggttaaatcgccggagaacttcaaccgctactttgccgaacgacagatggatagcatcatgatcccggtggatatcgctccgcaagccgttgctgattatctcaatacgctacgcggctggcacaacatgagcggcgtgctggttaccgttccgcataaacagcgtgccgctgccctagttgatgagttaacgccgcgagcccgacacctgaatgccgtcaatgtcatccgtaagctggccgatggccgtttgcaaggcgatatgctggatggcgtcggcttccagcttgccgcagaggcgcatggatttaatgccgcgggtaaaaaagcgcttctctccggctgcggcggcgtcggcagcgcaattgcctggggattatgcgaagcgggcatccttcagctggccctgcatgaccagaatcccgctacccttcagcaactgcataaccgactggcagcccattttccccacgttcagctcagcgacctgcccactacccttactggtctggatttagtggtgaatggctctccagcgggaatgaccggtttcgcttctttaccgctgccgcaggcgctgctggaaacccttcccgcagcaacgcatgtcgctgacgtggtaaccgcgccgatcgtcaccccgcttctggccttcgcccgcgatcgcggctgcactatccagaccgggccggagatggcgctggcgcagatgaaactcatggggcagttcattggcgctattccgcaggaacaaggagcggcagcatga

SEQ ID NO: 256391 - DNA, 321 bp, Klebsiella pneumoniae
atgatctatgaaaaacgtacctacaccattaatccgctgaaaatggccgactggctggcgttatataaaagcaatgcttacgccgtacaaaccgaacatctcggcaaactcatcggctttttctttactgaaattggggtggttaatcaggtggtgcatatctgggcctatgaaagcctggacgatcgcctggtgcgtcgggcgcgcatggcgcaggacgaacgctggctgacgttttcacgcaagaaccgcgaactggccgccgttgagcgcctggagtcggttcttctgcgccctactgatttttcaccgctgcaataa

SEQ ID NO: 256392 - DNA, 1704 bp, Klebsiella pneumoniae
atgagcgggcagatgaacgtggatgttctggtggtcggctccggcgcggcggggctctccgccgccgtcactgccgccattggcggcgccagcgtgctggttgcggagaaagagtcggtgattggcggcaccagcgcctggtccggcggctggctgtggatcccgcataatccgctggcgcgtgaagaggggattaaggaagagcccaacgcaccgctggtttatttgcagcatgaaatgaacggtgaaccggccgatgcgcgcctgcttgcctacttacggcacggaccggagatgattgactttttccgccgccatactgccgtgcagtttctttccggcagcaaaatgcccgattttcatcattcgccgggatcggccgccggagggcgctcggtcacggcgcagcctttcgatgggcggctgctcggcgactggctgcatcgcctgcgcccgcctctggagactatcagcctcgcggggatgggcattgccggcggcacggatatggcacactttttcaacgccactcgctcgccgcgatcggcgctgtatgccagccgtcgcctgctgcgccacggctggcagcggctgcgcgccggacgcggacagcatctggttaacggcaacgctttggttgcccggctgctgcgctcggcgctggatgcaggagtgacttttcagcttaatgcgccggttgaacggctgctcgcatccgggaacggagtaaagggcgcgatattacgcagcgacgacggccggatagaggttcgggccggtgcggtgatcctcgcctgcggcggctttcctcacgacagacagcgcctggccgaaaacgtgccgcacgccgccagcggctatggccacttctccgccgcgcctccgggtaatcagggggagggcatccgccttggcgaaacggtcggcggccagtttgataccacgctcaggcatgcgatggcctgggcgcccgtttcgcgcgtgacgcaggccagcggtctgcagctggtcttcccacatctggttgaacgcgccaagcccggctttattgccgtactgcccaacggtaaacgctttaccaatgaggctgattcctaccacgattttatcgccgcgctgctggaggccacgccgccaggcgaagcgccacaggcgtggctgattggcgatagccgtgcgcttcggcgctatgggttaggccatgcccgcccttttccttttgccccggagtcctggcgacgcaccggctatctgtacgtcggcgagacgctggaagcgctggcgaaagcatgcgctatcgattcgcagcagttggcgaaaacgatcgcccgttttaacggttttgtagacaagggggaggataaggattatcagcgcggcgcgtcggcatacaaccgcgcgcagggggacgccagccgttcccctcaccctacgcttgggaaactcagccgcgcgcctttttatgcggtacgcattctgcccggttcgctgggctccttcagcggtttaattaccgatgagaatgcgcgggttctcaacgcgcagcagcaaccgattcagggcctttacgccatcggcaacgatatgtcgagcgtgatgcggggattctatcccagcggcggtatcacgcttggtccggccatgacctttggctacatggtcggtaaaaaactggcagaaaacattaataaagcaacgcagtaa

SEQ ID NO: 256393 - DNA, 819 bp, Klebsiella pneumoniae
atgaacatgcgaaccctgtcactcgccgcgcttaccctactcgacgtcccgccaccgcaacaggtgcggatcgcggcccaaaccggatttactcacgtcggcctgcgcctgcttcccgccacggcgaccgaccctgactatggcatgctgggcgatactgccgctgtccgcgataccctggcagcgctgatggaaaccggtattcgcgtctcggacgttgagatagtccgcctgacgccagatttttcgctggacgctcgtttgcagctctttctccataccgccgcgcgtctgggcgccagacaggttttagtcgccggaaatgatgacaaccgcgctcgcagcgcggaaaatctggcccggcttgccgaagctggccaggagtatggtttaaccatgaacctggagcccatgccctggacacagctgcgcaccatcgccgaagcccaggcgcttatcgccgccagcggccgccaggatatcggtattttgatcgacgcgattcatttctggcgctcaggcgagtcgctgtctacgctcgccgcgctgccgaaaaactgcctcaactatatgcagctttgcgatgcctcgccgcaaatccccgcagatgaacaggagctgatttaccaggcccgcgccgcgcgtaaggtgcccggcgaaggcgggctcgatctgcatggactgatggcggcgcttccggcgacgctgccggtttctatcgaggttccgctaagcggcgaacgcggcgcgctgccggcgctcactcgcgctcagttgctgtttaacgccgcgcagtcctacctgcgcccttgcgcataa

SEQ ID NO: 256394 - DNA, 1365 bp, Klebsiella pneumoniae
atgacacagactcaacgcctggacgtcagggagttaatcaacgccaatccgctcagccgctttcaaaaactggtggtgtttttaggcttctgcgtgattgcgctggacggctttgatatcgccatcatgggatttatcgccccgacgctgaagcaggaatggggagtaagcaaccatgaactcggttttgtcatcagcgccgcgctgataggccttgcgctgggcgctatattctccgggccgctcgccgactggctggggcggaaaaaaatcattatcaatagcgtcttcttcttcggcttctggaccattgccaccgccctttcgcaaaacatcgaacagatggtgctttttcgttttctgaccgggctcggattaggcgccgccatgccgaatatcggcactctggtgtcggagtatgcgcctgagcgtcagcgctcgtttctgattacgattattttttgcggcttcacctttggcgccgcggcgggaggattctccgcctcatggctaatcccgaagtttggctggcactcgctgatgctgctcggcggcatcctcccgctgctgttcgcgccgctcctgatctggctgttaccggagtcggtgcgttttctggtggttaagcgcgcgccagcccgacgtattcggctgattttacagcgcctctatccgggccaaatcgccgatgatgctgagttcactctcccagcccagcccgtgcaggcaaatgcaatgcgcatcgtcctctcccgccagtatcgcttcggttcaatgatgctctggctggtctattttatggggctctttctggtctatcttctcggtagctggttaccgacgctggtgaaagaggtgggactaacggttggccaggcggcggtgatgaccgcaatgtaccaggcgggaggaaccattggctcgctgtttgcgggctggctgatggaccggatcaatccgcatcgggcgctcggaatgatttacgccgttggcggcctgtttacgatggcaatgggatatgctgcggcaagctttgcgctcatctgcctgctggcgtttatcagcggagcctgtttaaacggcgccaataccggtatgaatgcgctttccgcccgctactatcctaccgaagcgcgggctacaggttccagctggatgcacggcgtgggccgcatgggcgccatcctcagcgcttttgccggagctgagatgctggcgctgaatattagcttcgaaagcgtttttctgatccttggcatccccgccgcgatcaccgtcgccgggctcgcggccaaaggaattttcgcggctgactcggcgccaaaatccacctcctccaccgccgcgttcggcaataccggttaa

SEQ ID NO: 256395 - DNA, 447 bp, Klebsiella pneumoniae
atgattcgccactgggacgctagcgaaaccggcccgctgcttgagctgtggctggaaagtacgatccacgcgcacccgtttatcgccgaaagctactggcatgatagcctggcgatagtgcgcgacgtttatctgcccgccgcccaaacctgggtctgggaacaggatggcatgctgaagggctttatcagcgtaatggaatcccgcttcatcggcgcgctgttcgttgcgccggacgccgtcagacagggtatcggcagcgcgctaatcggcgaagtcaaaaaacactacggctggctcagcctcgaggtatatcagaaaaacgttcaggcggtaaatttctaccatgcgcaaggcttccgcattgaagactgcgcatggcaggatgaaacccagcatccaacctggattatgcattggtcggcggatcaaatgccgtcagcgtaa

SEQ ID NO: 256396 - DNA, 582 bp, Klebsiella pneumoniae
atgcaacgttgcggatgggtcagtcaggatcctttatacattgagtatcacgatagcgagtggggcgttgcggaaaagaatccccgtaagctgtttgagatgatttgccttgagggccagcaggccggactatcgtggatcaccgtgctgaaaaagcgtgaaaactaccgcaacgcttttcaccagtttgacccggttcgcgtcgccgctatgggtgaagaagatattgaacgtctgcttctcgacgccggtattattcgccaccgcggtaaaatccaggccatcatcggcaacgctcgcgccttcctggcaatggaagaaaatggtgaacctttcgcagatttcgtctggtcgttcgtcgacaatcaaccgcaggtgacgaccgccgccacgctggcggagatcccgacaaccacccccgcttctgacgcgctatcgaaagcgctgaaaaaacgcggctttaagtttgtcggctccactatctgctactcctttatgcaggcctgcggtctggtcaatgaccacgtcaccggttgtttctgtcgcacaggaggccaggatgattcgccactgggacgctag

SEQ ID NO: 256397 - DNA, 645 bp, Klebsiella pneumoniae; identical to SEQ ID NO: 173461

SEQ ID NO: 256398 - DNA, 1203 bp, Klebsiella pneumoniae
atgaacgctgcaaaccgtcaatacacccgctggctcacgctgctcggcactatcattacgcaatttgcgctgggatcggtttatacatggagtttgttcaatagttccctttccgccaagctgaacgaaccggtaagccaggtggcattctcatttggcctgctaagccttggtctggcgctctcctcatccgtggcgggtaaattacaggaacgttttggcgtcaaacgcgtcaccatggcgtcaggcgttctgctgggcctcggtttcttccttaccgctcattcaaacagcctgatgatgctgtggctgagcgcgggcctgctggtggggctggcagacggcgccggctatctgctcacgctgtcaaactgcgtcaaatggttcccggaacgtaaggggctgatctccgccttttccatcggttcttatgggcttggcagcctgggctttaaatttattgattcccatctgctggcgacggtcggccttgagaaaacctttattatctggggcgcaatcgtgctggtgatgattgtgttcggcgcgacgctgatgaaagacgcaccgaaccataccgctaccgccaacaacggcgtcgtcgaaaacgacttcacccttgccgaatcgatgcgtaaaccacagtactggatgctggcggtaatgttcctgaccgcctgcatgagcggcctgtacgtgattggcgtggcgaaagatattgcccaggggatggtgcaccttgatgtggcgacggcagctaacgcggttacggtaatctctatcgctaaccttagcggtcgcctggtgctggggatcctgtctgataaaatgtcccgtattcgagtgattaccatcgggcaggttgtttcgcttatcggtatggcggcgctgctgttcgctccgctgaacgctaccactttcttcgccgccattgcctgcgtggcctttaacttcggcggtacgattaccgtcttcccgtcgctggttagcgaattctttggtctcaataacctggcgaaaaactacggcgtgatttatctcggctttggtatcggcagcatttgcggttccctgattgcgtccctgttcggcggtttctacgtgaccttctgcgtcatctttgcgctgctgattctctccctggcgctatcgaccaccatccgccagccgaaaagtgagatttatcacgaagcgcatgcctga

SEQ ID NO: 256399 - DNA, 1689 bp, Klebsiella pneumoniae
atgaaatacattaaaacgatgacgcagctgaagctcagtatctggctggcgctgtacatcggctggtttatgaacgctgccgtactcttccgccgcttcgaagggtacgctcaggaatttaccatctggaaaggactctcaggggcagtggaactggtcgggactttcctggtcaccttctttctgctgcgtattttgtcgctgttcggacgccgggtctggcgtatcctcgcgactatcgtcgttctattctccgctgccgccagctattacatgaccttcctgaacgtggtgatcggctacgggattatcgcctcggtgatgaccaccgacatcgacttatccagagaggtgatcggctggcacctgatcctctggctggtgctgatgagcgcgctgccgctgctgcttatctggagcaaccgctgccgcttcacgctgctgcggcaaattcgtacccctggccagcggatgaagaatattacgattgtattgctggcgggattgatggtctgggggccaatccgtttgctggaggtccgtcagaagaacttcgagcggagctcagaggtcgatctgccaagctacggcggcgtagtggctaactcctacctgccgtcaaactggctttcggcgctggggctgtacgcgtgggcgcaggttgatgagtcatcggatactaaatccctgattaatccggcgaaaaaatttacctacgtggcgcccgaagggctcgacgatacctacgtggtgtttatcatcggcgaaaccacccgctgggatcatatggggattctgggctatagccgtaataccacgcctaagctggcgcaggagaaaaacctggtcgcttttcgcggatactcctgcgataccgcgactaagctgtccctgcgctgtatgttcgtccgtcagggcggggcggatgataatccgcagcggacgctgaaagagcagaacgtttttgccgttctgcatcagcttggctttaccggcgacctgtatgccatgcagagcgagatgtggttctacagcaacacgatggcgaacaatatcgcctatcgcgagcagattggcgcggagccgagtaaccgcggcaagagcgttgacgatatgctgctggtggacgaaatgaagcgcggtctggcgaagaatcccaatggtaagcatctgattattctgcataccaaagggtcgcactttaactatacccagcgctatccgcgcagttttgcgcagtggcagccggagtgcgttggcgtcgataataagtgttcgaaggctgagctgattaactcgtatgataacagcgtgacctatgtcgatcactttattgtcagcgtgctggatcagctgcgggataagaaagcgattgttttctatgccgccgaccacggcgagtccattaatgagcgcgagcacctgcacggtacgcctcgcaagatggcgccgccggagcagttccgcgtgccgatgatggtatggatgtcggataagtatctggcgtctcccgatcatgccgcctcttttgctcgtctgaagcagcaggcagccatgaaggtgccgcgccgccacgtagagctgtatgacaccattatgggctgtcttggctatacttcgccggatggcgggattaaccaatataacaactggtgccacgttcctgacgctgcggcgaaaaagccgtag

SEQ ID NO: 256400 - DNA, 1047 bp, Klebsiella pneumoniae
atgaataaaacagacgaattgcgtaccgcgcgcattgaaagcctggtaacgcccgcggaactggcgcaacggcaccccgtgtcccccgatgttgccgcccacgtttctgcttcgcgccgccgaatcgaaaaaattctcaacggtgaagatcgccgcctgctggtagtgatcggtccctgttccattcacgatactgatgcggcgatggagtatgcgcgcagactgcagggtatgcgcgaacgctatcagccgcagctggaaatcgtgatgcgcacctattttgagaagccgcgtacggtggttggctggaaggggctgatctccgaccccgacctgaacggcagctaccgggtgaatcacggccttgaactggcgcgtagcctgctgctgcaggtgaacgagctcggcgtccccaccgctaccgagtttctcgatatggtgaccggacagtttattgccgatttgattagctggggcgcgatcggcgcacgtacaaccgagagccaaatccatcgcgaaatggcctctgcgctctcatgcccggtgggctttaaaaacggtaccgatggtaatacccgtatcgccgttgacgccatccgcgcttcccgcgccagccatatgttcctgtcgccggataagcagggccagatgaccatctatcagaccagcgggaatccgtacggccatattattatgcgcggtggtaaaaaaccgaattaccacgctgccgacatcgccgccgccggagaagcgctggcagagttcgacctgccggaacaactggtggtggattttagccacggtaattgccagaaacagcatcgccgtcagctggaagtttgcgccgatatatgtcagcagatccgcgcgggctcgaccgcaatcgccgggatcatggccgaaagcttccttaaggaaggtacgcaaaaggtcgttgccggccagccgctgacctggggacaatcgattaccgatccctgcttgagttgggaagacagcgagcggctgctggatgaattagccgccgcaaccgccacccgcctctag

SEQ ID NO: 256401 - DNA, 228 bp, Klebsiella pneumoniae; identical to SEQ ID NO: 176667

SEQ ID NO: 256402 - DNA, 1443 bp, Klebsiella pneumoniae
atgaccctgtcttttactacccactggcgtgatgaactgccggatttttacactgcattagcccccacgccgctggagaacgcgcgccttgtctggcataacgcgccgctggcgcaagagctgggcattcccgagtcgttgtttaacctggacaagggcgctggcgtatggggcggcgaagcgctgctgccggggatgtcgccgttggcgcaggtctacagcggccaccagttcggctcgtgggccggacagctcggcgacgggcgcggtattctgctcggcgaacagcagttggccgatggccgccgcgttgactggcacctgaagggcgccgggctgacaccctattcgcgcatgggagacgggcgggcggtgctgcgctcaacgatccgcgaaggcctggcctcggaagcgatgcatgcgctgggtattcccaccacccgcgctctggcaatggtcgccagcgatacgccggtgtaccgcgaaaccgtcgagcaaggggcaatgctgatgcgcctggcggaaagccacgtgcgttttggccattttgagcacttttactatcgccgcgagccgcaaaaagtgcagctgctggcggattatgtgattcgccaccactggcctcatctgcaaaatgaagcggataaatacattgtgtggttcagggatgttgtcacccgaaccgcggagatgattgccagctggcaaacggtcggcttcgcccacggggtgatgaataccgataatatgtcgatcctcggactgacgatggattacggcccgtacggcttccttgatgattttcagcctggctttatttgcaatcattccgactatcaggggcgctatagctttgatcatcagccggcggtaggactatggaatctgcagcgcctggcgcaagcgctctcgccgtttatcagcgcggaagcgctgaacggcgcgctggatgactaccagcacgcgctgctgacggcatatggccggcgtatgcgcgacaagctgggattattgacccagcaaaaaggggataacgagctgctggacggcctgtttactctgatggagcgcgagggcagcgactatacgcggaccttccggatgctaagccttagcgagcaggagagcgccgccacgccgctgcgcgacgaatttattgatcgtgagaggttcgatagctggtttgccgcttatcgcgcgcgcctgcgcgatgaacagattgacgatgcgcaaaggcaggcgcaaatgcgcagcgtgaatccggctatcgtgctgcgcaactggctggctcaacgagccattgagcaggcagagcagggggatatgcgtgaactggaacgtctgcatagcgcactttctcagccctttgtcgatcgcacggatgagtatagccagcgtcctccggactggggaaagcgccttgaagtgagctgctcgagctaa

SEQ ID NO: 256403 - DNA, 465 bp, Klebsiella pneumoniae; identical to SEQ ID NO: 176665

SEQ ID NO: 256404 - DNA, 750 bp, Klebsiella pneumoniae
atgccgtttttgatgcagctacaggatgtcgaagagcctggacggctggcgccgttttcagccgatatcagaccgggagagattattcatctggtggggccaaacggggcggggaaaagcacattgctggcacgtatggcggggctctctaccggcccggggcaggtaagactgaatgaacgtcttctgaatgactggccggcgcaggagctggcgcgtcatcgcgcctacttaagccagcaccagatgccgcctttcgccatgccggtctggcattacctatcgctgcatctgcagaacgaggcgcaaaacggactcctgacggccattgcgcagaagctgggcttaggcgataagcttggacgtcaggtgaatcacatctccggtggggagtggcagcgcgtgcgcctggctgcggtgatactgcagattcatcgtcaggctaacgcgtccggtcaactgctactgctggatgaaccgatgaacagcctggacgtggcgcagcaggccgcgctcgatcgactgcttagcgatctctgcgcatcaggcattgccatcgtcatgagcagccacgatcttaatcatactctccggcacgcccacagctcctggcttatctgtcaggggcaaactatcgcctgcggcagcaccgcggaggtgttaagcgaggagaatttaaccgctgcctatgccatggagtttcagcgggttgaggtggcgggtcatcttatgctcgttgcgtcacagtag

SEQ ID NO: 256405 - DNA, 552 bp, Klebsiella pneumoniae
atgcaacacgatattcttaatactgaagtcaccactatcgatggtgagaaaacaacgcttgctccgtgggcaggcaaagtgctgttgatcgttaacgttgcgtcaaaatgcggcctgacgccgcagtatgagcaactggaagcgctgcaaaaggatttagaaagcgaaggtttcagcgtgctgggctttccctgcaaccagtttttggggcaagagccgggcagcgaagaggagattaaaacgttctgcagtacaacttacggcgtgaccttcccgatgttcagcaaaattgacgtcaacggcgaacatcgcgcgccgttgtatcaaaagctgattgcggcggcgcctcaggccgttgctccagcaggcagcggtttctatgaacgcatggctagtaaaggccgcgcgccgctgtatgtcgacgacattctgtggaactttgaaaaattcctgattggccgcgacggccaggttatcggtcgtttctctccggatatgacgccggatgacccgcagctggtggccgctattaaaggagcattagcgaaataa

SEQ ID NO: 256406 - DNA, 801 bp, Klebsiella pneumoniae
atgaaaaagatgtttagcaccgtgttaattgcggcctccgtcgcgctgttatcggcctgctcgccggatgaagataataaagttaaagtcgcgatcaataccgggccggatgaggctatctggaaagtcgtagaacaggtggctaaagagaaatacaacctcgacgtggaggtcatctcttttaatgattacgtcctgccgaacgaagcgttaaacaataaagacgttgatgctaacgccttccagacgctgccttaccttgaagcgcaatcaaaagaacgcggctataagtttgcgattgtcggtaaaaccttcgtcttcccgatcgccgcttactcgaagaaaatcaaaaatattagcgaactgcctgacggcgcgacgatctccatttctaacgaaaccaccaccctgggccgcagtttgctgttgctacaggcgcagggcttaatcaagctgaaagacgggacaggctacctgccgacgacgctggatattattgataatcctaagcagctgaaaattgtggaagtcgacacgccgcagctgacccgtacgcttgatgacccgaacgtcgccctgtcgattattaataccaatttctccgcgcaggctggtctgtccgccgctcgcgacgggttatttatggaggggcccgattctccgtacgtcaacgccattgttgcgcgcgaagataataaagacagtaaaaaagttcaggaactgaaagaggccttccagacgcaagccgttgccgacaaggcagcggaagtctataaaggcgatgcgattaagggctggtaa

SEQ ID NO: 256407 - DNA, 300 bp, Klebsiella pneumoniae; identical to SEQ ID NO: 176660

SEQ ID NO: 256408 - DNA, 906 bp, Klebsiella pneumoniae
atggtggattttcccccgattgcgagtttacgtagttttgaagccgtggctcgtcttggcagcgttacgctggcggcgaaagaactgcacgttacgcactcagctatcagtcagcagattaaagtgctggaggagagggtcggcttaaagctgtttattcgtcacggtcgcggcctgcagattaatgaagagggacgactctacgccttacaggtacgcgaggccctgaaccatatcgcggacgccacccgactggtgcaggtaaagccccgcagacaggagctgacgatagcggtggtaccctcttttggcggccactggcttttgcctcgtcttgagcggtttcgggtgaaataccctcaaatcacgctgcgaatacaggcaaacctggcggtcactcatctgcagcaggaaggggcagatttggccatccgcatgggaaaaggggactgggaaggcacggagagtcattatcttttctccgatgaacttatcgttgtggctgctccatcttataacggcggtgagctaccccgtacgccgtcagagatagcgcagagcaagattatcttttccatggaatcgtggaaaacctggtgtatcaaggctgggctcgaaagagagattgtgcccggcgggctatgcataaacgactcaaatctggtgctggaggccgtccggctcggtaaaggtgttgcgctggaacgccgctctttagtccaggatgctattgcccgaggagagctggaacagcttacctctttcaccgcgccttatccgtggccttactggctggtctcatcgcaagttgcagaaaagaaaaacgaagctgtgctttttaaggactggcttagtgaggaggttgtcgcctggcgtcagcaaacggcaaagggagaagagagataa

SEQ ID NO: 256409 - DNA, 609 bp, Klebsiella pneumoniae
atgaataagcttattggcatgatggactctccttatgtaaggcgcgtggcgatttctcttgaactttacggcgtcgagtttgaaagccatccgctgtcggtattcagcagctttgacgcgttttcgcggatcaaccctgcggtcaaagcgccgacgttggtgctggataacggaatacgtctgatggattcatcgctgatactggactatttcgaagcacaggcagcccgggagcgaaaactcctgccgatcgctgcggatgcgctggcaagagacctgcaggtactgggctttatgctcgccgcgggtgagaaggcggtgcaaaatgtgtatgaacatcaacttcgcccgacggaaaaacagcatcatccgtggatagagcgcattacccgtcaactgctagcggcctgcagggaatggaatacgctactggaagatcgtccgattgccacggactccgatcaggttgccgtgacaagtacggttatctggacctttattcaggccaggatccccgatattgttgatgcgcaagagtttcgtcacattcagtcgcttgccgaattatttgaaaatcatgctgcgtttaaaaaacatccctatcgctga

SEQ ID NO: 256410 - DNA, 924 bp, Klebsiella pneumoniae
gtgcggcgcgtgaaactgctttgttcttttattatgcttctcaccagccagagcgctctggcggtgagctacccgctgccgccggaaggaagccgtctggtaggcagcccgttgaccatcacgattccgcagaacaatacccagccgcttgaggcctttgccgctcagtacggccagggcctgagcaatatgctggaggccaacccgggcgtcgatgtgttcctgccgaaatcgggcaccacgctggtggtgccgcagcagcttatcctgcccgccacggttcgcaacggcattgtgatcaacgttgctgaaatgcgcctttactactatccgcctgaaggcacaacggtcgaggttctgccgattggtattggccaggcagggcgcgaaaccccgcgtaactgggtgaccgccgttgagcgtaagcaggaggcgccaacctggacgccaaccgccaatactcgccgggaatatgccagccggggcgaaagtctgccggcatttgtgccggccgggccggataacccgatggggctgtatgccatttatatcggcaggctgtacgccattcatggcaccaacgccaatttcggcattggcctgcgggtgagccagggctgcattcgcttgcgcaatgacgacatcaagtacctgtttgataccgttccggtaggcacgcgggtgcagattatcgatcagccggtgaaatataccgccgagccggacggtagccgctgggttgaagttcatgagccgctgtcgcgaaaccgcgcggagtatgaatcggaccgcaaggtaccgcttcccgtcacgccggcgatgcaggcttttgtgaagggcgagggcgttgatgtgaatcgcgccgggcaagcgcttgaacgccgctccggtatgccggtggagattggccgttcagcgttgtaa

SEQ ID NO: 256411 - DNA, 975 bp, Klebsiella pneumoniae
atgtctgatagcccggaggaaagggtgaacttccagcagctcaaaattattcgtgaagcggcccgtcaggattacaacctgacggaagtcgccaatatgctctatacatcgcagtcgggcgttagccgccatattcgtgaactggaagaagagctggggatcgagatttttatccgccgcggcaaacgtctgctggggatgaccgagccgggcaaagcgttgctgtcgattgccgagcgtatcctcaatgaagccagcaacgttcgtcgcctggcggacctgtttaccaacgatgcctccggcgtcttaaccatcgccactacgcatacccaggcgcgctatagcctgccgccggtgattaaagccttccgtgaactcttttctgatgtccgtcttgaactggttcagggaacgccgcaggaaattgaaacgctgctgcacaacggcggcgcggatattggtatcgccagcgagcgtctgagcaacgatccgacactggtggcttttccctggttccgctggcaccacagtctgctggttcccaaagatcatccgctgacccaggtgacgccgttgaccctcgaggcgattgcccgttggccgctcatcacctatcgccagggcataaccggccgttcacgcatcgatgaagcctttaaccgcaaagggttgatgccggatatcgtattgagcgcacaggactcagacgtcatcaaaacctacgttgagctggggctgggcgtggggctggtggcggaacagtcgggagatgagcgggagtctgatacctttacgcgtcttgatacccgccatctgttcgatgccaataccgtctggctgggcctgaagcgcggacagctacagcgaaattacgtctggcgttttattgaactctgtaatgcaggtctgtcgctggaggagattaaacgccaggcgatggagccggaagaggcggcaatcgattatcaaatttag

SEQ ID NO: 256412 - DNA, 918 bp, Klebsiella pneumoniae
atgaacttaagacgactgaagtatttcgtaaaaatcgtcgatatcggcagtctgacccaggccgctgaagtcttgcacatcgcacaaccagcgctgagccagcaggttgcgaccctggaaggcgagctggaccagcagttgttgattcgcaccaaacgcggcgtcacgccgaccgaagcgggcaagatcttgtatacccacgcccgtactattctgcgccagtgcgagcaggcgcagctggcggtaaataatgtcggtcaaacgctaagtggccaggtatcgattggcctggccccgggcacggcggcttcggccatcactatgccgctgctgcaaacggtgcgtaacgagctgccggaagtgatggtctatctccaggaaagtagcggaaccctcctcaacgataagcttatcgacggtcagctggatatggccgtactttatgaacgttccccggttgccgggatcatcagccagccgctgctaaaagaagatctttacctggtcggtacccgggattgtccggggcagagcgtggatctgacggcggtcgcggagatgaatctgttcttgccgcgcgattacagcgccgttcgcgcaagggtgaccgaagccttcaccctgcgtcgcttatcggccaaaattatcggtgaaattgaatccattaccaccctgacggcagccattgccagcggcatgggcgtcaccgttctgccggagtccgccgcccgttcgttgtgcagcgcggccaacggctggatggcgcgcatcagcacgccgtcaatgagcctgtcgctgtcgctcaatatgtcggctcgcggcagtctgtcgccgcaggcgcaggcggtgaaggagatcctgatgtcgctggtgagtcgcccgtcgctggagaatcgtgaattacagttagtcagttga

SEQ ID NO: 256413 - DNA, 486 bp, Klebsiella pneumoniae
atgaaataccagaataaaatcaggacaaaaagcatttacatactctttctggtgttggtgatagggttgatttttctctggctggtagggcatctttatcgcaaagacgactttgattgctcagccaacctgagaattgaatcgacttcatttgcctttgatgcaaaatttaaaaccttcttgcttatgcgagaaaataataccggctattttgatgtatccgggaaggtgctagtcgatgacgtgaagtacaacgttgaaagggcgtaccatttcaactatgaaaagaaagcgaataatatttatcacctaaccaataccacagtctcgaagagaaaggccgacaccatgatcgagggtatgatgcagaaagtcttttttagtcccgatccggattcaggacgctatatcaagatacaaaaaatgaaaaacgcctggatcgttcaaagtctgtattccccttcgtttatctgtgtaaccaattga

SEQ ID NO: 256414 - DNA, 771 bp, Klebsiella pneumoniae
atgtggctggatgaggatgcatccgtcacgctaacagcaaccaccggtcgcctgcttaagttccttttagaccacagagagcatgtgatttacaggaatgagatacttgaaaaagtctgggacgcacatgggctgcggacgtccagtcatagcctcaataagtatatttcagatctgagagccgttttcagaaacctgggctgcaccgaggagattatcgttaccgttccgcgggtgggttttatgatatctgcagccattgttattgaaagaatggattatcctgctctcgcggtaaatgacgaaagcgaaggagaaggggcggttgtcggtcggggcatcggttcaaatgaggagagcgagacatattctgccgggggggttaaaaaggcccgctatgcactacttgcgctatgcgcgttagtcatgctttttctgagcattcaaggcgaactgtatcgcccactctttgccgcagacgaggatgaaatctattttctggggagcgtcgattcatgcccggtcagaacttttaacgtaatacctcaagagcagaagcctggaatgatggccctggctcaggagcagattaagaaacaaggaatgcggtgcttaggtaatagtgttttttactttaatgtatcagagtctgtattaaaagcctctgaagcaagagtatttttagcccactgcattaactcaaaagttaagaaaggtgattggtattcatgtgaaaattattacaggccagattatgaaataccagaataa

SEQ ID NO: 256415 - DNA, 519 bp, Klebsiella pneumoniae
atgagatcgcgttcagatatgactctatcaactaatattttatctaaggataaatattttactctgggcctgattgaactgcttggagaagaatttattgacaatttctttttgattatagatctcgactctaacgatcttacgggttcggagtggatttacttctcgaataagaacattgtcgcctttgcatccagcgacctggctttttataagtccgaactatttgaaaaaataaccgtacttgataagaaaagtaatacccgaagtatcctgaatttctttttaaagaaagagacctcaggaaattaccatactaaattccggctaagtctgcgtgaaaagcagatgttaagcatgttaagcagaggggaaagcaaccaggagatcgcagaagagtttggcgtgaaacttaagactatttatacgcatcgccgcaacctgatgaataaattaggctgtaaaaataggattacgtttcaaaaattatttttcaacaataaatgtctcttcaagtga

SEQ ID NO: 256416 - DNA, 543 bp, Klebsiella pneumoniae
atgaacaaattagcacttatcgttatttcagcattgtccctgagttctgctgcggctctggccgataccgttacggtgaacggcggtacggtgcattttaaaggggaagtggttaatgcggcctgcgcagttgatgccggttctctcgatcaaaccgtgcagttaggccaggtgcgctcagcgaaacttgccaccgcgggtagcaccagctctcctgttggcttcaacatccaactgaatgattgcgatatcaccgtttccgagaaggccgcgatcgcttttgctggcacggcgattaacagtacaaacccaacggtactggccctgcagggttctgccgcaggcggcgcgactaacgtcggcgtacagatccttgaccgtaccggcaccccgctggcgctggatggcgcgtctttcggcgcacaaaccacgcttagcaatggtaccaacgtcatcccattccaggcacgctactttgcaacaggcgtcgcgactgccggtaccgctaacgcggacgccacctttaaagtgcagtacgagtaa

SEQ ID NO: 256417 - DNA, 1374 bp, Klebsiella pneumoniae
gtggaccatttgcctatattttgccaattacgcgatcgtgactgtttgttagtcggcggcggcgatgtggctgaacgtaaagctcgcctgttactggacgctggcgccagattgacggttaatgccctggattttgtgccgcaattccaggtatgggccgatgcaaacatgctaaccctggtccagggcgagtttaatcctgcgctgctggataactgctggctggccatcgctgctaccgataacgaagcggttaatcaacaggtcagcgaatcagcggaagaaaggcgaatattttgcaacgtggtcgatgcgcctcagcaagccagctttattatgccgtcgattatcgaccgttcaccgctgatggttgccgtctcttccggcggcacctcgccggtgctggcgcgcctgctgcgcgaaaagctggagtcggttctgccattacatttaggccagttggcccactatgcaggtcagctgcgttcaagggtgaagaagcagtttgccaccgtcggcgagcgccgacgcttctgggagaagctgtttgttaacgacaggctggcgcagtcgctggccaacgaggaccgccaggccgtcgcggacgctacggagcagctgctgaccgagccgctggaccatcgcggcgaagtggtgctggtaggcgcaggtcctggcgacgccggactgctgaccctcaaaggcctgcagcaaatacagcaggccgatgtagtggtttatgaccgcctggtctccgacgacatcatgaatctggtgcgccgcgatgccgatcgggtcttcgtgggaaaacgctcgggctaccactgcgtaccgcaggaagagattaaccagattctgctgcgcgaagcccagggtggaaaacgcgttgttcgcctgaaaggtggcgatccgtttatctttggtcgcggcggcgaagagctggaaactttgtgtcatgcgggtattcctttctcggtagtaccgggaattaccgcggcctctggctgttccgcctactccggcatccccctgactcaccgggattttgcccagggcgtgcgcctggtcaccggccaccttaagaccggcggcgaactggactgggaaaacctggcggtagagaaacagaccctggtgttctacatgggcctgaaccaggctccggcgatccgggaaaaactgattgcccacggcatggcggcggatatgcccgctgccatcgttgagaacggcacggcgataacccagaaggtggtcaccggtacgttagaacagctggatattctggcgaagcaaatggccagccccgcgctgattattgtcggtcgcgttgtcggcctgcgcgacaagctgaactggttctcaaatcactaa

SEQ ID NO: 256418 - DNA, 813 bp, Klebsiella pneumoniae
atgtttacggacacaataaacaagtgcgcggccaacgccgcccgcattgcgcgcctttcggccaataatccaatcagcttctgggtcagctcaatgatggcgggagcctatgtcggcctcggcatcattcttatttttaccctcggcaacctgctcgatcctgcggtccgcccgctggtgatgggcgccacctttggcattgcgttaacgctggtgattatcgccggctctgaattgttcaccggccacaccatgttccttacgctgggcgtgaaagcgggcaccatcagccagagtcagatgtgggcgattctgccccagacctggatgggtaatctgctgggttcggttttcgtggcgctgctgtattgctggggtagcggcagcctgctgccggtcgatagcagcctcgtgcataccgtcgcgctggcaaaaaccagccaatccgcgatggcgctctttttcaaaggcgcgctgtgtaactggctggtgtgtctggcgatctggatggcgattcgtaccgagggcgcggccaaatttatcgccatctggtggtgtctactggcgtttatcgcgtccggctatgagcactccgtcgccaacatgacgctttttgccctctcctggtttggccatcacagcgatgcgtatacccttgcgggaataggtcacaatttgttatgggtaacactcggcaatactttgtccggtgtcgtatttatgggattgggttattggtatgctacgccgaaatcggagcgccccgccccggaaaaaactaacgagactgagagtctggctcagcaggcgtaa

SEQ ID NO: 256419 - DNA, 327 bp, Klebsiella pneumoniae; identical to SEQ ID NO: 173300

SEQ ID NO: 256420 - DNA, 801 bp, Klebsiella pneumoniae
gtggcggtaggccgtatcgctcgtgaatttaacctgtataccaagatcaccggttcccagcgtatcggcctgtttggcgcacaaaaagacgatctgccggaaatctggcgtcagttgatcgacgcgggcttcgaaaccggtcacgcatacgctaaggcgctgcgaatggcgaaaacctgcgtaggcagcacctggtgccgctacggcgtgggcgatagcgtcggcttcggcgtagagctggaaaaccgctacaaaggcatccgtacgccgcacaaaatgaagtttggcgtctcgggctgtacccgcgaatgcgcggaagctcagggtaaagacgtcggcatcatcgccacggagaaaggctggaacctttacgtctgcggtaacggcggtatgaaaccccgccacgcggatctgctcgcagcggatctggatcgcgaaacattaatgaaatatctcgaccgcttcatgatgttctatatccgtaccgccgacaaactgacccgtaccgcaccgtggttagataacctggaaggcggcatcgattatctgaagtcggtcatcatcgacgacaagctgggactgaacgagcatctggaagaagagatggctcgcctgcgtgcagcggtagtctgcgagtggacagaaaccgttaactcgccagcggcccaggtacgcttcaaacactttatcaacagcgacaagcgcgaccctaacgtccaggtcgtgcctgagcgtgagcaacatcgcccggccacgccgtacgaacgtatcccggtaactctggtggaggaaaacgcatga

SEQ ID NO: 256421 - DNA, 1641 bp, Klebsiella pneumoniae
  misc_feature (1483)..(1492): n is a, c, g, or t
atgagcaaagtcagactcgctatcattggtaatggtatggtcggccaccgctttattgaggaccttcttgataaatccgacgccagcctgttcgatattaccgtcttctgtgaagaaccccgtatcgcctacgaccgcgtacacctctcctcctacttctctcaccatactgccgaagagctctctttggtacgggaaggtttctacgagaagcacggcgttaaggtactggtcggtgaacgcgccattaccatcaaccgccaggagaaggtcatccactccagcgcaggccgtaccgttttctatgacaagctgattatggcaaccggctcctatccgtggatcccgccgataaaaggttctgaaactcaggactgctttgtttatcgcactattgaagacctgaacgctattgaagcctgcgcccgtcgcagcaagcgcggcgccgtcgtcggcggcggtctgttaggcctggaagccgctggggcgctaaaaaacctcggcgttgaaacccacgtcattgaattcgcccccatgctgatggcggaacagctggatcagatgggcggcgaacagctgcgccgtaagattgaaagcatgggcgtgcgggtgcacaccagcaaaaataccaaagagattgtccaggaaggacgcgaagcgcgtaaaaccatgcgttttgccgacggcagcgagctggaagttgacttcatcgttttctctaccggtatccgcccgcgcgataagctggccacccagtgcggtctggaagtcgctccacgcggcggcattgtgatcaatgacgcctgtcagacttctgacccggatatctacgccatcggggaatgtgccagctggaataaccgcgtttatggcctggtcgccccgggctataaaatggcccaggttaccgttgaccatatcctgaaaacagaaaacgcctttgaaggcgcggatctgagcgccaagctaaagctgctgggcgttgacgtcggcgggattggcgacgctcacggacgcacgccaggcgcgcgcagctacgtttacctcgacgaaagcaaagaggtctacaaacgcctcatcgtgagtgaagataataaaactctgctcggtgcggtgctggtgggcgacaccagcgattacggcaatctgctgcagctggtgctcaatgcgatcgaactgccggaaaacccggactcgctgatcctcccggcgcatgcgggcagcggtaagccgtcaattggcgtggataaactgccggacagcgcacaaatttgctcctgctttgacgtcaccaaaggcgcattgattgccgctattaataaaggctgccacaccgtggcggcgctgaaagcagaaaccaaagccggcaccggctgcggcggctgtatcccgctggtgactcaggttctcaacgccgaactggcgaaacagggcatcgaagtcaacaataacctgtgcgagcactttgcgtactcccgtcagnnnnnnnnnnccgtcaggaactgttccacctcatccgcgtggaaggcatcaaaacctttgaagagctgctggcaaaacacggtaaaggctacggctgtgaggtttgtaaaccgaccgttggctcgctgctggcctcctgctggaacgaatatattctga

SEQ ID NO: 256422 - DNA, 1347 bp, Klebsiella pneumoniae
  misc_feature (411)..(420): n is a, c, g, or t
atgacagcagcgccgctttggttaattgagaacgttcgtctgcccgatcgcgaagggttatggcagatagcgatagacaaggggcgcttcggggatatcacccctatgggggaggcgcgcaaagagaattttgaagtgctgaatgcgcgcggcgggctggccatccccccttttattgaaccgcatattcacctcgatacgacccagaccgccggcgagccgaactggaatcagtccggtaccctgtttgaagggattgagcgatgggcggagcgtaaggcgctgttgagccatgaagacgtgaaagcccgcgcctggaagacgttgaaatggcaaattgccaacggtattcagtttgtgcgcacccacgtcgacgtttccgatccgacgctgaccgcgctcaaagccatnnnnnnnnnngcgctcaatgccatgctggaggtgaagcaggaagtcgcgccgtgggtagatttgcagattgtcgccttcccacaagaggggattttatcctatcccaatggtgaggctctgctggaagaagccctgcggctgggcgccgatgtggtgggcgccatcccgcattttgaattcactcgcgaatatggcgtggagtccctgcacatcgcttttcgtctggcgaaaaagtatcagcggcctttagatatccactgtgatgaaatcgatgatgaacagtcgcgattcgttgagaccgtggcggccctggcgttaaaagaggggattgggccgagagtgaccgccagccataccaccgcgatgcactcctacaatggcgcttatacatcacgtctttttcgtttgctgaaactgtccggcattaacttcgtggctaacccgctggtcaatattcaccttcagggacggtttgacgactatccgaaacgccgcggcatcacgcgcgtgaaggagctgatggcggcgggcattaacgtctgctttggccatgacgatgtctttgatccctggtatccgctgggaaccggcaacatgctgcaggtgctgcacatggggctgcacgtttgtcagatgatgggctatcagcagattaacgatggactcaagctggtgacggaaaatagcgcgcgaacgtttggcctgagcgattacggtattgcgacggggaacacggcgaatctggtgattctccctgcggaaaacgggtttgaggctgtgcgttgtcaggttccggttcgttggtcaattcgccaggggagagttatcgctaccacgcagctggcgcaaacctgggtacagatggatcggggcggggaggagctgttctttacccgaaacagcccctttgccggaacaaaggggcctgaggcttag

SEQ ID NO: 256423 - DNA, 1095 bp, Klebsiella pneumoniae
atgggaaacatcgcagattattttcatctgcccgtctccagcatgagcaacacctttacctttcttaatgccggtatcctgatctctatcttcctgaacgcctggctgatggaaattgttccgctgaaaacgcaactgcgctttggctttatcctgatgattctggccgtcgccggtttgatgttcagccatagcctggcgctgttttccgcctcgatgttcgtgcttgggctggtcagcgggatcaccatgtcgattggtaccttcttaattacccatatgtacgaaggtcgtcagcgcggcgcgcgcctgctgttcaccgactccttcttcagcatggcggggatgatcttcccgatgctggccgcctatctgctggcgcgcagcatcgaatggtactgggtttatgcctgcatcggcctggtctacgtcgctattttcattctgaccttcggctgtgaattcccggtcctgggcaaaaaagccctgcaggatagccagccggtcgtgaaagaaaaatggggtatcggcgtgctgtttctttccatcgccgccctgtgctacatcctcggccagttggggttcatctcctgggtaccggaatacgccaaaggcctgggcatgagccttggcgatgcgggtaagctggtaagcgatttctggatgtcgtacatgatcggcatgtggtcattcagcttcatcctgcgcttctttgacctgcagcgtatcctgaccgtgctggcgggcgtggcgacggtgctgatgtatctgtttattaacggttcgccggagcatatgccgtggtttattctcaccctcggcttcttctccagcgccatctatacgtcgatcatcaccctggggtcactgcaaactaaagtgtcgtcgccgaagctggtgaacttcattctgacctgcggcaccgtgggtaccatgctgactttcgtcgttaccggtcctatcgttgccgccagcggaccgctggcagcgctgcataccgctaacggcctctatgccgtggtctttgtgatgtgtctgatcctcggcttcgtctcccgccaccgccagaacaacgcggcagcggaatcgcactaa

SEQ ID NO: 256424 - DNA, 903 bp, Klebsiella pneumoniae
gtgctgaccggcacccggggcgtgcgcgaagagagccgggaagcggtgctgcgcgcggtagaagaacttaactaccgcccgagctttgccgcgcaaaacctcgccagtcaaacatccaatcacgtggggctggtgatcccggcaaacgatgaaagcagcggcgcgcgcctgctgccgatgctttcattagcgctgaaggggctgaataagaacctgattgttcagtacgtcacggatgcggcggaacaggcagcggtcgtcgatgatctacagcgtcagtgcgtggcggtagtggtactcggcgccgtcccggcggatgcgccgcgcaacgtgatctcttttgaccgtttcagcattgccggggtcaataatcagggctatgactacgcttttgctaccgaaagcgcctgccgctacgtgatcggcaaaggccatcgcaatatcgctctgcttattgatagcgacagcgatgacgccagccgccagatgctcgaaggctatcgcaacgtcctgcaaaactactccatcccttttaaccgacagctgatgctggcggccaacgacaacgttgaacaggcgctgctgacgctgatcaacagcttcagcaaatactcggtgattatcgtgaaacgcgaccgctacgccgccgaagcgatgcgcctgctgcgcgaattcaacatcgccgtaccgcaggaggtttcgctgctgagcctggaggattctcccctcgcctcgctgctgaatccgccgctgacctgtatctcctggccgctggagcagctgatggagaactgcctgcagcgtatccgcaatttgattgatgagcgccccgctttctcccccgaagggcgcacgctggcgggccgcctgatcccccgccagtcggtggccgatctctcctga

SEQ ID NO: 256425 - DNA, 918 bp, Klebsiella pneumoniae
atgctgcacctgccacctttgaagcatctgatgtttgccgcgactctggcgctgctggccgtcgcccccgtccaggccaaagagaaatttaaagtgattaccaccttcacggtgatcgccgacatggcgcaaaacgtcgcgggcgacgccgccgacgtcagctccatcaccaaaccgggggccgagatccatgaatatcagccgacccccggggatatcaaacgcgcgcagggcgcgcagctcatcctcgccaacggcctgaatcttgaactgtggttcgcccgcttctatcagcacttaaacggcgtaccggaagtggtggtcagtaacggcattcagccgatgggcatcagcgaagggccgtataacggcaaacccaacccgcacgcgtggatgtcggcggacaacgcgctgatctatgtcgataatattcgcgacgcgctggtgaaatacgatcctgcaaacgccaacgcctatcgccacaacgccgaagcctacaaagagaagatccgtcagaccatggcgccgctgaaggcggaactggcgaagctgccgcaggataagcgctggctggtgaccagcgagggcgcgttttcttacctggcccgcgataacggcctgcaggagctttatctgtggccgatcaacgccgaccagcagggtaccccgcagcaggtgcgcaaaaccatcgacaccatgaagaaagagcgcatcccgaccatttttagcgaaagcaccatttccgataaaccggcgcgtcaggtggcccgggaagccggcgcccactacggcggcgtcctgtacgtcgactccctgagtaccgccgatggcccggtgccgacctacctcgacctgctgcgcgttacgacccaaaccatcgtccagggcatcaacgacggactaaggaaacagccatga

SEQ ID NO: 256426 - DNA, 822 bp, Klebsiella pneumoniae
atgagccatgagcagccgggtctcgcggtcaacaacgtcagcgtcacctaccgcaacggccacaccgcgctgcgcgatgcctcgttctgcgtcccgcgcagctcaatcgccgcgctggtcggcgtgaacggctcgggaaaatcgacgctgtttaaagcgctgatgggctttgtgcgcgtcggaaagggcgatattgcgattctcggtcagccggttaatcgcgctctgcggcagaacctcgtcgcctacgttccgcaggcggaagaggtggactggtccttcccggtactggtggaggatgtggtaatgatggggcgctacggccatatgggctggctacggcgggccaaaccgcgtgaccatgagattgtcgacgccgccctggcgcgggtcggcatgagcgagtaccgccatcgccagatcggcgaactctccggcggccagaaaaaacgcgtctttctggcccgcgctatcgctcagcagggaaaagtcatcctgctggacgaacccttcaccggcgtcgacgtgcagaccgaagcgcgcatcatcgagctgctgcgggaactgcgcgacgaaggctgcaccatgctggtttccactcacaacctcggttcggtaagcgaattctgcgactacacggtgatggtcaaaggtaccgtgctggccagcggcccgacggaaagtacctttaccgctgaaaacctcgagctggcgtttagcggcgtgctgcgccacgtggtgctgagcggcgcggaagagcggattattaccgacgatgagcggccatttatcagccgccgggcggcggggggcgaaagatga

SEQ ID NO: 256427 - DNA, 900 bp, Klebsiella pneumoniae
  misc_feature (484)..(493): n is a, c, g, or t
atgagctggctgctggagccgtttagttatcactatatgctgaatgcgatgtgggtttcggccctggtaggcggggtgtgcgcatttctctcttgctacttgatgctcaaaggctggtcgctgattggcgacgccctctcccactccattgtccccggcgtggcgggcgcttatatgctcggtctgccctttgcgctgggggcgtttctttccggcgggctggccgcgggcagcatgctgtttcttaaccagcgctcgaagctgaaggaagacgcgattatcggcctgatcttctcctcttttttcggtattggcctgtttatggtgtcgctgaatccgacctcggtgaatatccagaccattattctcggcaatattctggcaattgccccggaggatattattcagctggcggcgattggctttatttcgatggcgattctgctgctgaagtggaaagacctgatggtgacctttttcaatnnnnnnnnnntgctgctgaagtggaaagacctgatggtgacctttttcgatgaaagccacgctcgttcgattggcctcaacaccagcgggttaaagctgctgttctttaccctgctggcggcctgtaccgtggcggcgctgcaaaccgtcggcgcgtttctggtgatttgtctggtagtgacgcccggtgccaccgcctggctgttgaccgatcgcttcccgcgcttgctggcgattgccgttgcgattggcagcctgaccagctttttcggcgcctggctgagctactatctggacggggcgaccggcgggattatcgtcgtcgcccagacgctgctgtttttagccgcttttgttttcgcgccgaagcacggcctgctcgccagccgtcgccgcgccagggaggcctcatgctga

SEQ ID NO: 256428 - DNA, 855 bp, Klebsiella pneumoniae; identical to SEQ ID NO: 173660

SEQ ID NO: 256429 - DNA, 351 bp, Klebsiella pneumoniae
atggcgggcaaacgtattgcgcgggaaaaaaagaccattagcagcatgatcgcgctctaccagcgccgctgcccggaggcccgtgacgataccgaacactatcaggcgctcaacgcctatgccgacaagcggctggataggtgcgtatttggcgaagaaaagccggcctgcaagcagtgcccggtgcactgctatcagcccgcgaaacgcgaagagatgaagcagattatgcgctgggcggggccgaggatgctctggcggcatccgatcctgacgattcgccacctgatcgatgataaacgcccggtgccggagttaccggaaaagtatcgacccaaaaagctgcaataa

SEQ ID NO: 256430 - DNA, 285 bp, Klebsiella pneumoniae
atgagccacaaagccgcgattaccattacctactgttcgcagtgcaactggatgctgcgcgccagctggatggcccaggagctgctgcacagctttagcaccgacatcgcttcggtcacgctggtgcaggggaccggcgggatcttcgtggtcgccgttgatgatgtgcaaatctgggagcgcaagcaggacggaggtttccccgatgcggcggagctcaagcgccgggtacgcgatgtatgcttcccggaaaaaccgctggggcacctggacaaaccggcataa

SEQ ID NO: 256431 - DNA, 2370 bp, Klebsiella pneumoniae
atgtataactccactcaatcaacagcatggttcaaaaaaagcctgctggtgacttctttgcttacagcaatttatcagacttccgccggggcggctgataccaccgcgaaaaccaccagcagcgcatcgactgatgacagctcggaacggatgaccgttaccgcgccggcgccgttgctaaaagcgggcagcgaacattcaatcagcgctcaggagctgcaggataaaggggccaacgactttggctcgatcatgcgctacgagccgctgattagcgccaccggcgccagcggtggttccggcaacggcaaaagcggcttcgaccgcggcggctataccggctacaatatccgcggcatggagagcaaccgcgtcgggatcgacgtcgacggcatcgcccagccgaacgccaccggacgcagctacgccagccgcgcgggcctcaataccttcggtatgggtcgcgactatattgacccctatatgtacggcagcattgatattcagtccggggcgacatcaacagaaaccgccaacagcgccatcggcggcaacgtctctttccgtccgaaatctgcggatgactatctgcatccgggcaaaaccagcgccttcggctaccgcagcggctacgactcatccgatcgcagctggcacaacggcgtcaccgttgccggcggcgacgagaccctgcgcgggatcttcgtctacagccgtcgcgacggtcaggagacggaaaataacagcgggaccgttgattcctatccggcaaactggcactcggacgcctttatggcctccgggatctggcagccgaatgacgagcataagttcaccagcaccttcgattattaccataaaacgaaccacacccattacgacgcctgggactccagcggcaacagcgttatcggcacgtcaaaccagaccagtcagacccgtcgctggggcctgagtctgaaagatgactggacgccgatgaatgattatatcgacagcgtatcgactaaagtctactaccagcataccgaggcccacgactggacctatatgccggacagcatcacccgcgcgatgcaaacggtgagctccgactatgacaccgacacctggggtattcagagcgcgctggcgaaatcgataggccgccacgatctgagcgccggttttaacgccagcacgacgaaaacccagcggccgttaacccagtcgccaaccccaagcgcttatagccagattatgcagccggacgccgatagccgcggctatatcgttgcgggcttcctgcaggacaaaattaacttcgatctcgatggccataacttcgcggttatcccgggcattcgtgtgatgcatcagtcgaccaaaccggaaaacgtctccgatttggccaacaacagcagcgtactgaccggttccgacgtgtcaaatctgtacggtaagaacgctgatactcaggcgctgccgtcgctggtcttgcagtacgatatcactccgcgcctgatgacttatctgcagtatcagcgcggcgcgcagttccctaacgccagccagctgtacggttcctggaacctcggctccagctacgccggacgcgcccagtatgcgctgatcggcaacaccgatttgaaaaccgaaaccagcgataacgttgagtgggggatgaaaggcgaagtgacggaaggcatcaccatgcgcaccgcgctgttctacaacacctataagaactttatcgcctatacccgctacacccgcgccaataacccgctgcagttcgccagcgttccgtcgaacatctacaccatttaccaggcagaaaaccgcgataaagcctatatctacggcggcgaaatcagcgctaaattcaactttggcacctggtttgaagaggttaacggcctgagcgccaccctcgcttacggttatagcgaggggcaatcgaaatccagctacagcggcgacaagtacgttgacctcgatagcgtcgcgccaatgaaggctatcgtcggcgtggcgtgggacgatccggcaaaagtgtacggcaccgcgctgaccgccacctttgttaagggcaagcgcgccaccgccaccaaccgtgaaagctataccaacaccggttccgccattaccgattcgaccaacgaatatatgcgcgttccgggctacggcatgctggattggaccgcgtactggcaggtcgcgaagaacgtgcgcctgaacggcggcgtttacaacattaccgatcgtaaatactgggattatctgagcagccgcaatatcgaaacggcgacgaatcaggacgccaacgacagagcgctggcggtgatgcctggccgtacctggcagttgggcgtgaacgtcgatttctga

SEQ ID NO: 256432 - DNA, 318 bp, Klebsiella pneumoniae
gtggacgtcggtcatggcgcgccattcgttttccagcgcctcgccgtcggcggagtcggcaaatttcagcggatcggccgggcgaatcgccagcggggcaggcgattgctgcgtctgcgcgacaatcagcgcatcccaggccgccatgtcggtattttcagtggtgtaaaccttgagcagcgcgtcgccgtgcggatcaaagaactggatgctctggcggccgttgtcgttcaggcgaaaagcgctggcccactggctcagaaacaggcgcaggtcgagggcgcgcggattgagcaccagtccggcgtggccgcttaa

SEQ ID NO: 256433 - DNA, 1611 bp, Klebsiella pneumoniae
atgctgctgctgatcggcgtctggatcttctttatgcggcaaatgcagggcggcggcgggaagggcgcgatgtccttcggcaaaagcaaagcccgtatgttgacggaagaccagatcaaaaccacttttgcagacgttgccgggtgtgacgaagcgaaagaggaagtcggcgagctggtagaatacctgcgtgagccgagccgcttccagaaactgggcggtaaaatcccgaaaggcgtcctgatggtcggccctccgggtaccggtaaaacgctgctggcgaaagcgatcgctggtgaagcgaaggtaccgttctttaccatttccggttctgacttcgtcgaaatgttcgtcggtgtgggcgcttctcgtgtgcgtgacatgttcgaacaggctaagaaagccgcgccttgcatcatcttcatcgatgaaatcgacgccgtcggccgccagcgtggcgcaggcctgggcggtggtcacgatgaacgtgagcagaccctgaaccagatgctggttgagatggacggcttcgaaggtaacgaaggtatcatcgttatcgcggcgactaaccgtccggacgttcttgaccccgcgctgttgcgtccgggccgttttgaccgccaggtggtggttggcctgccggatgttcgcggtcgtgagcagatcctgaaagtgcatatgcgtcgcgttccgctggcgccggatatcgatgcggcaatcattgcgcgcggtaccccgggcttctccggtgcggatctggccaacctggtcaacgaagcggcgctgtttgctgcccgcggtaacaaacgcgttgtgtcgatggttgagttcgagaaagcgaaagacaaaatcatgatgggtgcggaacgtcgctccatggtgatgacggaagcgcagaaagagtctactgcttatcatgaagcgggccacgcgattattggtcgcctggtgccggagcacgatccggtgcacaaagtgacgattatcccgcgcggtcgtgcgctgggtgtgaccttcttcctgccggaaggcgatgcaatcagcgccagccgtcagaaactggaaagccagatctccaccctgtacggcggtcgtttggcggaagagattatctacggtccggaacatgtttctaccggtgcgtccaacgatattaaagtggcgacgaacctggcgcgtaacatggtgacccagtggggcttctccgacaaactcggtccgctgctgtatgcggaagaagagggtgaagtcttcctcggccgtagcgtcgcgaaagcgaagcatatgtccgatgaaaccgcgcgtatcatcgaccaggaagtgaaatcgctgattgagcgtaactacggtcgtgctcgccagctgctgaacgacaacatggacattctgcacgcgatgaaagatgcgctcatgaagtatgagaccatcgatgcgccgcagattgacgacctgatggctcgtcgcgaagttcgtccgccagcgggttgggaagaacctggttcttctaacaactctgacaacaatggcacgcctcgtgcgccgcgtccggttgatgaaccgcgtacgccgaacccgggcaacaccatgtcagagcagctgggcgacaagtaa

SEQ ID NO: 256434 - DNA, 1014 bp, Klebsiella pneumoniae
atgagtacgattgaaacggcgaaaacgccgcagactgcccaacaatccggattgcttctggatgtgaaagatctccgcgtcacctttggtacccccgatggagatgtgaccgcggtcaacgatctcaatttcaatctgcgggccggggaaaccttaggcatcgtgggcgagtccggttccggtaagtcgcagaccgcttttgcgctgatgggcctgctggcggcaaacggtcgcatcgggggttcagcgacctttaacggtaaggagatccttaacctcccggagcgcgaactgaataagctgcgcgccgaacagatctccatgatttttcaggacccgatgacctcgctcaatccctatatgcgggtaggcgagcagctgatggaagttctgatgctgcacaaagcgctgagtaaagccgaagcgtttgaagagtcggtgaaaatgctggatgcggtcaaaatgccggaagcgcgcaagcggatgaaaatgtacccacacgagttttccggcgggatgcgccagcgcgtgatgattgcgatggcgctgctgtgccggcctaagctgctgatcgccgatgaaccgaccacggcgctggacgtgaccgtacaggcgcaaatcatgacgcttctcaatgagcttaagcgcgaatttaataccgcaatcatcatgattacccacgacctgggcgttgtcgccggcatctgcgacaaggtgctggtgatgtatgccgggcgtaccatggagtatggcgaggcgcgcgacgtcttttaccaaccctcgcatccgtattccatcggtctgctcaatgcagtaccgaggctggatgcggaaggcgatgccctgctgacgattcccggtaacccgccgaacctgctgcgtctgccgaagggctgtccattccagccgcgttgcccgcatgcgatggagatttgcaatagcgctccgcctctggaggagtttgcacctggccgcctgcgcgcctgctttcaaccggtgggggatttgctatga

SEQ ID NO: 256435 - DNA, 909 bp, Klebsiella pneumoniae
atgatgttaagtaagaaaaacaacgaggcgctggaaaacttcagtgaaaaactggaagtcgaggggcgtagcctctggcaggatgcccgccgccgctttatgcataaccgcgccgcggttgccagcctgattgtgctggtgattattgcgctgttcgttaccatcgcgccgatggtaacgcagttctcctattacgataccgactggggcatgatgtccagcgcgcccgatatggagtccggccactactttggtaccgactcttccggccgcgatctgctggtgcgcgtggctatcggcgggcgtatctcattgatggtcggcgttgctgctgcgctggtggcggtgattctgggaacactttacggttcgctttctggctatctgggcggcaaagtggattcggtgatgatgcgcctgctggaaatcctcaactccttcccgtttatgttcttcgtcattctgctggtgaccttctttggccagaatatcctgctgattttcgtggctataggcatggtctcctggctggatatggcgcgtatcgttcgcggtcagaccttgagcctgaagcggaaagaattcattgaggctgcgcaggtcggcggcgtttcaacgcgcaatatcgttatccgccatatcgtgcctaacgtgcttggagtggttgtggtgtatgcctcactgctggtcccaagcatgattctgtttgaatccttcttaagcttcctcggtctggggacccaggagccgttaagcagctggggcgcgctgctcagcgatggcgccaactcaatggaggtgtcgccgtggctgctactgtttcctgccggtttcctggtagttacgctgttttgttttaactttatcggcgatggcctgcgtgatgccctcgacccgaaagaccgctaa

SEQ ID NO: 256436 - DNA, 1632 bp, Klebsiella pneumoniae
atgaccatcatcacgaaaaaaagcctggtagccgcaggcgtactctctgcattaatgacaatcaacgccgcggtggcggcagatgtaccggcaggggtacagctggcggataaacaaacgctggtacgtaacaacggctccgaagttcagtctctcgatccgcacaaaattgaaggcgtgccggagtccaatattagccgcgatttgtttgaagggctgttggtaagcgaccttgatggccatccggtggcgggtgtggcggaaaaatgggacaacaaagattttaaagtctggaccttccatctgcgtaaagatgctaagtggtccgacggttcgccggttaccgcgcaagattttgtttatagctggcagcgtctggcggatccgaaaacagcctcgccttatgcaagttatttacagtacggtcacctggccaacgttgacgacatcatcgccgggaaaaagccagcaaccgatctgggcgtcaaagcgctggacgatcataccttcgaagtgacccttagcgaaccggtaccttatttctacaaacttctcgtgcacccatccgtttctccagttcctaaagccgctattgagaaatttggtgacaaatggacccagccggccaatatcgtcagcaacggcgcgtataaattaaaagactgggtagtgaacgaacgtattgtactggaacgtaatgctaactactgggataacggcaaaaccgttattaatcaggttacctttttgccgatcgcttctgaagtcactgacgtcaaccgctaccgcagcggcgaaatcgatatgacctataacaatatgccgatcgaactgttccagaaactaaaaaaagagatcccgcaagaagttcacgtcgatccgtatctgtgtacttattactacgaaatcaataaccagaaagcgccgtttaccgatgttcgcgtgcgtaccgcgctgaagatggcgctggaccgcgacattattgtcaataaagtgaaaaaccagggcgacctgccagcctatagctatacgccgccgtataccgatggcatgaagctcatcgaacctgagtggttcaagtggtcacaggaaaaacgtaatgaagaagcgaaaaaactgctgaccgaagccggctattctgctgacaagccgctgactttcaatctgctctataacacttccgatctgcacaaaaaactggctatcgccgtggcttcgatctggaagaaaaatctcggtgtcaacgtgaagctggaaaatcaggaatggaaaaccttcctcgataatcgccatcagggtaccttcgatgtcgcacgcgccggctggtgcgcggactacaacgaacccacttccttcctgaataccatgctgagcgacagctcaaacaacacttcgcattataagagcccggctttcgacaagattattgccgaagcgctgaaaaccagcgatgaagcaaagcgcgcggatctctatgcacaatccgagcagcagctggataaagactccgtcattgtaccggtcttctattatgttaacgcccgtttggttaagccgtgggtaggtgggtataccggtaaagatccgctggataatacttacacaagaaatatgtacattgtgaagcactaa

SEQ ID NO: 256437 - DNA, 696 bp, Klebsiella pneumoniae; identical to SEQ ID NO: 176635

SEQ ID NO: 256438 - DNA, 297 bp, Klebsiella pneumoniae; identical to SEQ ID NO: 176634

SEQ ID NO: 256439 - DNA, 561 bp, Klebsiella pneumoniae
gtggccgataccgcccatagcaaccagtttttccgctttatcaaccgcgtcttcgaagttcttcgcacgatacatcgccagcgtcggggacagtttttcgtgggcaaacggctcgctttcatcaacgtcggtgacttcaccaatcagaatcttggtggacacaggaacggtgaagcctgccagctcagcgattttatacgcaggttgaccaacgatagcggcgttcagcgcgccatttttcagaatgatattctgaaccgctttcagctcctggccctgcagcaggtagccgccgtggctggagaaacgttcgcgaacggcgtcgtatacggaatctacaacgactacggactgctcggaagcacaaataacgccgttatcgaaggttttagacatcagtacggatgcgacggcgcgtttgatatcagccgtttcgtcgataacaacgggagtgttacccgcgcctacgccgattgccggtttaccagagctgtacgctgctttaaccatgcccggaccgccggtggcgaggatcaggttgatatccgggtgatgcattag

SEQ ID NO: 256440 - DNA, 576 bp, Klebsiella pneumoniae
atgggtcaccgcatccagaccaccgaaagcacacagggatttcggcatttccatgaccaggttggcatcaacaatcgccatatccggagtcagggcatagtcagccagcgggtatttctgcccggttgcatcatcggtaacaacggcgaacggcgtgacttcagagccggtgccagatgtggtggtgatcgccaccattttggctttaacgcccattttcgggaacttgtagatacgcttacggatatccataaagcgcagcgccagctcttcgaagtgggtttccggatgttcgtacatgacccacatgattttcgccgcgtccatcggggaaccgccgcccagggcgataatcacgtccggtttgaaagagttcgccagctcagcgcctttacggacgatggtcagagtcgggtcagcttccacttcaaagaaaacttctgtttcaacgccggccgctttcagtacagaagtgatctggtctgcgtagccgttgttaaacaggaaacggtcggtgacgatcagcgcgcgtttgtgaccatcagtaatcacttcatccagcgcgattggcagtga

SEQ ID NO: 256441 - DNA, 1521 bp, Klebsiella pneumoniae
atgacgcattcagcatatgtctatcagttaaaggctgtccctgatatatttgatgagatttcgcaacgttttccggacagggttgcgttaattttcgatcaaagaaaaataacctatcgagaacttgctgagcaatgttcagcgctggctgcagtgttgcaaaataattgcctgataaaaggcgatatcgttgcaataaaaatagaacgtagcccggagttatatatttttatgctggcgctcatgaaaataggcgctgttatggttcccgtgaactcgaatagtcccgaacgctatattggtgaggttttaagtgcggcgggagccagatacctgattagcgatgatgtaacaagcgtgcccggcggagcatggcacgtcttgtcgagcaggacgctgatacaaaactgcactcaacaaagaagcgggaattacccggtattaagcgctgatgatccggcgctcatattgatgacctctggttcaacaggaaaaccgaaaagcgtactgattgctcatcgcgggattgccagactgggtctgccggtaccggcgttggggaatagcgagcgggactgctatttgcaaattgcagatatttctttcgctgcctcagctaatgaaatctggatggctttattgaccggagcatgtctcgcgattgcgccgcctggtttgccggatttaatggccctggcacggcagatcgaatcggataacgtgacgatgctattcctctcaggcgggctgttccggctatttgtcgaggtttcggtcgaaacactgcatatacctgattgtgtggtggtgtcgggagactttgtcaatcctcgcttatttagcgtggcggtggaggccggtaaagccaaaatatttaatggattaggatgcacggaaaattcagcgatctcgtctctctatcatattcagtcggaggagcaattatccagtgaatctcctgtgccggttggtactccactccctctggttgagatggtggtattcaatgaacggttgcaaccctgtacctgcggtgaatatggggaattatttatcgcaggggctggagtggctctggggtattccgatccgcaactgacggcggaaaggtttatcaccataccgtatcaaggcactgacatgcttttctatcgtaccgatgatcgggcaacttacgaccaggatcgcaatatcgtcctggtcggacgaggcaaccatatttgtaaaatacgtggcttccgcatcaatatcgccggtattgagcacctgttgcgcttacatcacgctgtagaagatgtgctgattgtggtagaggagacgccggatgaaccgcgattacatgcttgttatgtcacgcaggatgacgggctatccgtagcggatttaaagaatcacctcgcaatgcatgctcctgcctggatgatacctgaaaaatttagccgtctggcggtactgccaatgaccgctaacggtaaaaaagatcgtttacggttaaaaaattctttactggagcaggtgtaa

SEQ ID NO: 256442 - DNA, 231 bp, Klebsiella pneumoniae; identical to SEQ ID NO: 176566

SEQ ID NO: 256443 - DNA, 4371 bp, Klebsiella pneumoniae
atgccatcattcaatagcggcgagtcaaaaaagggctgtttgaacaaggagtgtggagaaagtgcggtaacgtatctgccagctacgcccgggcagcaggcaatgtggtggctggataatacgctggagcagccccaatgctataacgtgccggtgctgctgaccgttaatgcgacactggacgctgatattatgcagcgcgctgtggctgagctgaccttgcgccatgaaatattcagaacgcgttttgtttatcttgacggtaaattacaacagcgtatcggcgctgatggctatctctctttttcccatcgacaaccagagcagacggaaacccctgaatccgtcacggcacaactggcggctagccgtttatcattagctgaggggccgctgagtatcattaatatgctcagttcagactcaggtacaacctggttagcatgctgcttccaccacatcattattgatgccccctcagtacgtattgtcttgcatgatttgctgcgaatctattgtgcgcttgacgagaagcgcgttctgccggcgtttaacggcacgggaagctatcaggaatttactcgttggcaggccgcgtcccttgcggcggctgagtgcgaagatatgcgggtttattggcgacaggcactgcatccagctccacccttgtcggacctcccggtcgattttccccgtcgtcttcgggaagataccaaagccgcctataccatgctggcgctgaacgaacaggaagcggactcactgcagcggcacgcgagatcgttgtcaatgactccatttatgtatatgtccatgtgctggcaatttttcctcagccgtatgagcgggcagaacgatattaccgttggcgtgccttttactctgcgggatcgcagcgagtttgccgaaacgccgggatatatgatcaatactctgccggttcgcgtgcaggtcaatgaagatgacacggtcagcacgctggctgcaaaggtacgtcaatcttttattggcgcacatttcaataagctgctccctttcaatgaaattgtcgcactgtcgcgtgaaaacgcggggcaggacagtcctctattcagaacgctgttggttatgcccgatacccggggcgatattttcaacgacttgccttttaaagtcatgctggatgactattttagccagatggcaaaatacgatctgacgctgttctttgaagcgcaaccgcagtggaagctgacgctggagtataagacggcgttgtatcacccgcagaccattgactactggttgaaaatctttcgccatttattaagcgcgatgggcgaggacggcgaggtattactgtcatccctgaggctgttggatgcaccgttaagtcgtgaactggttgttcgatctagtcttaaatcgtgcgcggaggcctggcgatttgacgccctggcggctttcaatcagcatgctataagccactctgcggatactgcgttaattaccgctaatggcacacgatcgtatggttggttagcggaacgttcagggcagattgccgcttacctacagcagcagttaaatatcgcacctggcaaacgtgttgcattattactggaaaggaatgccgaggcgattgccactctgtttggcgtgttaaaaaccggcgcggcctacattccgatcgatccgcaatacccgcaagagcgaattggttacatgttgcaggacgccagtgtggattgcatcgccacgacacgatcgctggtagcaaaattcccagtgtctggctccgtacctctgttgttaatcgatgatattcccccggagtaccctggggaatactcttatatcaaaagaatgcccgacgatgagctgtatatcatttatacatcaggttcaaccgggcagcccaagggagtacggttattaaataaaacgctcaataacctgattaagtggcaacgagatgtttctgagtgcgatcaaggagattgtactctgcattttatgtcactttcttttgatgtctcggttcaggagatcttcggcacgttagctggcggtgggtgcttatatattgccagtgaagaagaacggagagatctggatcttctgcaagaggttatccaggagcaggggattaatcgtctctattttccctatgttgctttgcaacagttcgcgcatttgagcgcattggccaacaggcaattcccgagtttaaaagaggtctactccaccggggaacagctcgtactcaccgcggatattaaacattttttcaggcaacccgttcgcctgattaatctctatggtccctcagaaagtcacgtctgttccgcgtatgtgctgccaccggaaagcgataaatggggagatgcagcgtccattggttaccctctacccggatttactctgttggtggtggatgagcatttgcagctggttcccgccggtgtcgccggtgaactgctcatcgttagcgattttctctctcccggctatcacaataaaagtgaagaaagcgctcgacgttttatctctgctgagggctttgccacacaaagttgccacgcatatcgtaccggtgatctggtgaggctggagcatgacgatcggtttagctatcttggcaggatagacaatcagttaaaaattcgcggttttaggatcgaaccgtctgaagtagaagcggccatcaatgccctggaaggcgtgcaggtttcagcggtagttggcagggcagatacttcaggaagcaagcagctcgtcgcttttattgctggcttaatggatgataaaagcaatcaaaaggataagatcaaacgcggccttcgcctggttctgccggagtatatggttcccacagagttggtctttctggataagctgcctactacccctagcgggaaaatcgatcgtaaggcgttgcttaaggtggatattattgttgaatcatccgcgcagatgccagaacggtctctgacgaaaacgcaggagcaggtcagggcgctatgggaaacgctatttccgggtcgtcacatcgcactgcacgatgattttttcgccattggcggacattccttgttggccacgcagctggtttttctgctccgtaaggcattcaattgcgatattcctctacgtttgttatttaatcacccgacgttgttggctatggcagagtgcatcgacggctatgttgtcagtgaaaaggggcccgtcgataccgttgatcgttcctttgttcaggatggatacgaacgcatacattggcaggggggagagtgttcaacccctgggctgacgttgctcaccggggcgacaggatttttaggcatctacctgctgcgttcactgctattggccgggacccaatccgtgatttgcctggtaagagccaggacagataaggacgcattggctcgtttacgtgaaaatgcgatgcgctacggaatcgccgatgagattgatttttcccgggttgaagtttgcctcggtgatattggtcagcgcgatttagggttaagccctgacgcgtatagtcggttggcagagcgagtgaacacggtattccatgcagccgcacagattaattttttgctctcttattcttctgttaaacagtcaaatgtgcagggtacgctaaatattttagctttctgcggttgtggcggacgaaaaacgctccactatttatccactatcgccgtattttctccacgctatcctgaatcgcctatcgtggaacattgtgtgccggggcatccggaagcactgtcgattggttatacgcaaagtaagtgggtggctgaacgctatgttatacaggccagagaacaaggacttgatgctaacgtatttcgcatcggacgtattggcggagacagccgaactggggcctgccagagcgatgattttttgtggcgacagataaaaagctttatccagatggggttggcgcccaatccgtcttccctgtcaacggacctgctgcctgtcgactttgtcgctgaagcgatagttgctttagcgcgttcagaggctactcgacaggagaacttccatattttccatcctcagagcatccggtttgacccggtgtatcgggcgattcgttctctgggctatccgttggaaacgacttctgacggcgagtggttgcaacaacttgagctgtgtgtcacccaagggcgcgaggttgcgctggggccggtcattcatctctttaaagagaatttgttggatactggcgataacgcctatggtaatccagagacgactaagcgtattacacaactgggcttgcgctttcctgaactgtcggaggagactttcaaacgtatgattgtttatttccagcggcagaaagaaattgtctag

SEQ ID NO: 256444 - DNA, 393 bp, Klebsiella pneumoniae; identical to SEQ ID NO: 176568

SEQ ID NO: 256445 - DNA, 498 bp, Klebsiella pneumoniae
atggaaatgaataaaaaagtggctagtggttccgagcgcgaaatatcattgaatcgtcaatttgaagatgctttagggaatttgcaatgcgtacttgttgcacgtcgatcgttgattaatcctgatggtattaactggccgcaatacgatacgttgtatattttacgtcagttccagccgatgactccaagcgcaattggtgaaaagctcggatttgcgcgtagtaaaatgtccaagatcctgcggatgttgaaagataagcactttgttgagcaggagtcggcagaaagcgacaagcgagaaatgctgacgaggattacggaaaagggtattgaattcctgaattctgcagagtccagcaggcgcataatggctgagcaggtggcatcctgtatgtcgcagggagagattgctattttcgctgagctttgtacaagggctgcaaatatattacacgagaatattaaaggtaaactcgaagataccagtgaaaattaa

SEQ ID NO: 256446 - DNA, 255 bp, Klebsiella pneumoniae
gtgaccaatgacgtatttgatgccgtcgttgaccactttgttggctaccgctaccgcctgtttcgggtcgcaagcgtcatcatatttgacgatctgcagcttattgcccttgatgccgcccttagcattgatatccgctaccgcctgctctgcgccggtaaactcctggtcgccgtactgggccaccgggccggacatcgccccgactaccgcgattttgatatcttccgccagcgccgcgctgctcataactaa

SEQ ID NO: 256447 - DNA, 168 bp, Klebsiella pneumoniae; identical to SEQ ID NO: 174129

SEQ ID NO: 256448 - DNA, 810 bp, Klebsiella pneumoniae; identical to SEQ ID NO: 174130

SEQ ID NO: 256449 - DNA, 477 bp, Klebsiella pneumoniae; identical to SEQ ID NO: 174131

SEQ ID NO: 256450 - DNA, 777 bp, Klebsiella pneumoniae
atgtcgcctcgactctcggtcgtgatgatcgccaaaaacgcggcggatctgctgcctgattgtctggcgtcggtaagctgggccgatgagatagtgctgctggattccggcagcagcgacaacaccgtagaattagcccgcagcatgggcgttcaggtgcatgtcaatcgcgactggcagggctacggtattcaacgccagcgcgcccaggactacgccacctgcgattacgtgctgatgatcgataccgacgagcgcgtcactccggagcttgcgcagtctatccgcagcgtgctggccgcgccgcaaaccggcgcaatatacagcattgcccggcgcaactattttcttggccgctttatgcgccacagcggctggtatcccgatcgcgtgatgcgcttgtacgaacgcggccgttaccgctataacgataatctggtccacgaatctctcgatgcccgaggcgcgccggttatcgagctcgcgggcgatctgctgcatctgacctgccgtgatttctccggctttcagcaaaagcagctggcctacgccgccgcctgggcgcaggagcgccatcagagaggcaaaaagacctcgctggccgctatcttcggccatacgctgggcgcctttgtgaaaacgctgctgctgcgcggcggcattctggatgggaaacaaggctggctactggcggtggtcaacgcgcaatacacgtttaataaatacaccgagctgtgggccctgagccgcggctactcggagaaagtgtcattatga

SEQ ID NO: 256451 - DNA, 1275 bp, Klebsiella pneumoniae
ttggaattgctttataccgccctactttacctcattcagccgctggtgtggctgcgactgctgttacgcagccgtaaggcccctgcctatcgtaaacgctggaaggaacgttatggcttctgccagaacaaggtagaaccgggtggcatcctgctgcattccgtttccgtgggtgaaacgctggcggctatcccgctggtgcgcgcgctacgccaccgctacccctatctgccgatcaccgtcacgaccatgacgccaaccggctccgaacgcgcgatgtccgctttcggtaaagacgtccatcacgtctatctgccttacgatcttcccggcgcaatgaaccgcttcttcaataccgttcagccaaagctggttatcgtcatggaaaccgaactgtggccgaacatggtcgccacgctgcataaacgcaaaattccgctggttatcgccaacgcccggctgtccgaacgctcggcgaaaggctatgccaaactgggcaaatttatgcgtcggctgctgagccgcattacccttatcgccgcacagaatgaagaagacgccagccgctttatcgcccttggcctgaaacgcaatcaactggcggtcaccggcagcctgaagtttgatatttcagtcacgccggagctggccgctcgcgctatcaccctgcgtcgccagtgggcgccgcaccgccaggtatggattgccaccagcacccacgacggcgaagagcaagtcattcttcaggcgcataaaaagctgctggagcgcttccccaacctgctgctgatccttgtcccgcgccacccggagcgcttcggcgacgcccgcgagatggtgcagaaagcgggaatgagctacaccctgcgcagtaccggcgaaatcccgtcgaacagtacccaggtggtgattggcgataccatgggtgagctgatgctgctgtacggcattgccgacctcgcgtttgtcggcggtagcctggtggagcgcggcggtcataacccgctggagcccgctgctcatgcgataccggtactgatgggcccgcacacctttaacttcaaagatatctgcgccaagctgcagcaggacgatggactgattaccgtcaccgacgccgactcgctggtgacggaggtgtcaaacctgctgaccgatgaagattaccgtctgtggtatggtcgtcacgcggtggaagtcctgcaccaaaaccagggcgcgctctcccgtctgctacagttactccaaccctatctgccgcagcggagccactaa

SEQ ID NO: 256452 - DNA, 990 bp, Klebsiella pneumoniae
atgagtcaaacgcctttactaagcatcgtagccgccgtctataacggcgaaaaattccttgcgctattctttgagtgccttgagcaacagcagctggaaagctatgaactgatcctggtgaacgacgggtcgacggacggtagccttgcggttatcgaccagtggaaagagcgcctgcaaaacgtgctcgtactggaacaggaaaaccagggcgtgtcggtggcgcgcaataccgggctcgccgcggcgaccggtaaatacctgacctttccggatatcgacgataagctttacccgggcatgtaccgtacgcttctggaaatggcggaaaagggcaatcttgacgtcgccacctgcaacggccgctacgtctacgagacaaaaaaagatatccatcctattttcccgctggaccggctacagtcgaccggcgttttgcccggccacgtctggttaaaacaggcgctggattctcgtaagttcctgcatgtcacctggctcaatatttaccgccgcgagtttatcgcggatcaccgcttccattttgagccgggcctgcgtcatcaggatattccctggaccacggaagtgctgctggcggcagaacgcgtgcagtacaccagcgagcagttctacgattactacatccattcggaatcggtgtcgcataagccggacaatgacgatacgctgatgcgctcagcgcgccactatatgaagattcttgagatgctggacgccatcaaccagcgctatccggacaaggttcgcaatatttccgcctgccgctggcagatcgctaaagaggggctgggaattattcataccttcgatagcatgaaagatgagtcaaaaaagcatattatcattaaagagttctttgaccgcggtatctggagcctgatctggaaaaatgcccatacgttccgtctacgctggcgtcttggacgccgctatctgcgcatcaagcgctatcgcgacgcggcttaa

SEQ ID NO: 256453 - DNA, 1095 bp, Klebsiella pneumoniae
atgcgcatattgtttgttatcgacggcctgcccggcggcggcgcggaaaaagtcgtgctgacgctggcggcgcactttctcagccagggggaacaggtatcgcttttttccctgcgcgacgtctgcgattatccgctgccggaaggactggattatcaggtcatcgccgaccgctgccgcaaaccgtggcgcaaactgacggaactctcccggcgcgcgcgccagcttgatgcggccatcgatagcgcagaacggcagggccgcttcgatctggtgctctcgaatctgcataaaactgaccgcattgtctcccgcagccgcctgctgaacgggcgaaacgtctggtattgcctgcacggcgtattctctacttcctatctcggccatcgcaccggttttgaccgctggctgaagcagcagaagatcggacgcgtttaccagggacgcaacgtcgtctccgtctccgatgcggtaggtcaagatctggtcgagcagttcgccattcgcccggcccagctgaaaaccatctataacccgtttgatatcgccgcgctgcgcgcagcggctgaagagcccagccagcgacccgacggcgactatattattcacgtgggccgctttcatcccggtaaacgccacgaccgcctgattgaggcgtatgcgcaaagcggtatcgatgcgccgctggtactgctgggacagggaaaaccggaacaagagcagcgcctgcgccagctggcgcagcagctacaggttgccgatcgcgtcctgtttaaaggcttccagaaaaatccgctgccgtggatcaaaggcgcgcggatgctggtcctgagctccgatagcgaaggttttggcaacgtggtggttgaagcgctgctgctggatacaccggtcgccagcacccgctgcccgggcggcgtgaccgagatcctcaccggcgagctgtcgcgcggcctggcggatctcaacagcccggcgctggctcagacgatgcaaagcatttaccatagcccccctgccatcgacgcctcggcgctggagaaattcagcgtggcatcgatttgtcagcagtatcgtcagctgcgcagcgcctga

SEQ ID NO: 256454 - DNA, 1146 bp, Klebsiella pneumoniae
  misc_feature (819)..(828): n is a, c, g, or t
atgagtaaattcaggctggctctggtacgccagaagtatcgcccggacggcggcgcggaacgatttgtctcccgcgcgctggaggccctcgacgacagcgaccttgagctgaacgtcatcacacgcgagtggcaggggcaggtgaagcccgagtggaacatccacatctgcaatccgcgtaaatgggggcggatcagccgcgagcgtgggtttgccgacgccgcccgccagctgtggcagcgcgaagccttcgatctggtgcaaagccatgagcgtatccccggctgcgacctgtaccgcgccggagacggcgtacaccgccgctggctgcagcagcgctcgcgcattttgcccggctggaaaagccgcctgctgtttgccgaccgctaccatcgctatgtaatgcaggccgagcgagaaatgtaccaggactcgcacctgcgcggcgttatctgcaacgcggagatgattaaacgcgagattattgcagacttcggcctgccggcggaaaaaatccacgttatctataacgccatcgataaccagcgttttctgccgccgacggaagcggcctttgtcgcactgcgtaccaaatggaatctgccgctccaggcgacctgcctgatttacgtcggctccggctttgagcgcaaggggctggatgcggcgatccgcgccatcgcgccgaccaaccgctacctgctggtagtgggcaaagataaagagcaaagtcgttatcagcagctggcgaaaacgctgaactgcgaggagcgggtgcgctttttcggcatgcagtcggaaaccctgccgttctatcannnnnnnnnnttctatcagatggccgacggcctgctgctgccaacgctgtacgacccgttccccaacgttattctcgaagcgatggcctgcggcctgccggtcattaccactaccggctgcggcggcgcggagtttattgttcagggcagcaatggctacgtttgcgatgcgctggatatccaggcgctgcaggagtcggttagcgcccttcccgcccgggcgttaggctccgcggaaggcgaacgcgcccgcgagcgcatcatggcctgcaccagcgaacgcctctcggcgcagctgctctccctttatcaggatttggtgaaataa

SEQ ID NO: 256455 - DNA, 1077 bp, Klebsiella pneumoniae
atgacgcctgaaacccgcacttccggccgcgtgaacccggcgcgaatcctggttattaagcttcgccatcatggcgatatgttattgataacgccgcttattcactcgctaaaacagcaataccccgccgcctgcgtggatgtgctgctttatgaagaaacccgggatatgctcgcagcgaatactgagatccgccatatttatggtatcgatcggcgctggaaaaaacagggcaccggccatcagctcaagatggaatggcagctgatccgtacgctccgccagcagcgctacgatatggtgctcaatcttgccgatcagtggcccagcgcgattatcactaaactgaccggggcgaccacccgcatcggctttgactttccgaagcgtcgtcatccggcctggcgtttttgccataccgccctcgcctcaaccgagctgcacaaccagctgcataccgtacagcagaatctgtcgattctggcgccgcttgggctggatattgatgatgcgccggcaacgatgggctacagcgaacaggactggctcgccagccgcgcgctgctgccggaaggatttcaggacaactatatcgtcattcagccgacctcccgctggttctttaaatgctggcgcgaagcgcggatgagcgccctgataaacgcgctttctgaggcaggctatccggtcgtgctgacctccggccccgacgccaaagagaagcagatgatcgacacgattatgacgggctgtcccaatgctcgcctgtactccctcgccgggcagctcaccctgcgccagctggcgtctctcatcgaccatgcccgcctgtttatcggcgtcgactccgtgccgatgcatatggccgccgcgctgggcacaccgctggtggcgctattcggcccctccaagctcactttctggcgtccatggcaggcgcagggtgaggtaatttgggcgggtgatttcggctcgattcccgaccctgacgacatagataccaacaccgaggaacgctatctcgatttaatccccaccgacgcggttatcgcggcggcgaaaaaggtactggcatga

SEQ ID NO: 256456 - DNA, 1854 bp, Klebsiella pneumoniae
atgtgtgcgacatgcgacgggttgggcattgccagtactattgatatcaaccatctgattgattcaaatctgtcgttaaatgaaggagctattcgttatccttcttttgcgccaggctcatggcgctggaaacgttatgtttattcagggctttttgatgccgataaaaaaatcgcggattattcaaaagaggagcgagaattattactttatgcggataatctcactcctgaagcgccgttagccggttggcctaagagtgcaaagtttgaaggcgtcattacgcgctttacgcgaagttatttaaaacaagaaactaaagatactaaaactgaggaatttcagcgcgtcgttagtttgcaggtttgcccttcttgtcaggggatgaggcttaacgaggaaatactttcctgccggattagagggaaaaatattggcgaatgcgcaacgctgcctgtcacagagttaaagctgtttgtagaaaagctcgattaccctgaagtcaggccgctgatcgaagcattgctggaaaggttggatgccatgtgtgcagtaggcttgggatatctggatttgaaccgtacgacccctagcttatcgggcggtgaatcccagcggttgaaaatggtccgacatctgggaagtagtctgaccgggatcgtttatataattgatgaacccagtaccggcctgcatccagcagatatagtgaaattgaatgttttaattggaaaactacgcgacaaaggcaataccattctgatggtggagcacgacccggacatgatagcgatagccgagcatgttattgatttagggccaggagcgggtaagcaaggcgggaatattgtctttgagggcgacctgtcggcacttaagcaatcccaaaccttgacgggtcgatatttctcttcacgggcagagataaataagaaaccgagatgtgccaaaggttatatttcggtaagaaacgccacattgcataatctgcataacttatcggtagacgtgcctttaagcgttatggtcgctgtgacgggagtcgctggatcgggcaaaagttcattcgttatgggggccctggcgccacaatgtccggaggcgatcgttatcgatcaaaaaccgatacatacctcaattcgatcgcatattgcttcctggtgcggtgcatttgatacgatccgttcgctgtttgccgaaaaaaaccatgtgtcagcgtcgtggtttagcgctaacgccaaaggggcttgtccggaatgtaatgggctaggggtaatacaaaccgatctggcatttatggatacggttacgttgccatgtgaggcctgccaggggcagcgctataacccacaagcgctgaaatatcgttatcagggaaaaagtattgctgaggtattatccctgtcgattaatgatgccggcgaatttttcctgaatgagccacagctcaggccaatttttcgtagcctggtcgaagtcgggttgggatatttacgcttgggtgaatcgttaaatcatctttcaggcggtgaatgccagcggctgaagttagcgtcacaattaaatcatgatagtgacatgtatattttcgatgagccaaccacgggtcttcatcccagtgatgtggcctcgctgttgaaactatttaaccgactggtagcgcgcggaaacaccgtcattattattgaacataatatggagttgatcgctcaggctgactggattattgatattggaccttatgccgggcaagaagggggggaattattgtttagcggtacacccgaatcgatgctggcctgtcgccattcattaaccgcagaatggttgcgcaaacattgccggatagagtga

SEQ ID NO: 256457 - DNA, 1518 bp, Klebsiella pneumoniae
atggaaaataaatcagtatcattacctaccggtaatgactttttagcgggtctaaatgatgggcgagaaatatgggcttatggtgaaaaggtggacaatgttattacacatccagcgtttcgcaattcagcactgtccatagctaaattatacgacgcgctccatgacgaaaagtatcaggctatattaaccacgccttgtgataccggcagcggtggtgtcacccatccgttcttccgcgttcctcattctgttgaggatctgatacgcgatcgcgacgcaatcgcgcagtgggcacggcttagctatggctggttgggaagaagccctgatttcaaagcgtcgtttcttacgactctgggcgccaatcccgaggcctacggcgaatatacggataatgccaggcactggtacaaacgttcgcaagaggagctactttactggaatcatgccatcattaacccccctatcgaccgcaatctcccgcccgaccagattgaagatatctgcattcacgtcgaaaaagagtgtgatgatggcgtaattgttagcggtgccaaggtggttgctaccggctcagctttgacgcattacaatttcatcgcgcattacggtttacctgtcaaaaaaagagaatttgccctggtatgcacattacccatgaatgccccaggactgaagctggtttgccgcccctcttactccttagccgccgaaaaggtcggcagtccttttgactatccactatcctcacgctatgacgagaatgacatgatcttcattctggataaggtgaagattccctgggaaaacatttttatttacggcgataccgctaaagcggccacgtttttacccagttctggcttcctgcaccgctcaaccttccacggagtgacgcgtctggcggtaaaaattgattttatttgtggtttattcattaaaggcgtggaagccaccggcgtagccgatttccgcggcatacagacgcgcgtcggggaaatgctggcctggcgcaacctcttctgggccataagtgatgctatggctaaatcgccgaacccctggcacaacggcgccctcctgcctaacctggattatggtttagcctaccgttggtttatgagtctcggctatccacggatcaaagaaattattgaacaagatcttggcagcgcgcttatttatatcaattcgcatgccaaagatttcgctgcgccggaactggaaccttatctgaaaaaatatatgcggggctccaacggaatggatgccgttgaacgcgtcaagctcatgaagctaatctgggactccgtaggaacagaattcgccagcagacacgaactctatgaacgaaattataccggtagtcatgaaaatgttcgtatcgagctgttactcgccgcacagatgtcggggcaggtacaagaatataaaggtttcgccgaacaatgtatgatggattatgacctggatggctggctggatcgcgattaccactggcctttagacgaataa

SEQ ID NO: 256458 - DNA, 1950 bp, Klebsiella pneumoniae
atgttatctaaagattcagcaaatcccgacgagctttcggctcatctggccaatcttgatagaccctttgcctgtatttaccgcccccaatgcgaacctatcaacgcagtattgtttcttgaaggggatattgagctaagccagtccctttcagaattagcgctggatcctcccctggacgcgacgggcaaatgctcatttaacaaattgatattattgccatttaatcagctgaaagaaaaaggatatgcctgcattgacgatggtgaacagacgatcgtaatgcacattgagcggcaagactattatcctatagattcatttatcgcagccattaatgaccatgatatcaagccacgaaacctgcacttcgatcttgatgaccaaacgtatggcgacattgttgataccgtgattgatcaggaaatcagctccggggaaggcagcaactttgtgatttcacgcagcctggagggcgatataaccgactttagtatccgccacgcgctgacgctgtacaaacggctgctgcaatctgaatgcggatcatactggacatggatgatctttaccggcagccgctatttcatgggtagtacgcctgaacagcatatccaggttgatgagcagaacgtggcgatgaatcctatcagcggcacattaaaataccccgataccgggaatatggcgcacgtgctggatgattttctgcaggataaaaaagagcgcgacgaactatttatggtggtagatgaagaactcaaaatgatgagtagcatctgtcaacgtgatattcaggtatccgggccgaagctcaaggctatgtcgcacatcgcgcataccgaatattttatccatggaaaatcagatcgcagtctgaaagaaatcatcaggcaatcgctatttgcgccaacagtgaccggcagcccaatagaaagcgcctgtaaagttatcgctcggcgagaacgccgcggacgcggttattacagcggcatcgttgctataacgggtgcgcaagaaggtaaacgctatctggactcggccatcatgatccgcacggccgatatttccgctcagggacattttcggcttacggcgggttcaaccatcgtcagaagttccatcgcgcaaagtgaagccggtgaaacacgcgccaaattacaagggctaatgcattcgttcttctctgaaccaagcgccgggacgccaaaccggacaggattgtctgcagaactttgccatcgggctgaccagatactggcacaacggaatgcacgcgcctccgccttttggctggataactcgcaattgggcccgcgcactctactctctcatcatgccatcacactgatcgacatggaggacaacttcaccgccatgattgcctatcagttacgcagcgcgggttgcgccgtcaccctcattccctggtatgactgtccgagcaagctaacgcaactcaccgatcgcgacatcctattcattggtcccgggcctggcgatccaaccaatatacaactcgaaaaaatacgcgtgggccgaaaaattattgcgcaacggctccgggagcagcgtccgctaatcggaacttgtctgggacatcagttaatttgcgccgaattaggcattccgatcgagcggctggtcaataaccgtcagggtagccaacatcagatatccattcagggaaaacctcataccgttggtttctataacagtttctccgcactacatcagcggccatgctggtacagcccggagcatgacaaaacagtccagctggagcgacttccttccggtgaaattgtcgcattatcgtcaggcaacgttgcctccatacaatttcataacgaatcattcctgacgcaagacgcattttctatttatcaatggctgatacagaacgccttaacaacaacggcaactcttagcaaacaagatgccgtttaa

SEQ ID NO: 256459 - DNA, 633 bp, Klebsiella pneumoniae
atggaaaagatacggccctacccattgccgacagaacgtcaattacccaaatcaattgcagactggcgacccaacagttcaagagcggcgctactcatacatgatatgcagcgttattttctcgatttttacactgctgacgcctcgccgatagcgcaggtcatcgacaacatctaccgcttgcttagtgtcgcccgacgtctgcatattccagtattttatactgcccaacccggcgacatgacgccacaacagcgcggcttgctgcacagtctatggggttcaggcatgaacggcagccaggaacataaacagattgttcctccgttgacgcctctggaaaatgagtgggtattaacgaagtggcgttacagcgccttctttaactctcctcttctgagtactttgcacgaactcaaatgcgatcagctgatcgtctgcggcgtttacgcccatatcggttgtttgtgcacagcgcaagaggcctattccaatgatatcgagacattttttattgccgatgcgctcgccgatttctccgaagaaaagcatcgtctagcgcttgagctagctgcggaaaccagctcagtcgtgctgtcaacccgacaagctatcgacgcattggaacattaa

SEQ ID NO: 256460 - DNA, 786 bp, Klebsiella pneumoniae
atgacttttgataaagattatattgccgttattaccggcgcatgcggtggcattggcgaatccgtggcccacgcgctggcgaaagaagggctgtcactagcgcttcttgataataacgccactcagctggcaacccttgtagccacactacaagataaccatccgcagcccattgcaggctttactgtggacgttgccgacgaccgctgcgtagcagaggcctttaccgcagtcggtcatcaactgggcccggtagggtatctggtcaacggcgccggcgtactgtgccacgccagcgtggccgaaacacaacctcaggattgggcgaaaacatttgccgtcaacgcgactggcgtatttaacaccagccgccatgcggccaatctgatgatggctcagcgtaaaggcagcatcgtaactatcgcctcaaatgcagcgcgcgtgccgcgggcgacgatggccgcctactgcgcttcaaaagccgctgcccaggcatttacctatgctctggggctggaggtcgctccgtatgggatccgttgtaatgttgtcgctcccggctcaaccgatacgccgatgctgcgcggcatgtggcatagcgaaagtgacaagcaaaacacgctcaacggtaacccacaacaatttcgcattggtattccactcaacaaagtcgccacggcggaagaaattgctgccgcggtctgcttttacctgtgcgaagaatcagggcaaaccacgctatcaacgttattggtcgacggtggtgccgcactcggcagctgctaa

SEQ ID NO: 256461 - DNA, 1170 bp, Klebsiella pneumoniae
atgacatcatttcctggcaataagtccaactggcaacagccgttctggagcgataaggacatgcttgccctggtcaaaagtgaattagacaatcttccagaattattaagttttgcagaaataagtgaactcaataaagcattagccgccgtttatgcaggaaaaacaatgatatttcaggccggcgactgcgctgaaagaatttgcgaatctggcgcgttacatgtacggaaaaaattgatcttccttgagcaaatgtcccgcgaattctcaacactgacggggctgccgatattgacggtaggtagaattgctggtcaatatgctaaaccccgctcgcaacaaaacgaagtcgatggcgacagggtacttcccgtgtggcgcggtgattcagtcaaccggcccgaagcgacaccagaagccaggcgtaacgatccgcaacggatgctgctgagctatcgtgctgctgcggaaacgctggccgaaattaaacgttacgaacgggaatatccccgccatgttcatcacatttggaccagccatgaagcgctgttgctggactatgaaaccactcaaatccgcactaatccctacggagaatcatacttagccagcacccattggccctggataggcattcgtactcttgcgcctgacagcccacatatcgccatgctggcgaatatcgccaaccctgttgcctgcaagattgacgccagcgtaacgccatcgttcatcgcgacactttgccgacagctcaatcctcagcgtattcctgggcgtctgacttttatttcgcgttttggccgttcacacattcatcggttgggcgcgttgattcaggccgcacaagcaaccgaaacgccggtgttatggatgtgcgatccaatgcatgggaataccgggaaaacgcgggcgggcaataaacgccgcgagcttagcgacatgatggctgaaatctccggtttcctgaggcaggtgaaatcacataacgcctgcgccgctggactccatctggaagcaacgccgaatccggtcatcgaatgcttctgtgaaaataatcaccctgaagaacatgaacttaagcaaattctctgcgacccacgcctgaacgtagcgcaaacgcagatgttattaactcactggaaagagggacaacatgacttttga

SEQ ID NO: 256462 - DNA, 1275 bp, Klebsiella pneumoniae
ttggaattgctttataccaccctactttaccttattcagccgctggtgtggctgcggctgctgctgcgcagtcgtaaggctcctgcctatcgcaaacgctgggcggaacgctatggcttctgtcagaacaaggtagagccggatggcattctgctgcactccgtttccgtcggcgagaccttagccgccattccgctggtccgcgccctgcgccaccgctacccttctctgccgatcactgtcaccaccatgacgccgaccggttccgagcgcgccatgtcggcgtttggcaaagatgttcatcacgtctatctgccctacgatctgcccggcgccatgaaccgcttcctgaacaccgttcagccgaagctggtgatcgttatggagaccgagctgtggccgaatatggtggccgcgctgcataagcgtaagatcccgctggtgatcgccaacgcgcgcctgtccgaacgttccgccaaaggctatgccaaactgggcggctttatgcgccgcctgttgagccgcattacgcttatcgccgcgcagaatgaagaagatggtaaccgcttcctctctctggggctgaagcgcaaccagctggcggtcaccggcagcctgaaattcgatatctccgtcacgccagagctggcggcccgggcggtgacgctgcgtcggcaatgggcaccgcaccgcaaggtctggattgccaccagcacccacgacggtgaagaacaaatcatcctccaggcgcataaaaaactgctggagactttcccgaacctgctgctgatccttgttccccgccatccggagcgcttccctgacgcccgtgagatggtacaaaaggctgggatgagctttactctgcgcagcaccggcgagatcccctcctccagtacccaggtagtcattggcgataccatgggcgagctgatgctgctctacggcattgccgacctcgccttcgtcggcggcagcctggtggagcgcggcggccataacccgctagagccggcggcgcacgccattccggtgctgatgggcccgcataccttcaacttcaaagatatctgcgccaagctgcagcaggacgatggcctgatcaccgttaccgatgccgattcgctggtcagggaggtgtccacgctcctgaccgatgaagattaccgtctgtggtatggccgtcacgcggtggaagtgctgcatcagaaccagggcgcgctgtcgcgtctgctacagttactgcaaccttacctgccgcagcggagtcattaa

SEQ ID NO: 256463 - DNA, 402 bp, Klebsiella pneumoniae
atgaacgtcgccgcgcatcatggctcgcagcttaacggcgagctgctcatcaacagtatccagcaggcgggcttcaaatttggcgatatgaatattttccatcgtcacctgagcccggacggtagcggccaggtgcttttcagtctggcgaatatggttaaacctggcacctttaatccggacagcatggcggatatgatgacccctggggtgactatctttatgcaggttccgtcctttggcgatgaactgcaaaactttaagctgatgctgcagtccgcgcagtacatcgccgatgaggtcggtggcgtggtgctggacgaccagcgtcgtatgatgacgccgcaaaaactgcgtgaatatcaggaccgcattcgtgaagtaaaagaggcgaacgcctga

SEQ ID NO: 256464 - DNA, 2025 bp, Klebsiella pneumoniae
atggaatcgaacgaacaaaaactgactgaactgcgaaccacgcttcgccatcatgaatatctctaccacgtcatggatacgccggaaattcctgatgcggaatacgatcggttaatgcgtgaactgcgcgagctggaagctcagcacccggagctgatcaccccagactcgcccacccagcgcgtcggcgccgcaccgctagcctcctttagccagatccgccatgaagttccgatgctgtcgctcgataacgtctttgatgaggagagtttcctcgcgtttaacaagcgggtgcaggaccgtctgaaaaatagtgatgatcttacctactgctgcgagctcaagctggatggcctggcggtcagtatcctctatgagaacggcttgctggtacaggcggcgacccgcggagatggaacgaccggtgaagatattacctccaacgtgcgtaccatccgcgcgatccccctgaagctacgcggcgacaatattccgcagcggcttgaggttcgcggagaggtgtttctgccgcaggcagggttcgaaaaaattaatgaagaggcccggcgaaccggggggaaagtctttgctaacccgcgtaacgccgcagcaggttctttacgtcagctcgatccgcggattaccgcgaagcgtccgctcactttcttttgctatggcgtgggcgtgctggaaggcggcgagctgccggccagccactctgcacgcttgcagcagtttaagttctgggggctgccggtcagcgagcgcgtaaaactctgccatacgccagaggaagtgcttacttactatcgcaaggtggaagaagatcgaccgaatctgggatttgatatcgacggagtggtgatcaaagtcgattcgcttgcgttacaggaacagcttggcttcgtagcccgcgcgccgcgctgggcggtggcgtttaagtttccggcgcaggagcagatgactttcgtgcgcgacgttgagtttcaggtcgggcgaaccggcgccatcacgccggttgcgcgtcttgagccggtacacgtcgccggagtactggtcagcaacgcgaccctccacaatgccgatgaaatcgagcgcctgggactgcgcatcggcgataaggtagttattcgtcgtgccggagatgtgattccccaggtcgtgaacgttgtgctctcagaacgcccggaagagacgcgggaaatcgtgttcccaacccattgtccggtatgccactccgacgtcgaacgcgttgaaggcgaagtggtaacgcgctgtaccggcggattgatctgcggcgcgcagcgcaaagagtcgctcaagcattttgtctcccgtcgcgctctggacgtcgatggtatgggcgataaaatcatcgatcagctggtagaaaaagagtatgtgcacacgccagccgatctctttcagctgacgccgggtaaactcaccgggctcgatcgcatggggccaaaatcagcgcagaacatcgtggatgccctcgagaagtcaaaagagaccaccttcgctcgttttctttatgcgctggggatccgtgaagtgggtgaggcgacggcagccggtttagcggcccactttggcactattgaggcgcttgagcaggcctcgattgacgatctgcaaaaagtgccggatgtcgggattgtcgtcgccacgcacgtgcgtaatttctttgccgaagagagcaaccgcgaagttatcgctcagctgcgtaaagagggcgtccgctggcctgcgccggtagtggtcaatgctgaagagattgatagcccgttcgccggaaaaacgattgttctgaccggtagcctgagccagctctctcgtgacgatgcgaaagcgcagctggttgcgctgggcgcgaaggttgcgggcagcgtgtcgaagaaaaccgacctggttatcgccggggaggctgcgggttctaagctcgctaaagcgcaggagctgggaattgcggtaatcgatgaagacgaaatgctgcgcctgctcggagagtcgcgtggataa

SEQ ID NO: 256465 - DNA, 219 bp, Klebsiella pneumoniae; identical to SEQ ID NO: 174697

SEQ ID NO: 256466 - DNA, 999 bp, Klebsiella pneumoniae
atgaaatttttccgcattcttgatccattcaccctaacgttagtcaccgtcgtcctgctggcctctttttttcctgctcgcggcggatttgtccccttctttgagcatttaactaccgccgccatcgcgctgctgttttttatgcacggcgccaaactctcgcgtgaggcgatcgttgccggaggaagccactggcgtttacatctctgggtcatgtgcagcacgtttatcgtttttcccgtgcttggcgtgctgtttgcctggtgggcgcctgtcaacgtcgatccggctctatacaccgggtttatttatctctgcattctgccagccaccgtccagtcggccatcgcgtttacttccctggcgggcggtaacgtggcggcagcggtatgctcggcctcggcctcaagcctgctggggatcttcatttcgcctttgctggtcggcctgctgatgaatctgcacggcgcgggcgggagtctggagcaggtcggtaaaatcatgctgcagctgctgctgccgtttgtgctggggcatctttctcgcccgtggattggcaactgggtgacaaaacataaaaagtggatctcaaaaaccgatcagacctctatcctgctggtcgtttattcggcattcagcgaggcagtcgtgaacggtatctggcacaaagtgggtatcggatcgctgctgttcatcgttattgtcagcatcgtgctgctggcaattgtgatagctattaacgtgtttgtagcgcgcaggtgtggatttaataaagcggatgaaattacgattgtcttctgcgggtcgaaaaagagcctggcgaacggcattccaatggccaatattctcttcccgacttcaatcctggggatcatggtgctgccgctgatgatcttccatcagattcagctcatggtgtgcgcagtgctggcgaggcgctataagcgccaggccgaagcattgcaggcgcaggaaaaaaaccgcgcctccgaagcttaa

SEQ ID NO: 256467 - DNA, 927 bp, Klebsiella pneumoniae
atgaattactcgctacgacagttgaaggtttttgtgaccgttgctcgcgtcaaaagctttagccgggcaggggagagtattggccttagccagtcagcggtaagccatagcgtcaaagagctggagcatcagaccggggtacgcttgcttgaccgaacgacgcgcgaagtggtgcttacggaggccggccagcagctcgcggcccggcttgagcgtctgttggatgaactaaacggcacgctgcgagaggccggacgcgtcgggcagcagctgatgggaaccgtccgggtggcggccagccagactatttccgcccatcttatcccgcagtgcattgccgacagcaaccgtcgttatccggaaatcgatttcgtactacacgaccgcccccagcagtgggtgctggagagtatccgccagggggaagtggattttggcattgtgatcgatcctggcgctgctaccgatttacagtgtgagacggtgctcgccgaaccttttctgttgctttgccgtagcgatcacccttttgccggacggagcgcggtgaactggcaagacctccagcagcagcggctggttctgcaggattatgcttctggtagtcgtccgctgattgacgccgcgctctcgggatttgccgttaaagcgaatatcgtgcaggaaatcggtcatccggccacgctatttccgatggttgagtcggggataggtatcagtattttacccgcattagcgctgccgcttcctcagggcagccatttgcaggtgaaacgactcactccggtggtggagcgtcagctgatgctggcgcggcgtaaaaatcgctcgctttcaactgccgcagaagcgctgtgggaggtggtgcggcatcaggctggccagctgaccgctttgcgcgagaatgaccccttgtatcagaaatga

SEQ ID NO: 256468 - DNA, 834 bp, Klebsiella pneumoniae
atgagcgacacgcttttttcacagaacccatggtatagcgcagacatcattcgcggacataagccggactttatgccgcgggtggcttttattcttggttcgggtcttggggcgctagcggagcaaattgaagatgcagtggcaatttcatacgagaagctgcctggattcccggtgagtaccgttcacggccatgccggcgagctggtgttgggaaacctggctggcgtaccggttgcctgcatgaaggggcgcgggcacttctacgaagggcgcggcatgacggtcatgaccgatgccatccgtacgctaaagcttctgggatgtgaactgctgttttgtactaacgcagccggttctcttcgtccggaagtggggccgggaagtctggtggcgctgagcgatcatattaatactatgccgggtacgccgatggtgggcctgaatgatgaacgcttcggcgagcgctttttctcgctggcaaatgcctatgatgcggattatcgcgccgttctgcagcgcgttgcggcagaggagggttttccgctgactgaaggcgtatttgtctcctatcccgggccgaattttgaaacggcggctgagatccgcatgatgcaaattatcggcggcgatgtggtggggatgtccgtggtgccggaggtgataagcgcccgccattgcgggttgaaagtggtggctgttgcagcgattactaatctggctgaaggtctgggcgatgtgaagttatcccacgcgcaaaccctggcagcggccgaactctcccggcagaactttatcaacctgatctgcggcttcttacgcaaactggcctga

SEQ ID NO: 256469 - DNA, 1257 bp, Klebsiella pneumoniae
atgggtatcgcttctcgcttaaagctcatgtcgtttttgcaatattttatctggggaagctggctggtcaccctgggttcttacatgatcaatacgctgcatttcaccggcgcaaacgtcggcatggtgtatagctctaaggggctggcggccattatcatgcccggcatcatggggatcattgctgataaatggcttcgtgcagaacgggcctatatgttctgccatttggttggcgcgggagtgcttctttatgcgacgaccgtgaccgatccggatacgatgttctgggtgatgctcattaacgcgatggtctacatgcccactatctccttgtctaacagcgtctgctattcatgtctgtcgcagtccggccaggatccggcgaccgcgtttcctcccattcgcgtttttggcactctcggttttattgccgcaatgtggacggtgagcctgatggggctggagttaagcagcgcacagctatatatcgcctctgccgcgtcgctattactggcgatttatgcatttacgttaccgaaaattcctgtcgtcgagaagaaagccggaaccaccctggccagccggctggggctggatgcctttgtgttatttaaaaatccgcggatggccattttcttcttttttgcgatgatgctgggagcggtactgcaaataactaacgtcttcggtaatcctttcctgcatgattttgcccgcaatccggagtttgccgacagctttgtcgtacgttatccctcaattttgctttcggtgtcgcagatggcggaggtcgctttcatcctcaccataccgttctttcttaaacgctttggcatcaaaacagtcatgctgatgagtatgctggcatggacgctgcgctttggccttttcgcttttggcgatccctctccgttcggttttgtgttgctgttgatgtcgatgattgtttacggctgcgcattcgacttctttaatatttctggatcggtatttgttgagcaggaggtcagtgccaatattcgcgccagcgcccagggactgtttatgaccatggtgaacggcattggagcatgggttggttcagttctgagcggtatggccgtcgattacttctctattgatggcgtaaaagagtggcagactatctggctggtgttcgccgcctattcattactgctggcggttatttttgccctgttcttccgttatcaacatgagcctgagaaacttatcaacaaagcgctgacgcattaa

SEQ ID NO: 256470 - DNA, 885 bp, Klebsiella pneumoniae
atggaacgcacgcatcgtatcgatctgaaattattgcgctattttctggctgtcgcagaagagctgcattttggtcgtgcggctgcccgtctgaacatgtcgcaaccgccgcttagtatccacatcaaggagctggagcagcagctcggtacgctgctgtttgttcgccactctcgtagcgtggcgttgacccatgctggaaaaattctgatggaggagtcccgccgcctgctttccagcgccaatcaggcgctggcgcgagttgagcagattggccggggtgaggcggggagggtagaactgggcgtgataggtacggcgatgtgggggaaaatgcgcccggtaatgcggcgttttttgaaagagaaccctaacgtagaggtgcttttccgcgagaacatgcccgccatgcagatggcgatgctggagcgacgggagctggatgccggcgtctggcggatggcgacagcgcctacgccaggatttaccagcctgcgtttgcacgagtcctcttttctggtggccatgccggaggagcatccgctggcggtgcgtgaggcgatcccgcttgcggcgctgcgtaacgaatattttgttacgatgccttcaatacataccgactggacgtttttgcagcgcgtctgtcagagtgccggattcttgccgatgattatccgtgaagtgatggagccgcaaacggtactggctatggtcagcatgggaattggtattacgctcatcgccgatagctatgcgcaaatgacctggccgggcgttgtgtttcgtccgctggaagagcgcatacccgctgacttgtatattgtctatgaccaacaacaggcgacgcccgcgctggagaagctggtagcggcgctggtgaattga

SEQ ID NO: 256471 - DNA, 540 bp, Klebsiella pneumoniae
atgcaaaggatgaagtcaggtctgttgatatttttgctcccgccgctggcgctggccggtaaccagtggaacgttatgctgcccggcggaaacatgcgctttcaggggatagttattgccgagtcctgccgcgttgaagcgggcgaccggcagatgacggtcaacatggggcagatcagcagcaatcggtttcattcggccggagaagacaccaaccccgtccccttcgatatccacctgcaggagtgcagtaccgccgtcagccagcgcgttggcgtggcctttcacggcgtcgccgatggtaaaaacccggacgtgctctcagtgggcgaaggaccggggatagcgaccggcgtgggcgtcgctctgtttgataaagacgaccatccaatcccactgaacggccctcccgccgcctggacaagattgtataccgggccaaccacattgcattttgtagcgaaataccgggcaacagggcatcaggtcaccggaggcgcggccaacgctcaggcctggttctccctgacctaccagtaa

SEQ ID NO: 256472 - DNA, 546 bp, Klebsiella pneumoniae
atgaaaatcaaatcactggcaatcgttgttctgtcagccctgtctctgagctccgcggcggcgctggccgacaccacggtaaatggcggcacggtgcattttaaaggggaagtcgtcaacgcagcctgcgccattgacgcgggttcaatcgatcaaaccgttcctatgggccaggtacgttcggcgaaactggcgactgcgggcagcaccagcacggctgtcggcttcaatatccagctgaacgattgtgacaccaccgttgccaccaaggcctccgtcgccttcaccggcaccgcgattgacagcaccaacaccaccgtactggcgctgcaaagctctgcggcaggcagcgcgactaacgtcggcgtgcagatccttgaccgtaccggcaccccgctggcgctggatggcgcaaccttcggcgcagcttccaccctgaacgatggcaccaacatcattccgttccaggctcgctactacgcgactgccgctgccactgccggtaccgctaacgctgacgccacctttaaagtgcagtaccagtaa

SEQ ID NO: 256473 - DNA, 627 bp, Klebsiella pneumoniae
gtgaaccgacgtcgttttcttactggtaaagaagttcaggcgatgatgctggcagcccgccacgggcaaacgggagagcgggattactgtctaatcctgctcgcttttcgtcatggtatgcgcattagcgaattactcgatctgcactaccgcgacctcgatcttgtcgaaggccgcatcaatattcgacggctgaagaatggattctccaccgtacatcctctgatggtcgatgaatgtgacgctatcaggcgctggagtcaggtacgcggcgcctggaaaggcgcgcaaaaaaccgatgcgctgtttatatcgcgacgcggtacgccgctttcgcgtcagcaggcctaccgcatcatccgcaccgctggcgtagacgctggcacggctacccatactcacccgcatatgctgcgccatgcctgcggttacgaactggcggagagaggggccgacacccgccttattcaggactatctcggccatcgaaacattcgccataccgtacgctatacggccagcaacgccgcgcgattcgccggactctgggaacgcaacaacctgatggagtggaatttacaaaatcagaggatggaaaataatagtttgataaataagggaaaataa

SEQ ID NO: 256474 - DNA, 606 bp, Klebsiella pneumoniae
atgaaaagcaatgctattttaaaaaaaaggaacttcctgactcacaatgaaatagagtcattgctcaaagcggccaacagtggtgcacatgccacgcgcaattattgcctgacattattgtgttttattcacggattacgcgccagtgaaatatgccgcctgcaaatttccgatatcgatcttagttctaaatgtatctatattcaccggcttaagaatggattttcgacaacgcatcctttgctaaataaagaaatccgcgcattaaaaaactggctacaggtccgcgcctcgtacccgcagtccgacagcgaatggttatttctctcacgaaaaggtaatcctttgtctcgccagcagttttatcagattatttccgcctctggtgataatgccgggctatcgctcgaaattcatccgcatatgctccgtcattcatgcggcttcgccctggccaacatgggcattgatacccgccttatccaggactacctgggccaccgcaacattcgccataccgtatggtataccgccagtaacgctggccgtttctatggtatctgggacgaaagcagagacagacagcggagccctgttctgccgtaa

SEQ ID NO: 256475 - DNA, 612 bp, Klebsiella pneumoniae; identical to SEQ ID NO: 176009

SEQ ID NO: 256476 - DNA, 462 bp, Klebsiella pneumoniae
atggatagcatcgatcgaaaaattcttgctgagctgcaggccgacgggcgactatcgataaccgagctggccgaacgggtgaatctcagtctttcgccctgccatcgacggctgcgcacgctggagcaggagggggtgattaccggctatcgggccaaccttgatccggccaaaatgggcttcaactttttggccatcgtcttcgcgacgctaaaagagggggacaaaaaagcggtaagcgcgtttgaggaagcggtcgaagagatcccgcaaatcgtgctggcgcagcgtctgtttggcgatccggactatctgatgcatgtggtgacgcgcgatcttccggccttccagaagctgtacgatgataaactctccgcaatgcccggcgtgcagcatttacgttcgacattggtcatgaagacggtcgtgcaggatcgcccttttccgctcggtaatgggtga

SEQ ID NO: 256477 - DNA, 507 bp, Klebsiella pneumoniae
atggacaaatcaccgcagaccgacgccgtggatcgcattcttgaacagtggaaacgggaacgccccgatctcgattgcactccaatgggaccgttcggtcgtctgaagcgctgcgcgctgctgctggaaccgcgcattgaagcggcttttcttcgccatgatttagtgcgctgggagtttgacatgctggcgactttgcgacgggcgggcgatccgttcgtgctgtcgccaacccagctcttttcaacgttaatgatcacctccggcaccatgacccatcgtcttaaggcgctggaaaaacgagggtttattcgccgactgccaaacccggacgatgcgcgcagcatgctggtcgcgctgacgcctgaggggcggaagttaatcgacagggcggtagagagccacgtggaaaatgagcggcagctgctggatggcctttctgcggggcagcgccagcagcttgatgaagcgctgacggtgtttatgcgtctgctggaaaaagagtaa

SEQ ID NO: 256478 - DNA, 885 bp, Klebsiella pneumoniae
atggcctttgtttcgcgcaaccttgttgtagatctattcttaaccgcgctggcgcccgccatctggggcagcacctatattgtcacctcgcagttcctgccgcccgatagaccgtttatcgccgcgctgctgcgggtgctgccggccgggatcgccctgctgatctggagccgccgcctcccgctgcgcggcgagtggtggaaactgattgtcaccgggatcctgaatatcggcgcgttccaggcgctgctgtttattgccgcttatcggctgccgggcggactggcggcggtgattggcgctatccagccgctgctggtgatgctgctggcatggtgcgtcgatcgtcagcgatcgccctggctcgcggtgctatcagcaatgacggggatcgtgggaatggctatgttgctgctatcgccgcaaatgacgctcgatccgcttgggatcggcgcggcgtttctgggggcgatgagtatggcgcttgggacctggctgtcgcggcgctgggcgatcgctttgccggttattgccctgacaggctggcagctgctgattggcggtattgtactggcgccgattgcgttattggtcgatccgccgctgcatcaggtaacgctgactcaggcggcgggttatttgtggctgtgcgttgccggggcaatgctcgcatatggcctctggttccgcggtattggccgtctttctccggtagcggtatcggcaatgagcctgctgagtccggtgacagcggtactattaggctgggttttcctcggacaaaaaattgaggggctggcgctggcgggattggtgattgtgctattcagcgttctgtcaattcagcgcgcattatcgaataagagagctgtagcgggtcggtaa

SEQ ID NO: 256479 - DNA, 210 bp, Klebsiella pneumoniae; identical to SEQ ID NO: 176005

SEQ ID NO: 256480 - DNA, 636 bp, Klebsiella pneumoniae
gtgatagccgccgtagtaaacgaagtcgatattctcttttttcaggcgcgccaccagggtggagaagtctttctcgccggcggtgatgccatcaaagaacaccacgttggcgccacccttcttcagattatcctgtacagcacgggccaggccttcgccgtactgctgcttatcgtgaacaatcgcgatacgctgtggtttcacgctttccagaatatatttggcggcggttggcccctggtcggagtccaggccggtagtgcgcagaatcaggtgatagccgcgagctgtcagctccggcgcggtggccgccggggtgatcatcagcacgccttcatcttcatagatatcagacgccggctgggtggaagaagagcacaggtggccgataacgtatttgataccgtcgttaatcactttgttggcgacggcaaccgcttgtttcgggtcacaggcgtcatcgtactttaccatctgcagcttattgcctttgataccgcctttagcgttgatatccgcaatagcctgctctgcgccagtgaactcctggtcgccgtactgcgctaccggaccggacatcgcgccaacaacggccactttgatatcctcggccattgccgcaccgctcatgattaa

SEQ ID NO: 256481 - DNA, 1245 bp, Klebsiella pneumoniae
atgtctgacaactccaccttttcttcggttctgacgagccgggagcgtaccgctgtacctgcaaaatccctgagtttcattgaaggcgtgtcgatgatcgtcggcaccaatatcggcgctggggtgctatccatcgcctatgcctccagcaaagcgggctttctgccgctgctgttttggctgattgtggtcggtagtctgacgaccattaccatgctctacgtagcggagtcgacgctgcgcacgcgcaagcatctgcagcttagcggcctgtcgcagcgctacgttggccgctttggcgcgctgatgatgttcctctctgtttgcgtcaacagcgtcggcgcgctgacggcctatatgaccggcagcggtaaattattgcattcgttattcggtatctcgccggctctcggcagcgcgctgttttttattccggcggccggggtactttatcttggcctgaaggcgattggccggggcgagaaatttatcagtatcggcatggtcgtcatgataaccatacttgtcgccgcgacgttgctgaaagagaccgccagcgtcggctatttgctggatggtaactggctgtatatggtgccggtatttaacgttgtcgcgttctgcttctccgcgcagtatatcgtgccggaaatggcgcgcggtttcgctgataaaccggagaaactgccgaaggccattatggtgggaatgttattaaccttttgcctgctggcgctggtcccgctctcggtgattgcattaagcgggctggataatatttctgatgtggcgaccatttcctggggacgtgcgctcggcgagtgggccttcttctcggcaaacctttttgcgctctgcgcgatgctgacctcctattgggggctgggcggcagcttcctgaccaatatcttcgatcagtttcgccttggaaacgacgagcagccgttgaaacgctttaaggtgctgttagtggtcgccgtaccgcctttcattctggcctacagtgggatggtatccttcgtgaatgcgctctattttgccggggtatttagcggggtgattttatctatcatgccgatcctgatccttaaaggctcgcgcaggcagggtgatatcaatcccggttggacctgcccggcgctgattacgcatcctttaatccagatcttcatcgtattgctctatctttgcagcgccgcctacgccattgcttccgcctttggctacctgcctgcgggctggtag

SEQ ID NO: 256482 - DNA, 1266 bp, Klebsiella pneumoniae
gtgaaaagttcagaactgaatcagcgtcgccagcaggcgactccacgcggcgtaggggtgatgtgcagctactttgttgagaaagctgagaacgctacgctgtgggatattgaagggaatgaggtgatcgatttcgccgccggcatcgcggtgctgaataccggccatcgccacccaaaaatcgttgccgccgttgaacagcagctgcaggcctttacccacacggcttaccagattgtcccgtacgaaagctatgtcacgctggccgagcggattaacgaactggcgccgattgacggtccggcgaaaaccgccttttttaccacgggggcagaagcggttgaaaacgcggtgaaaatcgcgcgcgcttataccggccgtccggggttgattaccttcggcggcggcttccacggtcgtacgtttatgaccatggcgctgaccggcaaagtggcgccttacaagattggtttcggcccgttcccgggctcggtttatcacgccgtctaccctaacgccgcccatggcattaccaccgccgacgcgatgaagagcctggagcgcattttcaaagcggatatcgcggccgatcaggtggcggcgattgtgctggagccgattcagggggaaggcggctttaacgttgccccgcctgagtttatgcaggcgctgcgcgcgctgtgcgatacccacggcattctgctgattgccgatgaagtacaaaccggctttgcgcgcaccggtaagctatttgcgatgcagcactatgatgtgaagcctgacctgatgacgatggccaaaagcctggccggcggtttcccgctctccggcgtggtaggtcgcgccgaggtgatggatgcgcctgcgccgggcggcctgggcggcacctatgccggtaacccgctggcggtcgcggcggcgcacgcggtgctggacgtgattgaagaagaacagctgtgccagcgcgctgagcgcttaggcagccatctgaaagaggtgttgaatcaggcgcgtcaaagctgcccggccattgctgacgttcgcggtcagggctcgatggtggcggtggagtttaacgatccgcaaaccggggagccgtcggcggagatcacccgtcaaatccagcaacaagcccaggagaacggcctgctgctgctgagctgcggcgtctatggcaacgtcattcgcttcctctatccgttaacgattccggatgcgcagtttacgaaagcgctggatattctggcccgcgtgctgaagcgctaa

SEQ ID NO: 256483 - DNA, 1515 bp, Klebsiella pneumoniae
ttgcgttcgcttatcgcagacctggtgctggtcagattgcagaaagaaaccgatccgctcctgcacaagcgcctttacaaggcgattcgccacgccattctggatggttctctcccgccccatagccggctgccgccgtcgcgggatctggcgggggaactaggaatgtctcgcaacacaattttaacagtttacgaacaactcctggctgaggggtacgttgtgtcccgtcgcggcagcggcactttcgtggcgaaaacgctgcccgatatgtttcttcccgccagcagcgccaacgaaagccatcccgcgcagccccccagcgggactatttcccgtcgcggccaacatctgctggggcacatcagcgccagcccgcgtcagtggggggcgtttatccccggcgtaccggacgtcaatgcatttccccacccgctgttcagtaaaattcaggcacgcatcagccgccgtccaaaacccgaacagctcagctatagctgtaacggcggtaccgccgagctgcagcacgcgttggtggactatctgagagtagcgcgcggcgttctgtgtcaggcagatcaaattcttattactgaagggatccaccaggccatcgacctgatcacccgcatgctgtgcgaccgcggcgatctcgcctgggtggaggagccttcctactggggcattcgccacgtgttggcgatgaatgaagtgcgggctgagccgattgtggtggatgccagcggcctgtgcccgcccgaaagcgtagccgaagcgccgcggctgatcttcgttacgccatcccatcagtatcccctcggcgcggtaatgagccttgaacgccgacagcgcctgctcaccctggcccatcagcacggcagctggattgtggaagatgattacgacagcgagtttcgcttttccggccagccgatcccggcactacagggcttagtccccgaagcgccggtggtctacgtcggcacgttcagtaaaacgctctacccggggctgcggctgggctacgtcgtgctgcctcgaccgcttgcggctgaactcaaaaacgcccatgccgagctctaccgcggcggccattcgcttatccagctggcgctggcggaatttatcaatgccggtcattactcggcgcacattcgtcgcatgcgcctgctctacagccgccgtcgcgtctttttgaccgaactgattcagcggcactgcggagcgcatgcgctgtcggacttcagcgacaatgccggactgcatctgattctgaatttgccggatgaggcagatgacgtgacgattgcccgcgatgccaacgcgcgcaatatcttagtgcgtccgctgtcgcgctattacctgacggcgcagcggaagaaaggactgttgatggggtttgcttcgcagccggaaacgcagatggagccggcgttcaacgtgctgcttgagtgtctgaacaggcactgcccgcaggcgctgacggaggcagaaaaacaaaacgccccaacgtaa

SEQ ID NO: 256484 - DNA, 855 bp, Klebsiella pneumoniae
atgaccaaagatatgcaaactttagccttagcccccgttggtaacctggaatcgtacatccgggctgctaacacttggccgatgttgtcggctgatgaagagcgggagcttgctgaaaagctgcattaccagggcgatctggaagcagcgaaaaagctgatcctgtctcacctgcgctttgttgttcatattgctcgtaactactcgggttatggcctgccgcaggcggatctgattcaggaaggcaacattggcctgatgaaagccgtgcgccgttttaacccggaagtgggcgtgcgtctggtttccttcgccgtgcactggatcaaagcggagattcatgaatacgttctgcgtaactggcgtattgtgaaggtcgcgaccacgaaagcgcagcgtaagctgttctttaacctgcgtaaaactaagcagcgtctgggctggttcaaccaggacgaagtcgaaatggtggctcgcgagctgggcgtatcgagcaaagacgtgcgtgagatggagtcacgtatggcggcgcaggatatgaccttcgacatgtcgtcggatgatgaatccgatagccagccgatggcgccggtgctctatctgcaggataaaacgtctaactttgccgacggtattgaagacgataactgggaagagcaggcggcgaacaagctgaccgacgcaatgcaggggcttgacgaacgtagtcaggatatcatccgcgcccgctggctggacgaagacaataagtccacgctgcaggagctggcggatcgctacggcgtatcggccgagcgagtacggcagcttgaaaagaacgccatgaaaaaactgcgcgccgctatcgaagcctaa

SEQ ID NO: 256485 - DNA, 1074 bp, Klebsiella pneumoniae
atggaggccatatcggtgaataagcgcgaggcaatgaaccacattcgccggttcggcaatcgattcgatcgtttccgcaatgcgggcggagcgggcggcagcggtggacgcaatacgtcgaagcggcctaaggcggcgccgaatccggcttcccgcaagagcaacgtgttcaatgaacaggtgcgctatgcctggcatggtgcggtgcaggatctgaaaagcacgcccctggcgacgttcctgacggtgatggttatcgccatttcgttgaccctgccaagcgtgtgctatatggtctacaaaaacgtcagcaccgcggcgtcgcagtattatcccacgccgcaaatcaccgtctatctggagaaaacgctggatgacgatgccgctgcgcgggtagtcggtcagctgcaggcggagcagggcgtcgagaaggtcaactatctgtcgcgcgatgaagcccttggcgaattccgcaactggtcaggcttcggcggcgcgctggatatgctggaagagaacccgctgccggcagtggcgatcgtcgtgccgaaaattgatttccagagtgtcgaagcgctgaacacgctgcgcgaccgcgtgagtcatgttcagggcgttgatgaagtccgaatggatgatagctggtttgcgcgcctctcgtcgctgaccgggctggtcggacgcgtgtcggcgatgatcggcgtactgatggtggcggcggtgttcctggtgatcggcaacagcgtgcgtctgagcattttcgcccgccgcgataccattaacgtgcagaaactgattggcgcaaccgacggctttattctgcgtccttttctttacggcggtgcgctgctggggttctccggcgcgtttctgtcgctgatcctgtcggaaattatggtcatgcgcctttcgtcggcggtcaccgaagtggcgaaagtcttcggcacgcagtttgaactcagcggcttaggctttgatgagtgcctgctgatgctgattgtttgctcaatgattggctgggtcgccgcctggctggcaaccgtacaacatttacgtcactttactcccgagtag

SEQ ID NO: 256486 - DNA, 582 bp, Klebsiella pneumoniae
atggcgtttctgaccggccattccggcgcggggaaaagtaccctgctgaagcttatctgcggtatcgagcggcccagcgccggcaaaatccttttcggcggccatgacattagccgcctgaagagccgcgaagtgccgtttttgcgccgtcagattggcatgattttccaggaccaccatctgctgatggaccgtaccgtttacgataatgtggcgatcccgctgattatcgccggcgccagcggcgatgacattcgccgtcgcgtatcggcggcgctggataaagtcgggctgctggacaaagcgaaaaacctgccgattcagctttcaggcggggaacaacagcgcgtgggtatcgcccgcgcggtggtcaacaaaccagcggtcctgctggcggatgaaccgaccggtaacctcgacgaagcgctgtcggaagggatcttacgtctgtttgaagagtttaaccgcgttggggtgacggtgctgatggcgacgcatgatctggggcttatctccagtcgtccgtatcgcgttctgtccctcagcgaggggcatatgcatggaggccatatcggtgaataa

SEQ ID NO: 256487 - DNA, 1803 bp, Klebsiella pneumoniae
atgaaagccattaatcccgcggataatctggcctggcgcgtcatctggcgccagcttatctccagcgttggcagtcaggcagggatgctgcggcgcagtatgattgcgctgctgctggcggcattgatgcaggggattgcctttgcctgcctctatccgatcgttgatgcgctattacgtggtgaagcatcgccgcttctcacctgggctttggctttcagcgctgcggcgttcgcggcgctggcgctacgctggtatgggctgggctttgaataccgtggtcatctggcgcaggccacccatgaactgcgcctgcgcctgggcgaacagctacgccgcgtgccgctggaaagactccagcgcggcagagcgggcgaaacgaacgccttgttgctgggcagcgtggatgaaaatctcaactatgtgattgcgatagccaatattttgcttttaaccatcgtcactccgctgaccgcatcgctggcaacgttgtggatcgactggcggctggggctggtgatgttgctgatctttcccatgctggtgccgttttattactggcgccggccggcgatgcgccgacaaatgcagaccctgggcgaagcgcaccagcggctgagcggggatatcgttgaatttgcgcaagggatgatggttttgcgtacctgcggcagcgatggcgaaaaaagccgggcgttgctggcgcattttaatgcgctggaaagcttgcagagccgcacgcatcgccagagcgccggcgcgacgatgctgatcgccggcgttgtggagctgggcctgcaggtggtcgtgttagccggggtggtctgggtagtaacggggactctgaacctcgcctttctgatagccgccgccgcgatgattatgcgtttttcggaaccaatggcgatgtttatcagctacacctcggtggtggaactgatcgccagcgccctgcagcgtattgagcagtttatggcgctcccgccgcttcccgtcgcagaacgcggcgagatgccggagcgttacgatatccgctttgacaccatttgctaccgctatgatgacagcggcgctcccgcgctcaacaacctctctttgacctttccggccgccagcatgagcgcgctggtgggcgcctcaggcgccggtaaaaccacggtcagcaaactgttaatgcgctatgccgatccgcagcagggagagatttctatcggtggcgtcgatattcgtcatctgacggcggaacagctcaatagcctgatttccgtcgtgtttcaggatgtctggctgtttgatgacacgctgctggcgaatctccttatcgcccgcccgcaggccacgcagcaggaggtggaagaggccgcccgcgcggcgcagtgtcttgaattcatttcccgtcttccgcaaggctggctgacgccaatgggcgagatgggcgggcagctctcgggcggcgagcgccagcgaatttccattgccagggccttattgaaagatgcgccgatcgtcattctcgatgagccgaccgccgcgctggatattgatagcgaactggcggtacagaaagctattgatagtctggttcacaaccggacggtgattattatcgcccatcgcctgtcaaccatcgccggggccggaaacatcctggtgatggaagagggagaagtggttgaacagggcacgcatgcgcagctgctctcccgtcagggacgttaccaggcgctgtggcaggcgcaaatggccgcgcgcgtctggcgtgatgcagaggttgacgcatctgaggagcgactgcatgagtga

SEQ ID NO: 256488 - DNA, 1284 bp, Klebsiella pneumoniae
atgagtgatgttcagtcgcaggtgaaaccgttaacgaccggacgggtgatttttgccattgccgggatctatgtgacgcagagcctggtctcggcgctctctatgcagtccctgcctgcgctggtgcgcgccgccggcggctcgctggcccttgccggcgcgacaacgctgtttatgttgccctgggcgctgaagtttatctgggcgccgtggattgagcgctggcgcctgccgcccgatcgcccggagcgtcgttctcgcctgttaatcctccggggtcaggtcgggttggcggcgatcctgacggttgccgctgcgaccggctcggtcgggcgaactgggggatttcccgacacgcaaatcgccgcgttgtttgcgctgtttttactcgcgggtacggttgccgccaccatcgatattgccagcgacggcttttgtgtcgatcagctcagtcgcgcaggttacggctggggaaacagcgtccaggtcggcggcagctatctgggaatgatgtgcggcggcggcgtcttcctgatgctagcggcggcattcgactggccggtggccatgctgatcatggcggcgctgatcctggtcttatccgttcccctgtggcgcattgccgaacccatgcgcatcacgtctgtaccgcatgttccggcgttgggttatgcgcttaaaaggcgacaggcgcggctgggtttactgttggtgctgatgctgaataccgggatgcggttcgtgttgcctcttctggcgccgctgctgctggatcaggggttgagcatgtcggcgctcggcgcgctattcagcgctggcaatatcgcggctggtatcgcaggaacgctggcgggcggggtgctgatgaaatacacctcccccggcagagcgctgcttgcggcttatggcctccagggcgtcgtgctgatggcaatagtaacgacgttgctgctggcgccgggacatttgcggctgccgttactccaggggctgatcatcctgcaatccatttcgctggcctgcgccctggtctgtctttacgccacgctgatgacgctttcatcgcctctgcaggctggcgtcgattttacgctctttcaatgtactgatgccgccatcgccattctggccggcgtggttggcggcgtaattgcgcagcattttggctatgcggcctgctttatgtttggcggcgcattcacgctgctggcagcgtggattgcttctgcccggctgcattcgacaaacgcaattgaaggatccgggaataacacagagaggtaa

SEQ ID NO: 256489 - DNA, 1044 bp, Klebsiella pneumoniae
  misc_feature (1016)..(1025): n is a, c, g, or t
gtgcgtaccccaacccgtcagttcagctcctgtgtgctgatcgagtgcggtgatagcctggattctattaacgcgacctccagcgcgattgttaaatacgtttctcagcgcgccggtatcggcatcaatgccggccgcatccgcgcgctgggtagcccgattcgcggcggtgaagctttccacaccggctgtattccgttctataagcacttccagaccgcagtgaaatcctgctcgcagggcggcgtccgcggcggtgctgccaccctcttctacccgatgtggcatctggaagtcgaaagcctgctggtgctgaaaaacaaccgcggtaccgacgccaaccgcgttcgtcatatggactacggcgtacagatcaacaagctgatgtacactcgcctgctgaaaggcggagacatcaccctgttcagcccatccgacgttccgggcctgtacgatgcgttcttcgccgaccaggacgagttcgagcgcctgtatacccaatacgagcaggacgacagcatccgcaagcagcgcattaaagccgtagagctgttctcgctgatgatgcaggagcgtgcctccaccggtcgtatctacatccagaacgtggaccactgcaacacccacagcccgtttgacccggttgtcgcgccggtgcgccagtccaacctgtgcctggaaatcgccctgccgaccaagccgctggaagatgtaaacgacgagaacggtgaaattgcgctgtgcaccctgtccgctttcaacctcggggttatcgatagcctggatgagctggaagagctggcggtgctggccgttcgcgcgctggatgccctgctggattaccaggactacccgatcccggcggccaaacgcggcgcgatgggccgtcgtacgctgggtattggcgtgattaactttgcctactatctggcgaagcacggtaagcgctactccgacggcagcgctaacaacctgacgcataaaacgttcgaagcgattcagtactatctgctgannnnnnnnnnattcagtactatctgctga

SEQ ID NO: 256490 - DNA, 429 bp, Klebsiella pneumoniae
atgccgtccgagacctcttcgcagatctccaacgccaccaacggcattgaaccgccgcgcggtcacgtcagcatcaaagcgtcaaaagacggtatcctgcgccaggtggtgccggattacgaaaaactgcagaacggctacgagctgctgtgggaaatgccgaacaacgacggttatttacagctggtcggtattatgcagaagtttatcgaccagtcgatttccgccaataccaactacgacccgacgcgcttcccgtcaggcaaagtgccgatgcagcagttgctgaaagacttgctcaatgcctataagttcggcgtcaaaacgctgtactatcacaacactcgcgatggcgcggaagatgcccaggatgacctggcgccgtctattcaggacgacggctgcgaaagcggcgcatgtaagatctaa

SEQ ID NO: 256491 - DNA, 1131 bp, Klebsiella pneumoniae
atggcatataccactttttctcagactaaaaacgatcagctgcttgagccgatgttttttggtcagccggtgaacgtcgcccgctacgatcagcaaaaatatgacatcttcgaaaagctgattgaaaaacagctctccttcttctggcgtccggaagaggttgacgtttcccgcgaccgtatcgactaccaggcgctgccggaacacgaaaaacacatttttatcagcaacctgaaatatcagacgctgctggactcgatccagggacgcagcccgaacgttgccctgctgccgctgatttccattcctgagctggaaacctgggttgaaacctgggcgttctcggagactatccactcgcgctcctacacccatatcatccgcaatatcgttaacgatccggcgatggtatttgacgatatcgtcaccaacgagcagatccaaaaacgcgcggaaggcatttccagctattacgatgaattgattgagctgaccagctactggcatctgctgggcgaaggcacccacagcgtgaacggtaaaaccattaccgtgaacctgcgcgagctgaagaagaaactgtacctgtgtctgatgagcgtgaacgcgctggaagccatccgtttttacgtcagcttcgcctgctctttcgcctttgccgagcgcaagctgatggaaggtaacgccaagattatccgtctgatcgcccgtgacgaagcgctgcacctgaccggcactcagcacatgctgaatctgctgcgctccggcgttgacgatccggaaatggcggaaatcgccgaagagtgcaagcaggagtgctacgacctgttcgtgttggcggcacagcaggagaaagagtgggcggattatctgttccgcgacggttcgatgatcggcctgaacaaagatattctttgccagtacgttgagtacattactaacatccgcatgcaggcggtaggtctcgatctgccgttccagacccgctccaacccgatcccgtggatcaacacctggctggtgtccgataacgtgcaggtcgcgccgcaggaagtggaagtcagctcttatctggtcgggcagatcgattccgaagtcgacgctgacgatctgagcaacttccagctctga

SEQ ID NO: 256492 - DNA, 255 bp, Klebsiella pneumoniae
atgaaacgcattttcttgaagatttctgacactcgccttgagtgtcaggatgaacatccctccctgctggcggccctggaatcgcacaatatcgacgtggagtatcaatgccgcgaaggatactgcggatcgtgtcgtctgcggctggtttccggtcaagttgactggctcaccgagccgctggcgtttgtccagccgggagagattttgccctgctgctgccgggcaaaaggcgatatcgaaattgagatgtaa

SEQ ID NO: 256493 - DNA, 1068 bp, Klebsiella pneumoniae
atgaaaagtcaattaaccaccctgatgagcggagtgctgctggccgccacggcgctctccttcagcgccgtggcgggagagaaaatcgttatcgcccaccgcggcgccagcggctatctgccggaacataccctgtcggcgaaagcgatggcctacgcgcagggggcggattaccttgagcaagacctggtgatgaccaaagatgaccggctggtggtcctgcatgaccactatctggatcgggtgaccgacgtggcccagcgtttcccgcagcgggcgcgtaaagatggccgcttctacgctatcgactttaccctcgctgagataaagtcgctgaagtttaccgaagggtttgaaccgaaagatggcaagaacgtgcaaacttatccgggtcgcttcccgatggggaaatctgatttccgcattcataccttcgaagaggagattgagtttgtccaggggttaaaccattcgaccggcaaaaacatcggcatctacccggaaatcaaagcgccgtggttccaccatcaggaaggcaaggatattgccgccagcacgctgaaagtgctgaaggaatatggttacaccggcaagcaggataaggtgtatctgcagtgctttgacgccaacgagctcaagcgtattaagcatgagctggagccgaaaatggggatggatctcaatctggtgcagcttatcgcctataccgactggaatgagacccagcagcggcaggctgacggcaagtgggtgaactacagctatgactggatgttcaaaccaggggcaatggcgcagatcgcccagtacgctgacggtattggtccggactaccatatgctggtggcggaaggctcgaaaccgggagacgtgaagctgacggcaatggtgaaagaggcgcacgccagcggcatgcaggtacatccatacacggttcgcgcggatcaattgcctgactacgccatcgacgtcaatcagctctataacgtgctgtaccatcaggcggatgtcgacggcttgttcaccgattttccggataaagccgtgcagtttctgcacgctaagtag

SEQ ID NO: 256494 - DNA, 1347 bp, Klebsiella pneumoniae
atgttaagtatatttaaacccgcagcgcataaagcgcgattgccaaccgcggaaatcgatcctttatatcgtcgattacgctggcagatctttatcggtattttcttcggatatgctgcttactatttggttcgtaagaactttgctttagcaatgccctaccttatcgagcaggggttctcccgtggcgacctcggttttgccctttccggtatctccattgcctacggattttcgaaattcatcatggggtcggtttccgaccgctcgaatccgcgcatttttttaccggcaggcttgattcttgccgcgctggtgatgctggtgatgggcttcgtcccttgggcgacctccagcattatggtgatgttcgttctgctgttcctgtgcggctggttccaggggatgggctggccgccgtgcggacgtacgatggtgcattggtggtcgcagaaagagcgcggcggtatcgtgtcggtatggaactgcgcgcataacgtcggcggcgggatcccgccgctgctgttcctgctgggaatggcgtggtttaacgactggcatgcggcgctgtatatgccggctttcggcgcgattctgctggcgattttcgccttcgcgatgatgcgcgatactccgcaatcctgcggtttgccgccgatcgaagagtataaaaacgattatcctgatgactacagcgagaagcatgaagaggagctgaccgcaaagcagatctttatgcagtatatcctgccgaacaagctgctgtggtacatcgccgttgcaaacgtgtttgtttacctgctgcgctacggcattcttgactggtcgccaacctacctgaaagaggttaagcacttcgcgctggataaatcctcctgggcctacttcctttatgaatatgcggggattccgggcactctactgtgcggctggatgtcggataaagtgtttaagggcaaccgcggcgcgaccggcgtcttctttatgaccctggtcaccatcgccaccgttgtctactggctgaacccgccgggtaacccgggcgtggatatggcctgtatgattattatcggcttcctgatttatggcccggtgatgctgattggcctgcatgcgctggagctggcgccgaaaaaagccgccggcaccgctgcgggcttcaccggcctgttcggttatctcggcggttccgtggccgcgagcgccatcgttggctataccgtcgatttcttcggctgggacggcggctttatggtgatgatcggcggcagcgtgctggcggttgtgctgctgattatcgtgatgctgggtgaacgacgccaccatcaacagatgaaacaaggttaa

SEQ ID NO: 256495 - DNA, 1623 bp, Klebsiella pneumoniae
atggccgatagtcgtgaatatgacgtcattattattggcggcggtgccaccggcgccgggatcgcgcgcgactgcgcgctgcgcgggctaaaggcagcgctggtggagcgctacgatatcgccaccggcgcgactggccgtaaccacggtctgctgcatagcggcgcgcgctatgcggtcaccgatagcgaatcagcgcgcgagtgcattagcgaaaaccgtatattgcgccgtatcgcccgccactgcatagagcccaccagcggcctgtttattaccttgccggaagatgacccggcgtaccagtacacctttatcagcgcctgtcagcaggcaggtatcgaagcccagcctctgacgcccgccgaagcgctgcgtattgagcccgcggttaacccggcgctgctcggcgcggtacaggttcccgacggcaccgtcgatcctttccgcctcaccgcggcgaatatgctcgatgcccgcgaacatggcgcgacgatcctcaccggctgcgaagtcaccggtctgctgcggcagggcgatcgcgtccatggcgtcgcgatctacaatcatcagcgccgagaatcgcgcacgctgcgcgctcaggtggtggtcaacgccgccgggatttgggggcagcgcatcgcagagtacgccgacctgcgcatcgcgatgtttccggcaaaaggatctttgctgatcctcgaccaccgcattaaccgtcaggttatcaaccgctgccgcaaaccggctgacgccgatatcctggtgcccggcgatactatttcgctgattggcaccacctcaatgcatattccctatgacgaaattgacgacaaccgggtaaccaccgaggaagtcgaaacgctgctgcgggagggagaaaagctggcgccgatcatggggcggacgcgagtacttcgcgcctattccggtatacgcccgctggtcgccagcgatgacgatcccagtggccgtagcgtcagccgcggtatcgtgctgctcgaccacgcccgccgcgacggtatggaaggcttcatcaccatcaccggcggtaagctgatgacctatcgtctgatggcggagtgggccacggatgcgctatgccgcaagctcggaaataccgccccctgcacgaccgccgatacgccgctgcccggttcgcaggaaccggcggaagccacgctaagtaaaatcatctcgttacctgcgccgctgcgcgggtcggccatctaccgccacggcgatcgcaccccggcatggcttggcgatagccgccagcgccgtagcctggtctgcgaatgcgaggcggtcactgccggagaagtagagtacgcggttgaaaacctggcggtaaaaaacctgcttgacctgcgccgccgtacccgcgtcggcatgggaacctgtcagggcgaactgtgcgcctgccgcgccgccgggctgctcgcgcgttttaacgtcaccacctccgcgcggtccctcacccagctgtcccaatttttgaacgaacgctggaaaggcgttcagccggtggcctggggggatgcgctgcgcgaaagcgagtttacccgctgggtttatctcggtctgtgcggattagaaaaggagcaccaggatgaagtttga

SEQ ID NO: 256496 - DNA, 519 bp, Klebsiella pneumoniae
ttgcgcgattattggcggcggccttgccgggctgctctgcgggctggcgctcaaccagcgcggcctgcgcagcgtgattatcagccggggccaaagcgccctgcacttctcttccgcctcgctggatttgctctcgacgctgccgaatggcgaaaccgtcaccgatgttgcttacggtatcggccagttggcccgccagcttcccgaacacccttatgcctggctcggcgcagaaagggtgatgaattacgcccgccaggctcaggcgctgtttgccgactgcgggattgccatgcagggcgatgccagccagccgcatctgcgcgtgacgccgctgggaatcttacgcgcggcctggctttctccgcaggaaatcgccaccgcgccgctgcccgtcagcggcgtctgcgtcgttggcatcagcgggttcggcgacttccagccgcatcttgccgcggcctctctgcaccagcacggcgtgaccgccgtagcacacgagatagaattaccccttcttga

SEQ ID NO: 256497 - DNA, 345 bp, Klebsiella pneumoniae
atgcggcagatcctgtttcagcaccagggcgatttcggcttccaccttcggctgcagcacccgggagaacggcacattggcgttatcgccgtagcacatgtcggcaaacagggtgccgaagtccggctggtcaacgcccagctgctgctgcactttaggatgggtcaatcccaccttgcgtcccaccacccggcggccgttcgccacgtggtgctgcacgttcatccgctggatagcataggccgcttcggcattgtcgacgccgaggagagctcgcagcggttcaatcgcccggccgcgactttccgcctcacgcaaccgttgcgccaggtgttcaagagataa

SEQ ID NO: 256498 - DNA, 867 bp, Klebsiella pneumoniae
atgagctaccaaccgcaaaccgaagccgccaccagccgctttctcaacgtggaagagggcggagaaacattacgcatccattttaatgactgcggccagggtgacgaaaccgtggtgatgctgcacggctccggccccggagctaccggctgggccaactttagccgcaatatcgacccgctggtggaggcgggctatcgggtcattctgctggactgccccggctgggggaaaagcgatgctatcgtcaatcgcggctcccgctccgacctgaacgcccgggtgctgaaaagcgtcattgatcagctggatatcagcaacgtgcatttgctgggcaactcgatgggcggacacagcgcggtggcctttaccctcagctggccggagcgcgtcggcaaactggtgctgatgggcggcggaaccggcggcatgagcctgtttacgccgatgccgacggaaggcatcaagctgctgaacggcctgtatcgcgaaccgaccatcgaaaacctgaaaaagatgatgaacatctttgttttcgatacccgcgatctgactgacgccctgttcgacgcgcgtctcaacaatatgctatcgcgccgggagcatctggataatttcgtcaaaagtctcgaagccaacccgaagcagttcccggactttagcccgcgtctcggcgaaatccgcgcgcagaccctgatcgtctgggggcgtaacgatcgcttcgtgccgatggacgccgggctgcgcctgctggcgggcattaacggttccgaactgcatatctatcgcgactgcggccactgggcgcagtgggagcacgcggagagttttaaccagctggtgctcgattttctggcacgtgcctga

SEQ ID NO: 256499 - DNA, 489 bp, Klebsiella pneumoniae
atgctgggcgaagccatcggccgctttctgaccaccctcaataaacgggtattaatcctcggctccggcggcctgtcgcatcagccgccggtaccggagctggcgaaggccgatgcccatatgcgcgaccggctgctgggcagcggcaggcagctgccgccggacgaacgggaactgcgccagcagcgcgtgattagcgcggcgaagcagtttatcgaggatcagcactcgctctatccgctcaatccggtctgggatacccgcttcatgagcctgctggagcaggggcggctggcggagctggacgccgtcagtaacgaagagctgtcggcaatggccgggaaatcaacgcacgaaattaaaacctgggtggccgcctttgccgcgctatccgcatttggccgctggcgctgcgaaggtcgctattaccgaccaatccccgagtggattgccgggtttggctcgctgagcgccacagcgcagaactga

SEQ ID NO: 256500 - DNA, 501 bp, Klebsiella pneumoniae
  misc_feature (418)..(427): n is a, c, g, or t
atgaacgcttatcttcattgcctctcgcatacgccgctggtgggttacgttgacccggaacaggcggtgctggacgaagttaacggcaccattgccgacgcgcgggcgcgtattgccgccttcgatccggagctggtggtgctgtttgcccccgatcactacaacggctttttctacgatgtgatgccgccgttctgtttaggcatcggcgcaacttctatcggcgatttcagcagcgccagcggcgttctgccggtgccgacggcgctggcggaggcctgcgcccacgctgtgatgaaggagggcatcgatctggcggtctcctactgcatgcaggtggatcacggcttcgcgcaaccgctggagttcctgctcggcgggctggatacgctgccggttctgccggtgtttatcaacnnnnnnnnnncaacggcgtcgcgtcgccgctgccgggctttcagcgtacccgcatgctgggcgaagccatcggccgctttctga

SEQ ID NO: 256501 - DNA, 807 bp, Klebsiella pneumoniae
atgaacgagaattcgtcggcggaatacaaaacggtacgcggattgagccgcggattattgttattaaatttgttaaataaattcgacggaggcgcgacggtcagcaccctggccgagtttagcggtctgcatcgtacgaccgtcaggcggctgctggaaacgctgcaggatgagggttacgtgcgccgcagccgctccgatgacagctttcgcctgacgattaaagtgcgtcagttaagtgagggatttcgtgacgaacattggatttctgccctcgccacgccgctgcttggcgagctgctgcgcgaggttttatggccgaccgatatcaccaccctggacgtcgatgcgatggtggtgcgcgaaaccacccaccgcttcagccgcctctccttccaccgggcaatggtcggccgccgcctgccgctgctgctgaccgcctccgggttaacctggctggctttcgcgccggaacacgaacgacgcccgatcatcgatatgctggctgcccgcccggaagcggagtatcagctggcgcgcgagccggaaaaactggccgccattctcgaacgcacccggcaaaacggctacggtgaaaactttcgcggctggcagcaggaggagaaaatcgcctccattgccgttcccgttcgccgtcggcagcgggttatcggctgcctgaacctggtctatatggccaaagctatgactatcgaccaggcagcgcaaaagcatctcgcctcgctgcaaaaggtcgcaaggcagatagaggaacggatgtccgatgaagaggttttctaccagtag

SEQ ID NO: 256502 - DNA, 1059 bp, Klebsiella pneumoniae; identical to SEQ ID NO: 176695

SEQ ID NO: 256503 - DNA, 750 bp, Klebsiella pneumoniae
atgaccctttccctgaatttaagcaacctgctctacggttatagccgaccgctattcgccccgctgaacctgcagtgccgctccggtgatatctgggcggtacttggcgccaacggccgcggcaaaagctccctgcttgataccctgaccggcgtcctggcgccgctcggcggccagtttaccggcaccggcggtatcgccatcgtgccgcagcattttcgtccagcctttagctggctggtacgtgacgtggtgctgatggggcgggcgcgccacgttaacctgttcgctcagccatcggcggacgacgagcgccaggtccaggaggcgctggcgcagctggggatcgcgacgctcgccgacaaggtgttccgtgcgctgtccggcggccagcagcaactggtactcatcgccagggcgctggtgggcgctagccagaatatcctgctggatgaaccctgctcggcgctggatctggccaatcagcagctggtgctgcagctgattagcgacctggcatatcgccagaagcggacggtgctgtttaccacgcacgatcccacccacgccctgcaggtagcgaaccagactttgctactgctccccgacggtgaatggctggcgggagaatccaccgccgtactgacggaagagaatcttcagcgcgcgtatggtttggcggtacgcaaaatctgtcacccgggctcggcgctgccgctgctggccccgcagtttacgattcgccgttga

SEQ ID NO: 256504 - DNA, 186 bp, Klebsiella pneumoniae
atggcggcgtgcggcgatctgcgtacgctggttattccgccggcgtggaatgttcgctgcgattatcaactgacgcagattgaacaaagcgccggggcgcagcgtctgtgccgctttatcctcggcgcggagggccagcattttctgaaaaacgccggctttttagccatcaacggcgaatcgtaa

SEQ ID NO: 256505 - DNA, 1029 bp, Klebsiella pneumoniae
atgaatctgatattaaaacgcgtcgtggtacagaaagatccccggcggcgagaggccgttgacctctttcttcatcagcatcagctctcgctggaggcggattgcgaaatagtgattgtcgccgagtaccagcggcgcattgttggctgcggcgcgattgccggatgcgtgctgaagtgcattgccgtcgacccgtcgctgcagggagaagggcttagcctgaagctgctgactgaactgatgaccctggcgtatgagctgggccgcagcgagctgtttctgttcactaaaccttataacgcggcgctcttttcctgcgccggtttctggcctatcgcccgtgcgggcgacagggccgttttgatggagaacagccgcgaacgcctgacccgctattgccgccagctcaggatgtatcgccagcccggagaaaaaatcggcgccatcgtaatgaacgccaatccctttacgctggggcatcgctggctggtggagcaagccgctcgccagtgcgactggctgcatcttttcgtggtgaaggaagatgcttcatttttcagctaccaggatcgcgtggcgctgatcgagcaggggatcgccgggatcgacaacgtgaccctgcatccgggatcggcctatctgatctcgcgcgccactttccccggctacttcctgaaagacaaaggcgtggttgacgattgccactgccagatcgatctgcagctgtttcgcgaacatttagctccggcgctgggggtcacccaccgctttgtcggcagcgaaccgctgtgcgaattaacccgtaattacaacctgcgtatgcgacagctgctggaagcgcccggcgacgcgccgaccattgaagtggttgagctggcgcgggttgagaaagagggcgcgccgatttccgcttcccgggtgcgcaagctgtatcagcagcgccagtggtcggctatcgagccgctggtaccgccgggaacgctcgcttttctgatgcatctggcggaaagcgaacgccagaccgcctga

SEQ ID NO: 256506 - DNA, 1527 bp, Klebsiella pneumoniae
atgaaagagaccgtggcaatgcttaatcaacagtacgtcatgccggaaggattagaaccttacgcaggggtaacggcgaagagtccgtggctggccagtgaaagcgaaaagcggcagcgtaaagtctgcgcttcgctggaggaggcgattcgccgctccgggctgcaaaacggtatgaccatctccttccatcacgcgtttcgcggcggtgacaaggtggtcaatatggtggtggcgaagctggctgaaatgggctttcgcgatctgacgctggcctcaagctcgctgattgacgcccactggccgctgatcgagcacataaaaaacggcgtgatccggcagatttacacctccggtctgcgcgggaagctgggggaagagatctccgccgggctgatggaaaatccggtacaaatccattcccacggcggccgggcgtatttagtgcaaaccggtgagctaaccattgacgtggcgttcctcggcgtgccgtgctgcgatgaatatggcaatgccaacggctttagcggtaaatcccgctgcggctcgctgggttacgccaaagtggatgccgatgccgccagatgcgtggtactgctgactgaagagtgggtggattatccgaactatccggccagcatcgcccaggatcaggtggatctgatcgtgcaggttgatgaagtcggcgatccggcgaaaatcaccgctggcgcgatccgtctgaccagcaacccacgcgagctgctgatcgcccgccaggcggccaaagtcatcgaacattcgggctacttcaaagagggcttctctttgcaaaccggtaccggcggcgcatcgctggcggtaacccgcttcctcgaagataagatgcgtcgtaacaatatcaccgccagctttggtttgggcgggattaccggcacgatggtcgatctgcatgaaaagggcttgatcaaagcgctgctggatacccaatctttcgacggcgatgccgcccgttcgctggcgaacaaccctaaccatatcgaaatttccgctaatcagtacgccaatcccggttcgaaagggatctcctgcgaacgcctgaatgtggtgatgctcagcgcgctggaaatcgacaccggatttaacgttaacgtgatgaccggctccaacggtgtcctgcgcggggcgtccggcggccatagcgatacggcggcaggcgcggatttaaccattatcaccgcgccgctggtgcgtgggcgtattccgtgcgtggtggagaaagtcctgactcgcgtcacgccgggggccagcgtggatgtgctggtgaccgaccacggtattgctgttaacccggcgcgtcaggacctgattgataacctgcgtaacgcgggcatccagctcatgaccatcgaagagctacagcagcgcgccgaactgttgaccggcaagcctgatccgatcgaattcaccgatcgggtcgtggccgtggtgcgctatcgcgatggttcggtgatcgacgtgattcgtcaggttaaaaccgctggttaa

SEQ ID NO: 256507 - DNA, 909 bp, Klebsiella pneumoniae
atgagcgaagtgataataagccagcatcggccattgagccgtcaaacggtgacggctgaggagatggtttctcgcgtgggacgggcgctactgactgaagttcgcctgacgccgaagccgggtctggtggatattcgtaatgctggcgcgcatcgggatatggatctggccacctttgaggccagtacggcggttgtcgccccgtggatggagaagtttttcattatgggacacgacaccgccaatatcacgccggaacaggtgttgacgatgctgcgtccggtgggcatggcctgcgagacggatatgctggaagccaccggcggggtgaacacccatcgcggcgcgatcttcgcttttggcctgctctgcgcggcggcgggaagactggttgccagaggggagccggttgaacagcatcgggtttgcgatcaggtggcccgattctgtcgcggcctggtggcgcgcgagctctcctcctctgaaggaaagaaggtgagcaaaggcgaagggcatttcctgcgctacgggctctccggcgccagaggcgaagcggaaagcggctttcacaccgtgcgcactcaggcgatgccggtattcaatcgcgttatggcgaataccggcgacgccaatctggcgttattgcagaccctgctgcatctgatggcctggaatgacgataccaatctggtatcgcgcggtgggctggaagggctgaattttgttcagcagcaggcgcaaaagctgctgtgggaaggcggagtgctggccgatggcgggctggaagcgctgcgccagctcgatgatgaactgattgttcgccatcttagccctggcggcagcgctgacctgctggcggtaacctggttcctgtctggttttcctgccggggagatgttcctgcattaa

SEQ ID NO: 256508 - DNA, 408 bp, Klebsiella pneumoniae
atgaattttataattaaatcacttacctgttttatattacttagcccttttgtttctgccgcagccactgcatccgataaatggtctggttgtgcgcaaaaagaatatcaaattcaaaaacagctggagtatgccaaagcttacggaaatatacatagaatcagggggctggaaagcgcgctgacaaaagtacaacgctactgcacagacggtaaacttacttctgagtggcaagagaaggttgcagacaaggagagtaaggtccgcgagcgcatggaagaactacgccacgcccaggcttcaggcgatccagaaaaaatcagaaaaaaagagaagaagctacaagaagccaaaaatgagcttatggaagtacaatctggcctcaatcagtcactgaccaggcaataa

SEQ ID NO: 256509 - DNA, 864 bp, Klebsiella pneumoniae
atggataacggcatcaatcaggttattgattcttttattaaaggtcaggcggtaatcggcaaagtccatttttccacagagtccagaccggcttctgaaaaagcgctatgcgtcgattttccgcgcctcgaaatcatgcttgagggtcagcttcaggatccggcgattaaagccgattgcgcccggctcatgccgcacgatgtgctctatattccggctggtggatggaacgctcctcaatggctggtgccctccacgctgttaaccatcctgtttggtaaacaacagctggaattcgccctgcgccgctgggacggcggcgcgcttagcgtgctggataaacagcaggttccgcgccgcggcccccgggtcggctcttttcttctgcaggcgctaaatgaaatgcagatgcagccgcaggaacagcacacggcccgctgtatcgtcaccagcctgctcagccactgcgccgatctgctgggcagtcaggtgcaaacgtcatcgcgcagccaggcgctgtttgaagcgattcgtaagcatattgatgcccactttgccgatccgttaacccgggagtcggtggcgcaagcgttttatctctcgcctaactatctttcccatctgttccagaaatgcgggccaatggggtttaacgaatacctgaatcatattcgcctggaacaggccagaatgctgttaaaaggccacgatatgaaagtgaaagatatcgcccatgcctgcggttttgccgacagcaactacttctgccgcctgttccgcaaaaacaccgaacgctcgccgtcagagtatcgccgtcagtatcatagccagttgacggaaaaaaccgcttcgccggaaaactag

SEQ ID NO: 256510 - DNA, 663 bp, Klebsiella pneumoniae
atggaactctatctggacaccgcaaacgtagcagaagttgaacgcctggcccgtatttacccgctggcaggcgtgaccaccaacccgagcattatcgccgcaggcaaaacgccggtttgggatgttctgccgcgcctgcaaaaagccgtcggcccggaaggtattttgttcgcccagaccatgagccgcgacgcgcagggcatggtggaagaagccaagcgcctgagcaacgccgttcccggtattgtggtaaaaattccggtgactgccgaaggcctcgctgcgatcaaactgttgaaaaaagaaggtatccccacgcttggtacggcggtctatagcgcatctcagggcctgctggctgcgctggccggggcaaaatacgttgcaccttatgtaaaccgcgtcgacgcccagggcggcgacggcatccgcatggtccaggagctgcaatctctgctggagctgcatgcgccggaaagcaaagtgctggccgccagctttaagacgccgcgccaggcgctggattgcctgttagccggttgcgaagctattaccctgccgttagatgtagcgcaacaaatgatcggcacccctgcggtagagtcagccattgagaagtttgagcaggactggaataacgcttttggaactctgaacctgtaa

SEQ ID NO: 256511 - DNA, 1104 bp, Klebsiella pneumoniae
atggatcgcattattcaatcacccggtaagtacattcagggcgcggacgtaatttctcgccttggcggatacctcaaaccgctggctgagcgctggctcatcgttggcgataaatttgtactcggttttgccgaagaaaaactgcgtaaaagcctggcggatgccgatctggttggcgaaatcgcgccgtttggcggcgaatgctcacacaatgaaatcaaccgcttgcgtgatattgccggttccgcccgctgcacagccgtgctgggtatcggcggcggcaagacgctggataccgcaaaagcattagcacactttatgaatctgccggtggtgattgccccgacgattgcctccaccgatgccccctgcagcgcgctctctgtcatctataccgatgacggcgagtttgatagctacctgatgctgccgcgcaatccgaacatggtcattgtcgatacgcaaatcgttgccggagccccggcgcgcctgctggcggccggtatcggcgacgcgctggcgacctggtttgaagcgcgtgcctgctcccgcagcggcgccaccaccatggcgggcggcaaatgtactcaggcagcgctggcgctggctgaactgtgctacaacacgctgattgaagaaggtgaaaaagcgatgctggcggcagagcagcacgttgtgacgccagcgctggagcgggtgattgaagccaacacctacctgagcggcgtcggctttgaaagcggcggcctggcggctgcgcacgctatccacaacggcctgactgcgatcccggatgctcaccactactatcatggtgaaaaagtagctttcggtacgctcacgcagctggtactggaaaacgcgccggtagaagagatcgaaaccgtagcggcgctgtgccatagcgtcggactgcctatcaccctggcgcagctggatattaaagccgatatcccaggcaaaatgcgtaccgtagcggaagccgcctgcgcagaaggcgaaaccatccataatatgcccggcggcgcaacgccggatcaggtttatgccgcgcttctggttgccgaccaatacggtcaacgcttcctgcaagagtgggaataa

SEQ ID NO: 256512 - DNA, 789 bp, Klebsiella pneumoniae
atgcagtcatcagatcgaagaatgagcatttacgctattctgcagcaggacaaaaaagtcgtcgtcaatgagctcgccgcaaagttcgctgtcactaaaatgaccatccgtcgcgacctctccttctttgaaaaacaaggtattgttaaaacgacctacggcggagcctatttgaccagcggcgccagcgccggtcacagctttctgctgaactcgattcaaatggatgatgataagcatctcataggccagaaagccgccgaactgattgaagatggcgatacccttattatcgactgcggcgccacgccgctggcgttcgctcagtttattttagataaaagaatcatggtgataaccaattccttcccggtcgttaatctgctgaaagggcgtaaaaatattaaattgatcgtagcgcctggcgaatatgacgaggaggctcagggaatgatttctttcagtaccgccgacttctttcataacatccatgccgacaaggtcttccttggcactcagggaatcaacgacgagggcgagctgacggtagcaaccatggccggcgcgcacgtcaagcaaacgctgatgcgggccggaagacagaaaatcctgctggcggacaaaacgaaatttggccaaacgtttcttgcgggttacggtcgtctggcagaccttgacttcgccgtttgccagtccggtctttccgccgatattctctctctgatggacaggcaaaacgtacagctactgctggctgaaatcgcttctgatggcccggcgtccgcatag

SEQ ID NO: 256513 - DNA, 897 bp, Klebsiella pneumoniae
atggcagggaaaaatagcccgttggccttctgcggcctgattgtgctgacgcttatctggagctacagctggattgcgatgaagcaggtgacgctctatatcggcgcgttcgattttaccgcgctgcgctgtattttgggggcggctttgctgtttatcgttttgctgctgcgtggtcgcggaatgcggcccacgccatttggctacacgctggcgattgccctgctgcagacctgcgggatggttgggcttgcccagtgggcgctggtcagcggcggggccgggaaggttgcggttctaagctataccatgccgttttgggtggtcatgatggcggcgctatttttaggcgaacgcatgcggcggctgcagtatgccgcgataggcgtggcggcgctgggtttattgctggtgctgcagccgtggcagctcgatttttcgtcgatgaaaagcgccctgctggcaatcctctctggcataagctggggggccagcgcgattgtggttaagcggatgtatgcccgctatccgcgcgtggatttactggccttgaccagctggcaaatgctgtatggcgcgctggtgatgagcgccgtcgcctggctggtgccgcagcgcagcattgactggcagcctggggttttttgggcgttgggatatagcgcgattctggccacggcgctggcctggtgcctctggttatttgtgttacgcaatttgcccgccagcgtcgcggggctgagcaccctggcggtcccggtctgcggagtcctgttttcatggtggctcttaggggaaaacccgggtcaggttgaaggcgccggtattgtgctgattgtcctcgcgctgaccctaatcagcctcaagaagcgtgacgctcgggggcaggacgcataa

SEQ ID NO: 256514 - DNA, 888 bp, Klebsiella pneumoniae
atgagcttttttcacgccaatcagcgggaagccctgaatcagagcctggcggaagtacagggccagattaacgtctcctttgaattctttccgccgcgcaccagtgaaatggagcaaaccctctggaaatccatcgatcgcctcagcagcctgaagccgaagtttgtctccgtaacctacggcgccaattccggtgaacgtgaccgtacccatagcattatcaaaggtattaaggagcgtaccgggcttgaggccgcgccgcatctgacctgtatcgacgccagccgtgatgagctgcgtaccattgccaaagattactgggatagcgggatccgccatattgttgcgctgcgcggcgacctgccgccgggcagcggaaagccggatatgtatgccgctgacctggtgactctgctgaaagaggtcggggattttgatatttccgtcgcggcttatccggaggttcatcccgaagctaaaagcgcgcaggcagacttgctcaacctgaagcgtaaagtcgaagccggagcaaaccgcgcgattacccagttcttcttcgatgtggaaagctacctgcgtttccgcgaccgctgcgtctccgcgggcatcgatgtcgaaatcattccgggtattctgccggtctctaactttaagcaggcgaaaaaatttgccgacatgaccaacgtgcgtatcccgacgtggatggcgaaaatgtttgaaggtctggacaatgaccccgaaacccgccagctggtaggggcgaatatcgcaatggatatggtgaagattttaagtcgtgaaggggtgaaagatttccacttctataccctgaaccgcgcggaaatgagctacgcgatttgccacacgctgggcgtgcgtccggcgtaa

SEQ ID NO: 256515 - DNA, 906 bp, Klebsiella pneumoniae
atgacaaattcacgtttacagaatctggatattcgcctgctgcgctacttcgccatggttgcggaggaaaacaacatcagccgggcggcgcagcggctatttatttcgcagccgccgctgagccgtcatatccgccatctcgaggcgcagctggggctgacgttatttttgcgccataccaaaggcctgattcttaccgaagagggaagacgagtgctggacatggtccggccgctgctggcgcttcaggaacgcactctggcagcgctgaaccagctctcggcacactcgcagcagcctcttcgtctgggcctgacgaccgcttttgaacaaggagttttcgccgccgcagaagctgctttgggcgaacataaccgcgctttgcatattacccgtcagccctcgccggcgctggctcagcgggtgcgcaagggtacactcgatgcggcgctgatcgccctgccgctgaataccgatggccttcacctgcgcgctttatcgtattatgaaccgctcatcgcggccctaccggcagcctggccagaggtcggtcaggcggatctggcgttaagcgcgctcaatcaccggccgctgttttggtttaaacgcgagcgtaatcccgatttttttgactatacgcgacgcatttttgaccgggttggctatacgcccgcctacgtggaggagcccgccgagcacgatgttctgctggcgcggattgcgcgtggggaagggatgattttactgccggcatccttttctgctattcagcgtcagggtgtggttttctgtcctcttcaggatgccagtcagcagcttccgctcaggctgggcgtggtcacgatgccggcaaataagatgttgttggaagagttgaccgcagtacttgaaaaatcattgccttag

SEQ ID NO: 256516 - DNA, 1590 bp, Klebsiella pneumoniae
atgcaacaacgtcgtccagtccgccgcgccctgctcagtgtttctgacaaggccggtatcgtcgaattcgcgcaggcgctttccgctcgtggtgtcgagctactgtctacgggtggtaccgcacgcctgctggctgagaaaggtctgccggttaccgaagtctctgactacaccggtttcccggaaatgatggacggacgcgtgaagactctgcatccgaaagttcacggcggcattctcggccgccgcggccaggatgacggcattatggaacaacacggtatcgcgcctattgatatggtggttgttaacctgtatccgtttgctcaaaccgttgcccgcgagggttgctcgctggaagatgcggtagaaaacattgatatcggcggcccaaccatggttcgctcggcggcgaagaaccataaagacgtcgccatcgtggtgaagagcagcgactacgatgccattattaaagagatggatgcgaacgaaggctccctgaccctccacacccgcttcgacctcgccattaaagcattcgaacacaccgccgcctacgacagcatgattgccaactacttcggcagcatggttccggcctatcacggcgagagcaaagaagccgctggccgcttcccgcgcaccctgaacctgaacttcattaagaagcaggatatgcgttacggtgaaaacagccaccagcaggctgccttctatatagaagaagaaatcaaagaagcctctgtcgccacggcacagcaggttcagggtaaagccctctcctataacaacattgccgacaccgatgccgcgctggaatgcgtcaaagaattcagcgagccggcctgcgttattgtgaagcatgccaacccatgtggcgtagcggtaagcacctctattctggatgcctacgaccgcgcatacaaaactgacccgacctctgccttcggcggcattatcgcgtttaaccgcgaactggatgccgaaaccgcgcaggccatcatctcccgccagttcgttgaagtgatcatcgcaccgtctgcgacggaagaagccctgaagattactgccgcgaaacagaacgtccgcgttctgacctgcggtcagtggacgcagcgcgtaccgggtctggacttcaaacgcgttaatggtggcctgctggttcaggaccgcgatctgggtatggtcacagaaggcgaactgcgcgtggtttccaaacgccagccgaccgagcaggagctgcgcgatgcgctgttctgctggatcgttgcgaaattcgttaaatctaacgccattgtttatgccaaagagaacatgaccatcggaataggcgcaggtcagatgagccgcgtttactctgccaaaatcgccggaattaaagcaggcgatgagggactggaagtgaaaggttcggcgatggcctccgacgccttcttcccgttccgcgacggtattgatgccgccgctgccgttggcgtgagctgcgtcattcagcccggcggttctattcgcgacgaagaggtgattgccgccgccgatgagcacggcatcgcgatgatcttcaccgatatgcgccacttccgccattaa

SEQ ID NO: 256517 - DNA, 1293 bp, Klebsiella pneumoniae
atgaaagtattagttattggcaacggcggccgcgagcatgccctggcctggaaagcggcgcagtcgccaaaagtcgataccgtttttgtcgccccgggtaacgcgggcaccgccctggaaccagcgttgcagaatgtggctatcggcgtcaccgatattccggcgctgctgagctttgctcaaagcgagaaaattgatctgaccatcgttggcccggaagcgccactggtgattggcgttgtggatgcgttccgcgccgcggggctgaaaattttcggcccaacggaaggcgcggcgcagctggaaggctctaaagccttcaccaaagattttcttgctcgccataacattccgacagcggaataccagaacttcaccgaagtcgagcccgcgctggcatacctgcgtgagaaaggcgcgcccatcgttatcaaggccgacggcctggccgccggcaagggcgtgattgtcgccatgacgctggaagaagcggaagccgccgttcaagacatgctggcaggtaacgcctttggcgacgccgggcaccgcatcgtcattgaagagttcctcgacggcgaagaggcgagctttatcgtgatggtcgacggcgagcacgtcctgccgatggccaccagccaggatcataaacgcgtgggcaatggcgataccggcccgaacacgggcggtatgggcgcttactctccggcaccggtggtcaccgatgaggttcaccagcgcaccatggaacgcattatctggccaaccgtaaaaggtatggcagcggagggtaatacctacaccggtttcctctatgcgggcctgatgatcgacaaacagggcaacccgaaagtaatcgagttcaactgtcgctttggcgatccggaaacccagccgatcatgctacgcatgaaatcggatctggtggatctgtgcctcgccgcctgcgacggtaagctgaatgagaaaacctccgagtgggacgagcgcgcctcgctgggcgtcgtgatcgccgccggtggttatccgggcaactacagcaccggcgatgagatccacggcctgccgctggaagaaacggcagacggcaaggtcttccacgccggcaccagactcgctaatgacgatcgcgtgctgaccagcggcggccgggtactctgcgccaccgcactgggtcgcaccgttgctgaagcgcaaaagcgcgcttacgccctgatgagcgatatcagctgggacggcagctttagccgtaacgacatcggctggcgcgctatcgaacgtgagcaaaaccgctaa

SEQ ID NO: 256518 - DNA, 1332 bp, Klebsiella pneumoniae
atgagtggcgagcaggtcgatattctggtggtggacgatgacatcagccactgcactatcttacaggcgttgttgcggggctggggttatcgggttgcgctggcttacaacggcatacaggcgctggaacaggtgcgcgagcaggtgtttgatctggtgctatgcgacatccgcatggcggagatggatggcatcgaaacgctgaaagagatcaaaaccttgaatccgtcgattcccgttctgattatgacagcgtactccagcgtcgacaccgctgtggaagcgctgaaatccggtgcgctggactacctgattaagccgctggactttgacaagctgcagctgacgctatccgaggcgttggctcacacccggcagagcgagtctcccgttgccgggaccccggccgcccagtttggcatggtgggggatagcccggcgatgcgggcgctgctgaacaatatcgccctggttgcgccctccgatgcgacggtattaattcacggcgagtcgggcacagggaaagagctggtcgcgcgggcgctgcacgccagcagcgctcgcagccgccggccgctggtgatcctcaactgtgccgcgctcaacgagtcgttgctggagtcggagctgtttggccatgagaagggcgcctttaccggcgcggacaaacggcgagaggggcgcttcgttgaagcggacggcggtacgcttttcctcgatgaaattggcgatatttcgccgttgatgcaggtgcgtctgctgcgggcgattcaggagcgtgaagtgcagcgggtgggcagcaatcagaccctttcggtcgatgtacggctaattgccgccacccaccgggatttagccgaagaggtcagcgccgggcgttttcgccaggatctctactaccgcctgaacgtcgtgactatcgatatgccgccgctgcgtcatcgcagggaggatatcccccaactggcgcgctatttcctgcaacggtatgccgagcgtaaccgtaaagcagtacagggatttacgccacaggcgatggacttgctgatccactacgcctggccgggtaatattcgcgagctggaaaatgcggtggagcgggcggtggtcctgctgaccggagagtacatctccgaacgcgagctgccgctggcaattgccggtacgccagttgcggacgtgttgcacggtgatgatgttattcagccgctggtggaggtagagaaagaagcgatcctcgcggcgctcgaaaaaacgggcggcaacaaaactgaagccgcccgtcagttgggcattacgcgcaaaacgctgctggcaaagctcagccgttag

SEQ ID NO: 256519 - DNA, 1389 bp, Klebsiella pneumoniae
atgaacgtgatgcggttgtctaaggattccgtcgccgttgggctgagctggttgttaaccggccttatcttgctgctggtgtgcctgttttctgcgttaatcgtgcgtgactatggccgtgaaaatgaagccgcacgccagactatccaggaaaaaggcagcgtgctgatccgcgctcttgagtccggaacccgggtcggaatgggaatgcgtatgcatcattcccagctgcaggcgctactggaggagatggcctggcagcccggcgtgctgtggttcgcggtgacagatgagaacggtaaaattatcgcccatagcgacccgcggcgggtcggtgagtcgctctaccccgccagcaccctgcgagagctgaatatcggtagcgaggagcgctggcgccgcctcgaacaaccggagccggcgctggagatttatcgccagtttcgcccgcttaacggcggtgggcatcatatgcgcatgatgatgcgtcgcgaatctgccgatctccgtaatcaggcgccccaggtcatttttattgcctttgatacccgcgagctggatgccgaccatgctcgtggcctgcgcaatatggtcatcatgctctgcgcggcaggcgtagtcatgacggcaacggtgctggcgcagttctggttccgccgctatcagcgttcgcgcaagcagctgcaggaagcgacggcgcgaaaagaaaagctgctggcgctcggtcatctggccgcgggcgtcgcccatgaaatccgcaacccgctatcatccataaaagggctggccaggtatttcgccgagcggaccccagccgatggcgaagcgcatcagttggccctggtgatggccagagaagccgatcgcctgaacagggtcgtcagcgagctgctggaactggtgcgtccggcgcatttaaaatatcaatcggttgatttaaatgaagtcattacgcattcgcttcaactggttagccaggatgccgccagccgggcgatatctctgaagtttatcgcgcagcccgcgctatgccgcatccaggccgatccggatcgtttaaaacaggtgctgctcaacctttatctcaatgctatccatgccattggccgcgatggcgtgattacggtggcggtgagagagtgcggcgatgggcgagtaaaggtgagcgttgcggacagcggcaaagggatgacggcggaacagctacaggccattttcacaccgtacttcactaccaaggccgacggcaccgggctggggctggcggtggtgcagaacatcgttgagcagcacggcggaacaattgacgccgagagcactcccggcaagggcgcgctatttacgctctatttgccggttaatgggcaacagaaggatgaacaaggatga

SEQ ID NO: 256520 - DNA, 435 bp, Klebsiella pneumoniae
atgaaacggaacaaaaaaatgacgctgacgctgattgccctcgccgcgctgactttcggcagtagctcagcctgggcaaggcaccactggtataacggtaccggtatgggcccccagggctatagtcaactgacgaccgaccagcaggccactgcccagaagctgcataatgatttctatgagcaaacccgcgttttacgtcagcagctcatttcaaaacgctatgaatacaacgcgctgttaaccaccgataaacctgacagcgcgaaaatcgaatccgtcgcccaggagatggacgctctcggtcagaagcttgcccagcagcgggtgaagttcgatctcgcattagcgcaggcgggtattcctcgcggcgagaggatgggacgtggaggctgcggcggaggccgcggtcatatggggatgaaccactggtaa

SEQ ID NO: 256521 - DNA, 693 bp, Klebsiella pneumoniae
gtgtacagttttatcgaaggggcttgtcggccccttttgtctatctggcgccgcacgctggcgctggcgggcgtattgctgctcactgcctgcagccatgattcctctctcccgccgtttaccgccagcggttacgcggaaaaccagggggcgatgcgtatctggcgcaaagattccgacggcgaggtccatctccttgccgccttcagtccatggcgtcatggtaatacctcgaccagcgagtatcgctggcaggatggtcagctcgcgctgatcgagctcaacgtctacggcaaaccgccggaacatattcgcgcccggtttgatgcgcaaggcgaactcagctttatgcagcgtgaaatcgatgggcagaagcagcagctttccagcgatcaggttgcgctatatcgctatcgggcagagcaaatacgccagaccagcgatgcactgcgtcagggacgcgtcatgctgcgccaggggcggtggcatgctgacaggacggtaaccacctgcgaaggtcagaccgtgaagcctgacctcgatacgctggcgctggcgcatattgagcgtcgtcagaaccactcatccgtcgaggtgagcgtggcgtggctggaagcgccggaaggctctcagctgctgctggtggcaaacgaagacttctgtacctggcagccgaccgaaaaaagcttctga

SEQ ID NO: 256522 - DNA, 312 bp, Klebsiella pneumoniae
atgatcgccaatcaccccgaacgtgaacaaattcgcctcgaaaatgtgcttttcgccctcggtaacccgctgcggcttgagattatccggatccttgccgacggcagcgagcagagctgtaacgccctgcgtcatgaagatgtggcgaagtcgaccatgactcaccactggcgcgtcttgcgcgacagcggggtgatctggcagcggcctcaggggcgggagaatttgatttcgctgcgccgggaagatttagacgcgcgctttcccggcctgctggatacgctgcttaaggtgatgcagcaggagaagtaa

SEQ ID NO: 256523 - DNA, 1359 bp, Klebsiella pneumoniae
atgtcgcataacgctactccaaaaacctctcgcgtggaattacgtaaaacgcttacgttgattccggttgtaatgatgggccttgcctatatgcagccaatgacgctgttcgatacgtttggtatcgtctctggattgactgatggtcacgttgcgacggcttacgccttcgcgctgatcgccattctcttcacggcgctgagctacggtaaactggttcgccgttttccgtcggcgggttccgcttatacctacgcacagaaatccattagcccggccgttggctttatggttggctggtcatcgctgctggactatctgttcatgccgatgatcaacattctgctggcaaaaatttactttgaagcgctggtgccttccattccgtcgtggatctttgttgttgcgctggtggcctttatgaccatctccaacctgcgcagcattaagaccgtggcgaacttcaacaccctgatcgttatcctgcagatggggatcgtagcggtgattgttggcctgattatctacggcgttatgcacggcgaaggcgcgggcacgctgaccagcacccgtccgttctggtctgaaggcgcgcacgtggtgccgatgattaccggtgcgaccattctctgcttctcgttcctcggcttcgacggtatctcttcgctgtctgaagaaaccaaagacgcagagcgcgtgatcccgaaggctatcttcctgacggcgctgattggcggcctgatctttatcggggcttcctacttcctgcagctgtacttcccggatatctcgcgctttaaggatccggacgcatcgcagcctgaaatcatgctgtacgttgcgggcaaaaccttccagtggggcgtgctgattttctccagcgtcaccgtactggcgtccggcatggccgcgcatgcgggcgtttcccgtctgatgtacgtgatgggccgcgacggcgtgttcccgacgcgtttctttggttacgtgcatccgaaatggcggactccggcgtggaacgtactgctggttggcgcgattgcgctgctggcgattaaattcgacctcgtgacggcaacggcgctgattaacttcggtgcgctggtggcgttcaccttcgttaacctgtcggtgatctcacagttctggatccgtgaaaaacgcaacaagacgctgaaagaccacttcaactatctggttctgccggtgtgcggcgcgctgaccgtcggcgcgctgtggatcaacctggaagagagctccatggttctcggcctgatctggggcggtattggtctggtctacctggcctgcgtgaccaaaagcttccgcaacccggtaccgcagtacgaagacgttgcctga

SEQ ID NO: 256524 - DNA, 891 bp, Klebsiella pneumoniae
atgaaaccactgctggatgtgctcgtcattcttgatgccctcgacaaagagggcagttttgccgccgcctcggcaaagctctataaaacaccctccgcgctgagctataccattcataagctggaaagcgacctcaatattcaactactcgatcgcagcggccaccgggcgcgctttacccgtaccggtcagatgctgctggaaaaagggcgcgacgtgctgcataccgcccgcgagctggaaaagcaggctgtcaggctgcatcagggctgggaagacaggctggtgctgaacgttgatagcggtttcccgtttcacctgttggcgccgctgataacggcgttttatcgccagcatcacgccacccgtctggaatttcgccgcgataccctcgcagcaggctggcagaccctggcggaagggcgggcggatctgctgctcggggttcagagcgacccgccggcgctaagcggctacggttgtctgcttctcggtgaactgacgcaggtatttgtcgtttcgccccagcatccgctggcgcaaattaccgaaccgctgagctggcgcacgttgcgccgttatcgcgcgattgccaactgcggcttgttgccgcaggcagaaaatcaggacagcctgacggtattcgatctttccggccaactgacgctgctttgcgccgggctgggatggggctatttgccgctctttcaggtgcagtctttattagcgcgcggcgagctgcgaataattcaaaccaggatggttgcgccggtaaatcgcgcgtggattggctggcatgaagagggcggtggtctggcgggcgagtggtggcgagcagagatattagcaaatagtgctatccatcaggtctataatactaaaatcgtatga

SEQ ID NO: 256525 - DNA, 825 bp, Klebsiella pneumoniae
atgaagaaggtcgcaattgtaggattaggatggctgggtatgccgcttgcgctgtcgttgatgtcgcggggatggcaggtcaccggcagtaagaccacccaggatggcgtggaggcggcgcggatgtgcggtatcgacagctacccgctgcgtctggagccgcagctggtctgcgacgctgaggacctggatgcattaatgaacgtcgacgcgctggtgattaccctgccggcgcgccggaccgggccgggagacgacttctatcgtcaggcggtacaggaaatcgttgataccgcgctcgcgcatcacgtgccgcgcatcctgtttaccagctcgacttccgtctacggcaacgccagcggcacgctgaaagagagctcgccccgtaatccgcaaaccgccagcggacaagtgctgaaagagctggaggactggctgcacaatcttcctggcacctcggtggacattctgcgcctttccgggctggtggggccgtctcgtcacccggggcgcttctttgccggaaaatccgcgccagacggccagcacggcgtgaacctggtgcatctccaggatgcgatcgccgcgatcgagctgttattgcagtccccgaaaggcggacgcatctataatatatgtgcgcctaagcatcccgcgcgcggcgtcttttatccgctgatggcccgcgagcttgggcttcccgttcccgtcttctctgataacccggaaaacggtagcggcaagatcgtggatggcagccgtatttgcaacgaactggggtttgaataccaatatcccgacccgctggtgatgccgatggagtga

SEQ ID NO: 256526 - DNA, 381 bp, Klebsiella pneumoniae
atgatgacgcaactgctactgcttcctttattacaacagcttggtcagcagtcgcgctggcagctctggctgacaccacagcagaagctgagtcgcgaatgggtgcagtcatccggtttaccgctatccaaggtgatgcaaatcagtcagctctcccctgctaatacgctcgaatcaatggttcgctcactgcgcacgggaaactatagcgtggtcattggctggctgtcggaagaactcaccgttgaggaacatgaacgactggttgccgctgcagaagaaggtcacgcgatgggctttatcatgcgtccggtaagaaataccgctcagcctggcagacaacattccgggctaaaaattcactcaaacctgtatcattaa

SEQ ID NO: 256527 - DNA, 717 bp, Klebsiella pneumoniae
atgttgctgtataaagggaactcccttattttcttattagcggatccgttagcaaatttatgtcttatttacatgattaacaaaggaataatcatgaagaaactcgtatgtcttaggatccatcagtttcgggcatgtttgtctccattaggaaaaataagctgtcggcccttatttggtggctatagcctggcgatagataataccgtgtttgccatgatggctgagggggagatctatcttcgggtttgtgagcagagtgcgcagtatcgcgtggcgcataaaaacccgctgttgaagatgcagaagaatggtcgtctggttgcgcttaagtactatcatatagatgaagggctttggcgtgacagcaaaatgctttttcatttatcagcgctatcattacagaccgctcgtaatgaaaaacatcggcagcgacattccggaagattaaagaatcttccaaatattagttttcacatggagctccagttgattaattcaggtatcaaagatgaattaacgctgcgaaaaattggcgcgaaagaagcctggctcagactacgaaaaatgaataaagcgctaacggtaaacgtcctttattcattagagggagctattgcgggcgtgcatgcggccacgctcccgacgcaacagcgtcaggagcttgaggagtgggcggcggtacaggtacaggagatggaggcctactcaggttga

SEQ ID NO: 256528 - DNA, 2136 bp, Klebsiella pneumoniae
atgctcagccccctgctacgccgctatacctggaacagtgcctggttatattacatcaggatattcatcgcactctgcggtacgaccgcatttccctggtggctcggcgaagtaaaactcaccatccccttaacgcttggcgtcgtggccgcggcgctgactgacctggacgatcgtctggcaggacgtctgcgtaatctggccattacccttgtatgcttctttatcgcttcggcctcggtggagcttctcttcccctggccctggttattcgcggcaggattaaccgtttccactatcggctttattttgcttggtggtctgggacaacgctacgccaccatcgcgtttggcgcgctattaattgccatctacaccatgttgggggtaacgctttacagccaatggtatctccagccgctgtttttgctggctggcgcggtgtggtacaacctgctcaccctcgccgggcatctgattttccctatccgtccccttcaggacaatctggcacgtagctatgagcagctcgcccgctatctggagcttaaatcccggctattcgatccggatatagaagatgaaagccaggccccgctctatgacctggcaatagccaacggccagctggtgactacgctgaaccagaccaaagtttccctgctgactcgtctgcgcggagatcgcggccagcgcggtactcgccgcacgttacagtactatttcgtggcgcaggatatccatgaacgtgcgagttcatcacatattcagtaccaaacgctacgcgaccattttcgttatagcgatgtgatgttccgctttcagcgtatgctatcaatgcaggcgcaggcctgccagaaactgtcgcgtgccattctgctgcgcgagccctacctgcacgacactcattttgagcgcgcttttatgcatcttgacgcagcgctcgatcgcgttaaggccagcggcgcgccagcggaacagattaaagcgctgggttttttgctgaataacttacgggctattgacgcccagctggcgacaattgaatcggtccagaccaccgaacagtccattcacagcacggaaaacctgttagccgacgaccagcctaacggatttagcgatatctggctgcgcttgcgcagtaatatgtctcctgagtcagccctgtttcgtcatgcggttcgaatgtcgatagtcctgtgcgcaggttatgcctttatccaattgaccgggctgaaccatggctactggatattactgaccagcctgtttgtttgtcagccaaactataacgccactcgccatcggctggcgttaaggataatcgggaccttgatcggtgtggccatcggcctgccggtactgctcctcgtcccgtccgttgaaggccagctgcttttgattgtcctgactggcgtgctgttcttcgctttccgtaatgtgcagtacgcccacgcgacaatgttcattacgctccttgtcttgctctgttttaacctcctgggagaaggtttcgaagttgccctaccgcgcatattcgacactctgattggctgcgctatcgcctgggccgcagtgagttttatttggccggactggaaattccgcaatctccctcgagtgctcgagcaagcaatcaatgccaactgccgatatttagatgccattcttgagcaatatcaccaggggcgcgacaaccgcctggcctatcgtgttgcacgcagagccgcgcataaccgggatagcgaactggcctctgtcgtatcgaacttatcaacagaacccaaagcgggctcacaaacgcgggaaactgcttttcgtttgctctgcctgaaccatacctttaccagctatatctctgctctgggagcccacagggaaaagctgacaacgccagatattctggcgctgctggacgatgccgtgtgctatgtggatgacgcgctgcaccattcgccagccgatgaactacgggtacagcaggctttagcaagcctgcagacccggatccaacatcttgaccctcgcgccgacagcaaagagcctttagttctgcagcaaattggactgctgctggcgctactgccagaaatttgtcggctacagcgacaggttgagattcaacctgagtag

SEQ ID NO: 256529 - DNA, 447 bp, Klebsiella pneumoniae
atgcgtaccgttctgaatattttaaactttatccttggcggattcgccaccacgctcggctggcttctggcgacgctggtcagcatagtactgatttttacgctgcctctcacccgctcctgctgggagataacaaaactctctcttcttccctatggtaatgaagccattcatgttgatgaactcgaccctcagggtaagaatagcctgcttaacgcgggcggaacgttgttgaatattttatggtttattttcttcggctggtggttgtgcctgatgcatatcttttgtgggatcgcccagtgtctgaccatcatcggcattccggtaggcatcgccaattttaaaatcgccgcgattgctttgtggccggtaggccggcgagtcgtttccgttgagaccgctcgtgctgcgcgtgaagccaacgcgcgtcgccgctttcagtaa

SEQ ID NO: 256530 - DNA, 2034 bp, Klebsiella pneumoniae
ttgggcaaacgcatggctcaacacccttatgacagggtgcaacttcttaatgccggagtaaaggtttccggtgatagccatgaatatcttatacctttcaatcagttattatctattcattgcaagcgtgggctggtgtggggagagctggaatttatcctcccgggcgagaaagttgtgcgattgcatggtaccgaatggaccgaaactcagcgtttttaccatcatctgaatgctctctggcagcagtggagcgcggaaatgagcgagatttccgccgatctgctgcgccagcagttggctgatgtggcgcgttcaagcgccgagggtaaatggttgacgcgtcagcaggtgtccgatattcagcagaaaattcgccatgcccttagcgggctccccgtgccgacaagccgccttgagggatttgaaaactgccgtgaattatggcggcagtgtcagagttggttgggggatacggaaaaggccaggcttgagcataaccaaaaatttactgaatcaatgctggaacaatatcggggattttttgctgcagttgaatcatcgccgctgaatccggctcaggcgcgcgccgtggtgaacggcgagcgttcattgctggtactggcaggggccggaagcggtaaaacctctgttttagtggcgcgagcaggttggctattgacccggggcgaagcggcagctgagcaaattttgctgctggcttttggtcgacaggccgcgcaggagatggatgagcgcattcgcgaacgcctcggaaccgacgagatctccgcgcgcacttttcatgctctggctttgcatattattcagcagggcagtaaaaaagcgccgatgattagcaagctggaaaacgacagcgctgcgcggcaaaaacttttgctcgaaagctggcagcagcagtgtcaggagaaaaaagcgcaggcgaaaggctggcgactgtggctggaggaagaaatgggctggccgatccctgaaggggatttctggcaggataaaaagctgcagcgccgcatcgccagccgcctcgatcgctgggttagcctgatgcgcatgcatggcggctcgcaggctgagatgatcgccggggcgcctgaggaggtacgcgatctttttagtaagcgcgtcaagctgatggcccctttactaaaagcctggaaaacggcgttaaaagatgaaaatgccgtcgacttctccggtctgattcatcaggcgataaatattctcgataaaggccgctttgtcagtccgtggaagcatattctggtggatgaatttcaggatatctctccgcagcgggcgtcactactcgccgcgttacgtcgacaaaatacgcagaccacgctgtttgccgttggcgatgactggcaggctatctatcgttttagcggtgctcaactctctttgacgacggcttttaatcactattttggcgaaggggattgttgcgcgctggatacgacctaccgatttaatagccggataggcgaggtcgcaaacggatttatccagcaaaacccgcatcagttgacgaaaccactcaacagtctgattgcaggcgacaaaaaagcggtgacgttgttagcggaggataaactcgacgatctgctcgataaaatgagcggttacgtcaagcgagaacagcggatcttgctgttagcgcgttaccatcatttgaagccagcggcgctggaaaaggctgcaacacgctggccccatcttcagctcgatttcatgactattcatgccagcaaagggcagcaagcagattacgtcattatccttggtcttcaggacggtgatgatgcgtttccggcttcggcgcgtgagtcgattatggagcaggcactgctaccacaaccggaggattttgccgatgcagaagagagacgtttgctgtatgtcgcacttacgcgcgcgcgtctgcgggtctggttgttgtttaataaagagcagccgtcaccgtttgttgatatgttgaaggcgctggacgtgccggttgcgagaaagccgtaa

SEQ ID NO: 256531 - DNA, 273 bp, Klebsiella pneumoniae
atgctgagcggcccaatgggcggcgaccagcaggtaggagccctgatatcagaaggtaaaattgatgttttgatttttttctgggacccgctgaatgcggtgccgcatgaccctgatgttaaagcgttactccgtctggcaaccgtgtggaatattcccgttgcaacgaatgtctcgaccgccgactttatcatccagtctccccactttagcgatccggtcgatattttgattcctgattaccagcgttatctcgctgagcgtctgaaataa

SEQ ID NO: 256532 - DNA, 591 bp, Klebsiella pneumoniae
atgaacgtggtgatcctcgataccggctgcgccaacctcaattcggtgaaatctgcggtgagccgccacggctacgagccgcaggtcagccgtgacccggacgtggtgctgcgcgccgataagctgtttctgccgggtgtagggacggctcaggcggcaatggaccagctgcgcgaacgggatttaatcgatctgattaaagcctgcacccaaccggtgctgggcatttgtctcggtatgcagctgctgggaaaacgcagcgaagagaataacggcgtcgacctgctgggtattatcgaccaggacgtgcccaaaatgaccgaccacggcctgccgctgccgcatatgggctggaaccgggtatatgctaaagcgggcgatcgtctgtttcgcggcattgaagacggggcgtatttttacttcgtccacagctacgcgatgccggtcaacgttaacactatcgctcagtgcagctacggcgaggccttcaccgcggcggtacagaaagataacttctttggcgtccagttccaccctgaacgctccggcagcgccggggcgcagctgctgaaaaatttcctggagatgtga

SEQ ID NO: 256533 - DNA, 738 bp, Klebsiella pneumoniae
atgatcattcctgctttagatttaattgacggtacggtcgtccgtctccatcagggcgattatggccagcagcgcgactacggcaacgatccgctgccgcgcctgcaatcctatgccgcgcaaggagccgaagtactgcatctcgtcgatctgaccggggcgaaagatccggcgaagcgccagatcccgctgctgaaaacgctggtggctggcgtgaacgtgccggtgcaggtcggcggcggcgtgcgcacggaagaagacgtggccgccctgcttgacgcgggcgtggcgcgcgtggtggtgggctcgacggcggtgaagtcgccggaagtggtgaaaggctggtttaagcgttttggcccgcagcatctggtgctggcgctggacgtacggatcgatgcgcaaggcagcaagcaggtggccgttagcggctggcaggagaattccggcgtaaccctggaggagctggtggagagctatcagtccgtcggcctgcagcacgtgctatgtaccgatatttcccgcgacgggacgctggccgggtctaacgtctcgctgtatgaagaagtctgcgcccgctatccgcaggtggcgtttcagtcctccggcggcattggcgatctgcatgatatcgccgcgctgcgcggaacaggggtgcgcggggtgattgtcggccgggcgctgctggaaggtaaatttaacgtaacggaggccattcaatgctggcaaaacggataa

SEQ ID NO: 256534 - DNA, 234 bp, Klebsiella pneumoniae
  misc_feature (159)..(168): n is a, c, g, or t
atgctggcaaaacggataatcccctgtcttgacgttcgcgacggccaggtagtgaaaggcgtgcagttccgtaatcacgaaatcatcggcgatattgtcccgctggcaaaacgctatgccgacgaaggcgcggatgagctggtgttctacgatctgtcnnnnnnnnnnatatcaccgcctcgagcgacggtcgcgtggtggataaaagctgggtatcgcgcgttgcggaagtga

SEQ ID NO: 256535 - DNA, 600 bp, Klebsiella pneumoniae
gtggtggataaaagctgggtatcgcgcgttgcggaagtgatcgacattcccttctgcgtcgccggcggcattaagtcgctggaagaggcggcgcaaatcctctcctttggcgcggataaaatctccatcaactcccctgccctggcggacccgacgctgattactcgcctggccgatcggttcggggtgcagtgtattgtcgtgggtatcgatacctggtttgacgccgagagcgggaagtatcacgtcaatcaatataccggcgatgagagccgtacgcgggtgacgcagtgggaaacgctggactgggtgcaggaagtacaaaagcgcggggccggcgagatcgtcctcaatatgatgaatcaggacggcgtgcgtaacggctacgatctgcagcagttaagcaaggtacgcgccgtgtgccacgtgccgctgattgcatccggcggtgccgggactatggagcacttcctggaagccttccgcgacgccaacgtcgacggcgcgctggccgcctcagtgttccacaagcaaattatcaatattggtgaactgaaaacgtacctggcagcacagggcgtggagattagggtatgttaa

SEQ ID NO: 256536 - DNA, 597 bp, Klebsiella pneumoniae
atgttaagtgaacagctggattggcaaaaaaccgacggtctgatgccggtcatcgtgcagcacgccgtttccggggaagtgctgatgctgggctatatgaatcaggatgcgctggcgaaaaccgaagagaccggtaaagtgaccttttattcacggaccaaacagcgtctgtggaccaagggggaaacgtcgggtaattttctcaacgtggtgagcatcaccccggattgcgataacgacaccctgctggcgctggtaaatccgattggcccaacctgccataaaggcacatcgagctgcttcggcgaaaccggccaccagtggctgtttctctaccagctggagcaactgttggccgaacgcaagcacgctgacccggagagctcttacaccgcgaagctgtacgctagcggcaccaagcgcattgcccagaaggtgggagaagaaggcgttgagaccgcgctggccgccacggtgcatgaccagttcgagctgaagaatgaagcgtcggatttgatgtatcacctgctggtgctgctgcaggatcaggggctgaatttaacggacgtgattaacaatcttaagagccgtcactga

SEQ ID NO: 256537 - DNA, 1146 bp, Klebsiella pneumoniae
atgaaaattatatttgcaactgagccaatcaaatatccattaacgggtatcggtcgttattccctcgaactggtaaaacgattggcggtggccagcgaaattgaagagctaaaattatttcacggctcttcatttattgacagcattccccagattgaaaataaagcggatacccgagccagcaatcacggtaagctggcggcttttttacgccgtcagccgttattgattgaagcctatcgcgtgttgcatccgcgtcgccaggcgtgggcgctgcgcgattataaagattatatctatcatgggcctaacttttatctgccgcatcgtctggaacgtgccgtaaccacatttcatgatatctccatattcacctgtccggaatttcatccaaaggaccgggtgcgttatatggaaaagtcactacgcgaaagtctggacacggcaaagcttattttgacggtatctgacttttcccgcagcgaaattatccggctgtttaactatcctgccgatcggatcgtaacgacccatcttgcctgcagcggcgactatattccgcgcagcccggatgaatgtctaccggttctgcagaaatatcagctggagtggcagcgctacgcgctttacatcggcacgatggagccgcggaaaaatattcgaggcctgttgcaggcgtaccagcttctgccgatggagacgcgcatgcgctacccgctgatcctcagcggttaccgtgggtgggaagatgatgcgctgtggcagatcgttgaacgcgggactcgtgaaggatggatccgttatctgggctatgtaccggatggcgatctcccgtatttatatgcggcagccagaacctttatttatccttcgttttatgaaggattcggattacctattcttgaagcaatgtcttgcggtattccagtagtatgctccaatgtcacatcattacctgaagtggcgggggatgcggggttgttatccgaccctaacgatgtagacgcgataagcgctcatatattgcaaagtctgcaggatgaatactggcgggagatagcagtagcgcgcggttttattcaggcacaacagttttcgtgggaaacctgtacggcccagacgatcgatgcctataaattactctaa

SEQ ID NO: 256538 - DNA, 1485 bp, Klebsiella pneumoniae
atggaagaggctttatttaatccgcaggatgttcacgatatttgccgtgttatgcaaagggctttaaccgataatgcgttctactcagcgttgaaagctcatgctccgaagcaggcggcaaaattcacatgggatcacaccgcgcaactcgcattaaagggatttgaaaggcttgttgatacggcttctgcttcagagcctctggatatcactagtttcaccgcaaacaccattaatcaaattaaaaatattgcggaattaggtgaagccgaacgcttacaaacagcctgggctattactcgtaacagctttgccacgcatcagcgcaagctgctggttgatatttctgtccttgtcgaacatgatgcgaaaacggggattcaacgagtttcccgtagtatacttagtgagttactgaaatcaggcgttgctggttacaccgtcagtgcggtttattatcgaccgggtgaatgctatcgttatgccaacgaatatctgaatacccattttaacggccagttcgggcctgatgaaccggtactgtttaccaaagatgatattctggttgctaccgatctgactgcacatttgtttccagaacttactgcccagctggattttattcgtttatccggcgccagggtttgttttgttgtgcatgatatcttgcctctgagaaggccggagtggagcgatgagggaatgcagcgcgttttccccatttggttatcctgcattgcgcagcacgctgaccgtctgatttgtgtttctgcaagcgtagcagaggatgtgaaatcgtggattgctgaaaatgccaactgggttaaacctaatccattgctgcaggtgagtaatttccatcttggcgccgacctggatgccagcgttccttctgtgggtatgccggataacgcgaatgacttgctgactaagatggctgctgaaccctcctttattatggtgggaacgatggaacctcgcaaaggccatgcgcagacgctagcggcatttgaggaattgtggcggcagggcaagaactacaatctgtttatcattggtaaacaggggtggcatgttgatgatttatgtgaacgtttacgtcaccacccacagctaaataagagattattttggctacaaaatattagcgatgagttccttgcgaagttgtatgctcagtctagtgcgttaatcttcgcatctctcggcgaaggatttgggctaccattaattgaagccgcgcagaaaaaattaccggtaatcattcgtgatattccagtgtttaaagaaattgctcaagaacatgcattctatttctctggtgaacagccgggagatatttcaacagcgattgacgagtggttggagttatatcggaaaaatgctcatcctcgctctgaaaaaatcaactggttgacatggaagcaaagtgcagaattcctggtggagaatcttccggttattaaatctgacgcgaataaataa

SEQ ID NO: 256539 - DNA, 1059 bp, Klebsiella pneumoniae
ttgacttttctcgccgcgcaattttcagcccaggtactggactggtacgacaaatacggacgtaaaaccctgccctggcaaatcggcaagacgccctacaaagtatggctctccgaggtgatgttgcaacaaacgcaggtggcgacggttatcccctattttgagcgctttatggcgcgtttcccaacaattaccgatctggccaatgcgccactcgatgaagtcctccatctgtggaccgggctgggctattacgcccgcgcgcgcaatctgcataaagcggcgcagcaggtggccaccctgcacggcggaaacttcccgcaaacttttgatgaagtcgccgcgctgccgggcgtgggtcgttccaccgccggggcgattttatccctttctctcggtcagcattatccgattctcgacggcaacgtgaagcgcgtgctcgcgcgctgctatgctgtcagcggttggccggggaaaaaagaggttgagaaacgcctgtgggatattagtgaggacgtgacgccagcgaaaggggttgagcgttttaaccaggccatgatggacctcggggcgatggtgtgtacccgctctaagcccaaatgcgagctctgtccgctgaataacggctgcgtagcctacgccagtcattcatgggctcaatatccaggcaaaaaaccgaaacagacgatcccggaacgtaccggctatttcctgctgatgcagcacggcgatgaggtatttctctgccagcgcccgccggtgggtttatggggcggattgttctgcttcccgcagtttgaagatgaagatgcgctgcggcagtggctggcgcagcgccagattaaggccgataatctgacgcaattaaccgcgtttcgccacactttcagccatttccatctggatattgtgccgatgtggcttacagtgcactcatccggcgcatgcatggatgaagggggcgcactctggtataacttagcgcagccgccgtccgtcggtctggcggcccccgtggagcgcttgttgcaacagttaaaagccggagcaccggtttag

SEQ ID NO: 256540 - DNA, 276 bp, Klebsiella pneumoniae; identical to SEQ ID NO: 172900

SEQ ID NO: 256541 - DNA, 1086 bp, Klebsiella pneumoniae
atgatgaaaaaatacttagcgctagcgctgattgcgcctttgctcgtttcgtgttccagctcaaccaaaaaaggcgccgagtataacgaggcgtgggtgaaggacaccaacggctttgatattctgatgggccagttcgcccataacatcgagaacatttggggttataacgaagttctgctcgccgggccgaaggactacgtcaaatacaccgaccagtatcaaacccgcagccacatcaactttgacgccgggacgattaccgtcgaaaccatcgccggcactgacccggccgggcgtctgcgccaggcgattattaaaaccctgctgatgggcgatgaccctaactccatcgacctctattccgacgtcgatgacattcagatctcaaaagaaccgttcctgtatggtcaggtcgtggataacaccggtgagtcgattcgctgggagtggcgcgcctcacgctttgcggactacctgctgcaaacgcgtctgaaaagccgcagcaacggtccgcgcatgatctacagcatcaccatcaacctggtgccgaaccatctcgacaaacgtgcgcataaatacattggcatggtccgtcaggcgtcgcgcaaatatggcgttgatgagtcgctgatcctggcgattatgcaaaccgaatcgtcctttaacccctatgcagtcagccatgccgacgcgctggggctgatgcaggtggtgcagcacagtgccgggaaggatgtgttccgctcgcaggggaaatccggcctgccgagccgcagctatctgttcgatccggccaataatatcgataccgggaccgcttatctggccatgctgaacaacgtctatctggccggtattgctaaccccacctcgcgtcgctatgcggtgattaccgcctataacggcggcgcgggcagcgtgctgcgggtcttctccagcgataagattcaggccgcgaatatcatcaataatatgacgccgggcgacgtttatcagaccatcaccagccgtcacccatccgccgaatcgcgccgttatctctacaaggtaaacaccgcgcaaaaaggctaccgccgcaagtaa

SEQ ID NO: 256542 - DNA, 1257 bp, Klebsiella pneumoniae
atgaatcttaagctgcagctcaaaatactgtcgttcctgcagttctgcctctggggaagctggctgaccacgctcggctcatatatgttcgttaccctgaagtttgacggtgcggccatcggagctgtttatagctcgctcggtatcgctgcggtatttatgccgacgctgcttggtatcgttgccgataaatggatcagcgccaaatgggtttacgccatttgccatctggtcggcgcgctgacgctgtggctcgccgcccaggtcactacgccgggcgagatgttcctcgtcatcctgcttaactcgctggcctatatgccgacgctggggctgattaacaccatttcctactaccgtctgcagtctgcgaacatggatatcgtgaccgatttcccgccgattcgcatctggggcaccatcggttttatcctcgccatgtggggcgtcagcttctccggctttgagctgagccatatgcaactctatatcggcgcagcgctctccttgctgctggtgctcttcactctgacgctgccgcatattccggtggccaatcagcagaaaaaccagagctggaccgccatgctgggccttgatgccttcgcgctgtttaaaaacaaacgtatggcgatcttctttattttctcgatgatgctgggcgccgaactgcaaatcaccaatatgttcggcaacaccttcctgcacagctttgataaagatccgctgttcgccagcagctttatcgtgcagcacgcctcggtgatgatgtcgatttcgcagatctcggaaaccctgttcattctgaccatcccgttcttcctcagccgctacggcatcaagaacgtgatgctgattagtattgtggcgtggatgctgcgcttcggcctgttcgcttacggcgacccgactccgttcggcaccgtgctgctggtgctgtcgatgatcgtttatggctgcgccttcgacttcttcaatatctcggggtcggtgtttgtggaaaaagaggttcgcccggaaatccgcgccagcgcccagggaatgttcctgatgatgaccaacggtttcggctgcatacttggcgggatggtgagcggcaaagtggtggagcactttaccgtcgaagggattaccgactggcaaaccgtatggctgattttcgccggctattcgctggttctggcgtttgctttcgtcgcgctgtttaaatacaagcacgttcgcgtaccagccggtgcgcagaccgtcgtacattaa

SEQ ID NO: 256543 - DNA, 2187 bp, Klebsiella pneumoniae
atgccctggcctaagccttttactctccggaaacgggtattcgcgctcatgaaatcaatgcacattgccgccagccgcgagctggtatcccacctgtccacccaccgtcgcgtggtggccctggacagtactgattttaccgatgtggcggcagtcgtcattaccgtggcggacagccgcagcggcatccttgcgttgctgaaacgcacgggctttaacctgccggtctatctgttcagcgaagctgagcacgaaaaaccagaaggcgtgacggccatcgttagcggcaaagagcaggagtggctcgaactggaagccgccgcctgcgactatgaagggaacctgctgccgccgttcttcgatacgctgactcagtacgtagagatggataacagcaccttcgcgtgccccggccatcagcacggcgccttctttaagaagcatccagcggggaggcagttcttcgacttctttggtgagaacgtctttcgcgccgacatgtgcaacgccgacgttaagcttggcgatctgttgattcatgaagggtctgcgaaacacgcgcagaagttcgcggcgaaggtcttcaacgccgataaaacctattttgtccttaacggtacctcggcggcgaacaaagtggtgactaacgcgctgctgacccgcggcgatctggtgctgtttgatcgcaataaccataaatcaaatcatcatggggcgctgattcaggcaggcgcgacgccggtctatcttgaagcatcgcgcaacccgttcggttttatcggcgggattgacgatcgctgcttcgatgaaaaatacctgcgcgatctgattcgcgagacggcgccggaaaaagccgatacgccgcgcccgttccgccttgcggtgatccagctcggaacctatgacgggacggtatataacgcccgccaggtggtcgataaaatcggcagcctgtgcgattacatcctgtttgactcggcctgggtcggctacgagcagtttattccgatgatggccgactgttcgccgctgctgctggacctgacgccgaatgacccgggcatttttgttactcagtcggtgcataaacagcaggccggtttttcgcaaacttcgcagatccataaaaaggataaccatctgcgagggcaggcgcgtttttgcccgcataagcggttgaataacgcctttatgctgcatgcctcgaccagcccgttttatccgctgttcgcggctctcgacgtgaatgccaaaatccatgaaggggagagcgggcgccgcctgtgggccgaatgcgtggcgctgggtattgacgcgcgcaaagcgattatcgctaactgcaaaatgatccagccgtttattccgccaatggtcgcgggacgcccgtggcaggatcaccccaccgaaaccatcgcccgcgagcggcgcttctttagctttgaaccgggcgcgcgctggcacggctttgagggctatgccagcgaacagtacttcgttgacccctgtaagctgctgctgacgacgccaggaatcgatgcgcagagcggggaatatactgattttggcatcccggcgaccattctggcccactatctgcgcgaaaacggcattgtgccggagaagtgcgatctgaactctattctgtttctgctgacccccgccgaaagcgcggagaagctggcgcaactggtggcgatgcttgcccagtttgagcagcatatcgaatcggatacgccgctggccgaggttctgccgagcatcgttaacaaatacccggtgcgctatcgggactataccatccgcgagctgtgtcaggagatgcacaacctgtacgttagctttgaggtgaaggatctgcaaaaagagatgttccgcaagcagagcttcccgcgggcggtcatgaacccgcaggacgccaaccgcgagtttattcgcggtaacgtcgaactggtgcgcttaagcgaagcggaagggcgcattgcggcggagggcgcgctaccgtatccaccgggcgtgctgtgcgtcgtgcctggcgaaatctggggcggggcggtgctgcgctattttctggcgctggaggagggcgtcaatatgctgccaggcttctcgccggagctccagggggtctatagcgaaacggactctgacggcattaagcgtctgtatggttatgtgctgaaagcataa

SEQ ID NO: 256544 - DNA, 717 bp, Klebsiella pneumoniae
ttggttacagggccatttattaacgccggtgcggtccttttgggcggcgtacttggcgcactcttaagtcaaagattgccggaacggattcgtacatcaatgacctctatttttgggctggcgtcgctgggcatcggtattctactggtgatcaaatgcgccaacctgccggtgatggtgctttcaacgctggtgggcgcgctgttcggcgaagtatgtaatatggagaaaggcattaatacgctggtgagtaagcttcagcagctgctttcgccaaaaaagggccagataaagagttcggcgcatgagtcatatattcaaagctacgtcgcgattatcgtcctgttctgcgccagcggaaccgggattttcggcgcgatgcgcgaaggaatgaccggtgacgccagcattctcattgccaaagcgtttctcgacttctttaccgccaccattttcgcctgcaccctggggctggcggtctcggccattagcgtgccgatgctggccatccagctggcactggcggcctgcgcatcgttgattatgccgttaaccacgccgatgatgatggcggatttcagcgctgtcggcgggatgctgctggttgccaccggtttgcgcatctgcggaattaaaatgttcgccgtggtgaatatgctgccggccctggtgctggcgatgccgatttcggtagcctggacggcgtttttcgcctga

SEQ ID NO: 256545 - DNA, 1761 bp, Klebsiella pneumoniae
atgactcaaacgtttattcccggcaaagatgccgccctggaagattccatcgctcgcttccagcagaagttgcacgacctcggatttgatattgaagaggcctcatggctcaacccggtaccgcacgtctggtcagtgcatatccgcgataaagagtgcgctctgtgcttcaccaacggcaaaggcgccaccaaaaaagccgcgctggcctcggcccttggagagtactttgagcgtctctcgactaactatttttttgccgacttctggctgggcgagaccatcgccaacgcgcctttcgttcactatccgaatgaaaaatggttccctttaaccgacgatgacgaagtaccggaaggcctgctggatgcccgcctgcgcgcgttctacgatcctgacgatcagttaaccgccagcatgctggtcgatctgcagtcaggtaatgacgatcgcggcgtctgcggtttgccgttcacccgtcagtcagatggcgaaacggtctatattccgatgaatatcatcggcaacctgtacgtttctaacggaatgtccgcgggcaacacccgcaacgaagcccgcgttcagggcctctcggaagtgttcgaacgccatattaaaaaccgcattatcgctgaaagtatcagcctcccggagatcccggcggaggtgatggcgcgctatccgggcgtggttgaatccatcaacaagctggaggccgaaggtttcccgattttcgcttatgacggttcgctcggcggcaaatatccggttatctgcgttgtgctgtttaaccccgcaaacggcacctgtttcgcctcgtttggcgcacatcctgatttcggcgtggcgctggaacgtaccgttaccgaactgctgcagggccgcagcctgaaagatctcgacgtcttcacgccgccaacctttgatgatgaagaagtcgccgaacatgcgaatcttgaaacgcactttatcgattccagcggcctgatctcctgggatatgtttaagcaggatgccgactacccgttcgtggactggagcttctccgggaccacggaggaagagttcgccaccctgatggctatctttaagcaagaagataaagaagtttacatcgccgattacgaacaccttagcgtctacgcctgccggataattgttccgggcatgtctgatatctatccggcggaagacctctggctggcgaataacagcatgggcgcacctctgcgggaaacgattctttctctgccggaaagcgaatgggaaaaagaagattatctggcgcttatcgagcaaatggatgatgaaggccttgatgatttcacccgcgtgcgcgaactgctcggtctggcaaccggcaaagacaacggctggtatacgctgcgcattggcgagctaaaagcaatgctggcgctggcgggcggcgatctcgagcaggccttgatctggaccgagtggaccatggaatttaatgcctcaatctttagcgccgaacgcgctaattactaccgctgcctgcaaactctgctgctgctgagccaggaagaggagcgtcagccgctgcagtatctcaacgctttcgtacgcatgtacggcgccgatgccgttgaagccgccagcgccgcgcttagcggagaagcaccgttctatgggctgcaggcagtagacagcgatctgctcgctttcccggctcaccagtcgctactgaaagcctacgaaaagctacagcgcgcaaaagctgcattctggggtaaataa

SEQ ID NO: 256546 - DNA, 693 bp, Klebsiella pneumoniae
atgaagacatttgactggcatcgtatggcactggataaagtgcccgtggagtttctggccgaggtggcactgcgtagcctctataccttcgtcctggtatttatttttctcaagataaccgggcggcgtggcgttcgccagatgtctcttttcgaagtcctcatcattttgaccctcggttcggcggcaggggacgtcgcgttttatgatgatgttcccatgctgccggtactggcggtatttattaccctggctctgctgtatcgattgattatgtggctgatggggcatagcgaaaaactggaggacttgctggaaggtaagccgattattgttgtggagaacggcgaactggcctgggagaaactgcaggcggaaaatatgaccgaattcgagttttttatggaactgagaatcagcggggttgagcaactgggtcaggtacggctggccattctggaaaccaacggccagatcagcctttattactatgaggatgaagatgttaaagccgggctttccattttgccttcccgttttaccgatcgttttatcaccatacctcacgatgatgagtacgcctgcgttcgctgtagcgcaatccttacgctacgagctggggataaacaattatgccctcgctgcgcaaatgcagaatggtcgaaggtcagtcgggcaaaaagagtcacctga

SEQ ID NO: 256547 - DNA, 1089 bp, Klebsiella pneumoniae
atggctcaggtctataacttcagttcaggcccggcaatgctgccggcggatgtactcaaactggcgcaaaaggagctttgcgactggaacggtttggggacgtcggtgatggaaatcagccaccgtggtaaagagttcatcaaggtggctgaagaggcggaacaggattttcgctccctgctcaatattccttccaattacaaagtcttattttgtcacggcggcggtcgcggacagtttgctggtatcccgctgaacctgctgggtgataaaaccgttgccgactacgttgatgccggctactgggcagccagcgcggttaaagaagcgcataaatactgcaaaccgaatgtgattgacgccaaaatcaccgttgacggccagcgcgcggttaaaccgatgagcgaatggcagctgactccgggcgcggcctatctgcactactgcccgaacgaaactatcgatggtattgccattgaagaaacgcctgattttggcgacgatgtcatcgtgacggcggatttctcctcgactattttgtctcgtgaaattgacgtaagccgttatggcgtaatctacgcaggcgcgcagaaaaacatcggtcctgcaggtctgacgctgattattgtgcgcgaagatctgctgggtaaagccagcatagcctgcccgtcgattcttgattactccatcctgtcggccaatgactctatgtttaacacgccgccgacgtttgcctggtacctctccggcctggtgtttaagtggctgaaagagcagggcggcgttgccgctatggataaaatcaaccagcagaaagccgacctgttgtatagcaccatcgataacagtggtttctatcgcaacgatgtcgctgcggcgaaccgttcgcgcatgaacgtgccgttccagctggccgatagcgcgcttgataaactgttcctcgaagagtcgtttgccgctggtctgcatgcgctgaagggccaccgcgtagtgggcggcatgcgcgcttccatttataacgccatgccgctggcgggcgtgaaggcgctgaccgactttatgcaggacttcgaacgccgtcgcggctaa

SEQ ID NO: 256548 - DNA, 1284 bp, Klebsiella pneumoniae
atggaatccctgacgttacaacccatcgcacgcgtagatggcacaattaacctgcccgggtccaagagtgtttctaaccgtgctttgctactggcggcattggcccgcggcacgacggtgctgaccaatctgctggatagcgacgatgtacgccacatgctgaatgccctgagcgcgctgggagttcattacaccctgtcttccgaccgtacccgctgcgaagtcaccggtaacgccggcccactgcacgcggctgaagcattagaactgttcctcggtaatgccggaacggctatgcgtccgctggcggcggcgttatgtctggggagtaacgatattgtgctgaccggcgagccgcgaatgaaagagcggccgattggtcacctggttgacgcgctgcgtcagggcggggcgcagattgattatctggagcaggagaattacccgccgctgcgcctgcgcggtggtttcagcggtggacaggttgaagtggacggcagcgtttccagccagtttctgaccgcgctcctgatgaccgccccgctggcgcctcaggataccgtcattgcgattaaaggcgatctggtatccaaaccttatattgatattacgctgcacctgatgaaaacctttggcgttgaggttgaaaatcagtcttatcagcgttttatcgtgcgcggcaatcaacactaccgctcgccgggcgattatctggttgaaggcgacgcctcctcggcatcctacttcctcgccgccggagcaattaaaggcgggacggtaaaagtcaccggtattggccgcaatagcgtgcagggcgacattcggtttgccgatgtgctggaaaaaatgggcgcaactattacctggggcgatgattatatcgcctgcacgcgcggcgaactgaactccatcgatatggatatgaatcatatcccggatgccgcgatgactatcgccacggccgccctgttcgccaaaggcaccacgactctgcgcaatatttataactggcgcgtcaaggagactgaccgcctgtttgctatggccactgagctgcgtaaagtgggagctgaagttgaagaaggggaggatttcatccgcatcactccgcctgctaagctccagttcgctgaaatcggcacctataacgaccatcgtatggcaatgtgtttctcgctggtggcgctttccgatacgccggtcaccatccttgatccgaagtgtacggcaaaaactttcccggactacttcgaacagctggcgcgaatcagtacgctggcctga

SEQ ID NO: 256549 - DNA, 684 bp, Klebsiella pneumoniae
atgacggcaacagttccggtaatcaccattgatgggcctggcggtgcgggcaaaggcacgttatgcaaggcaatggcagaaacgctgggctggcatctgctggattctggggcgatttatcgcgttcttgctctcgctgctctgcatcaccatgttgatgttgaatccgaagaggcgctggtgccgctggccgcgcatcttgatgtccgttttgtctccactgacggtagcctggaagtcattctggagggggaggacgttagcgcggaaatccgcactcaggatgtggccaatacggcctctaaagtcgccgcttttccgcgcgtgcgcgaggcattgctgcgccgtcaacgagccttccgtgagctgcccggtttgatcgctgacggacgcgatatgggaaccgtggtattccccgatgcgccggtgaaaattttccttgacgcttccgcggaagaacgtgcgcatcgccgcatgcttcagttgcaggaaaagggctttagtgttaactttgatcgccttttatccgagataaaagagcgcgacgaccgcgatcgcaatcgtacagtggcgccgcttatcccggctgccgatgccttagttcttgattccacagaactaaacattgagcaagtgattgaaaaagcgctacaatatgcgcgcgaaaaactggcttccgcttaa

SEQ ID NO: 256550 - DNA, 423 bp, Klebsiella pneumoniae
atgagcaatgaagcctggcgtaacgcccgtgcgatgtatgagaacgataactgcgcgcaagcgctggggatcaagattatcgagatggatgacggttacgcgcagatgtccatggcggttaccgcgaacatgctcaatggccatcatacctgccacggcgggcagctgttttcgctcgccgataccgccttcgcttacgcctgcaacagccaggggctggcggcggtcgcgtcggcggcgagcatcgattttctgcgcccggcctttgtcggtgagctgctgaccgcgacggcgagagtcaagcatcagggcaagctgaccggggtctatgacatcgaaattgtcaatcaacagcaaaaagttgttgccttgtttcgcggtaaatcgcaccgcatcggcggcacaatcacaggagaagtctga

SEQ ID NO: 256551 - DNA, 1422 bp, Klebsiella pneumoniae
atgagcaaaacgttacctaccgttgcggtaataggcagcggcaccatgggcgccggcattgccgaggtggccgccgccgccgggcatccggtactgattttcgacatcgatcctgaggcggtggttcgcgccatcgacggtattggtcaacgtctggcctcccgcgtcagccgcggcaagctggcggctggccaggctgaggcgctgctgacgcgtctgtctccggctgaggatctgagcgctttagcccgcgcggagctggttattgaagctgcctccgagcgcctggacgtgaaaaaagcgctgttcaaacagctggctgaaatctgctccccgtcaacgctgctagtcagcaacacgtcgtcgatatcgatcaccgccatcgccgctggagtcgcgcacccggagcgggttgccgggctgcacttctttaacccggccccggtgatgaagctggtcgaagtggtcagcggcctggcgacctcggcggaagtcgttgaacagctctgccagcgggtctgcgcctggggaaaacagccggttcgctgccgttcgacgcccggttttatcgtcaaccgcgtggcgcgtcctttttatgccgaagcgtggcgagcgctggaggagcaggttgccgcgccggaggtgattgacgccgctctgcgcgacggcggcggttttcccatggggccgctggcgttgaccgacctgataggccaggacgttaactttgcggtgacctgttcggtgtttaacgccttctggcaggaccgccgctatctgccatcgctgcagcagcaggagctggttctggccggacggctgggcaaaaagagcgggcagggggtctactgctggcctggcgaagcgcagcctgagctggcgctggccgccgtatcagcagaacgcgcagcaaagcgcattaaaagtgacgttgtcaccgagctggacgaggtgctgctgctggaaacgaccggcgaaaccgccctggcattaagcatccagcacggccgtccggtggtggtctacgaccatagcgcgggcgaaacggtggtgctggccagcgcggaaacgacctcacaggcggcgaccgacaaagccattttctattttcagcagcagggcaaaaaggtgctgcagatcgccgactatcccgggctgctggtgtggcgcacggtggcgatgctggttaacgaagcgctggatgcgctgcaaaaaggcgttgccggcgccgaggatatcgataccgccatgcgcctgggcgttaactacccgcgcggtccgctggcgtggggggaatcacttggctggggccgggtactgcggctgctggagaacctacaacagcactacggcgaggagcgctatcggccctgttccctgctgcgtcagaaggcgctgatggagaaacatcatgagcaatga

SEQ ID NO: 256552 - DNA, 789 bp, Klebsiella pneumoniae
gtggaagctttcattctcagcgaaacagaacagggcgtgatgacgattacccttaatcgcccggaccgactgaacagttttaacgacctgatgcaccagcagctggcggcgtgcctgaaacaggccgaacgcgacgacagcatacgctgcctgctggtgaccggtgcggggcgcggtttttgcgccgggcaggatttaaatgaccgtaacgtcgaccccagcgggccggcgccggatctcgggctctcggttgagcgtttctataacccgctggtgcgccgtctggcggcgctgccgaagccggtgatttgtgcggtgaacggggtcgcggcaggtgcgggagctacgctggcgctgggctgcgatatcgtgctggcggcgcgttcggcgaaattcgtgatggcgttcagcaagcttggtctggtgccggactgcggcggcagctggtttctgccgcgcgtggcgggacgggcgagggcgatggggctggcgctgctgggcgacagcctgagcgcagagcaggccgcacagtgggggatgatctggcaggtggtggacgatgccgagctgaaagacaccggcctggcgctggcccgtcatctggccgcccagccatcttatggcctcggtctgattaagaaggcgcttcagcttgcggaaacccaaactctggatcagcagctcgatcttgagcgcgattatcagcgcctggccggacgcagcgccgactatcgcgaaggcgtcagcgccttcctcgcgaagcgtccacctcaattcagcgggaaatag

SEQ ID NO: 256553 - DNA, 768 bp, Klebsiella pneumoniae
atgagcgaactgttaattgctcgtcacgcgcgcgtcctccagctgacgcttaatcgcccgcaggcgcgcaacgcgctgaataacgcgctgctgacgcaaattgccgacgtgctcgacgcggcggcgctggacccgacggtcggcgtctgcgtcattagcggtaatcaacgcttttttgccgcaggggctgacctgaacgaaatggcggaaaaagatctgcctgccaccctcgatgatattcgaccgcggctgtgggcgcgtatcgacgccttcaacaaaccgctgatcgcctcggtaaacggctatgccctcggcgccggatgcgaactggcgctgctctgcgacctgatagtcgccggcgataacgcccgttttggcctgccggaaatcaccctcggtattatgccgggcgcgggcgggacccagcgcctgatccgcagcgtcggtaaagcgctggccagccggatgatattgagcggcgaaagcatcgatgccaggcaggcgctgcgggcggggctggtaagcgaggtttatccgccagcgctcaccgatgaatatgcactcgctttggcagcaaccgtggcccgccactcgccgctggcgctgcgcgcggctaaacaggccttacggttgtcgcaggaggtcagcctgcaggccgggattcagcaggaacgccagttatttactttgctgagcgcgactgaagaccgtcgcgaaggcatcgacgcctttctccataaacgtactgcggaatttaaaggacgctaa

SEQ ID NO: 256554 - DNA, 1071 bp, Klebsiella pneumoniae
atgacgacatttcattcgcttaccgtggcgaaagtggagccggaaacccgcgatgcggtgaccatcacctttgccattcccgacgcgctgcgaaacgcatacgccttccgtccgggccagcatctgacattaaaagcccgccttggcggggaagagctgcgtcgctgctactccatttgccgcagccgcacgccgggggaaatcagcgtggcggtcaaggccatcgacggcggacgcttctcacgctatgcccagaacgacattcaacaagggatggcgttggaggtgatggtgccgcagggccactttggctaccagccgcaggccgggcgcagcgcggactacctggcgattgccgctggctcaggtattacgccgatgatggcgattatcgacgccaccctcgccaccgaactcgacagccgtttcaccctgatttacggcaaccgcagcagccatagcatgatgttccgccaggcgctggccgacctgaaagaccgctatccgcaacgcctgcaggtggtgcatctgttcagccaggaggcgatggacagcgatctgctgcaggggcgcatcaatggcgacaagctacgcgcgctggccgcccgtctgctggatttcagccgctttgagcgcgcctttatctgcgggccggcggcgatgatggatgaagcggagatggccctgcgcgaactgggcataccggagaaagcgatccatctggagcgctttaataccccgggcagcagcgtcaagcgggccaccggcgtccaggcggaggggcgcacagtcacaatccgtcaggacggccgcgacagaaccatcgccctcagcgcagaggatgacagcatccttgacgccgcgctacgccagggggcggatctgccgtttgcctgcaaaggcggagtctgcgccacctgtaaatgcaaagtcctgcgcggcgaggtagcgatggctgctaactacggcctcgaagccgacgaagtggcggcaggttacgtgctgagctgccagtcgctgcccaccagcggcgatgtgatcgtcgatttcgacgcgcgggggatggcatga

SEQ ID NO: 256555 - DNA, 498 bp, Klebsiella pneumoniae; identical to SEQ ID NO: 172372

SEQ ID NO: 256556 - DNA, 756 bp, Klebsiella pneumoniae
atgaaaaacgataatcccgttgcagcttatgctctgcgcctcggcgataacggcctggtgctggcccagcgtctgggcgagtggtgcggacatgcgccggagctggagatcgatctggcgctggccaatatcggtctcgacctgctggggcaggcgcgcaatttcctcagctatgccgctgaactggctggcagcggcgatgaagacaccctggcctttggccgcgacgagcgtcagtttcgcaatttgctgctggcggagcagcccaacggcaactttgccgacacccttgctcgccagttttttatcgatgtctggcacgtagcgctgttcagccgcctggtcggcagtcgcgatacgcagctcgccgccatcgccgccaaagcgttaaaagaagtgcgctaccaccagcgctttagccgtggctggctggagcgcctgggcaacggcacggcgctttcggcgcagagaatgcaaagcgcagtcgataatctgtggcgctttaccggcgagctgttccaggccgatgagctggagattgagctgagcgcgcagggcatcgccgtagacccacgcgaactgcagggcgaatggcagagtgcggtacatacggcgctgatcgactccggtttacagatcccgcaagaagcggccttccgcagcggcggtaaacaggggctgcacagcgagcatctcaggccgctgctggcggagatgcagtatttacagcgcgcgtatcccggccagcagtggtag

SEQ ID NO: 256557 - DNA, 288 bp, Klebsiella pneumoniae
atgagcaataactattggcctttatatgaagtgttcgttcgcagcaaacagggactgtcgcaccgccacgtcggcagtctgcacgccgccgatgatcagatggcgctggaaaatgcccgcgatgcctatacccgccgcagcgaaggctgttcgatttgggtggtgaaggccagcgaaatcgttgcctcgcagcctgaagagcgcggtgaatttttcgatccagcggagagcaaagtctatcgccatcccaccttctacaccgtgcccgacggcatggaacatatgtga

SEQ ID NO: 256558 - DNA, 864 bp, Klebsiella pneumoniae
atgccggaagcctaccgcaaaacgctgatccgccagattggtcagcacgcgcattcggaaatcgtcggcatgctgccggagggcaactggataactcgcgcgccaaccctgcgccgcaaagcgattctgctggcgaaagtgcaggatgaagccgggcacggtctgtacctctacagcgccgcggaaaccctcggctgcgcccgcgaagatctgtatcagaagatgctcgacggcaagatgaagtactcctccatcttcaactacccgaccctgagctgggcggacatcggcgtaatcggctggctggtggacggcgcggccatcgtcaatcaggtggcgctgtgccgtacctcctacggaccctatgcccgggcgatggtcaagatctgcaaagaggagagctttcatcagcgccagggattcgaagcctgcatggcgctggcgcagggtagcgacgcgcagcggcagatgctgcaggacgccatcaaccgtttctggtggccggcgctgatgatgttcggtccgaacgatgataactcgccaaacagcgcccgcagcatggcctggaaaatcaagcgtcactccaacgatgagctgcgccagcgctttgtcgataacaccattccgcaggtggaaatcctcggcatgaccgtacccgacccggatttacagcgggatgaagccaccggccactaccgctttggcgccatcgactggcaggaatttaacgaggtcattgccggacgcgggatctgcaaccacgaacgtctggccgctaaacgcaaggcgtgggaagagggcgcatgggtgcgggaagccgcgctggcgcatgcgcaaaaacagcaggctcgcgacgccgcataa

SEQ ID NO: 256559 - DNA, 948 bp, Klebsiella pneumoniae
atgcgttggttcgtttctctgctggtgctgctggcgggcgtcgcctcggccgccgatacgcaaacctttaccgatgacttaggtcgcacggtcaccgttccacgacatccgcagcgcattgtgtcgatgcacgatctggatatcaccatcccgctgattgagcttggcgtcccgccggtggccagccatggccggacgcgtccggacggcagccactttttacgcgccagcgctcagctgaccggcgttgattttgataacagcgcgattcggtttatcggcacggcggatatcgatctcgaggcggtagccgcggcgaaaccggacctgattattaccgagcccagccgccacgtttcggtggagcagctggagaagattgcgccgacggtcagcatcgaccacctgcagggcagcgcgccgcgcatctatagcaagctggcgcagctcaccggcacccagccgcggttattgattctcgaacgccgctatcaggcgcagattgcccagctgaagtcgatagtggacacgcaaaaaatcgtggtttcggtgattcaggccaacaacggcaaggttaccgtgcatcacgcctatcatgcgctgggacgcgtgctgcgcgatgccggatttcgctttccgccgctgatcgacaacatccccgatggccagcgtattgacgtcagcgccgagcagctaccggcgctggacgccgatttcgtatttgccacctggcgttccgataccggcggcaggccgcaggatgagctgcaggcgatggagagcgtgatgcccggctggtgcgactttatgcgcgcctgccgcaccgggcgctatattctgctgccgcgcgaggaggttatctctaactcctacgccgcgctgtcgctgatggtcgcccaggtgcagtcgcacattgccggtcgtcctttgcccgagagattgcaatga

SEQ ID NO: 256560 - DNA, 900 bp, Klebsiella pneumoniae
atgaaaacggtggttaaaagagagaagggacgggtggacctgttcggtgaacgttttcgcgctcgcgcgcatcaactgtcgccgcgtttgctggcggtggtgagctatatcaacgaaaaccgggaagcggtgctggagcgcacggctatggaaatcgccgccgcgacgaatacttcggacgccacggtggtgcgcgccatccaggcgctcggcttcgccggcctacgggagctgaagcagaccatggagcgctggttcggcccgtcggcgacctcgtcggaaaaaatgatctccacggtgagcgccttgtccagcgacgtcaattcgagcatcgatttcgtgctggatgggcatcagcgggcctgcgaagtgctgtcgcgccccgccaaccgtgcggcggtggcgcaggcggtggcgttgctcaccgacgcccgccaggtggggattttcgggatcggcgcctcgggcattctggcggagtataccgcccggctgctgagccgcatcggcctgccttcgtacgtaatgaaccgcaccgggtttagcctcgccgagcagctgatcggcctgcagcgcggcgacgtgctgattatgatggggcaaaagtcgccgcaccgggaggggatgacgaccctgcgcgaggcccggcgactgggaataccgacgattttgctgacccaggcggtggattcccgctttagccaggaagcgcaggtggtgattgaggtgccgcgcggcggcgataacggtcgggtgccgctgcacggtacggtgctggtatgcctggagatgattgtgctgtcggtcgcctccaccgcgccgcaaaaaacggtgaaatcgatgaagcggatcaatgaattgcatcgggctattggtaaatccggcggtaaacgaagctaa

SEQ ID NO: 256561 - DNA, 771 bp, Klebsiella pneumoniae; identical to SEQ ID NO: 174513

SEQ ID NO: 256562 - DNA, 723 bp, Klebsiella pneumoniae
gtgattcacattaacaatctgcacaagcgcttcggcgacagccacgttctgcgcggcatcagctgcgatattaagccacaggaagtggtctgtatcatcgggccgtccggttccgggaaaagcaccttcctgcgctgcatgaacgcgctggaaaccgttagcgaaggcgaagtcgaggtgaacggctatgccgctcacgatcgcgcgaccgacctgaataagatgcgggaaagcgttggtatggtttttcagcgcttcaatctgttcccgcacaaaacggtgctggaaaacctgattatggccccgatgagcctgcgcggcatggcgcgtgcggaggcaacgcatctggcggaagagctgttggcgaaagtcggactgagcgataagcgcgacgcctggccctccagcctttccggcggccagcagcagcgcgtggccatcgcgcgcgcgctggcgatgaagccatcgattatgctgtttgatgagcccacttcggcgctcgatcctgagctggtgggcgacgtgctggaggtgatgaaaaatctcgccagcgaagggatgaccatggtgatcgtaacccacgagatgggctttgcccgcgaagtggctgaccgggttatctttatcgaccagggcatcattcaggaagagggtaaaccggcgcagatctttggcgcgccgactaacccgcgcaccgccgcgtttttgagtaaagtgctttaa

SEQ ID NO: 256563 - DNA, 1206 bp, Klebsiella pneumoniae
atgttcaacccagagcagaatcgtcttgcccccacgctggcgatgatcatggcggcttcattagtgggatttatcaccggatacacggtgcccttaatcagtctggagctggcgcagcagcagattgataccgtttacgtcggcctgctggccgcgcttccgccagcggggatgatgatctcctccttcctctcacccgcgctgtgccggcgtttcgagatggggcttctgctctccgtcagcctggtggcgctggcggcagctacgatcgcctcctgcctgtcgtttgatatgcttcatctcctgctgccgcgtctggtgaccggcctggcgtcaggggtaattatcgtcattggcgaaagctggatcaccggcggcgcggcggggaaaaatcgggccaccctgaccggcatttatgcctccgcctttaccggctgtcagctggcggggccgctgctgatctccgccggagaggcctggcaatcctggacgctgctgctggtcggcgtggtgaccctcgcctgcctgctgatgctgcgccacctgccaaccggcagccgcgaacggctggcggaacgggccagctggcgcagcctcggcgcttttttaccggtgctggcttccggcgttttctgctttgccttttttgatgccagcatactggcgctgctgccgctttacggtatggataaagggctgaatgaagtgacggcggtattgctggttacggtagtacttaccggcgatgccgtatttcaggcgccgctgggctggattgccgaccgcttcggcatccgtcgcgtacatctgacctgcgcaatggtcttctgcctcgccctgctggccctgccgttcctgctggcatcgtacatccagctgattgtcggctgcctgattctcggcgccgcggcgggggcactctataccctatcgctggtccgcgccgggaaaaccttctccgggcagaagctgattatgatcaacgccctgctgggcttcttttggtctgcaggcagcgtggccggcccggtggtcagcggcttgttgattagcgtctcgggctatgacggcctgctgatcacgctgtttgtcagcggcgcgctgttcctgctgattcaatgcctgggcaaaaacgaaaaagcgctactggcggacgaacgtgagcgcgaagaagagagggatgatattcgcgaggcggcgcagtaa

SEQ ID NO: 256564 - DNA, 1152 bp, Klebsiella pneumoniae
atggctgtgtccccttcactgatcgccgaggccattcgctggcgacgtgattttcatgcttgccctgagctggggtatcaggaacaggaaacgtcgcgccgggtggctgaactgctcgcttcatttggccttcaggtgcatcgcgggctggcgggtacgggcgtggtcgcgacgctggagaacggccccggtccggtaattggcctgcgggccgatatggatgcgctgccgataaccgagctgagcgacgtcggctataaatcgcgaaacccgggcgtgatgcacgcctgcggccacgacggccatagcgcgatgctgctggcgacagcggcccatctggcgcagacccgatgctttcgcggcaccgtgcactttgtttttcagcctgctgaagagaacctgggcggcgcgcgtaaaatggtggaagaggggctgtttgcgcgcttcccgatggatgccatttacgcgctgcataactggccgggaatgccgctgggccaggtggccatcggcagcggggcgatgatggcctctctcgatgcgtttgaaatcaccctgaccggcaagagctgccatgcggcgatgccggagcgcggggcggacccgattgtcgccgcggcgcagctgattatggcgctgcaaaccattccgtcgcgccgcctgtcgccgcaggaatccacggtggtaagcattacccagatttccggcggggaggcgattaacgtgctgccggataaagtcgtgctgcgcggcacctttcgctgcctgaacaaccaggtgcgcgagcgggtcagggggctgatcgagagctatgtcgccgcccagccgcaggtatcagacgtggaaggcaaaatcgcctggtatcccggctatccggtgaccaccaaccatcctgctgaagcgcagaaggttcgtgaggtggcgagtgcgcttctgggcgagtcggcggtgatctggaacggtaatccgtccatggcatcggaagattttgcctgcatgctggaggcctgcccgggcgcttatttctggatcggcaccgatggcgagacggcgtcaaagccgctgcataatgccggctatgattttaacgatgaactgattccgcacggcgtggcgctgtggacgacgctggtggagacgctgctggcgtaa

SEQ ID NO: 256565 - DNA, 1125 bp, Klebsiella pneumoniae
atggcttatcaactcaacattaactggcccgagtttttagaaaagtactggcaaaagcagccggtggtattaaagaaggctttcgcgaatttcgtcgatccgattaccccggatgaactggccgggctggccatggaaccggaagtcgatagtcgactggtgagccttaagaatggtcaatggcaggccagcaacgggccgtttgaacattttgatggcctgggcgaaaccggctggtcgctattggctcaggcggtaaaccactggcacatgcccgccgctgagctggtgcgccctttccgcgtactgccggactggcgtttagacgacctgatgatctccttttccgttccgggcggcggcgtgggcccacacatcgaccagtacgatgtctttattattcagggcatgggtagccgccgctggcgcgtgggcgataagctgccgatgcgtcagttctgcccgcatcccgcgctgctgcacgtcgacccgttcccgccgattattgatgaggatctggagccaggcgatattctgtacattccgccgggattcccgcacgacggaatcactcacgaaacggcgctgaactactccgttggcttccgcgggccaaacggccgcgatttgatcagcagctttgccgattacgcgctggaaaacgatctcggcggcgagcactacagcgatccggatttaacctgccgtgaacatccgggccgggttgaagagtatgaactggaacgtctgcgcggcatgatgatcgagatgattagccagccggaagatttccgccagtggtttggacgttttgctaccacgccgcgccacgagctggatattgcgccagctgaaccgccttatgcagaagaagagattgtcgacgcactcgagggaggcgaaatgctgactcgcctgagcggcctacgggtactgcacattggcgatgacttttttgtgaatagtgaacagcttgagccaaccgaacctgcggccctggacgcgctttgccgctataccctgctgggtaaagatgagttaggtgaggccgcactgcgcaatccggcctttatcgccgagctgacccgtttgattaaccagggctactggttcttcgacgaatag

SEQ ID NO: 256566 - DNA, 876 bp, Klebsiella pneumoniae
atgagaacgaaaattctgactgccgccattctggcgttatctgccgctggcgtacaggctgctgaaaaaccgctgaaaatactgttggttaacgacgatggctgccagtctgtgggaaccacatcgctgcaggaaaaactggcggccaaaggatatgacgtctggatggtggcgccggcaacgaatcagagcgggattgggtcggcaatcacctttaagacgggtaaggtctttgatgtcaaaaaagccgctgacaaacgctactgcttcccgggaacgcccgccgacgcgctggatttcggcctgtggggcgtgctgaaagacgcgccgccggatctggtgatctcgggcgttaacgacggccccaataccggtatggcgcaggttaactccggtaccgttagcgctgcggctcgcgccattcgctatggcttcccggcgattgccgccagtattggctaccgattcacggaagaagagatgaagaacaaatggccgagcacgcataagtactggcctgactcggtggattacgttgtctcgctggttgataaacttaacgccgcgcataaaccgggaagcccgattttgccgcaagggtccggtttgagcattaactatccgccgctgccgtcggctgaaattaagggcgttcattatattgagaatgaacagttccccgcgccgcagattggttatgaactgctggcggacggcacagcaaaacagacgatgaatccggaagcgatgaaaccgggggaaggggataatgactcgggctggctaaacaaagggtatattacttacaccctgtttgatggctcatggaacgcgccgcagtaccaggcgcagtatgagacgctgctcggaaaataa

SEQ ID NO: 256567 - DNA, 780 bp, Klebsiella pneumoniae
atgaagaagtggctaatagcattaatgatggcggcaggtgcggcaacctgctcggcagcggaagttaaaaacgacgatggcgtgaatatctatttcgctcgtcatggcaaaacgctgctgaatacgtttgaccgcgtacagggttgggctgactccccgcttactgaagacggcattcgcgtcgcacgttatctcggcgaggggctaaaaggcattccatttgatagcttctattccagcgatgccggacgtcagcgtgaaaccatgcaggtgatacttaagcaagccggagtaagtgattacaaacttactgagctaagcggcctgcgggaagccttcttcggcggttttgaaggcggctataacaaagatatggccgacgccggcgccaaacagctggggcttaaagatggcgctgcgctgttcagccaaatgaaagcgggcaccctggccgttgataccaaccagaatgcgctggctgcagccgatcccaaaggcatggcggaaaactatcagcaggtaaaaacccgcacccaggcagcgctgcataccatcgttgaaaacgcgcaggcccggggcgataaaaacgtgctggcgatttcatccggtaccgcaatgcagatcatgatttccgacttaacggacgataacgcgaaaaacaaaccgcttgccaatgccgcggtggttaaaattgtttataaagacggcaaatataccgttccagaaatcggcactatgaaatatgtcgaagccggaaaacaggctctcgataaaaaataa

SEQ ID NO: 256568 - DNA, 1314 bp, Klebsiella pneumoniae
atgctgctggctattcccgccagcgcctggtcagcttcgaccactaacagcctgaaggagcgcgattatatcgataccgtgctcgacgatccgttattcagccagtctcatctgaatttatcctttaaaaactactggaaatatcttaaggaagaagagaccgagccgaagaaagtccataatgcctggggtcagggcgtcgccgtcgattatcagtccggctattttgccgatattattggctttgatgccacatactacggggcggtaaagctcggcgccagcgattactttaactcccgcggcgtactctataacaacggcagcggaaataacaaaagcaacgctgaaggcttttccaaatttggtcaacgcaatatcaagctgcagtatcgcctggcggacactcatctgaacgcccgctggggctggcagacgatgaaaaactttggcgtcatctccaactcgacccgcctctctccgaccacctacctgggctggaccggcgcggtgaactacggtcccttcacgctgcgcggcgcgtacatcgaaagcgcgatggatcgtaactcgccggataagaaacgcttccagaccaacagcggacagtacattaaccatatcgccagcggcgatattctgtggcaaagcgagcacctgaacatgcagtacggctatggtgaaagcgacaactatctgcgccgccatattctgtttaccaatataaagccgataaaagcgctgaacatcggtactcaggtctacgccactcatgcgctggacgagtataaagcgatgccggcgaataagcgtgactttgacgatgatgcctggcacatcgccatggatgtgaagtggcaggcggacaactggagcaccaagtggggtctgggctataccgatgcgaataaggccaatgaagtgggcttctacccgcgccatatgagtaaaaactcgcgcgggacctttatctcaatggcttacgccggcaacgactatatgcgcgacggtgaactggttctctctaatatgtcggactataacctgacgccggagctggctatcggtctcgccggcaacatcgcccagtttaactaccgcggcaaccacgtccgtaccggggaaattaacgccttcagccgctgggtgccgacgcacccgagactgaaaaatctcaccgtctgggcgatgttcgggccgggctggtcctataagatgaatggcaaaacgccggtgcttaccgacggccattacagccgggccaactcgctctcttcggaagtaattatcgaatataaatttaatctgttctga

SEQ ID NO: 256569 - DNA, 1368 bp, Klebsiella pneumoniae
atgatgaccctgcttacctcgcccgccattgcccctgcaaaaaatgaacaaacatcgcaacaaacccatgaaagaagaaagctgctcaccgtgctgggctccggtctttctggcacaacgattgagttctatgacttttttatctacggcaccgccgccgcgctggtgtttccgtcgctgttttttcctaacctctcgccgctgatggcgctgctggtatccttcctgacgctgtcgattaccttcgttagccggcccatcggtgccatcgtatttggccactatggcgataagatcggccgcaagaaatcgctggttctgtcgctgatgattatgggtatttcgacgtttttcataggattaatccccagctacgacaccataggtaacgccgcgccgttgatacttatctttttgcgcctctgccagggctttgccattggcggcgaatggggcggggcgacgacgttgatcaccgagtatgcgccgcgccatcgccggggctttttcggcacctttgttcagttgggcaacgtgcttggactgtttatcgccaccggcgtttttgcgctggtggtgatgctgcctgaggatgacctgatgtcctggggctggcgtgtgcctttcctgttaagcatcgcgctgctgttcgtcgggatgtttatccgctcaaggatcgaggagacgccggtgtttcaggagaatcagaagcagcagcagaatgcgccgaaagcggccgagcagaagtttcctgttctcaccgtgctcaaacatcaccgtaaagcggtattcctggcgatgggtatgcgcatgggggagattgttctgggctggctgacggtggcgttctttatgtcctatgtgacaagggaactcaactttactcgcgaaacggcgctgaacgggctgctgctggccagttttgtcggcatttttacctttccgttcttcggctggctttccgataaaattggccgccgaccggtctatctggccggcgccgcgatcacgctgatctttgccttcccgctgttctggatgatcgactccggctcggtgaagatgtttatgttcgccaccaccttctgctattccgtggggctgggcatgatgttcagcgtccagcccgccttcttttcggagctttttgacaccagcgtgcgctacaccggcgtgtcgctcggcttccagctggcgaatatcgtcggcggcttaacgccgatgatcggtaccttactgctggtgtggtccggtggcgcatcgtggcccatctcgctgtttctcgcctgcatggcgctgattaccatcctgtgcgtctgcgtgacgcgggaaagctataacgatgagcttaatgaggtgaagaagtag

SEQ ID NO: 256570 - DNA, 318 bp, Klebsiella pneumoniae
atgatcgcttccggcggcggcgcgcgcagcccgctgtggcttgaaatcaaagccgcggcgtacaatcttccgatattatctacgcgcaatcaggagaatggcgtcaccggatgcggtattatcgccggggttggcgcggggctgtacgccgattttgccagcggcgtgcgccagacggtgcagttcgacaaactgatttcgccagatccccgtctgcgggattattaccacgcctgcagcgagctttttgatacgctgtaccggcaatccgccgccttatacgacaggctggatgcgctcagcgtgggacccgactga

SEQ ID NO: 256571 - DNA, 732 bp, Klebsiella pneumoniae
atgaaaggcgcttatctcgcacttgcgctcggtttatttaccggttcggcgctggcggccgagcgggtgatccattttggcaccagcgcaacctatccgccgtttgaattcgtcgacggcaataatcaggtggcgggttttgatattgatatcgccagagcggtatgtaaggagctacaggctacctgcagcttcaccaatcagagttttgatagccttattccggcactgcgttttaagaaaatggatgcggcgatcgccgggatggatatcacgccgctgcgtgagaagcaggtggatttttcgacgccgtacttcaacgaactgtcggcggtggcggtcgtgcgcaaagataccttccacacctttgccgatttaaaaggcaagaagcttggtctggagaacggcacttcccatcagcgctaccttcaggatcgccatcgtgagattgcgtcgcaggcctatgacagctatctgaacgcgcttgtcgatctgcgtaacggacggctggacggcgtgtttggcgacgtatcggcgatgaaaaactggttaaaggaaaacccggatttcgtcatcatggatgagcgcgccaccgacccggagtattacggcaaagggctgggcattgcgctgcgtaagggcaatccgctgctggcggagatcaaccaggcgctggagaaagtgatggcttcacctgaatacagcgaaattaaagatcgctggattaaataa

SEQ ID NO: 256572 - DNA, 1551 bp, Klebsiella pneumoniae
atgcattcctctgttaataaaaatgaatctcggacctttttcggtcatccttacccgctcggttcgctgtttttcaccgaaatgtgggaacggttctcgttttacggcattcgtccattactgatcctgtttatggcggccaccgtctatgacggcgggatggggctggcgcgtgagaacgcttcggccatcgtcgggatttttgccgggaccatgtatcttgccgcgctgcccggcggctggctggcggacaactggctcgggcaacaaaaagcggtctggtatggttcgatactgatcgcgctgggccatctctccatcgcgctgtcggcggtgatgggcgatagcctgttctttatcggcctgatgtttatcgttctcggttccggcctgttcaaaacctgtatttcggtgatggttggtacgctgtacaagaaaggcgatgcgcgccgcgatggcggcttctcgctgttctacatgggcatcaacatgggctcgtttatcgccccgctgatctccggctggctgatcaaatcccacggctggcactggggctttggcatcggcggcatcgggatgctggtcgcgctgataatcttccgcgtctttgccgtcccggcgatgaaacgctatgacagcgaagtcggcctcgattccacctggaatagcccggtagtgaaacgaaacggcgtcggcgcatggctactggcgctgacggtaggcgtagcggttattgttgcgttgattgcccagggcgttatcgtgattaacccggtggcggtggccagcgtgctggtctacgtgattgcggcgtcggtggtgctctattttatctacctgttcgtcttcgccgggctgagccgtaaagagcgcgcccgcctgctggtatgctttatcctgctgatttcggcggcctttttctggtcagcgtttgagcagaaaccgacctcgtttaacctgttcgctaacgactataccaaccgtacgatcggctcgttcgagatcccggcggtgtggttccagtcgattaacgccctgtttatcattctgctggcgccggtatttagctgggcctggcctgcgctggcgcgcaaaaacgtacgtccgagcagcatcaccaagtttgttatcggtattttgtgcgcggcggcgggctttggcctgatgatgctggcggcgcaaaatgtcctgagcaacaacggcgcgggcgtttcgccgatgtggctggtgggcagcattctgatgctgacgctgggcgagctgtgcctcagtccgattggtctcgcgaccatgactctgctggcgccggaaagaatgcgcggccagatgatggggctgtggttctgcgccagcgccctggggaacctggctgcgggtctgattggcggtcacgtgaaggccgatcagctggatatgctgcctgacctgtttgcacgctgctccattgcgctgctgatctgcgccgcggtgctgtgcctgctgattgttccggtgcgccggatgctggaaaacaccaaatccagcgagcaaaaaccggcggcgaatacctga

SEQ ID NO: 256573 - DNA, 846 bp, Klebsiella pneumoniae
atggaacggctccagcgcttcggttttctcgccgacgccgaggaatttaatcggcttgccggtaatatggcgaatcgacagcgccgcgccgccgcgggcgtcgccgtccactttggtcagcaccacgccggtcagcggcagcgcttcgttaaaggccttcgcggtattcgccgcatcctgaccggtcatcgcatcgacgacgaacagggtttcaaccgggttaatggcggcgtggacgtgcttgatttcgtccatcatcgcttcgtcaacgtgcagacgaccggcggtatccaccagcagcacgtcgtagaatttgagtttcgcttctttcagcgccgcgttgacgatatcaaccggcttctgcccgacatcagacgggaagaaatcgacgccgacctgctcggccagggtttccagctgtttgatcgccgccgggcggtaaacgtccgcggaaacgaccagcactttcttcttgtgcttctcgcgcaggaatttccccagcttaccgacgctggtggttttaccagcaccttgcaggccagccatcagcaccacggccggcggctgcgcggccaggtcgagcgtctggttctcttcgcccatcgccgccaccagctcgttgcggacgattttgacgaactcctgacccggggtcaggcttttattgacttcatggccgaccgcgctctctttgacgcggctgatgaaatcacggaccaccggaagcgcaacgtccgcttccagcagcgccatgcgcacttcgcgcagggtgtctttaatattgtcttctgtaaggcgtccgcggccgctaatgttgcgcagcgtacgcgacaaacgatcggttaa

SEQ ID NO: 256574 - DNA, 1179 bp, Klebsiella pneumoniae
atgacacgctttcttctctgcagctttgccctggttctgctctacccctccggcatcgatatgtatctggtcggcctgccgcgtattgctcaggacctgggggccagcgaggcgcaattacatatcgccttctcggtctatctggccggtatggcctccgcgatgctgtttgctggccgcatcgccgaccgctcggggcgtaagcctgtcgctattgtaggtgcagcgatctttgttatcgcctccctgctctgcgcccaggcgcataccagcagccacttcctcatcggacgctttatccaggggatcggcgccggcagctgctacgtggtggctttcgctatcctgcgcgatacgctggacgaccgtcgccgcgccaaggtgctgtcgttgctcaacggcatcacctgcattatccccgtcctggcgccggtgcttggccacctgattatgctgaaatatccgtggcagagcctgttctacacgatgaccggcatgggcgtcatgatcgctgtgctgtcggtctttatcctgcgtgaaacgcggccgacggcgcctccgcaggcagcgtcaccgcagcatgacgctggcgaatcgctgttgaaccgctttttcctcagccgcttactcattaccaccctcagcgtgacggtgatcctgacctacgttaacgtctcgccggtactaatgatggaagagatggggttcgaccggggaacttacccaatggcgatggctctgatggcgatgatcagcatggcggtctccttctcaacgccgttcgccctgtcgctgtttaatccccgcaccttaatgctgacctcacaggtgctgtttctggcggcaggcgtgacgctgagcctcgccactcgccaggccgtcaccctgatcgggctgggcatgatttgcgccggcttctccgttgggttcggcgtcgcgatgagccaggcgttggggccgttcacgctgcgcgcgggcgtcgccagctcggtcctcggcatcgcgcaggtgtgcggttcatcgctgtggatttggctcgccgccatcatcggactcagcgcaatgaatatgctgatcgggatactcattgcctgtagcatagtgagccttgttttgttactggtcgtcaccccgccgcgggttgcgcaatacgatgaagaagccgctgtcgagtcttga

SEQ ID NO: 256575 - DNA, 237 bp, Klebsiella pneumoniae
gtgaccggcattaaaaccgcgcatatccaggcagaaacccgcgtcacgctggacgcgcccgaggtggaatgcacagaaagacttaaagcgcgcactttcgaactgacccacggcggaacgatggccggtgatgtgatccactccggcggcgtgttgcagtcaaacgggatcaccgtgcacgaacataaacacggtggcgtgcagtctggcgggagtaccacgggaggcccgcaatga

SEQ ID NO: 256576 - DNA, 351 bp, Klebsiella pneumoniae
atgacagccagttataccgggatgaacccggaaagcaccggcgcgctgaccgatcacgatcagctctggcagtccgtgacaaaaatcctgaccacgccaaccggctcccgtgtgatgcgccgggactttggcagcgcgatccctgatttgctcgatgcgccgcagaacgccgtcacccgcatgcagctgatgggcgccgccgctatcgcgctggcgcagtgggagccgcggatcagcctgactaccgtcaacgtggtgttttcagaaacaggcgcagtgaccgccgagctgagcggcaccatcacggaaaccatgacagaaaccagcaacaccatcaggctaaggagctag

SEQ ID NO: 256577 - DNA, 924 bp, Klebsiella pneumoniae
gtgcaaacgtccgtcgatttatctcagatcccgcagcctgacgtcgtcgaggtgcccgattttgaaacggtgctgactgatatccgggcgcttatcgtggcggccatgcctgtggaacttcaggcttctgtgtctgctgcgttgttactggaatctgaaccgatggccgcgctggctcaggcattcacctatcgcgagatccatctgctgcaacgcatcaatgaagccgtgcgcgcggtgctgctttccagcgccctgggggcggatctcgatcaggtctcgggaaattttgacactgaacgcctgctgattaccgaagccaccgacgaggcggacgccgtatacgaaagcgatgaagagctgcgcgctcgcacgctgctctcatgggcgcgcctgagcacggcaggtgcccgtaatgcctatcactactttgcgcgaggtgcggatgcggatgtgctcgacgtgcgcgcctatggcccggagacgcatgatcaggagggccgcgttttcctctacgtgctgtcacgcaccggggatggaacagccccgcaggctctgctcgataaagtcctggaagcggtgaacccggaggacgtgcgtccgattacagattatgtggccgattatgttcgttccgctgtgattgtgaattatcaagtggttgctgacatttacgtcccttacggcgtggacaccgccacggtgctggaaaaagccaccgcagcactgaacgaatacaccgcctctgtgcatcttatcaacgccaccgctgcacggtcgggcatcgacggggcgctgcatcaggacggcgttgtcactgtcgatttgcattcaccggccgccgacgtcgttgcgacgatgggcgaagcgcctcattgcacctctgtgaaaatcaatcttgtggtgatggactatgaccgctaa

SEQ ID NO: 256578 - DNA, 3030 bp, Klebsiella pneumoniae
atgaccgctaattatcccgccagcattctgccgcccaacgctaccgccgtggagcgggccattgacagggccagcgccgccgcactggcgcgcatacctgtgtatcttatccgttgggtgaaggatcctgacagctgcccgctggcgctcctgccgtggctggcgtgggaatatcaggttgatacctggaatattgactggtcagagcaaaagaaacgcgatgcgatcaagcgcgcccactacatccaccggcatcgcgggacggtcgccgccgtccgtcatgccctggtggacagtccttttgggacggatattgttgaatggttcaatcagaacccgaaaggggatccatatacctttcgcctgaacgtgtatcagaacgatttgccggtgacggaatttgaccagcaggatctgaaacttgcggtactgcgcgccaggaacctgcgcagctggttttccgttcatgtatttggccgacttcagggaacctcatatgcggccggttacatgtacgccacggagaaaatcacgccgcgctttgtcccgttgcaggtggttttatcccgctacgagctgaatctggcccctggtgacgcggaaacggtcacggtgaccatcctccctgaatacgcggaagataaaacctttacggtaaccacatcggataaaacaattgcgactgcccgaattgtcaacggcgctattctggttacgggcgtgaaacggggcacctgttcggtcaccgtcacgacaactaacggcgtcagcgcggtgatcagcgtgaaagtggtcgcggtgatgaagttcatcacccgcatcgacaatgcaagccgtccgttgttctacgtgcgcatggatgaggatttcacgattgattatggcgacggaacagacagccgggaataccgttttgatgctgccggtgctgtgtacggctgggttattccgacgcgtgacgttgtggagggagaagagtacacaataacggttaagaacacggaaaccgccagtttccagcgcacgtcgggaaacgtttcagtgacgttgaaccctgtgcaggaaatcattcttttgacgggagacagggacaatcttgtttctttcgcgagtggcgcaactggtctttacaaggtccatgccggggcttttgatgacctgccaaatatccagaaatgtacctccatttttcggggctgctcgtcgctgactgaactgccagagggtttattcgcgcggtttactggtgccacagatttctcggcggcgttttatggctgcacggcactggctgctgttcctgatgggctgttcagcgaattatcgcaggtgacgctattcacctcggtgtttgagaattgcacgcgcctgctgagtgctggcaaaaacacattccggggctgtgctgctgcgacgcatttcaccagtgcgttttcgggatgcacatcccttatcgataccgggacgggcatttttgacgggtgtgtcagtggaaataacttcggttataccttcgatggatgccgcgcgctgacaacattgtcagcagatttattcagcgatgtgcctggtggcgtctttacagcgattttcaggagctgtacggcgctgacgcagctaccgccgcgcctgttccgcaactgcctggaagctacgcatttcggcggggcattcagtggatgcacgcagctgctttctgtgcctgatgaattctttaaggatttacccctggttaaccattttggaaccgttttttccggctgttcttcactggtgaaagcgggaaaagctgtgttttctggctgtgcgcttgcgcaaacattttcctccgctttttactattgccgtgttctggaagaggtcggcgatgatatttttgagggctgtgtcagtgcgaccacatttgccagtgttttctatggctgctgggctttaaccgctctaccgtcgtttgtggactgcaacaaggcaacgagctttgaccgggctttctatgcctgttcttcactgacagccgtcagagcagaggcctttgcgggtaaaacgctggtcacgacgttctattatgcattcacccaatgtacatccctgaaaagcatcggtgccggggcgttccgtggctgtagttccctgactaacctgacctatacatttacgggctgtacggcgctggtatcgctggccggggatatgtttgcaggatgcagcaaagtgacgaatgtcgctggcttgtttaaccagtgctctggccttgccgtgctgcctgaaaagctgttcagcgatctgacctctctgacggcaatggggagcactttccaggactgcaccgcgctggccgcgctgccatccgatctgtttgcgggttgtgtcaacctgacttctctgacgctgaccttctccggctgtactgcgctggcggtattgcctgctgatttactggagcataacaccctgctgaccagcgccggttcaacgttctacggttgcacttcactggtggacatcccgccgacgctgtttgcgtcctgcccgcttatcaccgcatttggcgcaacgttccagaataccggcgtggaggaaataccggaaaatctgttcagcggcaacccgctggtgacggcatacggccagaccttcaggggatgtaaaaacctgcgttcagtgcctgccggtctttttgttgccagtatcaacgccacgacttttaccaatgtgtttgccgagtgcgtcgcactggaagaggtcgggacaggcctgctgaataacttaccggccacgacaatcggctacctgtttgacggctgcgtgcaactgagaaccaacgtcagcacgatattcaatcttgacagttattcgacgattgtcaccacgacggccacattcaggggatgcactgccatcacgggcaaaggcctggagtttatgggcaaagtgccgaatgtcactgcgcattattacgcgttttatagctgtatcagcctggacgacttcgcagatttacccggtaactggataacgaataaattatga

SEQ ID NO: 256579 - DNA, 216 bp, Klebsiella pneumoniae
atgaaaacattcaatcaaattaaaagcttgatcggattttgccagaccgatgaatttttcctggaatacctgcaaaagcttcagggcgcaggggttattcaggtggttgatggcgatattgacgctgaaaataaaacgctgagtgaagatttttacaatcgccttgccagtgtgtatggcattgaagcagaggaaacactatggcaacaggactga

SEQ ID NO: 256580 - DNA, 1098 bp, Klebsiella pneumoniae
atggcaacaggactgacactaacgacggcgggcgccgctgaaatcgaggccgcgaatcaggcgggggaggttgtggatattaccgccgtactgatcggcgatggtggcggcgtgacattgccgaccgaacccgatgacctggcggcggtgaccgcgctttttggtcagtttggccgtgaaacctttgactctgattcaagcaatgaggggtttatcagcggtcagattgttatcaactgccgggattatccgggtaagacgctcagagaggcggggctggtcagtgctaagggtacgctcattgcttacggcgtgtacccggcgacgtacctcccggcgcaatctgattcgatcatcaaagagatcattctgacgctggtgctgacgttgacccatacctcaagcgtgcagcttgttatcgatccggcgcttgccactctcacgcaggaaacgggtgataaacgctatctgcggcgaacacaaaaccttgctgatttaaacgataccgaagaggcccgggaaaatctggagctggggaattcagccacgcggaacgtgggcaccacggagggaacggtggcggcgggagatgattcacgtattaccggcgcactgcaaaaagaaagtaacctctctgatttaaccaacgctgaaagtgcgcgcgagaatctggggctgaacagtgacggcgaggggtttaagggtatcgttgacgccattctttatcctgggatcattatccctagcgaaaaaagcccggctgagcgttttccgtggcagacctgggagagtttaagctatgcctttgccgacagggtagtacgcattggttctcagcacggtgcgaccggcggcagcaataaggtaaaaatcgcagccagcaaccttccgccgcactggcacaaatcgggtgacagatcacctggtgagacctgggatccgaccacgacacacggcacggacaaccagaagagcgggccgctcaatatgacagcaggaacctatatcgacgcagcgggcgagcaggaaaccgcaaacgaatcactcgatgtgaccaacgaatacgtcaccctctgcttgtggaaacgaacggcataa

SEQ ID NO: 256581 - DNA, 1662 bp, Klebsiella pneumoniae
atgttggcacaactcactatcagtaattttgctatcgttcgtgagctggaaatcgattttcacagcggtatgaccgccattaccggcgagaccggcgccggtaaatcgatcgctatcgacgcgctggggctgtgcctgggcggtcgggcggaagccgatatggtgcgcagaggcgccagccgggctgatttatgcgcacgcttctccctgaaagacacgccggccgcacaacgctggctggaacaaaaccagctcgaaagcgggcgtgagtgtttacttcgccgcgttatcagcgcagacggccgctctcgcggctttattaacggtacggcggtgcctttatcccagctccgcgaactgggacagcttcttatccagatccatggccagcatgcgcaccaactgttgactaagcctgaacatcagaagaccttacttgatggctataccggtgagtatgcgcttactcagctaatggctgagcgctatcgtcagtggcacaaaagctgccgcgatctggcgcagcatcagcagcaaagccaggagcgcgccgcgcgtgcggatctggtgcagtatcaactaaaagagctcaacgagtttaatccgcagccgggcgaattcgagcaaattgatgaagagtacaaacgtctggccaacagcggccaattgctgtcgacctgtcagcatgcgctgtcggtgatggcagacggcgaagaatccaatctgcaaagccagctctatgccgcaaagcagctggtgagcgagctggttggtatggacagtaaactctccggagtgctggatatgcttgaagaagcatctattcagcttagcgaagccacggacgagctgcgtcattatcacgatcgcctcgatctcgatccgaatcgtctgttcgaactggaacaacgtatctcccgacagattgccctggcgcgcaagcatcaaattacgcccgaggagcttccagaattttaccagtcactgctggaagagcagcgtctgctggatgatagcgccggttccctggaatccctcagtcagatggtcgtggagcatcatcagttagcccttgagacggcgaagcagctacatgccctgcgtcagaatagcgctgatgaactgactcagttaattacggagagtatgcactcactttcaatgccacacggtgtattctccattgatgtcgcgtttgatgagcgtcatctcaccgctgaaggcgcagaccatattgaattccgggtaaccaccaacccgggtcagccgctgcagccaatcgctaaagttgcttccggaggcgaactctcgcgtattgcgctggcgattcaggtgatcaccgcgcggaaaatggaaactccggcattgatttttgatgaagtagatgtcggtatcagtggccctacggcagcggtggtgggcaaactgctgcgccagctaggtgagtcaacccaggtgatgtgcgttacccacttaccgcaggtggccggttgcggacatcatcatttcttcgtctgcaaggaaacagacggtgaaatgaccgagacgcatatgcaccctctggataaacgcgctcgcttgcaggaactggcccgtctgctgggcggcagtgaagtcactcgtaacactctggcaaacgcgaaagagttgctcgcggcgtaa

SEQ ID NO: 256582 - DNA, 879 bp, Klebsiella pneumoniae
atgaagaatcacttcaagtgtataggcattgtgggacaccctcgtcacccaaccgcgctgaccacacatgaaatgctctggcgctggctgtccagcaaaggttatgaagttctggttgagcagcaaatcgctcatgaattacagctcagcaatgtgaagaccgggacgctggcggaaattggccagcaggcagacctggccgtcgtggttggcggcgatggtaatatgctcggcgcggcgcggacgctggcgcgctacgatattaacgttattggcattaaccgcggaaatctcggctttctgaccgacctcgatccggacaacgcgctacagcagctcgctgatgtgctcgaaggccactatatcgccgaaaaacgcttccttctggaagctcaggtctgtcagcaggattgccagaagcgtatcagcacggcgattaacgaagtcgtcctgcaccccggtaaagtagcgcatatgattgagtttgaagtctatattgacgaggtgtttgctttctctcagcgctcagatgggctcatcatctccacgcctaccggctccacggcctattccctctccgccggcgggccgatcctcaccccttcgctggatgctatcaccctggtgcctatgttcccgcatacgctttcggcccggccgctggtgatcaacggtgacagtactattcgcctgcgtttttcgcagcgctgcagcgacctcgaaattagctgcgatagccagatagcgctgcccattcaggatggagaagatgtgctgatccgccggtgtgattatcaccttaatctcatccatcctaaagattacagctatttcaatacattaagcactaagcttggctggtcgaaaaaattgttctga

SEQ ID NO: 256583 - DNA, 591 bp, Klebsiella pneumoniae; identical to SEQ ID NO: 173524

SEQ ID NO: 256584 - DNA, 1383 bp, Klebsiella pneumoniae
  misc_feature (123)..(132): n is a, c, g, or t
gtggaacatatctccaccaccacactgatcgtaacgctgatcatcatggtggttatctccgcctatttctccggttctgaaaccggcatgatgacgctaaatcgctaccgcctgcgtcatatnnnnnnnnnnatcatcatggtggttatctccgcctatttctccggttctgaaaccggcatgatgacgctaaatcgctaccgcctgcgtcatatggccaagcagggcaatcgtcaggcaaaacgcgttgaaaagctgctgcgcaaacctgaccgtctgattagcctggtcctcattggcaataatctggttaatattctcgcttcggcgctcggcaccatcgtgggtatgcgcctgtacggcgatgcaggcgttgccattgccaccggggttctgacgttcgtggtgctggtatttgcggaagtgctgcccaaaaccattgcggcgctctacccggaaaaggtcgcctatcccagcagccttctgctcgcgccgctgcaaatactgatgatgccgctggtgtggttgctcaacaccatcacccgcattctgatgcgcatcatgggcattaaaaccgatatcgtcattagcggggcgctcagcaaagatgaactgcgtactatcgttaatgaatcacgctcgcaaatctcccgccgcaatcaggacatgctgctgtcggttctggatctcgagaaagttagcgtggacgacatcatggtcccgcgcaatgatatcgtcggtattaatattaacgacgactggaagtccattgtccgccaactgacccactctccccacggccgcatcgtgctgtaccgcgacacccttgacgatgccatcagcatgctgcgggtacgcgaagcttatcgcctgatgacggagaaaaaagagttcacaaaagaggtaatgctgcgcgccgccgacgaaatttacttcgtgccggaagggacgccgctcagcacccaactggtaaaattccagcgcaacaaaaagaaagtgggcctggtggtggatgaatatggggatattcagggcctggtcacggttgaggatatcctcgaagagatcgtcggcgattttacgacctccatgtcgcctacgcttgctgaagaggtaacgccgcttaacgatggttcagtgattatcgacggtaccgccaacgtacgtgaaatcaataaagcatttaactggcatctgccggaagatgaagcgcgaaccattaacggtatcattctggaagctctcgaagagatccctgcccccggcacccgcgtgcgcattgaacagtatgatatcgatattcttgatgttcaggagaatatgattaaacaggtgaaggttatgccggtaaaacccattcgtgaaagcgtggcggagtcatag

SEQ ID NO: 256585 - DNA, 792 bp, Klebsiella pneumoniae
atgcctgtttttgctctactcgcccttgtcgcctactccatcagcctcgcgctgatcgtccctggtctgttacaaaaaaacagcagctggcggcggatggcgattctttccgcaactattgcgttgatttgtcacgcctttgcgctggagtcacgcatttttcccggcggcgaaagcgggcaaaacctcagcttattaaacgtgggatcgctggttagcctgatgatctgtacggtgatgaccatcgtcgcatcgcgcaatcgcggctggctgctgctgcccattgtctacaccttcgccctgatcaacctcgcgttcgccacctttatgccgaacgagtacatcacgcatctggaaaccacgccggggatgttggtccacatcggcctgtcgctcttttcttatgctacgctgattatcgccgcgctctacgctctgcagctggcgtggattgactatcagttgaagaataaacgattgaccttcagtagcgaaatgccgccgctgatgagcatcgaacgtaaaatgtttcatatcacccagataggcgtggtgctgttaaccctgacgctgtgtaccgggctgttttacatgcataacctgtttagtgcggaaaacattgataaagccgtactctctatcgtggcgtggttcgtttatatcgtcctgctttggggccactatcatgaagggtggcgcggacgccgggtcgtctggtttaacgtgactggcgcaggcctgctgacgctggcctactttggtagccgcgtattgcaacagttcatgagctaa

SEQ ID NO: 256586 - DNA, 345 bp, Klebsiella pneumoniae
atggacctgcttaatctcgtccatcatcgcttcatcaacgtgcagacgaccagcggtatccaccagcagcacgtcgtagaatttgagcttcgcttctttcagcgcggcattaacgatatcaaccggtttctggccaacgtcagacggaaagaaatcgacgctaacctgctctgccagcgtttccagctgtttgatcgccgcgggacgataaacgtcagcggaaaccaccaggactttcttcttgtgcttttcacgcaagaatttacccagcttagcgacgctggtcgttttacccgccccctgcaaaccggccatcagaactacggcaggcggctgcgcggctaa

SEQ ID NO: 256587 - DNA, 234 bp, Klebsiella pneumoniae
atgaaaaaggtattagctgcattagcgttatccgcgtttgcatttggcgcctcagcctctcagttgattacgaaacaagaagttgaccattttaaactgacccatgtaggcagtatctctgtaggaccttccggcggtcaattctcttctccctctgacttgcacgatcagctttcaaaattagctgatgaaaaaggtggcaagtttgaagcaactgctgaagtttataaataa

SEQ ID NO: 256588 - DNA, 1053 bp, Klebsiella pneumoniae
atgaaaatcacgcgtaatcaagatattgatcgtatgaggggactcacagtctatctgatgctggttgttaatagcccagtagacttgaggataacgaactctgcgttaatccactcagaatgggcggggttatcgttggcggataccgtgtttcctacgtttctttttattgtgggtatttctctgacgctgtcaaatcgtcttaaaaaaatcacgctgcgaggcctgtttataaggtcaacggttctagtcctgacaggaatatttctgaaagcaattgtctttgttttgtacgatcaggagcatttcaaaatcatgggggtgctgcaacgcatcggtatttgctatggagtgacaggcttaatttatcactttatcagcaataaaaagttacctgctctatgcctggcgctcatacttgcgtggtcagccattttaatgatatggggagattataatcaatacgcaaatatttctgatgtcgtagatgatttactgcttggcgcgcatgctaattattataatactgacactggcagatctggggactcagaaggcgtattgagcacgctcggcgcccttgtcaccactttgtcaggcgttatcttcggagagcaaataaataaaatcagtgacgcccgggggttctgttatggaatggtttgtataataacgggttttgttctggcttactatttttcgataccgattgttaagaagctctggacaccatcatttctcttaatttgtgtcggcattgcaatttggctttatctattagtgaaaagaatggccgtaatagatctcacctggctcgagtacccgggaaaacattccctggctatttatgtgatttcagtcatcgcttttgatgttctgctttactgtcatgtctggcattctttatttgttgcagtctacacctggctaatcccgcgcagtattcctctccagggagcaacgttgtttttttctgtgctgttttcatctattatatgctttacaccgtatctgatacaaaaaacgatgtttttcgttaaaagagcgatctaa

SEQ ID NO: 256589 - DNA, 171 bp, Klebsiella pneumoniae
atgtttaaactgtcaatttttgcgtttttactatctatgtttaccgtttccgctattgcagatgatgatattgcagcactgattgttgatcccggtccggatgtgtgtaatttaattaatgctggcattgacgttccaggcataatcgacattagtgtttgtaaaaaataa

SEQ ID NO: 256590 - DNA, 441 bp, Klebsiella pneumoniae
atgcgtttcagtaccatgcccgacagtgaaattatttctgaactgtgccgaagaattaaagaaacgcgtatacagctgggattgtcacagattgagctggccgaacgcgcccaggtcggtgcggcaaccattaagcgcgttgaattgggtgagtcggtgaccctcagtacgcttattggcattttgcgcggtctggatcgtctgcatcagctggagtcgattttattcgattcgcacatgcgcacctttaaggcgcagctcaatgccgagaccccttcccgtatccgtatccgtaaaaaaacgcctcaggcaaaagagaaattgcccactgctacgccgcctggcgaggctaatgccaccattaacgagtggtacacctcatcggcttcgaacagcgtggtatggtcttttacaccgccggacgcggagaaaaaaagctaa

SEQ ID NO: 256591 - DNA, 1368 bp, Klebsiella pneumoniae
atgattagcgttttcgatattttcaaaatcagcatcgggccgtccagctcacataccgtcgggccgatgaaagcgggaaaacattttgttgataccctgcaggaaaagggcctgctgcaaaaagtgaatcgtctggtagtggatgtgtatggttcactgtcattaacgggtaaaggtcaccacaccgatatcgccatcattctcggactatcgggatatttaccggataccgtggatatcgacgccatccccggtattattcgtgatgtgaacaccatgcatcgtctgtttatagaagaaggccagcgagaaattcagttcccggtggcggaatgcatgcgttttcacaatgaatttctgccgctgcatgaaaacggcatgagcattacggcgttttgcgacggcaaaattgcccatttccagacctattattccatcggcggcggttttatcgtgacggaggaaaactttggtaagaatcaggatgccgaagtcgatattccgttcccgttctattccgcacgtaatctgctggcgcactgtcatgacaactgtctgtcgatttctgccgtgatgatgaaaaatgagatcgctcgccacggcagagagagcgtggagcaaaatatggcgaaaatctgggagaccatgagaaacgccattaaccggggtatgaatacggaaggcatcttgccggggccgctgaaagtaccgcgccgtgcttctgcgctgcaccgcgtgctggcgccccagagccagtcgattacgccactgagcgccatggattgggtcaatatgttcgcgatggcggtgggagaggagaacgcggcgggcgggcgagtggttaccgcgccgactaacggcgcctgcggcattgttccggcggtactggcctattacgatcgttttatcaaagaggtgacgccggaaatctatatgcgctattacctgacggcgggcgccattggcattctgtacaagatgaatgcctcgatttccggagcagaagttggttgccagggagaagtgggcgtggcctgctcaatggcctctgccggtctggccgaactgctgggcggcagcccggagaaggtgtgcattgccgcggagatcggcatggagcataacctcggcctgacctgcgatccggtggccgggcaggtccaggtgccctgtatcgagcgtaacgcgattgcggcagtgaaggcgattaactcggccagcatggcgatgtaccggaccagcgatccaaaagtctcactggataaagtcatcgaaacgatgtttgagacaggcaaagacatgaatgccaaataccgtgaaaccgcccggggcggtctggcaataaaagtcgcggtatgtgaatcctga

SEQ ID NO: 256592 - DNA, 1284 bp, Klebsiella pneumoniae
atggaaaccgttcaaaataccctcgtcgctcgcgagagcagcggctggagaaagagtgataccgtctggatgctgggtctgtacggtactgcgattggcgcaggggtgctttttttgccaattaacgccggggtcggcggtttaattccgttaatcatcatggctattcttgcatttccgatgacgttttttgcccaccgtggtttaactcgttttgttctgtcgggcaaaaacccaggggaagatattaccgaagttgtggaagagcatttcggtacgggcgccggtaagctcattacgctgctgtacttcttcgctatttatccgattctgctggtctacagcgtggctattactaacacggtcgatagctttattactcaccagcttggtctggtgtctccgccgcgcgccattttgtcgctgattctcattgtcggcatgatgggaatcgtccgctttggcgaaaaaatgattgttaaagccatgagcgtgctggtgtttccattcgtctttgcgctgatggtgctggcgctgtatttgataccgcaatggaacggcgcggtactggatacgctgtcgctgagcagcgcctccgcaacggggaacggtctgtggatgaccctgtggctggcaatcccggtcatggtgttctcctttaaccattcgccaattatctcctcctttgcggtggcaaagcgggaagaatatggtcaggacgctgagcgcaagtgctcgcgtatcctgggcttcgcccacatcatgatggtgctgaccgtgatgttcttcgtgttcagctgcgtgctaagcctctcaccggaaaacctggcggaagcgaaggctcagaatatctccattctttcctacctggcgaaccacttcaacgcgccggtgattgcctggatggcgccgattatcgccatgatcgcgattaccaaatccttccttggccactacctcggggcgcgtgaaggtttcaacggcatggtgattaaatctctgcgcggaaaaggtaaatccatcgaaatcaacaagctgaacaagattaccgcgctgtttatgctggtgacgacctggcttgtcgctacccttaacccaagcatcctgggcatgattgagaccctgggcggtccggttattgcgatgattttgttcctgatgccaatgtatgccattaacaaagtcccggccatgcgcaagtacagcggtcatatcagcaatgcgtttgtggttgtcatggggttaattgccatctccgccatcttcttctctctgtttagctaa

SEQ ID NO: 256593 - DNA, 966 bp, Klebsiella pneumoniae
gtgaaaaaaggggcctgggatttcctgcaaaagccgatcgatccgggcaagctgctcacgctggtggatgccgcgctgcgtcagaggcaatcggtgatcgcccgtcgccagtattgtcagcaaaaattacaggttgagcttattggccgtagccaatggacggatcggtatcgccagcgccttcagcagctggcagagacggatattgcggtatggctttacggcgagccgggaaccggccgcatgaccggcgcgcgttacctgcaccagttagggcgtcacgccgacggtccgtttatctcctgcgaactaaatacggctaacgcccacacgctgaatgaactgatcgcgcaagcccagggcgggacgctggtcttaagtcacctggagcatctgactcacgggcaacagcatcatctggtacagctgcagagtcatgagaaacggccttttcgcctgattggtatcggtaatgcttcgctggtggaactggccgccagcagccagatagtggcggaactctattactgcttcgcgatgacgcaaattggctgccagcctctgtcaaagcgacctgatgatatcgagccgctgtttcatcactatttgcaaaaaacctgtcaacggctgaatcatcccgtcccggaggtggatgccggtctgttgaaggggatgatgcggcgagtgtggccaaataacgttcgcgaactggcgaacgccgccgagctgtttgcggtgggggtattaccgctcgcggaaacggtgaatccgcagatgctcgttggcgaaccgacgccgctggatcggcgggttgaggacgtcgagcggcagattatcactgaagcgctgaatatccaccagggacgtatcaatgaggtggcggagtatctgcttataccgcgtaaaaaactctatctcagaatgaagaagtatggcctgagtaaagagcattacaaaggggtgtag

SEQ ID NO: 256594 - DNA, 558 bp, Klebsiella pneumoniae
atgaaaaaagttgcggtgctgctggcgtcgggttttgaagagggagaggcgattgtggtggttgatatcctccgccgtctgcatctggatgtggagcttctctcctgcgccgaatcgcgcgcggtggtgagctaccacgatatcccaatggttgcggatagcactttagccgaacgcgcagggatgctgtacgacgcggtggttctgcccggcggtccgcagggaagcgtcaacctcgccgccagccaggacgtcgtagcgtttattacggcccacgataaagcaggaatgctgatctgtccgatctgttcggcagccgcaagggttctcggcggcaatgggctgctcagggggcgacgctacgtctgttcgggggagttatggcagaacgtggcggacggggagtatgttgatcaacccgtagtggaagacggtaatttgatcagcggtaaagggttaggccatgtttttgatttttcttttaccgttgccgctcgtttattgggggatgaggtgccggtacgcaatcatgcggagcatatttattgccgctggtaa

SEQ ID NO: 256595 - DNA, 543 bp, Klebsiella pneumoniae
atggtcgttccaggaatggtgcaaaagctgaataaccaattgaatcttgagttccatacctccaacttgtatctgcagttaagcgagtggtgtattcagcagcggttgaacggtaccgccacttttctgcgtaatcgagcgcaatccagcataacgcagatgatgcgggtctttgattttatgaaaagttccggcgcctggcccgtggttaaagcagacgaagcctgcagcgcggaatgcgcctctcttgaagacctgtttagcaaaaccgttgctgattatcagcagcgcagcagcatgctttccggcctgacggcagaggcgaaggcgcaaagcgacgaatcaaccctacgcttcctcgcgctgctggcgaaagaacagcagctggatggcatgctgctggagaccattctggatgaagtccgctgcgcggaccaggccgggaccagcgaacagcaaaccgatcgtcacctgcttgaactggtcagccaacagtacgccagcgtcatgtcggcaaataccggaacgcgcgataaagcgtaa

SEQ ID NO: 256596 - DNA, 639 bp, Klebsiella pneumoniae
atgaaaatcgcactgatgatggaaaacagccaggcgaacaaaaacgccatcatcctcaatgaattaaacgccgttgctgacgagaagggcttcccggtttacaacgtcgggatgagcgatgaaaacgaccatcacctgacctatatccatctgggcattatggccagcatcctgctgaattcgaaggctgtcgactttgtggttaccggctgcggcaccggtcagggcgcgctaatgtcgttaaatattcatccgggcgtcgtttgtggctactgcatcgaccctgcggacgccttcctgtttgcgcagatcaataacggtaacgcgctgtctctgccgtttgcgaaaggatttggctggggtgcagagctgaacgtacgctttatctttgaaaaagccttcaccggccgcaaaggcgaaggctatccgccggagcgtaaagagcctcaggtgcgtaacgccggcatcctgaacgcggtcaaagccgcggtggttaaggaaaactatctggatacgctgcgtgcgatcgatccggagctggtgaaaactgccgtttccggccctcgcttccagcagtgtttctttgagaactgccaggataaagagatcgaagcgttcgttcgccagatcatcggttaa

SEQ ID NO: 256597 - DNA, 1818 bp, Klebsiella pneumoniae
atggtagctaagtcaatcgtcgacattgacgtaaatgacgacaaattcgtcgcgtttatggagaggttccgtgagtaccagagcgcgctggaggatttgcctgaggcctggcgggtggccgctgttggtatcggtgaaagcagcaaagagaccgaaaaggccaagggggaagcgaaggggttaggcgctgagtttaatgccgtagccgaagccatcctgaccattaatagtggtctcgaccggctgaataacaatctcgacgattcgacgaaaaaacaggacgagtttaataaaaacacccgatccgcaaatggcctcctcagtgatgcgacgaaagacgcaaagtcgctggccagccatatcaaggaagctactgccagtcttctttcatggggtggaattgtcggcctgtttaccggcgttctcggtgtcggcgggttgttcggaattaaccgactggcggcaggtgctgcacagcaacgatttacttcgctaggtcttggaacgacagctggtggactcagtgcttctgaagtggactataggcgcgctattggcaatccagttggtactcttggagcgattcgggatgcacagatggacttgtccaggcgttggacattcagcgcgatgggtataaataacccagaccaggacccggcgaaactccttccgcagatgatccgcaatgcgcgcgatatcttcgtgcagaacggcagcacgctgcagggcgcacaggcgcacggcctgactaacttctttaccctggacgatctgaatcgctttaaaaacatgagcgacgctgagatcgaatcaatgcaaaaaagagcggaaagagatgcggaacggctaaacataaccgatgaacagaacaggaagtggactgatttcaccaaccagcttgatctcagcgagaggagtatcaatagggcctttgttatcgggcttggtcctcttactccgcaactgagtaagctgtctgatgcgttgtcaggtgcgattgacactgccctgaaatctcctgaactgggtaaatggattgatggtctggctggtggcattgagaagttcggtaactatcttgcatcccctgacttcactaacgatgttaaccagttcatgacaaatatcagggaaatgtgcgtaactgtcgataacgtaattaagtttcttaagggcgaaacatttaatgactggatgaaaaaatctgaggatagcgcaaactccgctgctgaatgggtaaaagataagaccagatttgatccgagaagcgttggccccgcaatgaaagagtttttagccccgtcgtggggaaagattaaatcggcgtttatttatggtgacttaaatcccgttttttcagagcctgcagacatctccgataagtctcgcactatcgctgatcgtttcaataatcccggtaatttgcgctcagcttatgggtacgatacccataacaccaaaagcggtaagtttgccgtgttccctacgctggatgagggcgtgttagcggcgactaagcagcttcagatttatggtgcccgcggcatcaatacgattgatgaaatctctaggcgctgggctccgtcaaaggagaacaacacgcaggaatatattcgtcatgtcgtaagaacttccgggtttaatgaacatcagcagcttaaccttaacgacccgaaagtgctggcaaaacttatttcggcgatggcatctaaggaaggtgccggcaacagggtgacagagagcgcagttatccagatttacaacaatacaggtggtaatgcgatcgtggcagcagctcagctgggtgcccagtaa

SEQ ID NO: 256598 - DNA, 186 bp, Klebsiella pneumoniae; identical to SEQ ID NO: 196074

SEQ ID NO: 256599 - DNA, 2355 bp, Klebsiella pneumoniae
atgaatcctgagcgttctgaacgcattgaaatccccgtattgccgttgcgcgatgtggtggtttatccgcacatggtcatacccctgtttgtagggcgggaaaaatctatccgttgtctcgaagcagccatggatcatgataaaaaaatcatgctggttgcgcagaaagaagcctcgacggatgagccgggtgtaaacgatcttttcaccgtcgggaccgtggcgtctattttgcaaatgctgaagctaccggacggtactgtcaaagtgctggtcgaaggtttgcagcgcgcgcgcatctctgcgctatctgataacggcgagcatttttcggcgaaagctgaatatctcgaatcgccggcgattgacgaacgcgagcaggaagtgctggttcgtaccgctatcagccagtttgaaggctacatcaagctgaacaagaaaatcccaccggaagtgctgacgtcgctgaatagcattgacgatccggcgcgccttgcggataccatcgcagcccatatgccgctgaagctggcggacaagcagtccgtgctggagatgtccgacgttaacgaacgtctggaatatctgatggcgatgatggagtcagaaatcgatctgctgcaggttgagaagcgtattcgcaaccgcgtgaaaaagcagatggagaaatctcagcgcgagtactacctgaatgagcaaatgaaagccattcaaaaagagctcggcgagatggacgacgcccctgacgagaacgaagcgctgaagcgtaagatcgacgcggcgaaaatgccgaaagaggcaaaagagaaaaccgaagcggaactgcaaaaactgaaaatgatgtccccgatgtcggcggaagcaaccgtcgttcgcggctacattgactggatggtgcaggtaccgtggaacgcccgcagcaaggttaaaaaagacctgcgtcaggctcaggagatcctcgacaccgatcactacggtctggagcgcgtgaaggatcgcatccttgagtacctcgcggtgcagagccgtgttaacaagctcaaagggccaatcctgtgcctggttgggcctccgggggttggtaaaacctcgctgggtcaatctatcgccaaagcaaccgggcgtaagtacgtgcgtatggcgctgggcggcgtgcgtgacgaagcggaaatccgcggtcaccgccgtacctacattggctcaatgccgggcaaactgatccagaaaatggccaaagtgggcgttaaaaacccgctgttcttactggatgagatcgacaaaatgtcttcggatatgcggggcgatccggcatcggcgctgctggaggtgttggatccggaacagaacgtggctttcaacgaccactatctggaagtggattacgatctcagcgacgtgatgttcgtcgcgacctctaactccatgaatattccggcgccgctgctggatcgtatggaagtgattcgcctctccggctacaccgaagatgagaagctgaacatcgccaaacgccatctgctgtcaaaacagatagagcgtaatgcgctcaaaaaaggcgagctgacggttgatgacagcgcgattatcggcattatccgttactacactcgtgaagcgggcgtgcgtggtctggagcgcgaaatctcgaaactgtgccgtaaagcggtcaaacagctgttgctggataagtcgctgaagcatattgagattaacggcgacaacctgcatgacttcctgggcgtgcagcgctacgactatggccgtgcggatagtgaaaatcgcgtgggtcaggtgactggcctggcgtggacggaagtgggcggcgatctgctgaccattgaaaccgcctgtgttccgggtaaaggaaagctgacctataccggttcactgggtgaggttatgcaggaatctatccaggctgcgctgaccgtggtgcgttcgcgtgcggataagctgggtattaactcagacttttatgaaaaacgcgatatccacgtgcacgtaccggaaggcgcaacgccgaaagatggcccaagcgccggtattgcgatgtgtaccgcactggtttcctgcctgacgggtaatccggtgcgcgccgatgtggcgatgaccggggaaatcaccctccgcggtcaggttttgccaatcggtggtctgaaggaaaaactgttggctgcacaccgtggcggcattaagactgttctgattcctgatgaaaataaacgtgaccttgaagaaattccagataacgttatcgccgatttagatatccatccggtgaaacgaatcgaggaagttctggcacttgcactgcagaacgagccgtttggtatggaagtcgtcacggcaaaatag

SEQ ID NO: 256600 - DNA, 273 bp, Klebsiella pneumoniae; identical to SEQ ID NO: 173055

SEQ ID NO: 256601 - DNA, 1875 bp, Klebsiella pneumoniae
atgatggacaacctacgcacggccgccaacagcgtcgtgctcaagattattttcggtatcattatcgtctcgttcattttgaccggggtgagtggttacctgattggcggtggaaacaactatgccgcaaaagttaatgaccaggagattggtcgcgcacagtttgaaaatgccgttgccagcgagcgtaaccgcatgcagcagcagcttggcgatcagttttctgaactggcggccaatgaaaattacatgaagaccatgcgtcagcaggtgttgaaccgtctgattgacgaggcgctgctcgatcagtacgcccgtgaactgggccttaatatcagcgacgaccaggtcaagcaggctatcttcaagacccaggctttccaggcggatggcaaatttgataacgagcgcttcagccgtatcgttaatcaaatggggatgacgacggaccagtacgctcaggcattacgtaatcagctgacgactcagcaactgattaacgccgttgccggtaccgattttatgctgccgggcgaatccgaccagctggcggcgctggtgtcgcaacagcgcgtcgtccgtgaagcgacgattgacgtaaacgcgctggcggcgaagcaaaccgccaccgacgatgaaatcaacgcgttttaccagcagaaccaggcgcgttttatggcgcctgagcagttccgcgtcagctacatcaagatggatgctgcgagcatgcaggaaaacgtctctgaccaggaaattcagtcatggtacgaccagcatcaggatcagttcactcagccgcagcgtaatcgctacagcatcatccagaccaaaaccgaagcggatgctcaggcggtgcttgatgagctgaaaaaaggcgctgatttcgccgcgctggccaaagaaaaatcaaccgatattatctctgcccgcaacggtggtgatatgggctggctggaagatgcggctaccgtgccggagctgaaagaggccggtctgaaagaaaaaggccagctttcaggcgtaattaaatcttccgtcggtttcctggtggcgcgtctggatgacgttcagcccgctcaggtaaaaccgctggctgacgttcgcgatgatatcgcggctaaagtgaagcaggagaaagctctggatgcttactatgcgctgcagcaaaaagtcagcgacgcggcgagcaacgataacgaatccctggctggcgcggctcaggttgccggtctgaaagtggttgaaaccggctggtttggtcgcgataacctgccgcaggagctgaatttcaaaccggtttctgacgctattttcaacggcggtctggttggcgaaaacggtacgccaggcagcaactccgatatcatcaccgtcgacggcgatcgcgcgtttgttctgcgcatcagcgagcataaaccggaggcggtcaaaccgctggcggaggtgaaagcgcaggtgagcgatattgttaagcacaacaaagcggagcagcaggcgaagctggatgccgataagctgctgacggccctgaaagagggtaaaggcgatgaagcgatgaaagcggcgggcctgagcttcggagcgccgcagacgctgtcgcgtaccggtcaggaagcgctgatccagtctgtctttgcgctaccgctgccgcaggcgggtaagcccagctacggcgtgggcacggacatgcagggcaatgtagtactgctggcgctggatgaagtgaaagcgggtacgatgccggaagagcagaaaaaggcgatgattcagggcatcacccagaataacgcgcagatcgccttcgaagcgctgatgagtaacctgcgtaaagcggcgaaaattaagctcggcgacattatcgatcagcaacaataa

SEQ ID NO: 256602 - DNA, 369 bp, Klebsiella pneumoniae
atgaaacgaggattgaaaacgcttcttaccgtcgccgtactggtttgcgcagcgggaagtcagggcgcttttgccgcgccttccagcgggaaaacgtcgccggcaacaaaggagagcgtgcagacgccgcaggcaaaggcacctgatgcgttgaacgcgcccgatagcgaaggtaccagggtgagtatcaataacgccagcgccgaagaactggcgaaggggctgaacggcgttggcctgaagaaggcgcaggctattgtcagctatcgtgaagaatatgggccatttaaaaccgttgacgatcttaagcaggtgccggggatgggcaattcgctggtagagagaaatctgtcacatttgaagctgtaa

SEQ ID NO: 256603 - DNA, 405 bp, Klebsiella pneumoniae
atgcagacacaaatcaaagttcgcggctatcatctcgacgtctatcagcatgtcaataacgcgcggtatctggagtttctcgaagaggcgcgctgggatggcctggaaagcagcccggcctttcactggatgacagctcgcaacatcgcctttgtggtggtgaatataaacatcaactatcgtcggcccgcggtgttaggcgacgttctcaccgttaccagtaagctggaaaagctgaacggaaaaagcgggaccttaagccaggtggttacccttaaccctaacggcgaggtggtcgccgatgcgcttatcacttttgtctgcattgatctaaaaacgcagaaagcgctgtcgcttgagagcgaactgcgcgaaaagctggagcaactggagccttcccggtag

SEQ ID NO: 256604 - DNA, 615 bp, Klebsiella pneumoniae
gtgcattgcgtcacttttgattatggccaacgtcatcgcgcggagattgacgttgctcgcgaactggcgctaaagctgggcgccgttgcccacaaagtccttgatgtcacgctgcttaacgaactggcggtcagcagcctgacccgcgatagcattccggttccggattatgaaccggacgccagcggcatccccaacactttcgtgcccggtcgcaacattctgttcttaaccctgacggccatttacgcgtatcaggttaaagcggaagctatcatcaccggcgtttgcgagaccgacttttcgggctacccggactgccgcgatgagttcgtcaaagcgctgcaccaggccgtcagtctgggaatggcgaaagatattcgctttgagacgccgctgatgtggctgaataaagccgagacgtgggccctggccgattattggggccagctggacctggtacgccatgaaaccctgacttgctataacggcattaaaggcgacggctgcgggcagtgcgcctcctgtaacctccgcgccaacgggctgcgccagtatctgggcgataaggttggggtgatgacggtcatgaagcagaaaacaggactgcagtag

SEQ ID NO: 256605 - DNA, 555 bp, Klebsiella pneumoniae
atgaaaacaggattgaaatgggctgtcgcaataatggttattatgagcggaacggcgaatgccgcagcgtttagcatcagcagcgtagatatgcgcgatggcgagtctctggcgcagaatcactggtttggcggctttggctgcaccggcggcaatgtatcaccgcagatcgcctggcaaaatgcccccgcgggtacccgtagtttcgcggtgaccgcttatgacccggatgcgccgaccgggagcggctggtggcactggacggtggtgaatattgcccaacaggtgacaagtttagccgctggcgccggagacaaaaataacgctaaactgcctgccggggcggtacaggggcgcaatgactttggctatgcgggttttggcggcgcgtgcccgccggccggagataaacctcatcgctaccgctttacggtctgggcgcttgataccccgacgctgcccattgatagcgcggccagcggggcgttagtcggatttatgttacacagccacgccatcgccagcgcgcagttaacggcgctggccgtaagataa

SEQ ID NO: 256606 - DNA, 789 bp, Klebsiella pneumoniae
atgcggaatatcaattttcaccataatgcgctaacggcggcggaaattaccacccgccgtctatgcaaactgcaccgcgtcacgctgttctcgcccgcgatctgccgggtaaaccgcggcagtaaggtcattgtgcagggagccagcgagatgctggcaacgccgcagcagctgatcattttgcccgccgaggtggaactggaggtcataaatcagccggaaaacgggctgttttgctccgatctgctgtcactaacgcccgagctgttggccgattttaagcatcgctatatgagcgaaccgcaggtcggtcgtttgacttcgctttgcgcgccgctggcgccggaactgtcgtttatgtggcagagcgttctgcaggcggtgcgggaagggctttcggcggagttacagcatcatcaggcgatggggttgctgctggcgttgtatcaggccggatacgccggaccgctgcttaacgaacggcgcgacgacataaccggtcaggtcaggcagattattatgctgtcgcctgccgaagcgtggagcgtggcgaaagtcgcaaaaatgctgtttcttggcgaatcgacgctgcgccgccgtttgcagcaggagtcccggagctttcgccagatcgtggaagaggtgcgtatggcctacgcgctggggcaattacagtcgacgtcgcggcccattggcgacattgcgcaaagcagcggctatctgtcaggctcgcgctttaccgcccgttttcgtcagcactatgggttattaccaaagcatgtacgctga

SEQ ID NO: 256607 - DNA, 282 bp, Klebsiella pneumoniae
atggcaacggtttgcacgatggcgtgggtatacggttccgttcagggcgtcggatttcgctattctacccagcgcgaggcgctacagcttgggctaacgggatacgcgcgcaacctcgacgacggcggcgtggaggtgcttgcctgcggagagcaggagcaggtggagaaacttatcgcatggctgaaagccggtgggccgcgcagcgcgcgggtggacagggttctgaccgagccgcatcagcccaccagagagtggcagaaattcgccattttgtattag

SEQ ID NO: 256608 - DNA, 330 bp, Klebsiella pneumoniae
atgtttatctttgaaggcaacgaaatagagaccgatagcgaaggctatctgaaggatacgaccctgtggagcgaggcgatggcaaccgttattgctgaacaggagggcatcgccctgtccgttgaacactgggaagtcgtgcgcttcgtgcgcgatttttatctggaattcaacacctcaccggcaatacgcatgctggtgaaagccatggcgaacaagttcggcgaagagaaaggcaacagccgctatctttaccgcctgtttccgaaaggcccggctaagcaggcgacaaaaatcgccggtctgcctaaaccggtaaagtgtatctaa

SEQ ID NO: 256609 - DNA, 660 bp, Klebsiella pneumoniae
atggatcgtataattacatcgtcgcgtgaccgttcatcgctgcttagcacgcataaagttctgcggaacacctattttttgcttagcctgacgctggcattttccgccattacagcgacggccagcacggtactgatgctgccttcgccgggtctgattctgacgctggtcggcatgtatggcctgatgttcctgacctataaaacggcaaataaacctaccggcattatttccgcgtttgcctttaccggcttccttggctatatcctggggccgatgctcaatgcctacctgtctgcgggcatgggcgatctgattggcctggcgctgggcggaaccgcgctggtgtttttctgctgctcggcctacgtgctgacgacccgtaaagatatgtccttcctcggcggcatgctgatggcgggcgtggttgtggtgcttatcggtatggttgccaatattttcctgcagctgccggctctgcatctggcgatcagcgcggtgtttatcctgatatcttcaggcgccatcctgtttgagaccagcaacatcatccgcggcggtgaaaccaactacatccgcgcgaccgtaagcctgtacgtctcgctgtacaacatcttcgtcagcctgctgagcatccttggcttcgccagcagagactaa

SEQ ID NO: 256610 - DNA, 1629 bp, Klebsiella pneumoniae
atgaaatcacaaaaatataatcacatcacgcgggtactgctggctgtcggtctgttctcaatcactctcccggcactggccgcgcaggtgccgccgggaacggtgctggcagagaagcaggagctggtcagaaataacggcagcgagccgtcgtcgctggatccgcataaagtcgaaagcgacgttgaaaacaatatcattagcgatcttttcgaagggctggtcagcgtttcgccggcaggcgacattcagccccggctggcggagaagtgggagaataaagataacaccgtctggacctttcacctgcgtccaggtgcgacctggtctgacgggacggcgattacggcgcaggatatcgtctggagctggcagcgtctggtgtcgccgctcacggcgtccccttacgcgagttatcccggcaatatgcatatcgtcaacggtgcggagatagcgcggggtcaaaaagcgcccgagacgctgggcgtcagagcggttgatgatgcgacctttgaggtgaccttaacccagccgaatgcggcgtttttggccatgctggcgcacccgtctctggttccgctcgataaagtcctcatttcgcgctacggcgacaagtggaccaaaccggaacatattgtaaccagcgggccctacaagctgtcgcagtgggtggtgaacgagcgtatcgtcgcagagcgcaatccgcgttactgggataacgcgcataccgtcatcaataaggtgacctatctgccgataagctctgaagccgccgatatcaaccgctacaaagcgggggagatcgacatcgtctataccgtgccgattaaccagttcgcccagcttaaaaaaactctgggcgaacagctgaatgtttcgccgcagctggcgacctactattaccagttcaatacgacccggccgccgtttaatgacccgcgcgtacggcgggcgctgaatatggccctcgataaagagattatcgcggagaaggtactggggcaggggcagcgtcctgcctggcttgtcagccagcctgatatcggtggggtgaagctgcacaatcccgaatatgccagctggtcgcgcgataaacgtatcgccgaggcgaaaaaactgttgagcgaggccgggtataacgagacccatccgctggtatttaatttgctctataatacttcggaatcgcaccagcgaattgccatcgccgccagctcaatgtggaaaaagaatcttggcgtcgaggcgaagctgcaaaatcaggagtggaagaccatgctcgacaccatgcacacgcataattttgacgccgtgcgctacgcgtggattgccgactatgacgatgccgcgacttttctcaataccttccgtaccggcgatagtgaaaataccactcagtacagtaatccagcctacgatgaggcgttgcgcaatgcggcaaaagcgtctgataccgcggcgcggggtcagttctaccagcaggcggaggatttactaggccaggatgtcccggctattccggtctatcactatgtgcgtacccatctggtgaagccatgggtcgggggttttacgccggataaactggggtattactacaccaaagatatgtacatcaaaaaacattag

SEQ ID NO: 256611 - DNA, 294 bp, Klebsiella pneumoniae
atggcaacgcttgaaaaattggtagagttaatccctgcaaaaaaaaaagtctggaagcgttttgaaaaggcctttaaagaattcaaagcggctggaggtgcattttacacagttcttgaaactgtccacggttataacggcaagcacgtcaatgatataggcaatgacggtgattacagcctgcattttagaaacatcggcccgtcaatcatggctccaggattatctggttttgcagatggtgagcattttttgacgttcaaagatggtgttgctgtggaggatgacaagtga

SEQ ID NO: 256612 - DNA, 846 bp, Klebsiella pneumoniae
atgagtcgtgtattaaatacagaaattatcattcctgttatcgaaaatcttgtaaaaaaagcttgttatgaactggatgataatctcatgtgttcttttcgtaaagcatatgagaaagaagagtcaaagatcggcaaggaaactattaagatactaatcgataatggcgaatatgctaaaaaagaacagcttgcatgttgccatgatactggtacttgtatcgttatcatggaaattggtcaacatgtatgctgggaaggtaagcctcttaaagatcaggtgaaccaaggcgttcgccagggctatgaaaatggatacttaagaaaatctatggttgcagatcccttagaacgtattaatactaacgataatacacctgcaattttacatactgaaattgttgagggtgatcgagtgagtattaccgttatgccaaagggcggcggtagcgaaaatatgggaacatttaaaacattgcttcctggcgatggtattgatggtataaaagaatttgttctggatactgtccgtcgtgtaggaggtaatccatgcccaccttatattattggtattggcgttggcggtacaatggaccactgctcatggatggcaaagaaagcattattacgccctcttggcgagttcaatgctaaaccactttatgcccagcttgaagctgaattattagaggccgtaaataatacagggatcggccctttaggtatgggggggcgtattacggcgttaggcgtgcatgtcgattactatccttgccatatcactgcactgccagtcgcaatcaatttccaatgtaatgcgagccgccacgctagtgaaatcatttaa

SEQ ID NO: 256613 - DNA, 543 bp, Klebsiella pneumoniae
atggaattaacattaccattgactaaagagaaagctaaaactctgaaggtcggcgatatattatttctcactggatttgcttacacctgtcgtgacgccgctcataaaaaaatagaagtagcgcttagcaacggtgaaaaatcgcctgtcgattttcacaaccaaacgatttactatgcaggcccctgtcctgccaaaccaggtttgccaattggctctaatggccctacaacagctgcgcgtatggacccatttgtagaaatgatgttccaacaaggagcaaccgcatttcttggcaaaggcgaccgtgctgattatgtcgctgagctttgcaaaaagtacggtggggtttcgctacttggtattggaggagcgtctgcaattaatacaaaacatgttaaatcagttgaaattgttgcctacgaagaattaggaacagaatctattaagaagttatattttgatcgctacagagttattgtaggcattgattctgaaggaaatacacttcagaagcaggaagtacataaattcgccaaataa

SEQ ID NO: 256614 - DNA, 1053 bp, Klebsiella pneumoniae
atgaattatcagaacgacgatttacgtattaaagagatcaacgaattattacctcccgttgcgctcctggaaaagttccccgctaccgaaaatgctgccaataccgttgcgcatgctcgtaaagcgatccatcagatcctgaaagggaatgacgatcgcctgctggtggtcattgggccctgctccattcacgatccggcggcggcaaaagagtatgctgaacgtctgcttaagcttcgtgaagagctaaaaggcgagctggaaatcgtgatgcgcgtttattttgaaaaaccgcgtaccaccgtcggctggaaagggctgatcaacgatccgcatatggataacagcttccgcatcaacgatggcctgcgtatcgcgcgcaagctgctgcttgatatcaacgacagcgggctgcccgcggcgggggaattcctcgatatgatcacgccgcagtatcttgccgatctgatgagctggggcgcgattggcgcgcggaccacggagtcgcaggtgcatcgtgagctctcttccggcttgtcctgcccggttggatttaaaaacggcaccgacggaaccatcaaagtggctatcgacgccattaacgccgccggcgcgccgcactgtttcctgtcggtgaccaaatgggggcattcggcaattgtgaacaccagcggtaatagcgattgccatattatcctgcgcggcggaaaagagccgaactacagcgcgcagcacgttgccgaagtgaaggtcggtctggcgaaagcaggtctgcccgttcaaattatgattgatttcagccacgccaactccagcaaacagtttaaaaagcagatggatgtcggcgctgacgtatgtcagcaggttgccggcggcgagcggtcgattatgggtgtgatgattgaaagccacctggtggaaggcaatcagagtcttgaaagcggcgagccgctgacctacggtaaaagtattaccgatgcctgcatcggctgggaagataccgatacgctacttcgccagctggccggggcggtaaaagcgcgtcgcggttaa

SEQ ID NO: 256615 - DNA, 372 bp, Klebsiella pneumoniae
atgaaaatgaataagctaaccagtcttctcctcgcagcaacccttggtctggccagcggcgcggccctggccgccgataccggggcgcagtcgaataatgggcaagcgaacgcagcggccgacgcgggccaggtcgcccccgatgcgcgtgaaaacgtggcgccaaacaacgtcgacaacggtaaaatcaactccggttccaccgataccaacggcaccatgctccaccctgacggctcgagcatgaaccatgacggcatgtcgagcgacgaagtgcacaaaaactcaatgtgcaaagatggccgctgtccggatactgataaaaaagtcggtcaggacgaagcgacgaaaaccgacggtaccacccagtaa

SEQ ID NO: 256616 - DNA, 945 bp, Klebsiella pneumoniae
atggggcaatcacactcgcataattctgcgcaacccaccgaagataaaaatgcccgtcggctactgctggcgttctgcgttactgccgggttcatggtggttgaggtcgcaggcggactcatttcaggttcactggcgctgctggccgatgccgggcatatgttgacggacgcggcagcgctgctgttcgcctttctggcagtgcgtttcgccagtcgaccgccgaatgcgcaacatacctttggctggctgcggctgaccacgctggcggcttttctcaatgccattgctttagtggtcattacgatcctcatcgtctgggaggccattcagcgctttcatcatccgcagccggtggccggtaaaacgatgatggttattgctgtggccggcctgctggccaatattctggccttttggatcctgcatcgcggcagtgaagaacgtaatctcaatgtgcgggccgccgctctgcatgtgctgggggatttactcggctcggtcggggcgattattgccgctgtcgtgatccttacgaccggctggacgcctatcgaccccatcctgtccgtgctggtatcgtgcctggttttgcgcagcgcctggcgtttgctgcaggagagcgtcaacgaactgctggagggggcgccgcgctcgcttgatgttgaggcactaaagcgcgatctgcgtcgctcaataccggaggtgcgcgatgtacatcacgtccacgcctggctggtcggcgaaaaaacggtgatgacgctgcacgtgcaggtggtgccgccgcacgatcacgatggcctgctggaacggatccaacatttcttacagcataagtacgaaattggacacgtaacggtgcagatggagtatcagccctgcagcggcccggagtgccgtctcaacatgacgcacgccgggcatgaccatcaccatcaccactag

SEQ ID NO: 256617 - DNA, 720 bp, Klebsiella pneumoniae
atggatttttttagtacgcagaatattttagttcacatacccattggcgccgggggatatgatctgtcgtggattgaagccgtcggtactatcgcaggcctgctgtgtatctggctggcgagcctggagaagatcgtcaactatgcctttgggttaatcaacgtcacgctgtttgccattatcttttttcagatccagctgtacgccagccttctgctccaggtcttcttctttgttgccaacgtctacggctggtatgcctggtcacgacagaccagcgataaccaggctgagctgcaaatccgctggctaccgctgccgaaagcgttaggctggctggcggcctgcgtggtggcgattggcctgatgacgctatttatcgatccggtttttgcgtatctgaccaggattgccgttgcgctgatgcacgccctgggcctgcaggtcgttatgccggcgctgcagccagacgcattcccgttctgggactcctgcatgatggtactctcgattgcggcgatgattctgatgacccgaaaatacgttgaaaactggctgctgtgggtgatcatcaacgttattagcgtcgttattttcgccctccagggggtttatgcgatgtcgctcgaatatttgattctgacattcatcgccctcaacggcagccggatgtggattaatagcgcgcgtgagcgaggctctcgcgcgttttcacgctag

SEQ ID NO: 256618 - DNA, 1044 bp, Klebsiella pneumoniae
atgagcgtaatgtttgatccggaagcggcaatttatccctttccccccaagcccatgccgttaaaccgcgatgagaagcacttctatcgtgaaaaaattaaacgcctgctgcgtgaacgcgatgcggcaatggtggcccattactacaccgaccccgaaattcagcaactggctgaagagaccggtggctgcatctccgactctctggaaatggcgcgcttcggcgcccgacattccgcctctacgctgctggtcgccggcgtacgatttatgggagaaacggcaaaaatcctcagcccggaaaaaaccatcctgatgcccacgctgcaggcggagtgttcgttggatcttggctgcccgatcgaggcgttcagcgctttttgcgacgctcacccggaccgcaccgttgtggtctatgccaatacctctgcggcggttaaggctcgcgccgactgggttgtgacctccagtatcgcagtggaactcattgagcatctggatagcatgggggaaaaaatcctctgggcgccggaccgccatctgggcagctacgtgcaaaaacagaccggcgccgacgtgctgtgctggcatggggcctgtattgttcatgatgaattcaaaactcaagcgctggcaagaatgaaagcgttatatccgcaggctgcggttctggttcacccggaatcaccgcaggcgatcgtcgatatggccgatgcggtaggttcaaccagccagttaatcagtgcggcaaaaacgctcccgcaccagcagctgattgtcgccaccgaccgggggattttttacaaaatgcagcaggcggtgccggaaaaagagctgctggaagcccctacggcaggcgaaggagcgacctgccgcagctgcgcgcactgtccgtggatggcgatgaatggcctgcaggccattgctgaagcgctggagaacgggggcgctgaacatgaaattcatgttgatgaacagctgcgtaccggggcgctggttccgctaaacagaatgctcgattttgcggctacacttcggggatag

SEQ ID NO: 256619 - DNA, 1344 bp, Klebsiella pneumoniae
atgacgacgattctcaagcatctcccggtaggacaacgtattggtattgctttttctggtgggctggataccagcgccgcgctgctgtggatgcgtaaaaagggagcagtcccttatgcatataccgctaacctgggacagccagacgaagacgattacgaagccattcctcgtcgtgccaaagagtatggtgctgaaggagctcgtctgatcgactgccgtaagcagctggttgcggaaggtattgctgcaatccagtgcggcgcgtttcataacaccaccggcgggttgacctactttaataccactccgctgggccgcgcagtgaccggtactatgctggttgccgcgatgaaagaagacggcgttaacatctggggcgacggcagtacctataaaggcaacgatatcgaacgtttctatcgttacggcctgctgaccaacgcagagctgaaaatttacaaaccgtggctggatagcgactttatcgacgagttaggcggccgccaggaaatgtcagaatttatgatttcctgcgggtttgactataaaatgtccgttgaaaaagcctactcaaccgactccaatatgctgggagctacgcacgaggctaaagatcttgagttcctgaactccagcgtcaagattgtgaacccaattatgggcgtgaagttctgggatgaaagcgtcaaaattcctgcggaagaagtcaccgtccgctttgaacaaggccacccggttgcgctgaatggacagacctttagcgatgacgttgagctgatgctggaagctaatcggatcggcggccgccatggactcggcatgagcgatcagatcgaaaaccgtatcatcgaagcgaagagccgcggcatttatgaagcccccgggatggcgctgctgcatattgcctatgagcgtctgctgaccggtattcataatgaagataccatcgaacaatatcacgcacacggtcgtcagctgggtcgcctgctgtatcaggggcgctggttcgactcacaggctctgatgctacgcgacggcctgcagcgctgggtggccagccaaatcaccggcgaagtgacccttgaactgcgtcgcggcaacgactattccatcctgaataccgtgtcagataatctgacctataaagcagaacgcctgaccatggaaaaaggcgactcaatgttctccgctgaggaccgtatcggccagctgacaatgcgcaatctggatatcaccgatacccgcgataagctgtttggctacgctcagtccggactgctgaccgcctcttccgccaccggcttgccgcaggtggaaaacctggaaaataaagctaagtaa

SEQ ID NO: 256620 - DNA, 330 bp, Klebsiella pneumoniae
atgtacgaagctcttttagttgttttccttattgtagcaattggccttgttggtctgattatgctgcagcaaggtaaaggcgctgatatgggagcctccttcggagcaggcgcttccggcactctgtttggatccagcggttctggtaacttcatgacccgcatgactggtatcctggctgcgctgttcttcatcatcagtctggcgctgggtaatatcaacagcaacaagaccaacaaaggaagtgagtgggataacctgagcgctccgaaaactgagcaaactcagccgacagctccggcacagccgagcagcgacatcccgcactga

SEQ ID NO: 256621 - DNA, 1338 bp, Klebsiella pneumoniae
atgagtaaccgcaaatattttggtactgatggtatccgtggccgcgtaggcgatgcgccaataacgccagaatttgtcttaaagctgggctgggcggctggaaaggtgctggcgcgccacggttcgcgcaagattattatcggtaaagatacccgtatttcaggctatatgctggagtccgcgctggaggctggcctggctgccgcagggttatcggcttcttttaccggcccaatgccaacgccggcaattgcctatctgacgcgaaccttccgcgcggaggccggaattgtgatctccgcttcgcataatccgttctatgataacggcattaaattcttctctatcgaagggactaagctcccggatgaagttgaagaagccattgaagccgaaatggaaaaagagctgacctgcgttgattccgccgagctgggcaaagccagccgtatcgtcgacgccgctggtcgctatatcgagttttgcaaaggcacctttccgaacgagctgagcctcaactccttgaaggtggtggtcgattgcgctcacggcgcgacttaccatatcgccccgagtgttttccgcgagctgggcgctcaggtgatcgccatgggctgtgagcctgatggactcaacatcaatgaagaagtcggagcgacggatgttcgtgctctgcaggcgcgcgtgctggaggaaaaagccgacctgggtattgcctacgatggcgatggcgatcgggtcataatggtggaccatgaaggcaataaagtcgacggtgaccagatcctctacatcatagctcgcgaaggtctgcgccaggggcaactgcgtggcggcgccgtcgggacgctcatgagcaacatggggcttgaactggcgctcaaacagctgggtattcctttcgttcgcgcgaaggtaggtgaccgttatgtgctggaaaaactgcaggagaaaggctggcgcatcggtgccgaaaactccggccatgtgatcctgctggacaaaaccacaacgggggatgggattgtcgccagcctgcaggtggtggcggcgatggtgcgtaaccatatgagcctgcacgatctgtgtagcggaatgaaaatgttcccgcagctgctggttaatgtccgctttaccgaaggtagcggtaacccactggaacatgaacacgtaaaagcggtcacggcagaagtggaagccgagctgggcaatcgtggccgcgtactgctgcgtaaatcaggcaccgagccgctgattcgcgttatggtggaaggcgagcatgaagaaaaggtacacgagttcgcccatcgtatcgctgatgccgtaaaaagcgtgtaa

SEQ ID NO: 256622 - DNA, 849 bp, Klebsiella pneumoniae
atgaaacttgaagcccagggttcaaccctcgatctctcccacccccatgtaatgggaattcttaacgtcaccccggattcgttctctgacggcgggactcacaatacgctggtagaagccgttaaacatgccaatctgatgattaatgccggagcgactattattgatatcggtggggaatcgacgcgcccgggggccgcagatgtcagcgttgaggaagagcttgctcgagtcattccgacggtagaagccattgcccagcgcttcgaagtgtggatctccgttgatacctctaaaccggaggtgattcgtgaatcagcgcgcgtgggggcgcatatcatcaatgatatccgttcgttaaccgaaccgggagcgctggaggctgcggcggaaaccggcttgccggtgtgcctgatgcatatgcagggccagcccaagaccatgcaggatgcccctaaatacgcggatgtctttgctgacgttgaacgcttttttgtcgaacatattgtgcgctgcgagcgggccggtatcgcaaaagataaattgctgctcgacccgggattcggtttcggtaaaaatctttcccataattatgaactgcttgtccgactcagcgagttccatcatttcggtcttccgctactggtcggtatgtcgcgtaagtcgatggtaggccagttgcttaatgtcgggccgaaagaacgcctgaatggcagcctggcttgcgcagtcattgctgcaatgcagggcgcgcagattattcgcgtccatgatgtcaaagaaacggtagaagcgctgcgtgtggtggaagctaccctggccgctaaggaaaataaacgttatgagtaa

SEQ ID NO: 256623 - DNA, 1674 bp, Klebsiella pneumoniae
gtggttggcgaaccgccggaagagccaagcctgctggcttctatcttcatttcctggttcccgatgctgcttcttatcggcgtctggatcttcttcatgcgtcagatgcagggcggcggtggcaaaggcgccatgtcgttcggtaagagcaaggcgcgcatgctgacggaagaccagatcaaaaccacttttgccgacgtcgccggttgtgacgaagcgaaagaagaagtcggtgaactggttgaatacctgcgtgaaccgagccgtttccagaagctgggcggcaagatcccgaaaggcgtcctgatggtcggccctccgggtaccggtaaaaccctgctggccaaggccattgcaggcgaagcgaaggttccattctttacaatttcaggttctgacttcgttgaaatgttcgtgggcgttggcgcatctcgcgtgcgcgacatgttcgaacaggccaagaaagcggcaccgtgcatcatctttatcgatgaaatcgacgccgtaggccgccagcgtggcgcgggcttaggcggcggtcacgatgaacgtgagcagacgctgaaccagatgctggttgagatggatggttttgagggtaacgaaggtatcatcgttatcgcggcgaccaaccgtccggacgttcttgaccctgcgctgctgcgtccgggccgctttgaccgtcaggttgttgttggtctgccggatgttcgcggtcgtgaacagatcctgaaagtgcatatgcgtcgcgtaccgctggcgccggatatcgatgcggcaattatcgcccgcggtacgccaggcttctccggtgctgacctcgcgaacctggtaaacgaagctgcgctgtttgccgctcgtggcaacaagcgcgtggtctcgatggttgagttcgagaaagcgaaagacaaaatcatgatgggtgcggaacgtcgctccatggtgatgacggaagcgcagaaagagtccaccgcgtaccacgaagcgggtcatgcgattatcggtcgcctggtgccggaacacgatccggtgcacaaagtgacaattattccgcgcggtcgtgcgctcggtgttaccttcttcctgcctgaaggcgacgctatcagcgccagccgtcagaagctggaaagtcagatttcgaccctgtacggcggtcgtctggctgaagaaattatctacggcgtagagcatgtttctaccggtgcgtctaacgacattaaagtcgcgactaacctggcgcgtaacatggtgacccagtggggcttctctgacaaactcggcccgctgctgtatgccgaagaagaaggcgaagttttccttggccgcagcgtcgcgaaagcgaaacatatgtccgatgaaacggctcgtatcatcgaccaggaagtgaagtcactgattgagcgtaactacaatcgtgcacgccagcttctgaacgataacatggacatcctgcacgcgatgaaagatgcgctcatgaaatatgagaccatcgatgctccgcagattgatgacctgatggctcgccgcgatgttcgcccgccagctggctgggaagaaccgggttcgtccaacaattctgacaataacggcacgcctcgtgcgccgcgtccggttgatgaaccgcgtacgccaaacccgggtaataccatgtcagaacagctgggcgacaaataa

SEQ ID NO: 256624 - DNA, 324 bp, Klebsiella pneumoniae; identical to SEQ ID NO: 174582

SEQ ID NO: 256625 - DNA, 516 bp, Klebsiella pneumoniae
atggactattttaccctcttcgggttaccggccagctataccctttcgttagaacctctggctgcccggtaccaggagctacagcgccagtatcacccggacaagttcgccagcggcagcgcggccgaacagcttgccgcggtgcagcagtccgccaccatcaatcaggcgtggcaaacccttcgccacccgctgacccgcgccgaatatctcctttcgcttcacggattcgatctcgccagcgagcagcataccgtgcgcgataccgcgttcctgatggaacagctggaactgcgcgaagagcttgatgagataggcaaggcgaaagatgaagcgcggctggaaagttttatcaagcgggtcaaagcgcaatttgatacccggcatcagctgatggttgaacaactgaataacgagacgtgggaggcggcggcggataccgtgcgcaagctgcgttttctcgataaactgcgaagcagtgcggaacaactcgaagaaaaactgctcgatttttaa

SEQ ID NO: 256626 - DNA, 336 bp, Klebsiella pneumoniae; identical to SEQ ID NO: 174585

SEQ ID NO: 256627 - DNA, 201 bp, Klebsiella pneumoniae
atgggactgaaatggaccgatagtcgtgaaatcggcgaagcgctgtacgacgcttttccggatctcgacccgaaaaccgttcgcttcaccgatctgcatcagtggatttgcgacctggaagagtttgatgacgatccaaacgcatccaatgaaaaaattcttgaggcgattctgctagtctggttagacgaagccgaataa

SEQ ID NO: 256628 - DNA, 1287 bp, Klebsiella pneumoniae
atgaccgaagctatgaaaattacgcttaccgctcagccagccgatgcgcgctggggagaaaaagcgtcttacagcatgaataacgacggcatcgccctgcacctgaacggcaaagacgacctgggtttgattcagcgcgcggcgcgtaaaattgacggcatgggtattaaacatgtcgcgcttgacggcgagggctgggataccgaccgcgcatgggcgttctgggcgggttataaaggcccgaaaggcagtcgcaaagttgagtggccagctcttgacgatgtgcagaaaagcgaactggataaccgcctgaccattattgactgggtgcgcgacaccatcaacgccccggcggaagagctggggccggaacagctggcgcagcgtgcggtagacctgctgtgcagcgtggcctgcgataacgtctcttatcgcatcactaagggcgaagatctgcgcgagcagaactacctgggcctccacaccgtcggccgcggatccgagcgtccgccggtcctgctggcgctggactataacccgactggcgataaagaagctccggtatacgcctgtctggtcggcaaaggcattacctttgactcaggcggatacagcatcaagcagagcgcatttatggactcaatgaagtccgatatgggcggcgcggcgacggtaaccggcgcgctggcgttcgccattactcgcggcctgaacaagcgcgtgaagctgtatctgtgctgtgccgataacctgattagcggtaacgccttcaaactgggcgatattgttcactatcgcaacggcaaaaccgtggaaatcatgaacaccgatgcggaaggtcgtctggtgctggcggacggcttgatcgatgcttcggcgcaaaagccggagctgatcatcgatgccgccacgctgaccggcgcggcgaaaaccgcgctgggcaatgactatcacgccctgttcagctttgacgacaggctggcgaatcgactgctggcgagcgcgcaggctgaaaacgaagctttctggcgtctgccgctggctgagttccaccgcggccagctgccgtccaactttgctgaactgaacaataccggcagcgcggcctatccggccggcgccagcaccgcggcgggcttcctgtcccacttcgtggagaattaccatgaaggctggctgcacatcgactgctcggcgacctaccgcaaatctgcggttgagcagtggtcggcgggcgcgaccggcctcggcgtgcgcactattgcgaatctgttgaccgcggaataa

SEQ ID NO: 256629 - DNA, 777 bp, Klebsiella pneumoniae
atgtccgaaactaaaaatgagctagaaatcctgctggagaaggcggctatagaaccaggccatcgtccggcttttttccgcagtttgctggaagccaccgtttgggtaccgggagccgccgcgcagggcgagcaggtcgttgaagacagcgtactggatctgcagcactgggaaaaagatgatggtacatcggtcattcctttcttcacctcgctggcggcgctgcagcaggccgttgaggacgaacagtctttcgtggtgatgccggtgcgcacgctatttgccatgaccctcggcgagacgctctatctcaatgccaaactcgccaccggcaaagagtttgcgccgcgtgagatcagccatctgctgggcgaagagggcagcccgctcagcacccagaccgtgctggaaggcggagagtcgctgctgctgtctgaggttgccgagccgcctgcgcagatggtggactcgctgaccgcgttgtttaagacgctgaaaacggtgaagcgcgcgtttttatgctctatcaaagacagcgccgatgcgccagccaacctgctgattggcattgaagcggaaggcgatattgaggaggttattcaggcgaccggcagcgtggcgaccgatacgcttcccggcgatgagccgattgacatctgtcaggtggtggagggtgaaaagggaattagccactttatgatcgcccacattacgccgttttatgaaaagcgctggggcagcttcctgcgcgactttaagcaaaatcgtattatttaa

SEQ ID NO: 256630 - DNA, 765 bp, Klebsiella pneumoniae
atggcgccgccgggacaggaagagcgcgatcttaacgctgagtatcaggccggtcatattcccggcgccgtcttttttgatatcgaagccctctccgatcacaccagcccgctaccgcacatgatgccgcgcgcggaggcgtttgccgtcgccatgcgcgaactaggcgtcagcagcgataagcacctggtggtatacgatgaaggtaatctcttctctgcgccgcgcgcctggtggatgctgcgcacgttcggcgttgaaaaggtgtcgattgttgcgggtgggctggaaggctggcgccgcgatgggctaccgctggagcaaggccttcccgagctgccggaaggggattttgacggacgcgccgatccgctggcgatcaagcggctgaccgatgtgctgctggtcagccatgaaggatcggcgcagatcgtcgatgcgcgtccggcaggacgctttaatggccaggtggcagagccgcgaccgggcctgcgctgcgggcatattcccggcgcgctaaacgtgccgtggactgaactggtgattaacggcgaacttaaaaccaccgatgaactcaacgagatttttgcgcgtcagggcgtcgattttgaacggccgattattgccagctgcggctccggcgtaacggcggcggtcgtcgtgctggcgctcactactctcggcgttaacggcgttagcctgtacgacggctcatggagcgaatggggcgcgcggacggatttaccgattgagccggcccagtag

SEQ ID NO: 256631 - DNA, 918 bp, Klebsiella pneumoniae; identical to SEQ ID NO: 177138

SEQ ID NO: 256632 - DNA, 231 bp, Klebsiella pneumoniae
atgaaaatgaataagactgccgccattatttctgcctgtgtgctgacctttggcctgagcgcctgttcctctaactacgtgatgcacactaacgatgggcgcactatcgttaccgacggtaaaccgcaaacggacaatgatactggcatgatttcgtacaaagatgcctggggtaacaagcagcagattaaccgttctgacgtcaaacagctgggcgagctggataactga

SEQ ID NO: 256633 - DNA, 1206 bp, Klebsiella pneumoniae
atgaacgcattcaaccccgcccaatttcgcgctcagtttccggcgctggccgacgctggcgtctatcttgatagcgcagcgacggcgctcaagccgctggcggtcattgaggccagcgatcagttctatcgcctcagcggcggtaacgtccaccgtagccagtttgctgccgcccggcagctaaccgaccgctatgaaaacgcgcgcgaacgcgtggcggcgctgctcaacgccccttccggccaggatatcgtctggacgcgcggcaccactgaagccattaacatggtggcgcaatgctacgtgcgcccgcgcctgaagcccggcgatgagattatcgtcagcgaagcggaacatcatgccaatctggtgccgtggttaatggttgcagagcaaaccggcgcgaggatagtgaagctaccgatcgctcccgatcgcctgccggacgtggccgcgcttggcgcgctcatcacgccgcgcagccgggtgctggcgattggccagatgtccaacgtcaccggcggttgtccggatttggcgcaggcgattcgcctggcccacgatgccgggatggtggtaatggtcgacggcgcgcagggggcggtgcatttcccggcggacgttcagacgctggatatcgacttttatgctttttcgggccataagctctacgggccgaccggcatcggcgcgctgtatggcaaaagcgaacggctggcgaaaatgtcgccgtggctcggcggcggtaaaatgatcgccgaagtcactttcgacggctttaaaacccagcccgcgccctggcgcttcgaagcgggaacgcccaatatcgccggggtgattggcctgagcgcagcgctggagtggctggacgagacggatatcgcacaggcggaaaactggagccgtgggctggcgacgctggcggaagaggagctggcgaaacgtccgggattccgttcgctccgctgccaggacgccagcctgctggcgtttgattttgacggcgttcaccatagcgatatggtgacgctgctggcggaatcggggattgcgctgcgcgccggtcagcactgcgctcagccgctgctggcggcgcttggcgtcagcggtaccctgcgggcctcattcgcgccttataacacgcaggacgatgtttacgcgctggtgcacgccgtggaccgcgctctggaaatactggtggattaa

SEQ ID NO: 256634 - DNA, 438 bp, Klebsiella pneumoniae; identical to SEQ ID NO: 177141

SEQ ID NO: 256635 - DNA, 810 bp, Klebsiella pneumoniae; identical to SEQ ID NO: 177142

SEQ ID NO: 256636 - DNA, 1098 bp, Klebsiella pneumoniae
atgaaaggacgttgggcaaaatatgcagtaacaggcgcaatgctggcaatgctggccgcctgttcctcaaaaccgaccgatcgcggtcagcagtataatgaaggtaaactcacccagccgttttcactggttaaccaacctgatgcggtaggttcgccgatcaacgccggcgatttctccgagcaggtgagacagattcgtagcgcctctccgcgcctctataccagccagagcaacgtctacaatgcggttcaggagtggctgcgttccggcggcgatacccgtacgctgagccagtttggtatcgacgcctggcagatgcagggaacggataactacggtaacgtccagtttaccggctactacacgcccgtggttcaggcgcgtcatactcgccagggcgagttccagtatccgatttaccggatgccgccgaagcgcggcaagctgccgtcccgcgccagcatctacgccggggctctgagcgacaactacatcctggcctacagcaactcgctgatggataacttcatcatggacgtgcagggcagcggctacattgattttggcgacggctcgccgctgaacttctttagctatgccgggaaaaacggctggccctattacagcatcggtaaagtgctgatcgaccgcggggaagtaaagcgcgaagatatgtcgatgcaggcaattcgcgaatggggcgaaaagcacagcgaggcggaagtccgcgagctgctggagcagaacccgtcgttcgtcttctttaaaccgcagtccttcgcgccggtgaaaggcgccagcgcggtgccgctgatcggtcgcgcgtcggtggcctccgaccgttccattgttcctgcaggcaccacgcttctggcggaggtgccgctgctggataataacggtaagtttaacggccagtacgagctgcgtttaatggtggcacttgatgttggcggggcgattaaaggccagcacttcgatatttaccagggcattggcccggatgccgggcaccgtgccggctggtataaccactatggccgcgtatgggtgctgaaaaacgccccgggcgcaggcaacgtctttagcggctag

SEQ ID NO: 256637 - DNA, 1005 bp, Klebsiella pneumoniae
atgacaaagcccatcgtttttagtggcgcacagccctcaggtgaattgaccattggcaactatatgggtgcgctgcgtcagtgggtaaacatgcaggacgattaccactgcatttactgcatcgttgaccagcacgcgattaccgtccgtcaggatccgcagcagctgcgtaaggcgacgctggatacgcttgcgctgtatctggcgtgcggtatcgacccgaaaaaaagcaccatttttgttcagtcccacgtgcctgagcatgcgcagctcggctgggcgctgaactgctacacctatttcggcgaactgagccgtatgacccagtttaaagacaagtcatcgcgctatgcggaaaacattaacgccggtctgtttgactatccggtattgatggctgccgacattctgctgtatcagactaaccaggtcccggttggcgaagaccagaagcagcacctggaactgagccgcgatgtcgcccagcgtttcaacgctatctatggcgacgtgtttaaagttccggaaccgtttattcccaaatccggcgcgcgcgtgatgtcgctgctggagccgaccaaaaagatgtccaagtcagatgataaccgcaacaacgttatcggcctgctggaagacccgaaatcggtagtgaagaagatcaaacgcgcggtcaccgactccgacgagccgccggttgttcgctacgacatccagaacaaagcgggcgtttccaacctgctggatattctctctgcggttaccggtcagagcattccagagctggagcagcattttgaaggcaaaatgtatggtcatctgaagggtgaggtggcagaagccgtttccggtatgctgaccgaactgcaggagcgctatcaccgattccgcagtgatgaagccttccttaatcaggtcatgaaagagggcgcagagaaagccagcgctcgcgcttccgtgaccctgaaagcggtttacgaagcgattggtttcgtcgccaaaccctga

SEQ ID NO: 256638 - DNA, 750 bp, Klebsiella pneumoniae
atggataagttacacaacattcgcggtgtggcgtttgatctcgacggaacgctggtggacagcgcgccgggattgaccgctgccgttgataacgccctgtatgcgctggaactcccgatggcgggcgaagagcgagtcgtgacctggattggtaacggcgctgacgtactcatccagcgggccctgacctgggctcgtcaggagcgcgcgacgctcagagcggcgcagggcaaaccttccgtcgatcatgatgatatcccgcaggctgagcaacaggccattttgcgcaagttgttcgatcgctactatggcgaagtggcggaagaggggagctttttgtttcctgccgttgccgatacgctgggcgcgctgcacgcaaaaggcctgccgctggcgctggtgaccaataagccaacgccgtttgtcgcgccaattctgtcgtcgctggatatcgccaaatattttaccgttgttatcggcggcgatgacgtaaaaaacaaaaaaccgcacccggaaccgctgctgatggtcgcggagaaattggggctggcgcccgcagagctgctgttcgttggcgactcgcgcaatgatattcaggccgcgaaggccgccggctgctgctctatcggattgacctacggctacaactacggcgagccgatttcgttgagtgagccggattatatctttgaccaatttaatgaactcttgcccgctttcgggctaccgtacagtgaaactcaggaataa

SEQ ID NO: 256639 - DNA, 678 bp, Klebsiella pneumoniae
atgaagcagtatttgattgccccttcgattctgtcggctgattttgcccgtctgggcgaggataccgccaatgcgttggctgcgggtgcggatgttgtgcactttgacgtgatggacaaccactacgtgccgaatctgaccattggtccgatggtgctgaaatcactgcgaaattacggtatcaccgcgccgattgatgtgcatttgatggtcaagccggttgaccgcatcatccctgattttgccgccgcgggcgccagcatcattactttccatccggaagcttccgaacacgttgaccgtacgctgcagcttatcaaagagcacggttgtaaagccggcctggtatttaacccggcgacctccctgagctacctcgattacgtgatggataagctggatgtcattctgttgatgtccgtcaaccctggctttggtggtcagtcctttattccgcataccctggataaactgcgtgaagttcgtcgtcgcattgatgaatccggctacgacatccgtctggaagtggatggcggtgtaaaagtgagcaacatcgctgagattgctgctgccggtgcggatatgtttgttgccggctcggctattttcgatcagccggactacaaaaaagtcgttgaacaaatgcgtagtgaattagcaaaggttagccatggataa

SEQ ID NO: 256640 - DNA, 828 bp, Klebsiella pneumoniae
atgaaaaagaatcgcgcttttctgaaatgggcagggggcaaataccccctgcttgatgatattaaaaagcacttgccgcagggcgactgcttgattgagcctttcgtgggcgccgggtcggtatttcttaataccgacttttctcgttatatcctcgctgatatcaatagtgatttgatcgatctgtataacatcgtcaaactgcaaaccgatgagtacgttgcggcggcgcgagagatgtttacgcctgagaacaacgttgctgaacagtattatctgtttcgcgacgagtttaaccagagccaggagccgctgcgccgcgcggtgctgttcctgtatctgaaccgtcatggctacaatggtctgtgtcgctacaacctgcgcggggagttcaacgtgccctttggccgttataaaaagccctattttcccgaagctgaactgtatcatttcgcggagaaggcgcagcatgccgagtttcattgtgaatcttatgaagagtgcatgaagcgggcagatcaccgttccgttgtttactgcgatccgccctatgcgccgctgtcgtcaacggctaacttcacggcctatcatacgaatagctttagccaggagcagcaggagctgctggctaaaaaagcggaatcgctgatgaaaaagcgtattccagtgctgatttccaaccatcgcacgccgctcactcaggagtggtataaaaacgccgctgagacgcatattgtgaaggttcgacgcagcatcagcagtaacggtggtacacgtaagaaggtggacgagcttctggctctgtaccgtccgcccaagactaaataa

SEQ ID NO: 256641 - DNA, 1311 bp, Klebsiella pneumoniae
atggatgaattaaaaccagaagacgatatgaaagccgatcgcagcgatcgtcgtactggtcgttctcgtcagtcttcagagcgtgatgccgatccgcaaatcaattttgatgatgtcgatcttgatgatgctgacgatggtcgcccgacgcgcggcagcaaagcacgccgtgagcgcgatgaagagcagtatgaagagtacgaagaagaagtagagtctgacgaaggcgatgacgaagagcgtcaggttgagcgtcgtccgcgtaagcgtaagaaagcgccggcaaaaccggcctcccgtcagtacatcatgatgggcgtgggcatcctcgttctgctgctgctgatcgttggcgttggttccgcgctgaaatcaccatcctcatccaacgagcaaaccgcttccggcgagaagagcatcaacttgtccggagatcaggacaataatacccagccagcggcccaggactcctctgcggcaaacaacgcgcaatcgcaggatgtctctctgccgcccatcgcgtctaacccgactcaagggcaggcgacggctgaaccacaagggcagcagcgcgttgaggttcagggtgatctgaataacgcgctgacccagcagcaggggcaaattgatagcgcggtagccaactctactctgcctacagaacctgctaccgttgcgccgctgcgcaatggcgccgccccgcgtcaggccactaccgagcgtcagacggcggcagcgccgcgtccggctgagcgtaagcatacggttatcgaaccaaaaccgcaggccacggcgaaagcgccgacgcagccgaaacaggttccggttcagcctaagcgtacagaaagcgtcgccgctacgaccccggcaaaaactcagccgaccactaagcctaccgctaccgcacaggctaaaccggctgcgactaccgctcctgcggcgaccaccgcgacagcaactactgctccggctgcgactgcagctgccgctccggcagcaacagcggcgactacgggtaaaagcgctggcgatgttggttcgatgaagtctgcgccgtccggccactatacgctgcagctcagcagctcttctaactacaacaacctcaatagttgggcgaagaaagagaagctggagaaatatgttgtctacgagactacgcgtaacggtcagccctggtatgtgctggtgagcggtatttacgcttcaaaagatgaagcgaaacgtgccgttgctacgctgccagcagatgtacaggcgaaaaatccgtgggcaaaaccgctgcatcaggttcagtctgacctgaaataa

SEQ ID NO: 256642 - DNA, 1095 bp, Klebsiella pneumoniae
atggagaggcttactgtaaccctcggggaacgtagttacccgattaccatcgcggctggtttgtttaacgatccagcttccttcctgccactgaaatcaggcgatcaggttatgctggtcaccaatgaaacgctggcgccgctttatctggataccgtacgctccgtacttgagcaagcgggagtaaaagtcgatagcgtgattcttcccgacggcgagcagtttaaaagcctggcggtgatggatactgtttttaccgcgctattgcaaaaaccacacggccgcgacacgacgctagtggcgctcggcggtggggtgatcggtgatttaaccggatttgccgccgccagctaccagcgtggcgtgcgctttattcaggttcctaccactctgctgtcgcaggtggactcttcggtgggcggcaaaacggccgtcaaccaccctctcggtaaaaacatgattggcgccttctggcagccagtttccgttgttgtcgatctcaactgtcttaaaacgctgccgaagcgtgagctctcttccggtctggctgaagtgatcaagtacggcgtgattcttgacggcgaatttttcgactggctggaaaataatattgatgcactgatggcgctggatgaaaaagcgatggcgtactgtatccgtcgctgttgtgagctgaaagctgaagttgtcgctgccgacgagcgcgaaaccgggttacgtgctttactcaatcttggccatacttttggtcatgctatcgaagctgaaatgggctacggtaattggttacatggtgaagcggttgctgccggcatggtgatggcggcgcatgcgtccgagcgtttggggcggtttaatccgcaggatacgcagcgaattatccatctgctgcaacgtgcaggcctgccggtgtgcgggccgcaggagatgacagctgacgcgtatttgccccacatgatgcgtgataaaaaagtactggcaggcgagatgcggctggtgctacccctcgcgatagggaagagcgagatacgcggcggagtaccgcatgatgttgttcttggcgcgattgctgatactcagcaggcgcaacaataa

SEQ ID NO: 256643 - DNA, 435 bp, Klebsiella pneumoniae
atggaattttacgattccgatcaagaaattgagaaacgcactggcgcagatgtgggttgggtctttgatgtagaaggcgaagacggcttccgcgaccgtgaagaaaaaatcatcaatgagttgacggaaaaacagggaatcgtgctggcaaccggcggtggctctgtaaaatcccgtgaaacgcgtaaccgtctctccgcccgcggcgtggtggtgtacctggaaacaactatcgaaaagcagcttgcccgtacgcagcgcgataaaaagcgtcctttgttacaagttgatgcgccgcctcgcgaagttctggaagcgttggcagatgagcgcaatccactgtacgaagagattgctgatgtcactatccgcactgacgatcaaagcgcgaaagtggtagcaaaccagattattcatatgctggaaagcaattga

SEQ ID NO: 256644 - DNA, 1014 bp, Klebsiella pneumoniae
atgcgcttctatcagatcgaaccaacgctggagaactactggcgcggcattattctttttggcaaaaacgtcgcctcctataagtttgcgctggcgcatgcgctgtacgatatccgccacgatggtagcgatctgatacgcctcgaggagctggcggtgccgttcagccggcatctgtgtcgccatcttgagcacgcccccaaacagatcacgtcgccaaaaagccagtttctcagcgcttgcagccgcttcaatcgccaggagataacccaggatcagctcatcgcggcaacggtcaagctcggctttagcgtggtgctggataaatttcataacgtgaaccagggcgaaatcgccaggcgcttttttatcgacgagcgtaaaacgcatcagggcatccgcctgaccgacgacttttattctctgacggagcgccagcagtaccagaacctgatccacgaaacggacgcccgctggcgtctggtggagcaggcgtgggcgatgaatatcgccagcaacctgatcgccgtggaatatgatgccgccgaacagcagctctttagcaccctgaatacccgacgggttgccatctccagctgtcgcgacagcctgaacggctaccaaaaaggccgctgcttttactgctatgcgccgattagtctcgaaagtggggatgagaacctggccgacgttgaccactttatcccgtgggcggcgcgcggcgaggtggcgaatatcaacggcgtctggaacctggttctcgcctgcaagagctgcaaccgcggggagaaaggcaagtttatgcgggtaccgtcggcaaaattgctgcgccgcctgcgcgacagaaacgaatattttattaccagccaccttcccttgcgtgaaaccttaatccgtcagaccggcaacacgaccgcccgccgcgatgacttcctcgccaaaatctggaacactgcgcgcattacgctccttcatgaatgggaacctcaggccgccggaacggatatattctga

SEQ ID NO: 256645 - DNA, 579 bp, Klebsiella pneumoniae
atgacaattaactactaccagcagaacgctgacagctttgtggcttcaaccgtcgctgtcgatatgacctctctgtacgcgccttttatcggggcgattgaaccgaacgggctgatcctcgatgcggggtgtggctccggacgcgatgccaaagcctttgccgatatgggctaccgggtcgaggcgtttgacgcctcaccggccatggtcgagcgggctgcgcaacacagcggactggccgtgcgtcaggcgacttttcaaagtatcagcgaaagcgcacgatatgacggcatctggtgctgcgcttcgctgctgcacgttcccgccgctgagctgccgggagtgatgcacaaactggctacggccctcaaacccggcggtgtctggtacgtctcatttaaatacggttcaggcgagcgagaaaaagaggggcggcggtttaccgatctcgatgaagcagggctgacgacgctggtcgaaccgctggcggatatccgtctcgccaacatgtggcagacggtggataagcgcccggagcggagcgaaatctggctcaacgcgctgttgctcaaaagctga

SEQ ID NO: 256646 - DNA, 1020 bp, Klebsiella pneumoniae
atgagcactattaaaagttacgccgccaaagaagcgggcgccgatctgtcgctgtgggagtacgatgccggcgaccttaagccggaagatgtcgaagtgcaggtggagtactgcgggatctgccactccgacctgtcgatgatcgacaatgaatggggcatgtcgagctatccgctggtggccggtcacgaagtgattggccgggtggcggccctgggcagcgcggcgcaggataaggggctgaaggttggccagaaggtcggcattggctggacggcgcgcagctgcggccactgcgacgcctgtatcagcggcaaccacgtgaactgtctggaaggctcggtgcccaccatcatcaaccgcggcggcttcgccgataagctgcgcgccgactggcaatgggtgatcccgctgccggaaaacgtcgatcttgaatccgccgggccgatgctctgcggcggcatcacggtcttcaaaccgctgctgatgcatcatgtcacggcgaacagccgcgtcggcgtcatcggcattggcggcctcggccatatcgccatcaagctgctgcacgcgatgggcgcggaagtcaccgcctttagctctaacccggcgaaagagcaggaagtactggcaatgggcgccgatcgcgtggtgaacagccgcgatcccgaagccttaaaggcactggccggccagttcgacctgattatcaacaccgtcgccgtcgacctcgactggcagccgtactttgaagcgctggcgtacggcggcaacttccacaccgtcggggcagtgatgaagccgttcccggtccccgcttttaccctgattggcggcgaccgcagcatctccggttcggccaccggcaacccgtccgagctgcgcaagctgatgaaatttgccggacgcagcaaagtcgcgccgaccaccgagctgttcccgatgtcgcagatcaacgaggcgctgaagcacgttcgcgagggcaaggcccgctaccgcgtggtgctgaaagccgacttctga

SEQ ID NO: 256647 - DNA, 714 bp, Klebsiella pneumoniae
atgggtgtcccaggtgaggttctggatgtagtagagcagcactgtcgtggcgttatccggcccgccgcgggtcatcactgccacgtggtcgatctgggtgatggagtaaatcagcgccgtggttatcacaaagctcagggtcgggcgcagcagcggcagcgtgaccttaaagaatacctgcgtgcgggtggcgccttccatgatcgccgcttcgcgcgtggaggccggaatgctttgcagcccggcgaggaaaaacagcatgtaataaccggcgaacttccacacgccaatcagcgccagcgccagcagcgcgctattgctgcgccccagccagttgttgttcatcgggccgaacagcttcgccagatagtggtcgagcaggccaaggcccggcataaagataaacagccacagcgcggcggcgctgaccatcgggataatcatcgggaagaagaaggcggtgcgcagccagcggttgacgcggtgattctcggtcagggcgaccgccagcagcagggcgagggtcacgcccggtaccaccgtcagcaggatataaagcaggttattcaccagcgactgccagaagacgttgtcggcgaacagacgactaaagttctccagcccgacatactggccgccgtcgctgaccatgcgggtatcgaacaggctgtcataaatcgatcgcccgaggggaaaccaggtaaacagcaataa

SEQ ID NO: 256648 - DNA, 675 bp, Klebsiella pneumoniae
atggagccgttctatttcgaaggcatcaacgtcgaaccgacggatgaagcggatgaaacggatgaaaatgaggaagacgacgttcagcctgaaccggcggtcaaccacgcgccgaaagcagccatcgaactgatggtggttggcggctcccgcgtgcgtctttccggcgaaaaatcctcggatgaagatagcgacgacctgtccttcagttggggcgtgcctgcggcgatcgccgtggcggataaaaccgccgccgtcatcgagttcgacgtcccgaaagtgagcgaagataccgagttcacctttactctgttcgtacgcgatacctggggtgagccgtcaacgcagcagcgctttgtgctctccgtcgtcgccgctacccagagcgatgacagcgaagacgagtcggaagacaagaacgatgatgagccggcggacgaccaggataacagcgatgatcaacctcaaccggcggatgatgatgtagtgccgtcagacgaaaccacgccttatccgctgtggaatgccagcaccgtgtatggcggcaactggggtacctttgaaaccgtcagctggaaaggccataactaccaggtgaaatggtggtctcagggcaatcagccggacctgaactgcggccagttccaggtgtggaccgacctcggcgcgtactaa

SEQ ID NO: 256649 - DNA, 1242 bp, Klebsiella pneumoniae
atgaaccgacaatcctggctgctgaatctcagcttgctgaaaacccacccggcctttcgcgccgtctttatcgcccggtttatctcaattctgtcgcttggcctgctgggcgtggcgatcccggtacagatccagatgatgacccattcgacctggcaagtggggctgtcggtcaccttaaccggcggttcgatgtttgtcggtctgatgatcggcggcgtgcttgccgaccgctatgagcgtaagcgactgatcctgctggcgcgcggcacctgcggcatcggcttcgtcggcctgtgcctcaacgccatgctgccggaaccgtcgctcatcgctatctatctgctgggcatctgggacggcctgtttgcctcaatcggcgtgaccgcgctgctggcggcgaccccagcgctggttggccgggaaaatctgatgcaggccggggcgatcactatgttgacggtgcggctgggatcggtcatttcaccgatgatcggcggtctgctgctggcaaccggcggcgtggcctggaattacgggctggcggcggcaggtacttttattacgacgctgaccctgctgcgtttgccgcggctggcgccgccgccgcagccgcgcgaacatccgctaaaatcgctgaacgcgggattgaagtttctgtttaacagcccgcttatcggcggcattgcgctgcttggcggactgctgacgatggccagcgcggtgcgcgtgctctatccggcgctggccggaagctggcagatgtcggcgtcgcagattggcctgctgtacgcggcgatccctttgggagcggcgttcggcgcgttgaccagcggacagctggcgcagacggcgaagcccggcgtgctgatgctggcgaccaccgtcggctcgtttgtggcgattgcgctgttcagcctgatgccggtgtgggagctgggcgcgctgtgcctggcgctgtttggctggctgagcgcaataagctcgctgctgcaatatacgctgatccagacgcaaaccccggagaatatgctcgggcgcatcaacgggctgtggaccgcgcagaacgtgaccggcgatgcgataggcgcggcgctgttgggggggctgggcgcgattctgacgccggccgcttcggcgagcgccagcggctgggcgctggtgattgtgggcgtggtgctggtcgggctgctacgcgagctgcgccgctttcagcgcccggagacggtcagcgaaagctag

SEQ ID NO: 256650 - DNA, 990 bp, Klebsiella pneumoniae
atggccccgtcccgccgcctgatgtttagctgcctgctgctgctgatcgccagcgccctggtctccctgtgggggctcggcaccggcctggtaccgttaagcgttgaacaggttatctccgcgctgctcggcgatgcgccgcgcaatatcaccctggtggtgaccgagtggcgcctgccccgcgtgctgatggcgctgctgatcggcgccgccctcggcgtcagcggcgcgattttccagtcgctcacccgcaaccccttgggtagcccggacgtgatgggttttaacaccggggcgtggagcggcgtgctggtcgccatggtcatgttcggccagaacctggcggccatcgccgcggcggccatggctggcgggatcctcaccgcgctggtggtctggatactggcgtggcgcaacgggattgaaacctttcgcctgattattatcggcatcggcgtccgcgccatgctggtagcattcaatacctggctactgttgcgcgcttcgctggaaaccgccctctccgccgggctgtggtatgccggctcgcttaacggactgacctggggaaaaacctggccctccgcgccgctgattctcttgatgctggtttgcggagcgctgctggcgcggcgcatgcggctgctggagatgggtgacgataccgcctgtgcgctgggcgtgcgggttgagcgttcgcgcctgctgatgatgctggtcggggtggtactgaccgccgccgccaccgcgctcgccgggccgatttcatttatcgccctggtggccccgcatatcgcgcgccgcctcagcggtaccgcgcgctgggggctgactcaggcggcgctgtgcggcgccctgctgctggccatctccgactacgccgcgcagcgtctgtttatgccctatcagttaccggtgggcgtggtgaccgtcagcattggcggcatctacctcatcgcgttgttaattcaggagtcccgcaaaaaatga

SEQ ID NO: 256651 - DNA, 795 bp, Klebsiella pneumoniae
atgaccgctgttacctcccgtttgcgcggcgatcggctgaccctggcgtacggcaaaaagaccatcgccgaatcactgaacgtcaccattcccgatggccactttaccgcgattatcggtcccaacggctgcggtaagtcgaccctgctgcgcaccctgagccgcctgatgacgcctaccagcggtcatgtctggctcgacggcgaacagatccagcattacgccagtaaagaggtggcaaagcgcatcggcctgctggcgcagaacgccaccacgccgggggatataacggttcaggagctggtcgcccgcggccgctatccgcaccagccgctgtttacccgctggcgcaaagaggatgaagaggcggtcaccagggcgatgaaggccaccggcattaccgacctcgcgcaacaaagcgtcgatacgctctccggcggccagcgccagcgggcgtggatcgccatggtgctggcccaggaaacggcgattatgctgctggatgagcccaccacctggctggatatcagccatcaaatcgatctgctggagctgctgagcgagctgaatcaggaaaagggctatacgctggcggcggtgctgcacgacctgaatcaggcctgccgctacgccacccacttgattgccctgcgcgacggtaaaatcgtcgccgagggcgcgccgaaggagattgtcaacgcggcgctgatcgagaagatttacggcctgcgctgtacgattattgaagatccggtggcgcatacgccgctggtagtgccgctgggtcgcaagtag

SEQ ID NO: 256652 - DNA, 858 bp, Klebsiella pneumoniae
atgcgcctggcggcgctgctgagccgcgaactggaacgccaggtgacgcctggccagataatggtcgcttcttccgtcggcaagctgagcgcgctgctggcatcggatctgagcgatgagcaggcgcaacggctgggcttcgacgcgatcctgccgctgcgcgagagcgacggtccgacgctgttttgcttccatccggcttccggttttgcctggcagttcagcgtgctggcgcgttatttaagcccgcgctggtcgatcgtcggcattcagtcgccgcgaccgcaggggccgatggcgacggcggcggatctggatgcggtatgcgaacatcatctgcaaaccctgctttcgcagcagccgcgcggcccgtactatctgtttggctattcgctcggcggtaccctggcgcagggaattgccgcccgtttacgccagcgcggcgaagcggtggccttcctcgggctgctggatacctggccgcccgagacgcagaactgggcggagaaagaggcgaacggtctggatgctgaggtgctggcggaaattgcccgcgaacgtgaggcgtttctggccgcccagcaggggcaggcttccggcgagctgttcagcgtgattgaaggcaactatgccgatgcggtgcgcctgctgactaccgcgcacagcgcgaagtttgacggtaaggcgacgctgttcgtggcggagaaaacccggcaacccgggatggacccgcaggtggtgtgggggccgtggatcggcgagctggaggtgtttagccaggattgcgcccacgtggatattatctctccgcaggcttttgaagcgatcggtccggtggtcagggagatactcggttag

SEQ ID NO: 256653 - DNA, 570 bp, Klebsiella pneumoniae
atgctcaaatcaactctcgcggcggtggctgccgttttcgccatttcagcattttccccggccatggcggcaaagggggatcctcatgtgttgctgaccacgtctgcgggcaatattgagcttgagctgaatagccagaaagcgcccatctcggttgataacttcctcaagtacgtgaacagcggtttttataacaacaccacttttcaccgtgtgatcccgggctttatggtgcagggcggcggctttaacgaacagatgcagcagaaacagcctaatccgccgattaaaaatgaagccgacaacggtctgcgcaacacgcgcggcaccatcgccatggcgcgtactgccgatcaggacagcgccaccagccagttctttatcaatattgcggataacgccttcctcgatcatggccagcgtgatttcggctatgcggtgtttggtaaagtagtcaaaggcatggacgtcgcggataaaatttctcaggtgccgactcacaacgttgggccgtatcaaaatgttccgtccaaacctatcgttattctttccgcaaaagtactgccgtaa

SEQ ID NO: 256654 - DNA, 168 bp, Klebsiella pneumoniae; identical to SEQ ID NO: 173295

SEQ ID NO: 256655 - DNA, 603 bp, Klebsiella pneumoniae
atgagcgataaatttggtgagggccgggatccttatctttactccggtctgcaggtcatgcgtaaccgcttaggtatccgccaggcacagcgccttgagcaggcggcgtgggagctgaccgcgctacgcgcggcaaccatcgaactcgggccactggtgcgcggcttgcctcatctctgcgcgattcatcgccagctctatcaggatattttcgactgggcgggacaactgcgtgaagtggatatctatcagggcgacacccgtttctgccatttcgcctatatcgaaaaagaggggaacacgctctttcaggccctggaagaggaaggctatctggtggggcttgctcaggataaattcattgaacgtctcgctcattactactgcgaaattaacgtcctgcatcctttccgaatcggcaacggcctggcgcaacgcattttctttgaacaactggctattcatgctggctatacgctggactggcgtgatattgccgtcgatgtatggaaccaggccaaccagagtggcgcaatgggcgacctttctccactgcagacgatatttcgtaaagtggtaagcgaagctgcggaaactgagtag

SEQ ID NO: 256656 - DNA, 564 bp, Klebsiella pneumoniae
atgatcctgcttatcgataactacgattcttttacctggaatctgtaccagtatttctgcgaacttggggcagaagtgcaggtcaggcgtaatgacgagctgacgttagcggaaattgttgcgctggcgcccgcgaaaatcgttatttcgccggggccctgcacgccgaatgagtccgggatttcgctggcggttattcgccacttctccggcaagacgccaatcttaggcgtttgcctgggccaccaggcgatagcccaggttttcggcgccgcgatcgtgcgggcggccaaagtcatgcacgggaaaacgtcccccattagccatcgtggccagggggtattttgtggcctcaataatccgctaaccgtgacccgctaccactccctgctgattgacccgctaacgctgcctgaatgctttgaggtgaccgcccgcagcgaggagggtgagatcatgggcattcgccaccgcgaattcgaccttgagggcgtgcaatttcatccggagagcattctcagcgaacagggccaccagctgctggcaaacttcctcaatcggtga

SEQ ID NO: 256657 - DNA, 1221 bp, Klebsiella pneumoniae
atggcaactgaacaaccggcgatcacccgcgcgacattcgatgaggttattttgccaatttatgcaccggcggaatttattccggtgaagggcaaaggaagccgggtatgggatcagcaggggaaagagtacgttgatttcgccgggggtattgccgtgactgcgctcggacattgccatccggcgctggtggcggcactccatgaacagggtgaaaagctgtggcataccagcaacgtttttaccaacgaaccggccctgcgcctggggcgtaagctggttgatgcgacgttcgccgatcgcgtcgtgtttatgaactccggaaccgaagccaacgaaacggcttttaagctggcgcgccactataccgtcactcgccatagtccgtacaaaaccaaaattatcgccttccataacgcattccacggtcgatcgctgtttaccgtctccgtcggcgggcagccgaaatattccgatggctttgggcctaaaccggccgatatcgttcacgtgccgtttaacgatttacacgcggtgaaagccgtgatggacgatcatacctgcgcggtggtggtcgagccgattcagggagaaggcggcgtgaccgcagcgacgccggaatttctgcaaggcttgcgcgatctgtgcgaccagcatcaggctttgctggtctttgatgaagttcagtgcggtatggggcgcacgggctcgctgtttgcttatatgcactatggcgtaacgccggatattctgaccagcgctaaggcgctgggcggcggtttccctatcagcgcgatgctgaccacccatgacatcgccagcgcgttccacgccggttctcatggttcgacctacggcggtaaccccctggcctgcgcggtgggcggagcggcgttcgatctgattaacacaccggaagtgctggacggcgtcaccgcgaagcgcgagctgtttgttgagcaccttcagcaaattgacgcgcggttcgatctgttcagcgatatccgcggcatgggactgcttatcggcgccgagcttaagccgcagtatcacgggaaagcgcgcgatttcctctacgccgccgcagaggctggcgtcatggtgctcaatgccggaccggacgtgatgcgctttgtaccgtcgctggtgattgatgatagcgatattgctgaaggcatgacgcgctttgccaaggctgttgagcgggtgctcagcgcttag

SEQ ID NO: 256658 - DNA, 492 bp, Klebsiella pneumoniae
gtggctgtactcatcaaggatgaagaaggtaaagagatgatcctctcttacctcaaccagggcgatttcatcggtgaattaggcctgtttgaagaaggtcaggagcgtagcgcctgggtacgtgcgaaaaccgcatgtgaagtggccgaaatctcctacaaaaaattccgtcagctgatccaggttaacccggatatcctgatgcgtctctcttcgcagatggcgcgccgtctgcaggttacgtcggaaaaagtgggcaacctcgctttcctcgacgtgactggtcgtatcgcccagacgctgctgaacctggcaaaacagccggatgcgatgacccacccggacggtatgcaaattaaaattacccgccaggaaatcggtcagattgtcggatgctctcgcgaaaccgttggccgcatcctgaaaatgctggaagatcaaaacctgatctcggcacacggtaaaactatcgtcgtctacggtacccgttaa

SEQ ID NO: 256659 - DNA, 414 bp, Klebsiella pneumoniae
atgacctggaaacgtcagctgacgctggatgagcttaacaccaccagcagcaatacgatggtggcccatctgggcatcgtctatacccggattgaggagggcgtgctggaagcggaaatgccggtcgacgcgcgaacccatcagccgttcgggctgctgcacggcggcgcctctgcggcgctggcggaaaccctcggctcgatggccgggtggctgatgaccgaagaggggcagtgcgtagtggggaccgagctcaacgccacccatcaccgggcggtctccagcggtaaagtccgcggcgaatgccgggcgctgcacctggggcgtcagggccagagctgggaaattgcgatattcgacgagcgaggacggcgctgctgcacctgccgtctgggcacggcggtcctcggctga

SEQ ID NO: 256660 - DNA, 756 bp, Klebsiella pneumoniae
atgaacaggctcgattttcacggccagaccgtgtggatcaccggcgcgggtaaggggatcggctacgctaccgcgctggcgttcgttgaggccggcgcgcaggtaaccggttttgatctggcgttcgacggtgaaagctatccgtttgccaccgagacgctgaacgtcgccgacgcgcagcaggtggcgcaggtatgcggccgcctgctggcagggatcgagcggctggatgtgttggttaatgcggccggtattttgcggatgggggcgaccgatgcgctgagccttgaagattggcagcagacctttgccgtcaacgttggcggggcgtttaacctgttccagcagacgatggcgcagttccgccgccagaaaggcggggcgattgtgactgtggcgtccgacgctgcgcataccccgcgcatcggcatgagcgcctacggcgcatcaaaggcggcgctaaagagcctggcgctgaccgtcggcctggagctggcgggcagcggcgtacgctgtaatctggtttctcctggttctaccgacaccgatatgcagcggacgctgtgggtgagcgatgatgcagagcagcagcgcattcgcggcttcggcgagcagtttaagctggggattcctctgggcaaaatcgcccacccgcaggagattgccaataccattctgttcctcgcctccgaccacgccagccatatcacgctgcaggatatcgtggtggacggcggctcgacgctgggggcataa

SEQ ID NO: 256661 - DNA, 852 bp, Klebsiella pneumoniae
atggcaatccctgaattacaggcttacgcgctgccggaagccagcgatatcccggcgaacaaagtgaactgggcatttgagccgtcccgtgccgcgctgctgatccacgatatgcaggagtatttccttaatttctggggcgaaaacagcgcgatgatggagaaagtggtggccaacatcgccgccctgcgcgagttctgcaaacagaataatattccggttttttacaccgcccagccgaaagagcagagcgatgaagaccgcgcgctgctgaacgacatgtgggggccgggtctgacccgttctcctgaacagcagcaggtcattgccgcgcttgcgccggacgataacgacaccgtgctggtgaagtggcgctacagcgcgtttcatcgctcgccgctggaggagatactgaaagaggcggggcgcgatcagctgattatcaccggcgtgtacgcccatatcggctgcatgaccaccgcgactgacgcgtttatgcgcgatattaagccatttttcgttgccgatgcgctggctgatttcagccgcgaggagcatctgatggcgctcaactacgtggcgggtcgctccggtcgcgtggtgatgacggaagagctgctgccgctgccggcatcgaaagcggcgctgcgcgcgctggtgctgccgctgctcgatgaatccgatgaaccgatggatgacgaaaatctgatcgattacggcctggattcggtacgcatgatggcgctcgccgcgcgctggcgtaaagtgcacggcgatattgattttgtggtgctggcgaaaaaaccgaccatcgatgcctggtgggcgctgctttctcgcgaggtgaaataa

SEQ ID NO: 256662 - DNA, 1608 bp, Klebsiella pneumoniae
atgatcgaatttacccgctggccggaagcgttcgcggcccgctatcggcaaaaaggttactggcaggatctgccgctgactaacctgattacccgtcatgccgaaaacgatgctcccgccattatcgacggcgacaaacgctacagttatcgtgagttcaaccgcctggttgataatctcgcctcctcgctgcagcgtcagggcctgaagcgcggcgaaacggcgctggtgcagctgggcaacgtcgcggaattttatctgacgtttttcgcgctgctgcggatcggcgtggcgccggtgaatgcgctgttcagccatcagcgtagcgagctcaacgcctacgccgcccagattgaacccgccttgctgattgccgatcgcgaacacgcgctgtttgccgatgacgaatttctgaatgattttgtcagccagcatccgtcgatacgcgtggctctgctgctcaacgacagcggcgaacggagcctgacggcagccattgagcggcctggcgataatttcattgccggaccaacgcctgccgacgaagtggcctttttccagctttccggcggcagcaccggtacgccgaagctcatcccgcgtacccataacgactacgactacagcattcgccgcagcaacgagctgtgcggcgtgagcgccgaaacgcgctacctgaacgcgcttcccgccgcccataactacgcgatgagttcgccaggttctttaggcgtcttcctcgccggcggtgtggtggtactggcgcacgatccgagcgccacactctgcttcccgctgattgaaaaacaccagattaacctgacctcgctggttccgcctgcggtcagcctgtggctgcaggagatccaggattccggcagcaacgcccgcctgcaatcgctgcggctgctgcaggttggcggggcgcgcctgtccgcgacgctcgcggcgcgtattccggcggaaatcggctgtcagcttcagcaggtcttcggcatggcggaggggctggtgaactatacccgcctcaacgatagccccgagcgcattatcaatactcagggttgcccaatgtgtccggacgatgaagtgtgggtggccgatgcgcagggcaatccgctgccgcggggcgaagtcggacggctgatgacccgtggtccttacaccttccgcggctattacaagagtccgcagcataatgccgaagcctttgatgccgacgggttctactgttctggcgatctgatctcgatcgatgaagacggctatatcaccgtgcagggacgggaaaaagatcagatcaaccgcggcggagagaagatcgcggcggaagagatcgaaaacctgctgctgcgccatccggcggtgatccacgtcgcgctggtcagtatggaagatagcctgctgggagaaaagagctgcgcatatctggtggtaaaagaacctctgcgcgcggtggcggtacgccgcttcctgcgggaacaaggggtcgcagaatttaaactgccggatcgcgtggagtgcgttgatgcgctgccgctgacgccggtgggcaaagtcgataaaaaacaattacgtcagtggctggctgaacgcaagctgggctga

SEQ ID NO: 256663 - DNA, 1137 bp, Klebsiella pneumoniae
atgactctgccgccggaaagcttcttctttatgtcgccgtaccgcagtttcaccaccgctggctgctttagtcggttttctcatcctgccgccgatggcgaaaatctggatggggaatttcagcacaaaatggcggccgcctttgcagcggcgcgggctgccgggatcgctaagccgataatggtcggcgccattccgtttgataccagcgagccgtccgagctgtttatacccacaagctgggaaaccttctcccgaccagaaaagcagcactccgcgcgctatgcgtcggggctgcagcccatggacgtgattcagcgccgggagatccccgaacaggacaccttcatggcgatggtgacgcgcgcggcggccctgaccgcgacgccggaagtggacaaagtggtcctgtcgcgcctgattgatatcaccacccgtgagcgggttgatagcggtgcgctgctggagcgtctgattgcccagaaccccgccagctataacttccacgtgccgctttcggacggcggcgtgctgctgggcgccagcccggagctgctgttacgtaaagaaggggcgcatttttactctctgccgttggccggttcggcccgccgtcagccggacgatgtgctggaccgcgaagcggggcacaagctgctggcgtcggaaaaagaccgccatgaacatgagctggtgacccaggcgatgaaggccgtactggcgcctcgcagcagcgagctaagcctgccggattctccgcagctgatcaccacgccgaccctgtggcatctggcgacacagattcagggcgccgcgctggcaaacgagaatgccatgtcgctggcctgtctgctgcatcccaccccggcgctgagcggcttcccgcatcaggcggcaaaacgcctgattaacgaactggagccgttcgatcgccagctgttcggcggtatcgtcggctggtgcgatgatgaaggcaacggcgagtgggtggtcaccatccgctgcgcgcgcctgcatcaacgcacgctgcggctgtttgcaggcgcagggatcgtcccggcgtcttcgccgctaggcgagtggcgcgaaaccggcgtcaaactgaccaccatgctgaacgtattcggcttgcaataa

SEQ ID NO: 256664 - DNA, 330 bp, Klebsiella pneumoniae; identical to SEQ ID NO: 173044

SEQ ID NO: 256665 - DNA, 612 bp, Klebsiella pneumoniae
atggcaactgatactcttgcgcataacgcccacgcgcacgaacacgggcaccatgatacaggaccgatgaaggtattcggtttctggatctacctgatgagcgactgcattatcttcgccactctgttcgctacctatgccgttctggtgaacggcacggcgggcggtccgaccggtaaagatatttttgaactgccgttcgttctggttgaaaccgcgctgctgctgttcagctccatcacctacggcatggcggctatcgccatgtacaaaaacaacaagagccaggtcgtttcctggctcgcgctgaccttcctcttcggggcaggattcatcgcgatggagctctatgaattccatcatctgattgttgaaggtatgggtccggatcgcagcggcttcctgtcagcgttcttcgcgctggtcggcacccacggtctgcacgtgacttcaggtctaatctggatggcggtgctgatggttcaggtttcccgccgtgggctgaccagcactaaccgcacccgtattatgtgcctgagcctgttctggcacttcctggacgtcgtgtggatctgcgtgttctctgttgtttatctgatgggggcgatgtaa

SEQ ID NO: 256666 - DNA, 948 bp, Klebsiella pneumoniae
atgagacttaggaaatacaataaaagtttgggatggatgtcattaatcgcaggcactgtattactcagtggttgtgattctgcactcctcgacccaaaaggacagattggactggagcaacgctctctgattctgacggcctttggcctgatgatgatcgtcgttattccagccgtcttgatggcagtaggatttgcctggaagtatcgtgcgagcaataaagatgcgaagtatagcccgaactggtcacactccaacaaagttgaagctgtggtctggacggttcctattctgatcatcctgttcctggccgttctgacctggaaaacaactcacgcattagagccgagcaaaccgcttgctcacgatgaaaaacctatcaccatcgaagtcgtttcgatggactggaaatggttcttcatctatccggaacaaggcattgctaccgtcaacgaaatcgccttcccggcgaacgtaccggtacacttcaaagtgacctccaactccgtgatgaactcgttctttatcccacgtttaggtagccagatttacgcaatggccgggatgcagactcagctgcacctcatcgcgaacgaacctggtacttacgacggtatctccgccagctatagcggcccgggcttctcaggaatgaagttcaaagctatcgccacgccggatcgtgcaaccttcgatcagtgggtagcgaaagccaaacagtctgcgaacgctatggactccatggaaacgttcgacaaactggctgcgcctagcgaatacaacaaagtggaatacttctctaacgtgaaacctgatttgtttaaagatgtggtgaacaaatttatgtctcacggtaagagcatggatatgacccaacctgagggcgagcatgcagcgcacgaaggaatggaaggcatggacatgagccacgcggaaaccgctcactaa

SEQ ID NO: 256667 - DNA, 1476 bp, Klebsiella pneumoniae
atgtccaatcattatttacgcattttcacgcagccaaaatcagctatcctgctgattctcggtttcgcctctggattaccgctagccctgacctccggcacgctacaggcgtggatgaccgttgaaaacatcgatctcaaaaccatcggttttttctcgctcgtcgggcaggcctacgtctttaagttcctctggtcgccggtaatggaccgctatacgccgccgtttcttggtcgtcgacgcggctggctgctggcgactcagatcctgctacttattgccattgcggcgatgggattccttgaaccttccacgcaactacgctggatggcggcgctggcggtcgttatcgccttttgctccgcctcgcaggatatcgtgtttgacgcgtggaagaccgacgtgctggccgctgaagagcgaggcaccggggcggcaatcagcgtgctgggctatcgtctggggatgctggtttccggcgggttggcgctatggctggccgatcgctggctgggatggcagggaatgtactggctgatggccgccctgctaatcccctgcattatagctactctgctggccccggaacccagcgacgtcattccggtgccgaagacgctggagcaggccgtcgccgcaccgctgcgcgacttcttcggccgcaataatgcctggcttattctcttgcttatcgtcctttataagcttggcgacgcgtttgccatgagtctgaccaccaccttcctgattcgcggcgtcggttttgatgcgggcgaagtgggcatggtcaataaaacgctcggcctgttcgccacgattgtcggtgcgctttatggcggcgtgcttatgcagcgcctgacgcttttccgcgcgctgctgattttcggcctgctgcagggggtatccaacgccgggtattggctgctctcaattaccgataaacaccttttctccatggcgacggcggtgtttttcgaaaacctgtgcggcggaatgggcacggcggcattcgttgcgctgctgatgacgctgtgcaataagtcattttcagccacccagttcgctttgctctcagcgctctccgccgttgggcgcgtatatgtggggcctatcgccggctggtttgtcgaagcccacggatggcctgctttctatctcttttccgttgttgctgcggttccggggattttgctgctgttaatttgtcgccgtacgcttgaacatactcaacgttcggagagctttatgccgcgcacgctttttcctcaggcctacgggctggcattagttattctggcgattggctgcctgatgctggcgatatggctactgctgctggtcctcaacgcgctggattacaccaccttttccttcctcgcgggcctgcttgaggttgccgttcttaccgccgttgcgggtattttgctcggcgcgttccttgactacctcgcattgcgcaaaaccgagttgatttaa

SEQ ID NO: 256668 - DNA, 318 bp, Klebsiella pneumoniae
atgacctcgcgtggctacatgattggtccaaacggcgcggttgacctgcaaatcatcgtcaacaaactgtacgccgacgtttctcaaggcaacgtacgctacaacattgcgaccaaagcggatattgccattatcgcgaccgccgccaacggcaataagatgacgaaaaactaccgtgccagctactctgttgaaggcgccttccaggcctcgaacaaaaatattgccgatgcggttaatagcgtcatgaccgacaccatcgccgacatggcgcaggacaccagcattcacgatttcatcaagcaaaacgcgcgttaa

SEQ ID NO: 256669 - DNA, 462 bp, Klebsiella pneumoniae
atgaattataaatacctaataatcctagcgctaatcagtacttcagccatagcatcggggccatccctcatagtgtgcgaacccaaagacaaaagtgaccagaatgctactggaatctggcctcgtccgtaccttgaaggagacagactttgttttgacattcgtgttgacgaaggcaaggcatgtgttggtaatgctcgggctaccaaatggctaagcggggccataatcgttgacattgatggtaagccacaaggtcgtgacgatacatggctcagggttgtaaacccaaccatctcagacaaaaaaattgagtacaaaatagaaggatcaagggacgacaaacattgggggttagtctccgatgtttccattaaccgcctttcaggagaggctgtagattggtttattggtgaacatggcggcacaagttatcagtgtctgtctcttatacacatctga

SEQ ID NO: 256670 - DNA, 1149 bp, Klebsiella pneumoniae
atgctctctgaaactttgcttgaagagttatgctataaaggtgagggttctgatttggattataaatcagaacgttacaatttttctaggaaagtcagtgacgaagaaaaatcagaaatgctgaaggatatcctggcattggcaaacacgcacagggaaggtactgcctatatcttgatgggcttcaaggaaaatcccccgtaccctgcagaggtagtggggttatcccaagaaggggttattgacgactcgcgtcttcaagagtttgttaatggaaaattagagactaaattgacatttcgctacgaagagggattatttgatggtaagcatatcgccgtgatttccattccgaaacagcagcgaccgctttacctcaagaaagatttcggtaagttgcttaaagacactgtttatgtacgcagggggagctctacaggcatagcttctccaagagaaatcgcattgatgggggctgccaatttggcaagaggtgatgctcaggtcgagctcctgtttcaaacagcggaaaaccagctattaccatcctttttcgaaaagacttttctaatttttcccagtaatttgcctgatttagagaaacagaaagggttgtatactcttggaggtattgcgaacaaagattattggcgtgattgtgcagcgtaccattcttatagagaacggctaatacaggtgagattgtctttttccaaccagtcagagttttctcttagtgacgtgcaattagaaatcacatgccgcagcccagaagatagggatatttcgctaatgcgagctgacgatctacctcccgaaccagaaatgacacttatcctaagtggtttagcttctcattttgaacatgcaaaacgaaatatgagcgttgatgaacatggcagccaacctactgtgcacgccacattgggaattgtgaggccagggcaaacgattcgtactgaggaagatctggtaatactgccatcaggcccgggaaattacgtactttatgtgcgtgtctttgctagcgaaattcctaaacccatattgtttgaacactcatttggtgtttctggcaaagttatagagaaggatttttcagacctaaatcaactgatctactcggcatcaagtgaaaacggagactaa

SEQ ID NO: 256671 - DNA, 483 bp, Klebsiella pneumoniae
atgaagataactgaagataatctcaatgaaataattgatttgctgaatgatttaatttgcgatgaaaatttgttaacacgcgcggaacgccttgatttggtccgggctgttgccgccatcggggcaatgaaagcacgtgttgctatagtgtcttcacaaaaatcttcgtcggtaaaaaagagtggagaaaagaaagaaaaggttatcgatccacggtttccaaacgctggcataccctggaatgacaatgatgagtccatgctacgggaagtattagagcctattccggaggaggagataggagagcatctcttctggctggctgaaaagcttgggcgcactccttatagtgtagcttgtaagatagctcagataaaaaaattacctgcagaatggaaagatagcttccgtaaaatttccgatcggattcgcgattcgaaaatgacgattggcgaatatattcaagctaaaggccatgaatag

SEQ ID NO: 256672 - DNA, 2175 bp, Klebsiella pneumoniae
atgccaacaatcaaagacatagcaaagctagccggtgtgtcacacggcactgtctcgaacgtacttaatggcagaggaaatgtcagcgttgagaagattgaagcggttcaacgagcggctaaggaagtgggctatcagttaaatgcgcaggcgcaatcgttaagagccagtaaaagccagggggtggcgctgttgctgccagacataaatgcggagcagtattaccagctttaccggggcttacatcaggtatgtcagccatcattaagcgaaccgctggatctttacctgaccaacgatctgcccaacctggaactggatattctgcaaacgctggcggcaaaatcttaccagaccattgttaccgtcagctgcctgagcaatagccaaccttattatgaaatgctcaagctgcccgcggaacagatcctttttgcgtaccgacaacctgccggagctgacaactatttcagcctcgattacgtcactgcgggtgaacaccttgcgagaagagcgctcgcacagcggccgggccatatcggtatcttttgcgaaccgcttgaatatgctcatagcgcatgttttattcaggcgatacaggagacctgccggacagtcagtccgcagactaagctcaccgttttatcctcgcaggcgggcgagtctaacaccgtagcgtttgattttttccgcggcgttgcccccgatattttcatcactcaggatagtgataaaacgcgagccgtgacgcaggcagcctggtttggtagcgcgcagtcctgtccgccgatactgcagttaagtgataatcttccggcagccttcgacggcgtcacaaactaccagatggactatggtcgcctgggtaccgccatcgcttcccatattcgccagcctaaaaaacaggtaacgcatcgaattctgacaaatagcggattttcattagatggccaatccgtccagccgcctgagaccgaggcgacgctgaatatgttaattttgcccagcccctcaaccgatgcgctgaaaaaactgttacctcacttttatcgtcagaccggtatcaaggtaaatcttgcggtttatccttatgatgaagtgtttgaaattctttcccatcttcatctgcatccctattacgatctcctgcgcatcgatatggcctgttttccctggtttgcagaaaaagcgttattgccgctggagtcgattgcccctgcgctgccgcagctgctgactcatttttctgaccagattcgacagcacttcagcatggtgaatggcaccgcgtgggccatcccctttgatgccagtatgcagctcctgttttaccgacgcgatctctttgaagatgcgacgataaaacggatgttctacgaaacgacgggaaaagagttaacgctacccgaaaactttgcgcaatttgatgagttagcggctttcttcagtcgccagcatcagccggataacagactgcgcccgatgggcacggcggtgaccttaggcagctcagggcttatcgccacggaatatctgctgcgttactacgcgctcggcggacgtctggttcgcgaaggcgaaccggttcaactggagacttcgcttgccgctacggcgcttgaacagtacctgcaacagctctccgtcgccgtgaatctctcaggagaatggtggagtgacgccgttaagcagtttgagcgcggcaacctcgccatgttgatcatgtatctcaatttgttcaatgacgtcgcgcatagccctatcgcccccactatcggctatgcttcagtcccgggacagcttccacagttgggagggggatccattgggatgtcccgctacagcaaaaagaaaaaacaggttgagcagttcttccactggctttattccgatgaaattgcgcgtcatctggttctgctcggaggaaactgcgcctggtcaggggtttgtcacgatcagaacgtccttaacctctatccatggtttaatttattgaatgaaaagggcatggtcgggataagagagtcacaggatacgcagggtaaacctttcaacctgcgccaggcagaaattattatcggccagggcgtgacgaacgcgataaatgggattatggatgtctctcaggccgtggaatacattaacaggcgaataaaaaatgaaaccggcgcctga

SEQ ID NO: 256673 - DNA, 1935 bp, Klebsiella pneumoniae
atgaatatattcgatcactatcgccagcgctatgaaactgccaaggacgaagagttcacactgcaggagtttcttaccatctgtcggcaagatcgcagtgcttatgctaacgcagcagaaagattgctgatggccatcggtgagccggtcatggtcgatacggccctggaacccaggctatcccgtctcttttcaaaccgggtcgttgcgcgctatccggcatttgaagagttttacggtatggaagatgccatcgagcaaattgtttcttacttaaagcacgccgctcaggggcttgaagagaagaaacagattctgtatctgctgggccctgtgggcggcggtaaatcatcgcttgccgaacgccttaagtccttaatgcagcgcgtgcctatctatgtgcttagcgcaaacggagagcgtagcccggtcaacgaccatccgctatgtctgtttaacccgcaagaggatgcgcaaatcctcgaaaaagagtacggcattccaaaccgctatctgggaacaattatgtcgccgtgggcggccaagcgtctgcaggaattcggcggcgacattactaagttccgcgtggtgaaagtgtggccgtcaatcctggcgcagattgccatcgccaaaaccgagcccggcgacgaaaacaaccaggacatctcggcgctggtgggtaaagtggatatccgtaaactggaacactatgcgcagaatgacccggatgcctacggatattccggcgctctgtgccgcgccaaccaggggctgatggaatttgtagagatgtttaaagcgcctattaaggtgctgcatccgctgctgaccgcgacgcaggaagggaactataacggtactgaagggatctccgccctgccgtttaacgggattatcctcgcccactccaacgaatcggaatgggttaccttccgcaataacaagaacaatgaggccttcctcgaccgcgtgtacatcgtcaaggtgccttattgcctgcgcatctcggaagagatccgcatctatgaaaaactgctcaataacagcgaactgactcacgcgccctgcgcgccgggaaccctggaaacgctgtcgcgcttctcgattctgtcgcgcctgaaagagccggaaaactcgagcatctactcgaaaatgcgcgtctatgacggtgaaagcctgaaagataccgacccgaaagcgaaatcctatcaggagtatcgcgattatgccggcgttgatgaagggatgaacggcttgtctacccgcttcgcgttcaaaattctgtcgcgggtatttaactttgatcacgccgaagtcgccgcgaatccggtgcatctgttctacgtcctggagcagcaaattgagcgtgaacagttcccgcaggagcagtccgaacgttacctggagttcctcaaaggttatctgatcccgaaatacgccgagtttatcgggaaagagatccagaccgcctaccttgagtcttactcggaatacgggcagaacatttttgaccgttatgtgacctacgccgatttctggattcaggatcaggagtatcgcgacccggataccggccagctgtttgatcgcgagtcgctgaatgcggagctggaaaaaatcgagaagccggccgggatcagtaatccgaaagacttccgcaacgagattgtcaacttcgtgctgcgcgccagagcgcacaacagcggacgcaatccaaactggaccagctacgagaaactgcgcacggttattgagaagaaaatgttctccaataccgaagagctgttgccggtgatctcgttcaacaccaaaacgtcaaccgatgagcagaaaaaacacgatgactttgtcgaccgcatgatggagaaaggctatacccgcaagcaggttcgcctgctgtgcgaatggtatctgcgggtacgtaaatcatcctga

SEQ ID NO: 256674 - DNA, 747 bp, Klebsiella pneumoniae
gtgactaaaatcaaacttctggcacttggtgtgttgattgcgacttcagcatccgccgtacacgctgaagggaagttcactttaggggcgggtgtaggcgtcgttgaacatccgtacaagcagtatgatgctgatgtttacccggtgccggtgattaattacgagagcgataacttctggtttcgtggtttaggcggtggtctttacctgtggaatgatactaacgataagctttccgtgaccgcctactggtcgccgatgtactttaagccaggcgacagcgatagcgagcagatgcgccgtctggataaacgtaaatccacggtgatggcaggacttgcgtacgaacactatacgcagtacggtttcctgcgcaccgcgctgtcaggggacaccctggataacagcaacggtatcgtatgggatctggcctggctatatcgctacaccaacggcaatctgacgcttacgccgggtattggcgttgaatggaatagcgataatcagaacgagtactactatggtgtttcgaagcatgagtcgaatcgcagcggcatgcgcagctacgatccggacagcagctggaacccgtacctcgagctgtcggcaaactatcgtttcctcggcgactggagcgtatacggcgtggcccgctacactcgcttgtctgacgaaatcaccgatagtccgatggtggacaaatcctggagcggtctgatttcaaccgggatcacttactccttctga

SEQ ID NO: 256675 - DNA, 855 bp, Klebsiella pneumoniae
atggcacaaaggacaatcagttttggtgagcatccagcggtttccgtcatagggcaggggacctggtacatgggcgaaaacccggcgctgcgcgttcaggagtctgctgcactacgcgcgggcatcgatcttgggctcacggcgatcgatacggcggaaatgtatgctgacggcggcgccgaagaggttgtcggcgaagccattcgcggccagcgcgagcgcgtggtgctggtgtctaaagtgtatccgtggaacgctggcggtcgcaaaatagccagcgcctgcgaagccagcctgcgccgtctgaagaccgactatctcgatctctaccttctgcactggcgcggcgactacgcattgcaggagacggtggcaggtatggaagcgctcgttgcgcagggcaaaattcgtcgctggggcgtatcgaatcttgattacgctgatatgcaagaactctggcaggttgacggcggcgagcagtgcgcaactgaccaggtactctatcacctggcttctcgcggtattgaacatgatttgttgccatggtgccagcagcagcggctgccggtgatggcctactgtccgctggcccaggccggccgtctacgcaatggacttttaaatcataccgttgtgaaaaatattgcgcaggcccggggcgtaaccgccgcgcaggtgcttctggcgtgggttatcagccatcagggggtactggcgattccgaaagcatcgagtatcgaacatgttgagcaaaatgctgcggcgctggacatcgagctgaccgctgaagagagggcgcttctggaaaaagcttacccggcaccgggaagaaaaacaccgctggatatggtctga

SEQ ID NO: 256676 - DNA, 885 bp, Klebsiella pneumoniae
atgattaataaaatttttgccctcccggttatcgaacagcttacccctgtcctttcccgtcgccagtttgatgacctggaactgatcgtggttgatcatccgcaggttaaagcttccgtggctttccagggcgctcacctgctctcctggaagcccgcaggcgaagaagaggtcctgtggctcagcggcaatactccattcaaaaatggcgttgccctgcgcggcggcgtgccgatttgctggccatggtttggcccatcagctcagcagggtctgccgtcgcacggttttgcccgcaatctgccgtgggccctgaaaggccacgatgaagacgataacggcgtggtgctgacctttgaactaaaaagcagcgatgccactcaccagtactggccgcatgagttcactctgttagcgcgtttcaaactgggtaaaacctgcgaaattgagctggaagcgcacggcgaatttgaaaccacttccgcccttcacacctatttcaacgtcggtgacattgcggcagtgaaggtcagcggtctgggcgaccgttatattgataaagtgaaaaatgccgaagaaggcgtattaagcaacggcactgaaaccttcccggatcgtaccgaccgcgtctatctgaatgcagaaacctgcagcgtcattcacgatgatgcgctcagccgcaacatcgatgtcgtccatcatcacaacagcaacgtggttggctggaacccgggaccggccctttccgtcagcatgggcgatatgcccgatgatggctacaagaccttcgtttgcgtagaaacttgctgcgtaaccgaatcgcagaaggccagcgaagagaaaccttcgcgcctggcgcaaaccattcgcgtggtgaaacgctaa

SEQ ID NO: 256677 - DNA, 612 bp, Klebsiella pneumoniae
atgtttgttaaaggtgctaactttgacaaatatgaaggccaggacatcgtttccaacgcttcctgcaccaccaactgcctggctccgctggcaaaagttatcaacgacaacttcggcatcatcgaaggtctgatgactactgttcacgccactaccgctactcagaaaaccgttgatggcccgtctcataaagactggcgcggcggccgcggcgcagctcagaacatcatcccgtcctctaccggcgctgctaaagctgtaggtaaagtactgccagaactgaatggcaaactgaccggtatggcgttccgcgttccgactccgaacgtatccgttgttgacctgaccgttcgtctggaaaaagctgcttcttatgaagaaattaagaaagcaatcaaagctgcttccgaaggcgcaatgaaaggcgttctgggctacaccgaagacgacgttgtctctaccgatttcaacggcgaagtttgcacttccgtattcgatgctaaagcgggtatcgctctgaacgacaactttgtgaaactggtttcctggtacgataacgaaactggttactccaacaaggttctggacctgattgctcacatctccaaataa

SEQ ID NO: 256678 - DNA, 1437 bp, Klebsiella pneumoniae
atggttggccgcgcctgcggcgttgccggcgtccgtccgggcgcttattgcgaaccgaagatgacctccgtaggctctcaggacaccactgggccaatgacccgtgatgagctgaaagacctggcctgtctgggcttctctgccgacctggtgatgcagtccttctgccacaccgctgcgtatccgaagccggttgacgtgacaacgcaccatacgctgcctgacttcattatgaaccgcggcggcgtatcgctgcgtccgggcgatggcgttatccactcctggctgaaccgtatgctgctgccggataccgtgggcaccggcggtgactcgcatacccgtttcccgattggtatctctttcccggcaggctccggtctggtggcgtttgccgcagcaaccggcgttatgccgctggatatgccggaatcagtactggttcgctttaaaggcaaaatgcagccgggtatcactctgcgcgatctggtgcatgcgatcccgctgtacgcaatcaaacaaggtctgctgaccgttgagaagaaagggaagaaaaacatcttctctggccgcattctggaaattgaaggtctgccggatctgaaggtcgagcaggcgtttgagctgaccgatgcctccgccgagcgttctgctgccggctgtaccatcaagctgaacaaagagccgattgttgaatatctgacctccaatatcgtcctgctgaagtggatgatcgccgaaggttacggcgatcgtcgtacgctggagcgtcgcgttcagggcatggaaaaatggctggccgatccgcagctgctggaaggcgatgcggatgcagaatatgcggcggtgatcgagatcgatctggccgatatcaaagagcctatcctctgcgcgccgaacgatccggacgatgcgcgtctgctgtccgacgtgcagggtgagaagatcgatgaagtctttatcggttcctgcatgaccaacattggccacttccgcgcggccggtaagctgctggacagccacaaaggccaactgccgactcgcctgtgggtggcgccgccaacccgtatggatgctgcgcagctgactgaagaaggctactacagcgtgttcggtaagagcggtgcgcgtattgaaattcctggctgctccctgtgtatgggtaaccaggcgcgcgttgccgacggtgcgacggtggtttcaacctcaacccgtaacttcccgaaccgtttaggtaccggcgctaacgtcttcctggcttctgcggagctggcggccgttgcggcgctgattggtaagctaccgacaccggaagagtatcagacctacgttgctcaggtggataaaaccgcggcggatacctaccgctacctgaacttcgatcagctgggtcagtatactgagaaggctgatggggtgattttccagaccgcggtataa

SEQ ID NO: 256679 - DNA, 363 bp, Klebsiella pneumoniae
atggattacgaatttctgcgcgatattaccggagtggtaaaggtgcgaatgtcgatggaccatgaggcgctcggccactggttcaacgaggaggttaaaggcaaccttgccctgctggatgaagtagagcaggctgcgcgtaccattaaaggcagcgaacgttcctggcaacgtgccggccatgaatacacgctatggctggatggtgaagaagtgatgatccgcgctaatcagctggatttttccggtgatgagatagaagaggggatgagctactatgacgaagaaagcctctcgctctgcggcgttgaagattttttgcaggtcgttgctgcctatcgggagtttatgcagcagcgctaa

SEQ ID NO: 256680 - DNA, 795 bp, Klebsiella pneumoniae
ttgaaaaaattgaagctgcacggctttaacaatctgaccaaaagcctgagtttttgcatttatgatatctgctacgcaaaaacggcagaggagcgcgatggctacatcgcctatattgatgaactctataacgccaaccgcctgacggaaattttgtcggagacctgttcgattatcggcgccaatattcttaacattgcccgtcaggattatgaacctcagggcgccagcgtaactattctggtcagcgaagagccgatcgacccgcagctcatcgatcagacggaacacccgggtccactaccggaaaccgtcgtggcgcatctcgataaaagccatatttgcgttcacacctacccggaaagccatcctgaaggcgggctgtgcaccttccgcgccgatattgaagtctcaacctgcggagtcatttcgccgctgaaagccctgaactatctgattcaccagcttgaatccgatatcgtcaccatcgattaccgcgttcgcggcttcacccgtgatgtgaacggtatgaagcacttcatcgatcatgaaatcaactccattcaaaacttcatgtccgaggatattaaatctttgtatgacatggtggacgtgaacgtttatcaggaaaatattttccataccaagatgttgctgaaggagttcgaccttaagcactacatgtttcacaccaggccggaagatttaacggaagaagagcgcagggtcatcaccgatcggctctggaaagagatgcgcgaaatttactacgcaagaaatattccggcggtgtaa

SEQ ID NO: 256681 - DNA, 1695 bp, Klebsiella pneumoniae
atgaacggaaaaatagctattaacttcaattcgatatcgctggcagcagcgcttgtgctggcgctgtcgccatcacccgacgctcgcgcggaaaaagaggcgctgatacatgttacggcaaattcgaatagtgacgcgtcagggccggcattcttaaattacgctaaagagcagcaggctcagaaagatcgcgcgcctgcgaagtccgttgaagaaaaaaacgctattacgcaaacaacgaataaaaaaaacgaacagaaaatcactgaactttcacgccaggctgcaataattgctcaaaaagataaaatcatccggcaacttcgacaacagctttcagcaaagccagctacggtttatgccgtacaggacaatcaaaaagatctgacggataaaattcgccagcttgagaaagcattaacggttgccgtagcagaaaaacaacgcttaatagacaaagagctctccgccgccgctgaaatgaaacagaaactggggcagctcaatgccacggaaaataaaattctgctacaggaaaaaaagctagcttctgcggaatcagcgaaacaaaagcttgaatcactgctaacggaagccaccgctgaaaagcaaacgctgttaaagaagctcgcggctgaggaaaaacaacagcaagatatcgcctctaagcttgctgccgctgcatcagacaagcaagcgctcgctgcaaagctcgctgtcgcagaaaccgcacagcgggaactcaaaacaaaactggatgcgggagaaaccagccggcaagcgctggcggcgaaacttgctgccgcagtagcggcaaagcaggatttggcggtaaaactggcggccacgggggtagaaaaccgggcgctcacggcaaaactggactccttcaccatcagcaggcagcagccagcgcctcaggaaaacgcggtcagcccgcaggcagatgaaaacaacgccctgctgcaggccagcgctgatgagataagccagctaaaggcccggcttgctgatgccgagacaaaatcaggtaaaaacccggcggctatcgattttaccagggagcctcagcagcaggcttactctgtcggcgtatcgatgggcgaggaggcgctaaaagtgttgtccacccgcagttcccagggcataaaaatcagtaaagataccgttctgcagggcatcctggattcgttttcagggaaaatcgccctcgacgagaaagcgcgcaataaggctctgttcgatgtgtcgaaaaaggtctttcagcatctgcataagatagaacagcagatggttaacgaaggaaaaaaataccaacaaaagttcgcgaaacaaaaaggtgtggtatttaaagatggggtatacagccgtatcgactatgccggcgaaggtaagatcctcgacagcgataccgtcaccgtaaccatcaaggagacgctaattgatggaaccgttattaacgacatggaagcggaaggcaaagtctggtctcagaccctaaaatcctatcctcctgtcttcttcgggccaataaagcgcctggggaaccacggttctattacggtggttatccctcctgaactcgcctatggtagcgaaggccggccaccaaaaatcccgcccggagcgaccatggtgtattcagtcagaatcgtagacgccacggcggcacaaccccaggctgaaaacccctga

SEQ ID NO: 256682 - DNA, 327 bp, Klebsiella pneumoniae
atgaaacctttacctgacgcgacattaaatcaacagcaaactgaacagcagagaattgccgaggagcaagcgcgcattgagacttgccgtaaagcgctggagtcactgaaagaggtgaatccaaagcaggcagctaaattagggaatgagttcaccgccctgctcaacgccgcatctcaatataattctgtgcgcagcaaagttgcagagccaactaaacagggtatcgactccatgtaccagttcaaatcaatcaagctatgcgcggatattgaaaaggaactgatcgatagtctggttaaacgcggtgaaaatgttcagccatga

SEQ ID NO: 256683 - DNA, 1551 bp, Klebsiella pneumoniae
atgaagaaaacggctgaagattacctgggcgaaccggtaactgaagcggtaatcaccgtaccagcttacttcaacgatgctcagcgtcaggcaaccaaagacgccggccgtatcgcaggtctggaagtcaaacgtatcatcaacgaaccgacagccgctgcgctggcttacggtctggataaagaagtcggcaaccgtactattgcggtatacgaccttggtggtggtactttcgatatctccattatcgaaatcgacgaagttgacggtgaaaaaaccttcgaagttctggcgaccaacggtgatacccacctgggcggcgaagacttcgacacccgtctgatcaactacctcgttgacgagtttaagaaagatcagggcatcgacctgcgtaacgacccgctggcgatgcagcgcctgaaagaagccgctgagaaagcgaagattgaactctcttctgctcagcagaccgacgtgaatctgccgtacatcaccgcagatgccaccggtccgaaacacatgaacattaaagtgacccgtgcgaaactggaaagcctggtagaagatctggttaaccgttccatcgagccgctgaaagttgctctgcaggatgctggcctgtccgtgtctgacatcaacgacgttattctcgttggcggccagactcgtatgccaatggtgcagaagaaagttgctgagttctttggtaaagagccgcgtaaagacgttaacccggacgaagccgtggccattggcgcagctgtccagggcggtgttctgaccggtgaagtaaaagacgtactgctgctggacgttaccccgctttctctgggtatcgaaaccatgggcggcgtgatgactgcgctgatcaacaagaacaccactatcccgactaagcacagccaggtgttctctactgcggaagacaaccagtctgcggtaaccatccatgtgctgcagggtgagcgtaaacgcgcatctgataacaaatctctgggtcagttcaacctggatgggattaacccggcgccgcgcggcatgccgcagatcgaagtcaccttcgatattgacgccgacggtatcctgcacgtttccgcgaaagacaaaaacagcggtaaagagcagaagatcaccatcaaagcctcttctggcctgaacgaagaagagatccagaaaatggttcgtgaagcagaagctaatgcggaatctgaccgtaagtttgaagaactggttcagacccgtaaccagggtgaccatctgctgcacagcacccgtaagcaggttgaagaagcgggcgataaactgccggctgacgataaaaccgctatcgagtctgcattgaccgcgctggaaacttccctgaaaggtgaagataaagccgatattgaagcgaaaatgcaggcgctggcccaggcttcccagaagctgatggaaatcgctcagcagcagcacgcacagcagcaggctggcggcgctgacgcttccgagagcaacgcgaaggacgacgatgttgttgacgctgagttcgaagaagtgaaagacaaaaaataa

SEQ ID NO: 256684 - DNA, 948 bp, Klebsiella pneumoniae
atgggatcgaaaggtgccaataaggattttgattacaatttaatcaagacccttgacgctgttatttcagctggaaatgctgccaaagcagcaaaaaaacttggtatcactccggcggcggtctcgttggcgcttcgccgtttacagagctattatcaggaagagttgtttatccgtggtaaagatggcctgttacccaccgctaaagcgatagagatccatcaaaatttccgtcaggttatggaactgataaatagtacctttattcccgagcataaagggagtcgtgatgcccggctgactattttaggcggtgatatcgttgaggcttactatctctcacagctttatgccggagatatctttgaacgggtattactcaaccattattcatcaagaaatctctctcgtgagatgatgacggagctactgcttacagcagaatgtgatgttctgattggtaccgagccgttgaacgtccccgggattgataatcaactgatcgatagcttcaaaagctttgtctgcatttttgccagtaatcatatcttaagtaccttgcctcatctttcattacatcatttctattcctcccgtcatgcgatgtatcagccgggcatgcactccccgatgattattaatgataagggtctttttaaagatgatctttattataaagggtcacgtattattggctatcgtagcgactccctcaatggcctgatgagtatgattgaacgtacttcattaatagccctgatgccgttgaaattggcgctattctataaaaatcagcgtaaatatgatattaagtttgtgcaaccgccaccggaactcacttttaaatctatacagatttatgcatcatggaacagaaacagtaaaaatatatcagtgataaatgaaattgtttccatgttacacactctgtcatcatttcgtcgctga

SEQ ID NO: 256685 - DNA, 348 bp, Klebsiella pneumoniae
atgtctattccaaatcatttggcgacaacggaagtcgttttgctggaagtcgaaatttttatcaccattattgctatcggagcctggggcgggtttgttagctaccttatccggcgtgataagcaagaaggtgatgatcattcccataagggcatcatgcactgtttaacccaggttgtgatttcctgttttactagttttttgctcagcgccgtggcgattgaaaaagagcttagttttaatatggtgttgctcgccgcgggtcttggcggggtatttgcagggccgattttgaaaattcttggcgagaagattaaaaaggctctggaaaatgcaaaaattcattaa

SEQ ID NO: 256686 - DNA, 534 bp, Klebsiella pneumoniae
atgaacccgattattgatggtattttagtaatggaaggcggctataccaacaatcctaaagataaaggtggagccaccaactgggggatcactgaggcaacggcccgagctcatggttatacaggagagatgatcaacctgacgcgagctgaagcattttctatcctcgaagaggattactggatcaaacccggatttgagcagatctcaactatatcctggcccatttctttcgaactctgcgatgccgcagtcaatattggcccccactatccttgcgtctggctacagcgctggctcaacgcgctaaaccgggaagaaaaaagttaccaggatatcaaaaccgatggcaagattggccctcggaccctctccgctctcaatcactttctgaccttaaggggcaaacagggtgaagaagtgctgataaaagcgctcaactgcagccagggagcctactatctggatatcacagaaaaaaacaaaggtaatgaagagtttatttatggctggatgaaggccagaatcacctga

SEQ ID NO: 256687 - DNA, 444 bp, Klebsiella pneumoniae
atgaaaacttatctcatcaatgataattgcgtttacaacgaaggaaagtatgagctgagaaccacctcaaactcacaggtcattaaaatgacggcaatgagggcgaagtgcctgagcttcatcatcgaaaatgcaaatatggatattattgaacggcaaaaaataacttcagaattatggggaagccgtagtcactttgtgaatgacgcaaatttaacgcaaatactctacttaatcagaagagatctgaagtcccttgggataaatgacctgtttatcaccatcccaagacagggcattcaggttaataaagagattcctattaaagccatggagagcgaaaagaaaggaacaaaacgacaggtgttcagaaagacgctggcagcattaaccaccgtgttttctgtgaccctcggtacggtgatgtacctgcacattcattaa

SEQ ID NO: 256688 - DNA, 747 bp, Klebsiella pneumoniae
ttgcgtccagacaacctcaagaccagaggtgatggcatccgcgcctgcgccgctattgtagctgttcgcccaaccgagaccctgcgcttcaatcggcgccgcttccggctctgcgcctacgtgggtggtcaccgcagcaccgtgcgttttacccagcgtatggccaccggcgatcagcgcgacgatctcttcatcattcatcgccatattaccgaaggtagcgcgaatcgctgcggctgcggagagcgggtcgccgctggcgttggggccttccgggttaacgtaaatcagacccatttcagtggcgccaatggcctgctgattcaggctttccggatggcggtgagccagccattcggtttcattaccccagtcaacatccagatccggttcccaaacgtcttcgcggccggccccgaagccaaaagtacggaagccggaattttccagcgccacgttgcccgccagcatatagaggtcggcccaggagattttctgaccgtatttctgttttatcggccacagcaggcgacgggccttatcgaggctgacgttatccggccaggagttgagcggagcgaaacgctgctgaccgcgtccggcgccgccgcgaccgtcaacggtgcgataggtaccggcgccgtgccatgccatacgaataaacagcccgatatagctgccccagtccgctggccaccactcctgcgagtcattgagcagggcatgcaggtcggctttcagcgctga

SEQ ID NO: 256689 - DNA, 933 bp, Klebsiella pneumoniae
atgagcgatgcgggtaatgtgaattttcgggcgctacagctgttcatcgccgtgtacgacagccagagcttttccgtggtggcgcgacgggaaggcgtttccccgtccatggtgtcgcgcgtcattcatcagcttgaagactccctcggccaacagctgttttatcgtaatacccgcgcagtggtgcccaccgaagccggacgtctttttgccgaacatgccagaggcatcagcgaacagttcagcgccgccagacgcgacctgcaggatcagagccttgagcctggggggctggtgcgaatcaacgccccggtctactttggccagcgccatattgcgccatggctaccgggtctgagcgaacgttatccacaaatgcaaattgagctggcgctgaccgatgattttatcgatccgcaccgggaggcgaccgatgttattttccgcatcggtagcctgcccgactccagcgttcatgccagagtgctggggatgcagcatcactatctggttgccgccccgcgctatctgcagcgtcgcggtgttccgcagcggccggaagatcttcgccagcacagtacgctggtgtacagcggttcaaacgggcctaaccgctggttatttcgcctcgaggaaggcgaatgggttcactatccgcaaaccccccagctggcatccaataacgccgatgcgttgctgaccgccgcgctgggcggcatgggggtagtactttttcccgactggatggtcaacgaagccattggcgcgggaagactgattcatttgatgcctcattacaccgccgcgattagcagcacgccttcgccagtgtcggcgatttatcctcacgctcgccacccttcgctaaacgtacggacggtaattgactattttgtcgacgtttttggtacgcctttatactggcagcgctaa

SEQ ID NO: 256690 - DNA, 438 bp, Klebsiella pneumoniae
atgatgcagttattactgatttttctggtgattgccggcggcatgggtctgtccgtcgaagccgggctactgggaccgctggccggtcaggtaggggatttatgggcgacgttcagtatatttggcgtcgggagcgccctcacgtttttgctgatgctgctgtttggcccgcgccagagcccctcatttttctctttacccggctggcagctcaccggaggcgtgctgggacccatttacgtcgtcattttaaccgttgccgtaccggtgatcggtatcgctatgaccatgatcggcattcttgccggccaggtctgtaaaagcctgctgatcgaccattacggtctgttcggttcgccaaaacgtaaaatcgatgggcggcggcttattgctctgctgttaatcgttgtcgccctggttctgattgccacaagctga

SEQ ID NO: 256691 - DNA, 465 bp, Klebsiella pneumoniae; identical to SEQ ID NO: 172206

SEQ ID NO: 256692 - DNA, 714 bp, Klebsiella pneumoniae
atgaataacgtattaccgtcaatcagcccacaggtgtcggcgctggctcccggctttcgcgccctgagcattgatgttatctctgctcccgtacgcgcgccgcaggttggtgcagaagcgctccattccgcctgccgtgcggttatcgccggtgaaccgcagtgggcggaagcacatttgcaggcctggaacgaggtattccgcgcctttggcgcaaagcctaagcgcacgccctgctcggcggaagccttgcgcaggcgggtgctgcgcgatggcgaaatggcagcgctcgatccgatcgtcgatctctataatgcggtgagcctgcgctacgccgtgccggtcggtggggaaaacctggcggcttacgttggcgtcccgcaactgaagatcgccgacggcagcgagccgttcgataccgtcaaagagggaaagatcgtcttcgaaaaccccgacgcgggtgaagtggtctggtgcgatgacgcaggggtgacctgccgacgctggaactggcgacagggagtacgcactcgcctgagcgtagagagtccgcggatgtggtttattcttgaaagtctgccggaaatgccgcttagcgcgcttcatgaggcgggagaaatgctgatggccggtctactgtcgatgatgcccgaagcgaaaatgcattcgcagttgataacggccgacgtctggctgacagggggcgcccggtag

SEQ ID NO: 256693 - DNA, 603 bp, Klebsiella pneumoniae
atgaccaaaaaagtcaatataacgaccggggcgggcgctgatgccgccagcatcaatgaagccgttgcggcgcgcattaagcgctatcgggcggaaaagaagatctccctcgacgagctatcaaggcgcgcgggcgtcagcaaagggatgctggtagacattgaagcctgccgggctaacccgagcattgcgctgttatgccgtctggcgtcagccatgggcgttgcggtggccgatttcgtcaatgttgccaccgcgccgccggtaaaggcgatcgccgcaggcgatatccccacgctgtggcagggtgaacagggcggccacgcgcgactgctggccggaaccagcggtcctgatatggtggaactctggcagtggagtctttatccgggcgaaatttttacttctccaggccacggagaagggaccacggagctgctttttgtgaccgagggcgccctgacattaacggtgaacgacagcctctatttgattcccgccggtgattcagccgtcgcacgtaccgacgccccgcatagctacgctaacgccggcgagacggtgacgcgattcaccatgacggtcagtgaaaaagcgcgctag

SEQ ID NO: 256694 - DNA, 297 bp, Klebsiella pneumoniae
gtggttatccacctcaacttcctgataaccggtggtgccgtgcagcgctttctcatagtagccttcgatgccctgcttaccgatattatggtcggcggcgtagttctcttcttcgccggctttggccagcttttgcaaatcgctgtcgttgatcttcgagacatagccaactacgtgcgccagctcggcgccgtagggataagcgcgctgctggtagctctctacggtaacgccgggaaaatggaactcattgacggcaaaacgcgccacctcaacatcgctcaggtccgattttaa

SEQ ID NO: 256695 - DNA, 909 bp, Klebsiella pneumoniae
atgggatccctgtttaagcagatctaccgctatacgcgccctcgcgcgtatcgccacaatgaaaatctgtggccttttacccgtattacgcgcgcgccaagcggcgaaatcagcgcgttacgctataaagggaaaacggtgccgctggtcagcctgagcgcgctgaaaaacagtatgcagggcgaagtcctgctgaccgccaccggcccctcaacccgcaatatcgatttttccctgttgtcgaaaacgatcccggtgatgggcgtcaatggcgcctggcatcttgccgaccggctgcacttttcgctctataccatcgtcgacatggaatttttcgataagaagccggacattatccgcgccattgtcagccagccggatattttgctgttcaccaccatgcacgggatcgccaaaatcgtcgatcgctatggggacgcgctgcgctgccgtttggcgttgattgaggacggttgctataagatttaccagccgaaagtcgccagcgaagcgataaagcgcacttaccagcagaatgcggcgatgtgctttcatcctcagcgcccggatatctgttttagcaccgatattcgccagggcatctttgatgccggcacggtggtctactgggcgctgcaaattctcgcctggctgggcttcaatactatcctggtgagcggcctggatatgaccaactttaaccagccgcgattctacgaaacacaacaagaaaaattgccttcttacctggcaacaaaagtggataccctcgtcatgccctcctttgcgcatgccgcgcaggtactgcagcaacgccagattcgggtgattaatttttccccagaaagcgctgtgccggatactatcttcgaaaaggttgcgtttaatgagtactttaaaagtgagtaa

SEQ ID NO: 256696 - DNA, 423 bp, Klebsiella pneumoniae
atgcaacgacagcgcggcttcaccttactggaaatcatggtggtgattgttatcctcggcgtactcgccagcctcgtggtgcccaatctgatgggcaacaaagaaaaggccgatcggcaaaaagtggtcagcgatcttgtggcgctcgaaggggcgctggacatgtacaaactggacaacagccgctatcccactaccgagcaggggctgcaggcgctggtcagcgcgccatcggccgagccgcacgcgcgcaactatcccgaaggcggctatattcgccgtctgccgcaggatccctggggcaacgattaccagctgctaagccccggccagcatgaacaggtcgatattttcagcctcgggccggacggcgtgccggagagcaatgacgatatcggcaactggacgattgggaaaaaatag

SEQ ID NO: 256697 - DNA, 1206 bp, Klebsiella pneumoniae
atggcgctttttcgctatcaggccgttgatgaaaacggtaaaacccggcgcggcgtccagcaggcggactccgcccgccacgctcgccagctgctgcgggaaaagggctggctggcgctggacatcgccccggcagccggcagcggcggacaaccgcgctttatccgccgcaccagcgcccgcgatctcgccctcgtcacccgccagctggcgacgctggtcgccgccgccatcccgctggaaaaagcgctcgacgcggtggctcagcagtgtgagaaaccgcagctgaaaaccctgattgccggcgtgcgcggcaaagtgctggaaggccacgcgctggcggaagcgatgcgcggctaccctggctgcttcgacgcgctctactgcgcgatggtcgccgccggcgaagcttccggccatcttgatggcgtactgaaccggctggcggactacaccgaacagcgccagcagctgcgcgcccggctgctgcaggcgatgatttaccccatcgtgctaaccctggtggcggtcagcgtgatcgtcattctgctgtcgacggtggtgccgaaggttgtcgagcagtttatccaccttaagcaggcgctgccgttttctacccgtctgctgatggcgatgagcgatatgctgcgcgccgccggtccgtggctgctgctcgccgccatgctcatggctctgctgctgcgctacctgctgcggcagccggcaaagcggctggcctggcacagactgctgctgcgcctgccgttgattggccgggtcgcgcgcagcgttaacagcgcccgctacgcccgtactctgagcattctcaacgccagcgccgttccgctgctgctggcgatgcgcatcagcgcggaagtattaagcaacgcctgggctaagcgccagctcgaagccgccagcgacgcggtacgcgaaggcgtcagcctgcatcgcgcgctcgaaatgacccagcttttcccgccgatgatgcgctatatggtcgccagcggcgaacagagcggcgagctcaacgacatgctagcgcgcgcggcagataaccaggaccgggatctgagcgcgcaaattcagctggccctcagcctgtttgaacccctgctggtagtggcgatggccggcatggtgctgtttatcgtcctcgccattctgcaaccgatactgcaactcaataccctgatgagtatgtaa

SEQ ID NO: 256698 - DNA, 1494 bp, Klebsiella pneumoniae
atgatgcccgccgctgaacgacgtccgctgctccccttcagctacgcccgcgcgcacaacgtgatgctcctgagcaacggcgcaagctgcgaggttttctgccttgccgccaccgcgccgcagacgctgctggaagctcgccgggtggccgggatgccgttcagcctggaacgactggaagcagaggcgttcgaaaagctgctggtgctgagctatcagcgcgactccgccgaggcgcggcgcatgatggcggatatcggcaacgagctggatctgtacacccttgccgaagagctgccggacaccgacgatcttctggatagcgaagacgacgcgccgattatccgcctgattaacgccatgctcaccgaggctatcaaagagaaagcgtcggatattcatatcgaaacctatgaacgccacctgcaaattcgctttcgcgtcgacggcgtactgcgcgaaatcctgcgcccccagcgccgcctcgccgcgctgctgatctcgcgcattaaggtgatggcgagccttgatatcgccgaaaaacgcattcctcaggatgggcgcatggcgctgcgtattggcggacgcgccgtcgatgtccgcgtctccaccctgccgtcgagctacggcgaacgcgtggtgctgcgtctgctcgataaaaacagcgttaatctcgacctgctgaccctcgggatgccgcccgcgctgctccagcaggtagatggactgatcgcccgcccgcacggcatcgtgctggtgaccggaccgaccggctcgggaaaaagcaccaccctctacgccgcgctaagccgcctcgatgcccgcgagcgcaacatcatgaccattgaagatcctatcgaatatgagctggagggcatcggtcagactcaggttaacgcgaaagtcgatatgacctttgcccgcgggctgcgcgccattttgcgccaggaccctgacgtggtgctggtgggcgaaatccgcgacggcgaaacggcgcaaatcgccgttcaggcctcgctaaccggccatctggtgctctcaacgctgcataccaatagcgcgctgggcgccatctcgcgcctgcaggatatgggcgtcgagccttttctgctctccacctcgctgctggcggtgatgtcgcagcggctggtgcgacggctctgcccgcactgccgccagcaggagccggccaatgccgataccgcccgccagatggagatcgcccccggcacggcgctctggcagccccggggctgcgccgagtgcggctttaccggctatcgcggacgtaccggcattcacgaactattgctggtggacgatcgcgtgcgcatggctatccaccgcggcgaaaacgaggtgacgctgatccaacagctgggaacggactatgtcaccctacgccatgccgggcgggaaaaggcgctggcggggatcaccagctggcaagaggtgctgcgggttagcgaacagcagatcgcggaggcctcctga

SEQ ID NO: 256699 - DNA, 1983 bp, Klebsiella pneumoniae
ttgatcatcaccaacgttacccgcccatttttcctgacgctgctgatattcgccgcgctgatattcaaaccggccgcggcggaagagttttccgccagctttaagggcaccgatattcaggaatttatcaatacggtcagtaaaaacctgaataaaacggtcattatcgatcccagcgtacgcggcaccattaccgtacgtagctacgatatgctcaacgaagagcaatattaccaatttttcctcagcgtcctcgatgtctatggcttcgcggtgattaatatgaataacggcgtcctgaaagtcgttcgttcgaaggatgcgaaaaccgccgcggtgccggtggcgagcgatgccgcaccgggtactggcgatgaggtcgtcacccgcgtcgtgccgctgactaacgtcgccgcccgcgatctcgcgccgctgctgcgccagcttaacgataacgccggcgcgggcagcgtggtgcactatgaaccctccaacgtcctgctgatgaccggccgcgcggcggtgatcaagcgtctgttgaccatcgtcgaacgcgtcgataacgccggagaccgcagcgtggtgacagttcccctctcatgggcctccgccgccgatgtggtcaagctggtgactgaactcaacaaagataccagcaaatcggccctgcccggctcgatggtcgccaacgtggtggctgacgagcgcaccaacgcggtgctggtcagcggcgagcccaactcgcgccagcggatcgtcgccatgattaagcagctcgaccgccaacaggcgacgcagggcaacaccaaagtgatctatctgaaatacgccaaagccgccgacctggtcgaagtgctgaccggcatcagcagcacgatgcagagcgaaaagcaggccgcgaagccggtggcggcgctggataaaaatattattatcaaagcgcacggacagaccaacgccctgattgtcaccgccgcccctgacgtgatgaacgatcttgaacgggtaatcgatcagttggatatccgccgtccacaggtgctggtggaggcgatcatcgccgaagtgcaggacgctgacggtcttaacctcggcatccagtgggccaataaaaacgccgggatgacccagttcaccaacagcggtctgccaatatctacggccatcgccggggccaaccagtacaacaaagacggcaccgtcagcagctccctggccagcgcccttagctccttcaacggcattgccgccggcttctaccagggcaactgggcaatgctgctcaccgcactctcaagcagcaccaagaacgatattctcgcgacaccgagcattgtcaccctcgacaacatggaggccacctttaacgtcggccaggaagtcccggtgctgaccggctcgcaaaccacctccggcgataacatcttcaataccgtcgagcgtaagaccgtcggcatcaagctgaaggtaaagccgcaaattaacgaaggcgattcggtcctgctggagatcgaacaggaggtatcgagcgtggcggatgccgcctccagcaccagttcggatctcggcgcgaccttcaatacccgtacggtgaataacgccgtgctggtcggcagcggcgaaacggtggtcgtcggcggcctgctggataaaagcgtctccgacaccgccgataaagtccctctgctcggcgatatcccggtaattggcgcgctgttccgctccaccagcaaaaaggtctccaagcgcaacctgatgctgttcattcgtccaacggtgatccgcgaccgagacgagtaccgtcaggcttcatccgggcagtacaccgcgtttaacgacgcccagagcaaacagcgcggcaaagagaacaacgacgcgatgctgagtaacgatctgctggagatctacccgcgccaggataccgccgcgttccgccaggtcagcgccgccatcgacgcgttcaatctgggaggcaatctatga

SEQ ID NO: 256700 - DNA, 609 bp, Klebsiella pneumoniae
gtggcggagaaaacgccctcctccgcaaacggcgacaatctcgagcaggcgcccgtttcggcgctcaaactgcgcgtaaccggcctgctcgccagtaccgatccctctcgcgccattgctatcatgatgaaggggaatcaacaggttagcctcgggattggcgataacacgccgggcggagaggcgaaaattgtcgccattttccccgaccgcctgatagttaattaccgcggcataaatgaggctatcccgctgtttaacgacccgcccgccgccggcaaaattagcgccgcgccgccagccggccaattggcgcaggagctccgcgcgcagccgcaaaatattcttcattacctcaatatttcgccggtcatggtcaacgacaagctcagcggatatcgcctgaatgcgggaaaaaaaccggcgttatttcgccaggcgggtctcaaggaaaacgatctggcgattgccctgaacggcctggatctccgcgataaagaacagtctcgccaggcattagctcagctaccggaattaaccgaaataacccttaccgttgaacgcgacggccagaaacaagatatttctctagatctgagggatgaataa

SEQ ID NO: 256701 - DNA, 132 bp, Klebsiella pneumoniae
atggcggtctgcccgaccatcacccctttcggtcgcccggtggagccggaggtaaagatgatatacgcggtatgctccggctgcgagagcgccagcggcgcggactcgcccgccaccagcggctgctggtag

SEQ ID NO: 256702 - DNA, 255 bp, Klebsiella pneumoniae
gtgggtaatcgcctgtacgccgtcgatatccagctgatagtcgaagactttaatattgagcaccgggccaaacagcggttcatcgcccgccgccctgccgctgtcgcggacaatctgttcggcgtcatagcgctggtggcggcgcattttcttgagctgtccggcaagacgcatggccagctccgccagcgtttcccgggcgtcaatattgaccgccagcggcagaacgttgagcaccgggccggtagcggttaa

SEQ ID NO: 256703 - DNA, 204 bp, Klebsiella pneumoniae; identical to SEQ ID NO: 176813

SEQ ID NO: 256704 - DNA, 1200 bp, Klebsiella pneumoniae
atgcataagacaggatgcgaagactggtggcgccatatctccggtccgcaaattgaggtcgtggacgacgcgtatcgggtgaccttttggtggcgcgatccggcgggcaacgaagcctcttcgccaacccggcgggtatggatttatattaccggcgtgactgaccatcataaaaacgccgtaccgcaaacgctgcagcgcattcccggtaccgatgcctggtgctggcaaaccactctctctgccgcctggcgcggcagctactgctttattccttccgcgcgggacgacgacttttcccctcagctttttaacggcgacagcccggaccgcgcgctgctgcgcgaaggctggcgcaagctgctgccgcgggcgattgccgacccgcttaatccgcaaagctggaagggcgggcgcggccacgcggtctctgcgctggagctgccggacgcccccgaccagcccggctgggcgctgcgtgatgaaccttatcagccgccggtctgcattgaatggcagagccagcgactcggcaaccggcggcggatatggatttacgccaccggcgatgcgcagccgcaagcgcgcccgctggcgattttgcttgatggtcagttctgggctgaaagcatgccggtatgggcgccgctagcaggattaacccgcgagaagcggttaccgcaggcggtttatctgctgattgacgttatcgataaccagcatcgcgccgaagagcttccctgcaatgaaacgttctggctggcggttcaggaagagctgctgccgatggttcaccggatagcacctttcagcgatagcgccgaccgaaccgtggtggcaggccagagctttggcggcctggccgcgatgttcgccgcgctctactggccccggcgctttggctgcgtgctcagccagtctggctcctactggtggccgcatcgcggcggcgtgcagacgggcctgctgattgagcggctcagccgcggcgaaatacagccgcaagggctacgcatctggctggaggccggcgttcgcgagccgatcatttttcgcgcgaaccaggcgctgctgacgcatctggaacagcagacgattttctggcgtcaggttgacggcggacatgatgcgctttgctggcgcggcgggctgacggccggactcatccagctgtggcagccattaggccgtgaagagtag

SEQ ID NO: 256705 - DNA, 918 bp, Klebsiella pneumoniae
atgccggaagtcaacgaagcgatcccgatgccgctcggccacggcgcgctggaaatcggcgaacggcgcaagcttgggcacagcctgcgcgagcgtcgctacgatcgcgcttacgtgctgccgaactcgtttaaatcggcgctggtgccgtttttcgccggtatcccgcatcgcaccggctggctcggcgagatgcgctacggcctgctgaacgatgcccgtaagctggataaagcggcctggccgctgatggtcgaacgctacgtcggtctcgcatacgataaaggcgtgatgcgctgcgcgaaagatctgccgcagccgctgctctggccgcagctgcaggtgcatgaaggcgaaaaatcgcaggcctgtagcgcatttaatatttcagccgagcgcccgataatcggcttctgcccaggcgcagagttcggcccggcaaaacgctggccgcactatcactacgccgagctggcgaaacagctgatcgatgaaggctttcaaatcgtgctgtttggttccgcaaaagatcatgaagcgggtaatgaaatccttgccgcgctcacgaccgagcagcaggcatggtgccgcaacctggccggggaaactcagcttgagcaggccgtcattctgatcgccgcctgtaaagcggtggttagcaacgattccggcctgatgcacgttgccgcggcgctggatcgtccgctggtggcgctctatgggccaagtagcccggacttcacccctccgctgtcgcacaaagcgcgcgttatccgcctgatcagcggctaccacaaagtgcgtaaaggcgacgccgccgaaggctatcatcagagtttgatcgacattacgccgcagcgcgtactggaagaattaaacgacctgctgctggaaaaaacggaacaagaggaagcctga

SEQ ID NO: 256706 - DNA, 972 bp, Klebsiella pneumoniae
atgcgggtattgatcgtaaaaacctcgtccatgggcgacgtgctgcatacgctgcccgcgctgagcgacgccgcgctggcctttcccggcattcgtttcgattgggtggttgaagagggcttcgcacagatcccctcctggcatgagaccgtcgacagggtcattccggtggcgattcgtcgctggcgcaaagcgtggttttccgcgcccgttaaagccgaacgcaaggcatttcgcgacgccgtacaggcggaaaagtaccacgccatcattgatgcccaggggctggtgaagagcgccgcgctggtcacccgactggcccgcggcgttaagcacggtatggactggcagaccgctcgcgaaccgctggcgagcctgttctataaccgtcgccaccatatcgccaaacagcagcacgccgttgagcgcacccgcgagctgttcgcgaaaagccttggctacgcgaagccggaaacccagggcgactacgctatcgctcgccattttttgcgccaggccgacgcctccgctgtgccctatctggtatttctccacgccacaacgcgggatgataaacactggccggaagagaactggcgagcgctaatcgctctgcttgccgacagcggcgtgcgtatcaaactgccgtggggcgccccccatgaagaagcgcgggccagacgcctggcggatgggcacgattttgtcgacgtcctgccgcgtatgagcctggagcaggtggcccaggtgctggcaggcgcgcgcggagtggtttccgtcgataccggactgagccatctcaccgccgcgctcgataaaccgaacttcacgctgtacggcccgaccgatccggggctgattggcggttacggtaaaaaccagtatgtcgtgcgcccggaaggcggcaacagcacgggggatattgccgcctcccggattctgcaactgttgaaatctcaggaactggcttaa

SEQ ID NO: 256707 - DNA, 909 bp, Klebsiella pneumoniae
atgggttcattatttaagcagatctatcgctacacgcatcgacgagcctttcgtcataacgaaaatctttggccgtttacccatatcacccgcgcggcaagcggtgaaatccgcaccctgaaatacaaagggaaagcggtcccgttggtcaacctcagcgaactaaaagatagcgctcagggcgaagtgctgctgacggcaaccggtccctctacgcgcagtatcgattttacgcggctgccgaaaagcatcccggtgatgggggtgaatggcgcgtggcatctctctgataaaattaaattttcgctctataccattgtggacatggagttttacgataaaaaaccggacattattcgtgcggtgattagccaaccggatatcgtactcttcaccaccatgcatggcattgccaaaatcctcgaccgccacggctcagcgcttcgctgtcgtttggcattaattgaagacgcctgttataaaatttaccagcctaaagtcccgagaagcgcgatacagcaggtctggcgcggcgtcactgcgctacgctttcatccgcaaaggcaggatatttgctttagcaccgacatccgccatggcatttttgatgccggtaccgtggtctactgggctctgcaaattctgatgtggctgggatttaaaactattctgataagcgggctggatatgagcaatttcaaccagccgcgattctacgaaacggaacaggataaactcccctcctggctggcaaataaggtggatgacctggtcatgccgtccttttcgcacgctgccaacgtgctgcaacaaaaccatattcgggtcgttaacttctccttagaaagcgcggttccggaaacgattttcgaaaaggtttcatttgatgagtactttaaaaatcagtag

SEQ ID NO: 256708 - DNA, 483 bp, Klebsiella pneumoniae
  misc_feature (349)..(358): n is a, c, g, or t
atgagtactttaaaaatcagtagttacgccagacagggttacaccattttctttcctttgtttctgttttttagcgctattttttgcgtatcaactcgcgcaaataaccttcttcatttatccattttgctgtttttgctttcacagctgaacacagacaaccgccgggcattagcggagaacctgcgccagcagtggccggtctatggtctgctggtcgtattctgcgtgtactatgcgctgagcaatatttggggccagacgccgcagcatatcgattcccctctgacccacggcacctataccattttctatcttctgctgctgacaacgctacttggccatcctnnnnnnnnnnggccatcctcgcacccggcatctgacgctgctgagcatcgtggccgggatcacggtgctgtctatctggacgatggttatcgacttcaccctggtcctcaaggagcgcctggtgtcgccggataa

SEQ ID NO: 256709 - DNA, 756 bp, Klebsiella pneumoniae
atggttatcgacttcaccctggtcctcaaggagcgcctggtgtcgccggataatcccggcccgaccaacgttatcgacctggcgggttattgcggtattggggttcttatttgcgccatgctgctgaaagaaaaaggcagccaccttctgtatgtgccgatggctatcatgctggtgatgctatttctgacccaaagccgcggcccgattatcgccctactggtggcgtttgtttgcaccctgcatctgcacgtctttacccgccgtaatatcttgattgtcgccgcgttagcgatgattctgggactgcttttcttcttcacccccaccggagacctgctactggcgcgctttgaggagctggggacgcaaagcggtttgcgcatcagcatctggcatcatacgatcgaggaagtggccagccagccgtggctggggcgaggttttgactacgagctgaactttaccaactacagcggcgaacatatcaccaccacccacagcgtctatcttggcgccctgctgaaaggcggcatcattggtctggcgctgctgttggcggtgattgccggagggctatggcaggcatggcgcaaacagcaggatggccgctacggactggcgatttttatctatgcgctgatttttatggcttcgcagggcatgtttatcatcagcaatcctcgcgaaacctggccgctgttttggctaccgctgggtattgcgctgagcggcagcctgaaggcgaaacgctaa

SEQ ID NO: 256710 - DNA, 1083 bp, Klebsiella pneumoniae
atgcgtatcgtgaagcagttcacgcggaagaaaaatgccttcttccgcgaaattaaatttaatttgattaactatcgttacagaaataaaagcgcacgccagccttttaatcccgcgaagattcagcatgttttattattgcgcctggatgacaaagtcggggatatggtcgtgacgaccggctgcgcaaagcttttggccgaccggggctataaggtgtctgttcttaccgggcctgtctgtaaacagatgcttgccggtgcggattttcttgagcaggtctatttatatcagccgcggatgcccttaaatgcgctgcgtgcggtgggatttgacgcggtcgttgattttgatgatgttaaaacctacgaacgttttaaactgctctctgatttgcggcctggctgcgttattggttttaataaacaagaatataagctttacgatcactccatccctttttttgacagcgccaggcatatttccgcccgctacaaagaagtggccaggctatttggcatagaacacgatcgttaccactatcatctgcccggcgatcttcacgaacgggaaagggttaagcttttacttaatcaggaaaaagcgcgcgcgctctgtattgcgatcaacccgtttaccgcttcaacggataaagacttttgtcatcaccaggtggcgactctgattgaccgcctgcatacgcttccgtatgccgtgagcgtcgtcatggttgggcatagcgaaaaaattcgccagctaaatctggataaagcgctatatctgcctgatagcaatattaattcagcggtagagatcgttcgccagtgcgatctggtgattacggcggataccgccatcgtgcatattgcccgcgcgttcgacaagcccatggtggcggtttacaacaaacgtaagctcaaagataccggtttgccgggctatactatttgggcgccgggttatgacaaggccagacagattgtctgtgaagagacccacgtcgccgacatgacgattgacgccgtctggccggtgattaaagcgcaggcggacgacctggttgcctctcgcgagcagacataa

SEQ ID NO: 256711 - DNA, 804 bp, Klebsiella pneumoniae
atggccatcgacccggtttatatcgaattcgccaaagatgtgattgcccgggggacggcggaaatcggcatgcatctgcatgcctggaacagcccaccgaccgacccgcttaccgatgacgactggcggcataaaccgtatctgatcgagtacagcgatgcggcgatgcgtgccaaagtcgactatatgacccgtctgctggaggataccttccagactaaaatggtcagccatcgcgccggacgctgggcgtttgacgagcgctacgcgcgtctgctggtggagtatggctatctggtcgattgctcggttactcccagggtgaactggaaaacggcgaaaggcgcgccgcagggcgacggcggtaccgattatcgtcacttcccgcagcacgcctactttctcgacgagaacgatattcgtcgtgaaggccagtcgtcgctgctggaagtgccaatgagcattcagtacaagcattctgcgtggatgaatagcctgaagcagggttacgatcgcctgcgcggcaaagtccgctcgccgtcggtacactggctgcgtccgatgggcggcaacgtggagacgatgaaaaaagtggtcgaacaaacgttgactcagggtaatgactacgtcgaatatatgctccactcttctgagtatatgcctggcggcagcccgacgtttaaaaacgagcaggatattgagcgcttatatgccgatctggacgcttttttcagctggctggcaccgcaggtgaagggaatgacgttggcggaatattaccaacagaaacgcgcacagcgataa

SEQ ID NO: 256712 - DNA, 1218 bp, Klebsiella pneumoniae
atgtcccccatcgaaaaatccagcaagttagataacgtctgttacgacatccgcggcccggttctgaaagaggcgaaacgccttgaagaagaaggcaataaagtcctgaagctgaacatcggcaacccagcgccgttcggctttgacgcacctgacgaaatcctcgttgacgtcatccgcaatctccccacctcccagggctatagcgattcaaaaggtctttattccgcgcgtaaggccatcatgcagcactatcaggcccgcggtatgcgcgatgtgacggtcgaagacatctatatcggtaacggcgtttccgagcttatcgtccaggccatgcaggccctgctgaacagcggtgatgaaatgctggttccggcgccggattatccgctctggaccgccgcagtcgcgctttccagcggtaaagcggtgcattatctttgcgatgaatcgtccgactggttcccggatctcgacgatattcgcgccaaaatcaccccgcgcacccgcggcattgtgattatcaacccgaataacccaaccggggcggtatactcaaaagagctgctgatggagatcgtagagatcgcccggcagaataacctgattattttcgccgacgagatctacgataagatcctctacgatgatgcgcagcaccattcgatagccccgctggccccggatctgctcaccgtaacctttaacggtctgtcaaaaacctaccgcgtcgccggcttccgccagggctggatggtgcttaacggcccgaagaaacacgctaaaggctacatcgaaggcctggagatgctggcttccatgcgcctgtgcgccaacgttccagcccagcatgcaattcaaacggccctcggcggttatcagagcatcagcgagtttattgttcccggcggccgtttatatgaacagcgtaatcgcgcctgggagctgattaacgaaatccccggcgtctcgtgcactaagccgaaaggcgcgctgtatatgttcccgaaaatcgacgctaaacgctttaatattcacgatgatcaaaaaatggtgctcgattttctgctgcaggagaaagtcctgctggttcagggaaccgcctttaactggccgtggccggatcacatacgtattgtgaccctcccgcgcgaagacgatcttgaaatggcgattacccgcttcggacgcttcctttccggctaccatcagctctga

SEQ ID NO: 256713 - DNA, 600 bp, Klebsiella pneumoniae
atgagtcagagtcatttctttgcccacctctcccgcctgaaactgatcaaccgctggccgctgatgcgcaatgtccgcacagaaaacgtctccgaacacagcttacaggtcgccatggttgcccatgcgctggcggcgattaaaaatcgcaaatttggcggccaggttaacgctgagcgaatcgcgctgctggcgatgtatcatgatgcttcggaagtgctgaccggcgatctgccgacgccggtgaagtatttcaattcgcaaattgcgcaagagtacaaagccatcgagaaaatcgcccagcagaagctggtcgatatggttcctgacgagctgcgcgacatttttgcgccactcattgacgaacatcactatagcgaagaggaaaaatccattgtcaaacaggccgatgcgctttgcgcctacctgaagtgtctggaagagctatcggcgggtaacaatgaatttctgctggccaagggccgcctggagaaaacgctggaatcgcgccgcagtccagagatggactactttatgcgggtatttgtaccgagcttccatctttcccttgatgaaattagccaggattcgcctttataa

SEQ ID NO: 256714 - DNA, 660 bp, Klebsiella pneumoniae
gtgcagtgtaaaggtttcctgtttgatcttgacgggacattagtcgattcgttgccggtggtggagcgttcgtggtgcaaatgggcggatcgattcagtatccctcatgatgaggtgctgaacttcattcatggcaagcaggcaatcacctcgttgcgtcactttctccccggccgcagcgaagaagagattcaggctgaattcaccctgctggaaacggtagaagcgacggataccgatggcgttacggcgctgccgggtgcggttgcgttgctcaaaaccctggatgaagccgggatcccctgggcgattgtgacgtcgggttcgatacccgtggcccacgctcgtcaccgtgccgctggtctgcctgaagctgacgtgttcgtcactgccgagcgcgtaaagcacgggaaacccgctccggatgcctatctgctgggggccgaactgttgggcctggccccggtggattgcgccgtcgtggaggatgcccctgccggtctgctttccggcctgaatgccggctgtcggaccatcgcggtcaacgtacccgccgatgcaccgcgtcttgatgaagcggatttagtattaacgacgctggaaagcctgcaggttgagcgtctgcctgacggcaaggtgaatgttagccttaaaaactaa

SEQ ID NO: 256715 - DNA, 426 bp, Klebsiella pneumoniae
  misc_feature (390)..(399): n is a, c, g, or t
atggaaatgaccaatgcgcaacgtctgattctgtcgaatcagtacaagatgatgacgatgctcgacccggacaacgccgaacgctatcgccgtctacagaccatcattgagcgtggatacgggctgcagatgcgcgagctggaccgcgagtttggccagcttaccgaggaaacgtgtcgtaccatcattgatatcatggagatgtatcatgcgctgcatgtctcctggaccaacctgaaggacgccagcggaatcgacgagcgtcgggtcacattcctcggttttgacgttgccactgaagctcgctatctcggctacgttcgctttatggtcaacgttgagggacgctacagccactttgacgccgggactcacggctttaactcccannnnnnnnnntgtgggaaaaataccagcgtatgctga

SEQ ID NO: 256716 - DNA, 456 bp, Klebsiella pneumoniae
atgtctggtccagaaaatcgccctgtaagttttttcggcttgtttcgccacgggcagcattatgcaaagacctggcctctggataagcgccttgccccggtgtttatcgaaaaccgtattattcgcgccacgcgctatgcgattcgtatcatgccgcccgtagcgattttcacgctgtgctggcaaatcgcccttggcggccagcttggcccggccgtggctaccgcgctgtttgcgctgagcctcccgatgcagggattatggtggttgggcaagcgctcggtgacgccgctgccgccgtcgattttaaactggttttatgaagtgcgcggtaaattgcaggaggccggacaagcattaacgccggtcgacggtaagcctgattatcaggctttagctgacacgcttaagcgcgccttcaaacaactggataaaactttcctggatgatttgtaa

SEQ ID NO: 256717 - DNA, 942 bp, Klebsiella pneumoniae
atgtcaggaaaagtctgtgtttttggttcattcaatttcgacatggttgccagggtggagcgctttccggtaccgggcgagtcgttagtggcctgcgggagtatgaccagcgccggggggaaaggggcgaaccaggccaccgccgcgctaaaagcgggggcgaatgtccactatatcggcaagattggcaatgataccttcggccattttgcccgccgtcatctgaaaggcgtgggcttcaatgccgtgacgctgctggtcgccgaagacgtccccaccggcaacgcgctgatttatgtggccggcaatgatgccgaaaacatgattgccgtcgaccccggcgcgaatatgacggtgaccgatgatgaaatcgccggctgcattcccgctatcggctgcgcggatgtggtgctggttcagctggagaacaatctttccgccattgagcaggtcgttgacgccggcaaagaggccggggccttcgtggtgctcaatcctgcgccctggcagcccgttgagcacgcctttctaagcaaagtggatctgctcacgccgaacgccacggaggccgggttaatgaccgggcgccgggttgactctctggcggccgcggccgaggccgccgatgcgctgcatgctcagggcgcgcgcaacgtcattatcaccctcggcgcaaagggcgccctgctgagcgagcagggcgtgaaatcccctattccgtgctttccttctcatccccgcgataccaccggcgcgggcgatgccttcaacggcgccctggcggcgcgactggcctgcggcgagccgctgcatgccgcagcccgatttgcggcggcctacgccgccgtcagcgtcgaaaagcagggcgcatcatctttacctgaataccaggaggcacgagaacggcttttgcgtgccgcctctgattatgaaatggcataa

SEQ ID NO: 256718 - DNA, 522 bp, Klebsiella pneumoniae
atgcgtaccatggcctccgcagccgcgggcagcaatagctgggtgcaggtgaaaacccatcgtactattggcgatgccgtcacgcatttaaaaggccagggcatgcagattctggcaacccatctctctgataacgccgttgattttcgtgaaatcgactatacccgccccacctgtatcctgatgggccaggagaaaaccggcattactcaggaagcgctggacctggcggatcaggacatcattattccgatgattggcatggtgcagtcgctgaacgtttccgtcgcctcggcgcttattctgtatgaagcccagcgccagcggcagaacgccggcatgtatctgcgcgacaacagcatgctgccgaaagaagaccagcagcgtctgctgtttgaaggcggctatccggtgctggcgaaggtcgcaaaacgtaaaggtctaccctacccccacgtcaacgagctgggcgaagtcgaagccgatgccacgtggtgggccactatgcaggctgcaggataa

SEQ ID NO: 256719 - DNA, 2082 bp, Klebsiella pneumoniae
atgcaaggtcgcctgttagatgccgtcccccttaataccctaaccggcgttggcgcggcacagagcagccgactggcgaaaatcggcctgcacacggtgcaggatctgcttctgcacctgccgctacgctacgaagaccgcacccatctgtatcaaatcggtgaactgctgcccggcgtttacgccaccgttgaaggcgaagttcttaactgcaatatcactttcggcggccgccggatgatgacctgccagataagcgacggctccggcatcctcaccatgcgcttttttaacttcagcgcagcgatgaaaaatagcctggcaaccgggcgtcgcgtgctggcctacggagaggctaagcgcggtaagcacggggcggagatgatccacccggaatatcgggttcagggtgatatgagtacccctgatttacaggaaacgctgaccccggtttatcccaccaccgaaggcatcaagcaggctacgctgcgtaagctcaccgaccaggcgctggagctgcttgaaacctgcgctatcgccgagctgctgccgccggagctggcgcaggggatgatgagcctgcctgacgccttgcgcacgctgcatcgcccgccgccctctttacagcttagcgagctggaaagcggcaaacatccggctcagcgacgcttaatcctggaagagctgctggcgcataacctcagcatgctggcgctgcgggcaggcgctcagcgctaccacgctctctcgctcagcgctaacgacacgctaaaagacaagctgctggcctctctcccctttacgccgaccggcgcgcaggcgcgcgtcacggctgaaatcgagcgcgatatggcgctggacgtgccgatgatgcgtctggtgcagggggatgttggctccggtaaaaccctggttgccgcgctggccgccctgcgcgccatcgcgcacggcaagcaggtggcgctgatggcgccgacagaactgctggctgagcagcatgccaataacttccgcagctggtttgaaccgctgggcgttgaagtaggctggctggcgggcaaacaaaaaggcaaagcgcgcctggcgcagcaggaggctatcgccagcggacaggtgcagatggtggtcggtacccacgccatctttcaggaacaggtccagtttaacggcctcgcgttggtgattatcgacgaacagcatcgtttcggcgtccatcagcggctggcgctatgggagaaaggccaacagcagggctttcacccgcaccagctgattatgaccgcgacgccgattccgcggaccctggcgatgaccgcttatgccgatctcgacacctcggtcatcgatgaactgccgccgggccgtacgccggttacgacggtagccatcccggatacccgccgcagcgatattatcgaccgggtacggaacgcctgtactcacgagggtcgccaggcctactgggtttgtacgctgattgaagagtcggatctgctggaggcccaggcggcggaagccacctgggaagagctgaagctggcgctgccggcgctgaatatcggcctggtgcacgggcgcatgaaatctgccgagaaacaggcggtcatgagcgcgttcaagcagggcgagctgcatctactggtcgccaccacggtaattgaggtcggcgtggacgtgcctaattccagcctgatgatcatcgaaaaccctgagcgtctggggctggctcagctgcaccagctcagagggcgcgtcgggcgcggtgcggtggcctcacactgcgtgctgctctataaatcgccgctttctaaaaccgcgcagaagcgcctgcaggttctgcgcgatagcaacgacggcttcgtcattgcccagaaagacctggaaattcgcggtcccggcgagctactcggcacgcgccagaccggcaacgctgaattcaaagtcgcagatttaatgcgcgatcaagccatgatccccgaagttcagcgcatcgcccgtcatatacacgaaagatatcctcagcaggcccaggcgcttatcgagcgctggatgccggaaaccgaacgctattccaacgcgtag

SEQ ID NO: 256720 - DNA, 1011 bp, Klebsiella pneumoniae
atgaaacgagaactggccatcgaattttcgcgcgtcaccgaagccgccgcgctggcaggctataaatggttaggccgtggtgataaaaacaccgccgacggcgccgccgtcaacgccatgcgcattatgctcaacctgatcaacatcgacggtactatcgtgattggcgaaggcgaaatcgacgaagcgccgatgctgtatataggcgaacgcgtcggtaccggcaacggtgatgcggtagacatcgccgtcgatcccattgaaggcacccgcatgacggcgatgggccaggccaacgcgctggcggtgatggcggtaggcgataaaggctgtttcctgaacgcgccggatatgtacatggaaaagctgattgtcggtccgggcgcgaaaggcaccatcgatctgaacctgccgctggcggaaaacttgcaaaacatcgcccgcgcgctgaataagccactaagtgaattaaccgttaccatcttagccaagccgcgccatgacgaggtcatcgttgagctgcaaaaactgggcgtgcgcgtatttgctattcccgacggcgacgttgccgcctctattctgacctgcatgccggatagcgaagttgacgttatgtacggtatcggcggtgccccggaaggggtcgtttcagcggcggtgatccgcgcgctggacggcgatatgcacggtcgtctgctggcgcgccaccacgttaagggcgacagtgaagagaaccgccgcatcggcgagaacgagctggcacgctgtcaggccatgggcatcgaagcaggcaaagtgctgcgtctggacgatatggcgcgcagcgacaacgtcgttttctcggcgacgggcatcaccaaaggcgatctgctggacggtattacccgtaaaggtaatatggccaccaccgaaaccctactgatccgcggtaaatcccgcactatccgccgaattcagtcgattcattatctcgatcgcaaagaccctgatatccagctacacatcctgtaa

SEQ ID NO: 256721 - DNA, 747 bp, Klebsiella pneumoniae
atggcaaactgggttacaggcaaagtcgtaaaagttcaaaactggacggatgcactgtttagcctcatcgttcacgcaccggttgaaccgttcaccgcagggcagtttgccaaactggggctggatgtcgacggtgaacgcgtgcagcgcgcctattcctacgtcaatgcccccagtaatcccgatcttgagttctacctggtgacggttccggaaggcaaacttagcccacggctggcggcgctgaagccgggcgatgaagtgcaggtggtcagcgaagcggccggcttcttcgtgctcgaagaggtgccggattgcgacaccctgtggatgctcgccaccggcacggcgattggcccgtatctgtcaattctcgaagaagggaaggacctggatcgttttaaaaatctcgtactggtgcacgccgcgcgctatgccgcggatctcagctatctgccgcagatgcaggcgctggaagcgcgctatgcgggcaagctgcgcatccagtcggtcgtcagtcgggaaaccgcgccgggcatgctcacgggacgtatcccgttcctgattgaaaccggcgcgctggaagaggccgtcggcctgccaatgaacgccgagagtagccacgtcatgctgtgcggtaacccgcagatggtgcgcgacactcagcagctgctgaaagagacccggcagatgagcaagcatctgcgccgccgaccgggtcatatgaccgccgaacactactggtaa

SEQ ID NO: 256722 - DNA, 429 bp, Klebsiella pneumoniae
atgaccctacagcagtggctattctcaattaaagggcggattggacgtcgcgacttctggatctggattgctatctggattgcgaccatgagcgcgctgttcacgctggctggcagcaacctactcaacttacagaccgcggcgtttattctggtatgcctgctgtggccgacggcggcggtgaccattaaacgtctgcacgaccgggggaaatccggcctctgggcgctgctgatgattctggcgtggatgctgctggcgggtaactggtcgatgttgccgggcgtctggcagtggggcgtcgggcgttttataccgacgctgattatcgtgatgatgcttatcgacctgggggcgtttgtcggcacccagggggcaaataagtttggcaaagagacgctggacgtgcgctggaaagcggagccctga

SEQ ID NO: 256723 - DNA, 600 bp, Klebsiella pneumoniae
atgaagaagtgggcaactttatatttaattgggctgacggcgctatccgtcggccaaaatgcgttgtccgccgagcctgactccgccgctacggcgccctatcttctctccggcgcgccggtgtttgatatctccatcagcgcgtttcgggaaaaattcaataccgataacccgaagcttttgctcaatgagtttcgcgccgtcacctccagtaaagaccaggcgaatttgacccgcgccgccaccaggatcaacgacaatctttatgcctcgaccgcgcttgagcgcggtacgcttaaaattaaatcgatgcagataacctggctgccgattcaggggccgcagcagaaagcggcgaaagcccgggccctcgagtatatgagcgccgtcatgcgcgcgttcgtgccgacgctcagccaggcgcagagccaacagaagctacaaaagctgctggccgccggaaaaggcaaacggtacttttcggaaaccgaaggcgcggtacgctatgtggtggcggacaacggcgaaaaggggctgaccttcgctgttgaaccgattaagctggcgctatctgaaacgctggaaaacaacaataaatga

SEQ ID NO: 256724 - DNA, 903 bp, Klebsiella pneumoniae
atggctgcgcttaattcaaaagtaagaaaagctgtcatcccggttgcgggattaggcaccaggatgttgcccgctactaaggctattccgaaagaaatgctgccgctggtagataagccattaattcaatatgttgttaacgaatgtatcgccgccgggattacagaaattgttctggtgacgcactcttctaaaaactccatcgaaaaccatttcgataccagttttgaactggaagccatgctggaaaaacgtgtaaaacgccagctgctggaagaagtgcaatctatttgtccgccgcacgtgactattatgcaggtgcgtcaggggctggctaaaggtctgggccatgctgtgctgtgcgcgcatcctgttgtcggcaatgagccggtcgcggttattttaccggacgttattcttgacgaatatgaatccgatctgtcccgcgataacctggcggaaatgatcgctcgttttgacgagaccggagccagccagattatggttgagccggttgatgacgtgaccgcgtacggcgttgtcgattgcaagggccagtccctgcagccgggtgagagcgtaccgatggtcggcgttgttgagaaaccgaaagcggacgtagcgccgtctaacctggcagttgtaggtcgctatgtgctgagcgccgatatctggccgctgctggcaaaaacgcctccgggagccggtgacgaaattcagctgaccgatgccatcgatatgctgatcgaaaaagagaccgttgaagcctatcatatgaaaggcaaaagccacgactgcggtaataagctgggctatatgcaggccttcgttgaatatggcgtgcgccataagtcgctgggcgctgaatttaaatcctggctggaaaaagccatcgcgaagtaa

SEQ ID NO: 256725 - DNA, 1014 bp, Klebsiella pneumoniae
atgacgcagccattggcgggaaaacagattctgatagttgaagacgaacccgttttccgctcacttatgcacacctggttagcttcgctgggcgcgaccatcgtccaggcggaagatggcgtggatgcacttcaaaaaatggccgagtcaaaacccgatttgatgatatgcgatatttccatgccgcgaatgaacggcctgcagctggtggagcatgtgcgcaatcagggcgagcagatgccgattctgatgatttcagcgacggaaaatatggcggacattgctaaagcgctgcgccttggcgtgcaggacattcttcttaaaccggtaaaagatttcgatcgcctgcgagaaaccgtgtacgcctgcctctaccccaacatgtttaattctcgtgtcgaagaggaggaacgcctgtttgaggattgggacgcgctggtcagcgatccctccgcggcgtcaaggctgctacaggagcttcagcccccggtccagcaggagatgtcgaactgccgtattcactatcggcagcttgtctccgtcgataagcccggtctcgtgctcgacattgcgccgctatcagaaaacgatctggcgttttattgtctggacgtcacgcgagcgggtgataatggggttcttgctgctttattactgcgcgcccttttcaatggcctgctgcaggagcagctcgctcatcagggacagcgtttaccggagatggggagcctgcttaaacaggtcaatcaattactgcgtcaggctaacctgccggggcaatttccattattggtagggtattaccatagcggcttgaaaaatttaattttggtttccgcgggtttgaatggcacgttgaatacgggggaacaccaaattcagattagcaatggcgttccgttaggtaccctgggtaatgcctatctcaaccaaattagtcaacgctgcgcatcatggcagtgccaaatttggggggccgggggacgtttacgccttatgttgtctgcggagtga

SEQ ID NO: 256726 - DNA, 900 bp, Klebsiella pneumoniae
atgagaaagctcaagatcggtctggcgctaggggcaggagccgcccgcgggtggtcgcatatcggtgtgattaatgcattacagcgtgcgggcattgacgttgatgtcatcgcagggtgctctattggctcgctggtgggggcggcttacgcctgcaaccgccttccggcgctggagaaatgggtatgctcttttagcaactgggacgtcctgaaattaatggatctctcctggcagcgagggggcttgctgcggggcgaacgggtatttagccaatatcgtaaactgctaccggtcaccgagattgaacgctgcgagcgtcgttttgcggccgttaccaccaatttaagtaccggtcgcgaactgtggtttacggaaggggatctgcatctggcgattcgtgcctcgtgcagtatgcctggtctgatgtcgccggtcatgcataatggttactggctagtggatggcgcggtggttaatcccgtgccggtatccctggctcgggcaatgggcgcggatattgtaattgccgttgatttgcagcacgacgcgcatctgatgcagcaggatttattatccctggaggtgccgcgtccggaggccgaagaagatttttcgtggcattcacggctgcgctcccgcctggcgcgtatgacctcacgtcgggcgacggtagcgccgacggcaatggagatcatgtcgacttccattcaggttctggaaaatcgtcttaagcgaaaccgtatggcgggcgacccgccggatatcctgattcagcccttttgcccgcaaatctccacgctggatttccaccgtgccggcgaagctatcgctgccggacatctggcagtggaaaagagaatggatgaactattacctttagtgcgtacctccgtgtag

SEQ ID NO: 256727 - DNA, 459 bp, Klebsiella pneumoniae; identical to SEQ ID NO: 177211

SEQ ID NO: 256728 - DNA, 843 bp, Klebsiella pneumoniae
atgcattcactacaacgtaaagtactacgcaccatttgccctgatcagaaaggcctcatcgcgcgtatcacgaatatctgctataagcacgagctgaacatcgtgcagaacaatgagttcgttgaccaccggaccggccgcttctttatgcgtaccgagctcgagggtattttcaatgactccgttctcctggctgacctcgacagcgcgctgccggaaggctcgattcgtgagctcaacccagcaggccgccgccgtgtcgtcattctggtgactaaagaggcgcactgcctcggcgatctgctgatgaaagccaactatggcgggctggacgtagaaatcgccgccgtcatcggcaatcacgaaaccctgcgctcgctggttgaacgctttgatattcccttccagctggtgagccatgaggggctaacccgcgaagagcacgataagcagatgggtgatgctatcgccgcccatgaaccggattacgtcgtgctggcgaaatacatgcgggtgttgacccccgagtttgtctcccgcttcccgaataagattatcaatattcaccactcattcctgccggcgtttatcggcgcgcgtccgtatcatcaggcctatgaccgcggggtgaagattattggcgcaaccgcccactacgtgaacgataatctggatgaaggccccatcatcatgcaggacgttattcacgtcgatcacacctacaccgcagaagatatgatgcgcgctggccgcgacgttgagaaaaacgttctgagccgcgcattgtaccaggtgcttgcacagcgggtgtttgtttacggcaaccgaacgattattctttaa

SEQ ID NO: 256729 - DNA, 654 bp, Klebsiella pneumoniae
atggatatcgtatcggttgccttaaagcgctactccaccaaggcatttgacgccaccaaaaagctaactgccgagcaggcggaaaacctgaaaacgctgctgcagtacagcccgtcaagcaccaactcccagccgtggcattttatcgttgccagcagcgatgaaggcaaagcgcgcgtcgccaaagcggcgagcggcacctacgtgtttaacgaacgtaaaattctcgacgcatcgcacgtggtggtgttctgcgccaaaaccgcaatggacgacgcctggcttgagcgcgtggtcgatcaggaagaagccgatggccgctttgctaacgccgaagccaaagcggcaaaccataaaggccgcaccttctttgccgatatgcaccgcaaagatctgcatgacgacgaccagtggatggcgaagcaggtgtatctgaacgtcggcaacttcctgctgggcgtggcggcaatgggcctggacgccgtaccgattgaaggcgtcgatttcgcaattctcgatgccgaatttgacctgaaggccaagggctacaccagcctggtcgtggtgccggtcggccatcatagcgttgaagattttaacgcctccctgccgaaatcacgcctgccgcaggcgacgacgattaccgagatttaa

SEQ ID NO: 256730 - DNA, 369 bp, Klebsiella pneumoniae
atggaccaccgctcgctgcatgaccacgcgcaccgtattgcgctggagcttccctttaccgagcactgctggccgttcggcccggagtacgatgtgtttaaagtcggcgggcggatttttatgctcaccgcaacggtacgcggccgcgcgctggtcaacctgaagtgcgatccgcaaaaatcgctgcttcatcaggccatttaccgcagcatcgagcccggctatcacatgaacaaaaagcactggatcaccgtggttcccggcgaggatatcagcgtggacctgctggcggagctgattgatgattcgtggaatctgatcgtcgataaactgagcaaaaaagagcagcagcggctgcgcccggggtga

SEQ ID NO: 256731 - DNA, 1101 bp, Klebsiella pneumoniae; identical to SEQ ID NO: 173264

SEQ ID NO: 256732 - DNA, 342 bp, Klebsiella pneumoniae
atgactatttccgctcaggtcattgatactatcgtcgagtggattgatgaaaatttgcatcaaccgctacgtattgacgatattgcgcgccatgccggttattcgaagtggcatttacaacgactgtttttacagtacaaaggggagagtctggggcgctatatccgcgagcgtaagctgctgctggcggcgcgcgatctgcgcgataccgatcagcgggtttacgatatttgcctgaaatacggctttgactcgcagcaaacttttacccgcatcttcacccgtacgtttaaccagccgccgggcgcctaccgtaaagaaaatcacagccgcgcgcactga

SEQ ID NO: 256733 - DNA, 2145 bp, Klebsiella pneumoniae
atgtttaaatataataagataacagcattatggactgcgactctggcggtatcttcgatcgggaatcaggcgctggcggcggaggaaacgcttgtcgtcaccgcgggcagtagcgaagatcctacagcgccgcttaggggaatagtggccaccaggacgctatccgcgacaaaaaccgccgcagagatcgtcaaaacgccgcagtcagtatcggtggttacccgcgatcaaatgcgcgcgctggacgtcacctcggtatcccaggcgctgcgctatagcgcgggcgtttttaccgaatatcgcggttcatctaaccgcaacgacgaggttttcgttcgcggctttagctatgtgcccaagtttctcgatggcctgagctacggcgcgacggcctcctcgcaaaccggtactttcgacccgtggctgctggaacgcgtcgagctggtacgcggcccggcctcggtgctgtttggccaggtaaaccccggcgggctgatcgccatgaccagcaaacgccctgtcagccagccgattcatgaactgcagttccgcaccggcaatcatcatcttgccgaaggcgctttcgattttggcggcccgctgagcgatgatggccgcatgctctatcgtctgaacgggatcgcccgtacccagaatagccaggttgaagattataaagagacgcggatggccatcgcccccgccctcacctggtatcctgatgacgccacgcgcatgacgttattaaccagctatcagaaagacccggatgccggttaccgtaacttcctgccgcgctacggtacggtggaaagcgtcgacggcagctatattgcgcgtgattttaacgtcagcgatcccagctacaatcagtcgtggcgggaacaaacgatgattggctatgaatttgagcaccagccagacgatacctttactctgcgccagaacgcccgctacgccaccatcaaacagaagtatcgctacctggtttattccagtagccccgccaacagctcggtactctcccgccgcgcccagcatgaaacgcgccagaccgatgagtttggcattgataaccagctcgaagcaaagtttgccagcggccaggtggcccatacggtgattggcggtctggattacaaaaccagtaaagataagcagtatcttggccgggccggaggttcgcagtacgatctcgactggcgcagcccgacctacggcgttagcgtcgatgaaagcgccttcagccccgccactaatgaacagcaaaatctcgatcaggctggggtctatgttcaggatcagctgagctggcagaactgggaactgttagtttccgggcgctatgactgggcggaagtacgcaccaccgattttaccgacgccagcagcacccagcagaatgataataagttcacctggcgcaccggcctgctgtacgcctttgattccggtctttccccctatatcagctacagcacctcctttgaacctaacctgcaaaccaaccgcgcgcctggcgttggaccgttcgatcccagcgaaggcaagcaggtggaagtcggcgtgaaataccagcctgacccaaacgcgctaatcacccttgcgctgtatgatttaacgcaaagtaacgtcgccacctacaacagcgccgccggatggtttgagaatagcggtaaagtgcgttccaaaggggttgaggccgaagcgcacgcgacgctctttgagaatctcaatctgatcgcttcatacacttataccgatgcagaaaccgtcaacactaccgttgtcggtaccgaagggaaaacgccagcgcgtattccgacccatatggcttcagccttcaccagctataccctgccggacggcgcgctgaaaagcctgactgcgggagtgggcgtacgctatatcggtaccagctatggcgatgcgaaaaacacctttaaggttccggcggtagatctgtatgacgccatggtcagctatgaattgggcgagctaaactcgagcctgaaaggcgcgcaggtacagttcaacgtaaacaacatcgcggataccaggtatgtggcctcctgcgccagcgatagcgcctgcttctacggcattggtcggacggtgacggcaacggtcagctacgcctggtaa

SEQ ID NO: 256734 - DNA, 1215 bp, Klebsiella pneumoniae
atgaattatgaattgatggccacccagaacgccccggtgaaaatgtggaccaagggcgtacccgtggaagacgaagcgcgccagcagttgattaacacggcaaagatgccgtttattttcaaccatgttgccgttatgcccgatgtgcaccttggtaaaggatcgacaatcggaagcgtgatccccactctcggtgcgattattccggctgcggttggcgtggatatcggctgcggaatgaatgcgctgcgcaccagcttaacggcggcggatcttccggataaccttgctgaattgcgtagtgcgattgaagccgccgtgccgcacggacggacgaccgggcggggccgtcgtgacgcgggggcatgggaaaatccaccggctaacgttgacgcgcactggtcaacactgcatgcggagtttcaatggctaaccagtaaatatccgcgcttccttaacaccaataactacaagcacctgggaacgctgggaaccggtaaccactttattgaaatttgcctcgatgaggcgcagcaggtttgggtgatgttgcactccggttcacgcggaattggtaacgccataggcacctattttattgaaatggcgcaaaaagatatggagcagcatattgcgaacttgccctcgcgcgatctggcttatttctctgaaggcagcgagcatttcgtggattacgttcgggcggtgagctgggcccaggattatgcgcgcgccaaccgtgaagcgatgctggaaaatgtgctgctggcgctgcgtaaaaccatcgacaaaccctttacgctggtgagcgaggcgattaactgccaccataactatgtgcaaaaagagcagcattttgggaaggagatttacgttacccgtaagggggcggtatccgcccggcgcggtcagtacgggattattccgggatcgatgggcgcgaaaagctttattgttcgcggactcggtaacccggagtcgttctgttcatgcagccacggcgccggacgcgtgatgagccgtaccaaagcgaaaaaactgtttagcgtagaggatcagattcgcgccaccgcgcatgtagaatgccgtaaagatgcaaacgtcatcgacgagatcccgatggcctataaggacattgacgcggtgatggccgcgcagtccgatctggtggaaattgtgcataccctgcgtcaggtggtatgcgtgaaaggataa

SEQ ID NO: 256735 - DNA, 1020 bp, Klebsiella pneumoniae
atgaaaaggatgattacgctggacggcgcgcagggagaaggcggcgggcagattttgcgctcggcgctgagcctgtcgatgataaccggccagccgtttgagatgaccggcatccgcgccggtcgcgttaaaccgggcctgctgcgccagcatctcacggcggtacgggcggcggccgagatctgtagcgctcagctgagcggcgatgagctgggctcgcagcggctgcgttttgtcccagggccgattcgcggcggagcgtataaatttgccatcggcagcgcgggcagctgcatgctggtgctgcaaacggtgttaccggcgctctggtttgccgatagcccggcccgcgtcgaagtcagcggcggcacgcataatcaggcggccccgagcgcggatttcatttgccgcgtctgggagccgctgctggcgaaaatgggtataaaccagcgtacggctttgatcaagcatggcttctatccggccgggggcggcgccgcgctaacggaagtggcgccgagtgcgtcactcagcgggctacagctgctttcgcgtggtgaaacgaattgccttaccgcagaagcgctgctggcggcggttccttaccacgttggcgagcgcgaagtgatagcgctgaaggcctggctgccgctggcagataaaaaaattcgcgtgctggagggcggcgccgggccgggaaatacgctgtcgctgaccgtggagtgcgaacatcttacggagctgtttatggcttttggctccaaaggcgtgagtgctgaaaaggttgcgcaccagcttgcttcgcaggtcaaacgctatctggcaagcaaagcggctgtgggggaatatctggccgaccagctgatattaccgctggcgctggcgggcgaaggtgcgtttaccgtcgcggaaatgtcggcgcatttgctgaccaatatcgcggtggttgagcggtttctgccgatccgatttacctgtgaaccgagtgatattggctatcttattcaggttcgcgattaa

SEQ ID NO: 256736 - DNA, 2706 bp, Klebsiella pneumoniae
atgttgattccgtctaaattaagtcgtccggtccgccttgaacacactgtggttcgtgagcgattactggcgaaactttccggcgcgaacaattatcgtctcgcgttggtgaccagcccggctggatacggtaaaaccacgctcgtttctcaatgggcggcggggaaaaatgaccttggctggttctcgctggatgaaggtgataaccaacaggagcgttttgccagctatctcatcgccgccgttcagcaggcgaccggcggccactgtgcagccagcgaggccatggtgcaaaagcgccagtacgccagcctgccttccctcttcgctcaactgtttatcgaactggccgactggcagcgcccgctatttctggtgattgatgattaccatctaatcaccaacccggttattcatgatgcaatgcgcttcttcctccgccaccagccggaaaatatgactctggtggtgctgtcgcgtaatctgccgcagctgggtatcgccaacctgcgcgtacgcgatcagctgcttgaaatcggcagccagcagctcgcttttacccatcaggaggccaagcagtttttcgattgtcgtctcagttcgcctattgaggccgacgacagcaaaaggctgtgcgacgatgttgccggctgggccaccgcgctgcagctgatcgccctctcggcgcgccagaacaacacttccgcgcaacactccgcccgtcgtcttgccggtattaatgccagccatctttctgactatctggtcgatgaggtgctggataacgtcgatccgcgaacgcgtaatttcctgctgaaaagctcgttgctgcgctcaatgaacgatgcgctcatcgtccgcgtcaccggcgaagagaatggccagatgcagctggaggagattgaacgccaggggctattcctgcaacggatggacgattccggcgaatggttccgttatcatccgctgtttggtaattttctgcgccagcgctgtcagtgggagctggcggttgagctgccggaaattcaccgcgcggcggccgagagctggatggcgcagggcttcccgaccgaggctatccatcacgccctggcggcgggcgacgctaaaatgctgcgcgatattctgctcaatcacgcatggggcatgtttaaccatagcgagctgagcttgctggaacagtctctcgccgcgctgccgtggtcaaacctgctggaaaatccgcggttaattctcctgcaggcctggctgatgcagagccagcaccgctatagcgaagtgaataccctgctggcccgcgccgagcaggagatggatacggaaatggacaccgccatgcacggcgatttcaacgccctgcgtgcccaggtggcgatcaacgctggcgatcaggacgaagccgagcgcctggcgatggtggcacttgatgagctgccgctggccagctactacagccgaatcgtggcgacctcggtacacggcgaagtgctgcactgcaaaggccaactgagtaaatcgctggcggtcatgcagcagacggaacagatggcccgccgccatgacgtctggcactacgcgctatggagcatgatccagcaaagcgaaatcctgtttgcgcaaggtttcctgcaggccgcctgggaaattcaggaaaaagcgttccagctcattcgcgaacagcatctggagcagttgccgatgcatgagtttttgctgcgtattcgctcccagctgctgtgggcatgggcgcggctggatgaagcggaaacctccgcgcgcaacggcatgaacgtgctttcgtcctaccaaccgcagcaacagctgcagtgcctgacgctgatggtgcagtgctcgctggcgcgcggcgatctggataacgcccgcagccatctgaatcgcctggagaatctgcttggtaacggtcattaccatagcgactgggtatccaatgccgataaagtccgggtgatctactggcagatggtcggcgataaagccgccgcggcaaactggctgcgtcagacgcccaaaccggaattcgctaacaaccacttcctgcagagccagtggcgcaatatcgcccgcgcgcagatcctgctcggtgattttgattccgctgaaatggtgctggaagagctaaacgataacgcccgctcgctgcgtctgatgagcgatctcaaccgcaacctgctgctgctcaaccagctctactggcaggccgggcgtaaaagcgaagcgcagaaagcgctactggaagcgctcaccctcgccaaccgcaccgggtttatcaatcattttgtgattgaaggagaagcgatggcgcagcagttgcgccagctgattcagctcaataccctgccggagctcgagcagcaccgcgcccagcgtattctgcgcgatatcaaccagcatcatcgccacaaattcgcccactttgacgagagcttcgtcgagcggctgctgaaccacccggaagtgccggagctcatccgcaccagcccgctaacccagcgcgaatggcaggtactgggacttatctattccggctacagcaatgagcagattgccggcgagctggacgttgccgccactacgattaaaacgcatattcgcaatttgtatcaaaagctgggcgtcgcgcaccgccaggatgccgttcagcatgcccagcagttgcttaaaatgatgggatatggagtctaa

SEQ ID NO: 256737 - DNA, 360 bp, Klebsiella pneumoniae
atgttcgatactctgctggaaaacggcgcctatagccgcacgctgcgccactgggacaacgtgaaaggcgcgtggcaggaggtaacgcagaccaagcaggcgctgcaaaaaggcgatcgggttatcgcgctggtcaacaacctcggcgccacgccgctgtccgagctctacggcgtctataaccgtctgacgcagcgctgcgaggaaaccggcatcgcgatcgagcgcaatcttatcggcagctactgtacctctctggatatggtcggtttttccatcaccctgttaaaagccgatgacgagacgctggcattatgggacgccccggttcacaccccggcgctgaactggggaaaataa

SEQ ID NO: 256738 - DNA, 633 bp, Klebsiella pneumoniae
atgtcattaagcagaacgcaaatcgtagactggctctatcgctgcggcgatatctttaccaaagagagcgattttttgaccggtctggaccgggagatcggcgatgccgaccacggcctgaatatgcatcgtggttttagcaaggtggtggaaaagctgccttcgattgccgataaagacattggtttcattcttaaaaataccggtatgacgctgctgtccaacgtcggtggggccagcggcccgctgttcggcaccttctttatccgcgccgctcaggtgacccaggcccatcagagtctgaccctggacgagctttatcaagccatccgcgaaggcgcggaaggcgtggtgaatcgcggcaaagccgagccgggcgataaaaccatgtgcgacgtctggctgccggtagtggaatcgctgcgccagtccagcgaacagcacctgtcgatccaaagcgctcttgatgctgcctgcgaacaggcgcaagccgccgtccaggccaccatcgccatgcaggctcgcaaagggcgggccagctacctgggcgaacgcagcatcgggcaccaggatccgggcgcgacctcggtaatgttgatggttcagatgctggccgcagcggccaaagagtaa

SEQ ID NO: 256739 - DNA, 1422 bp, Klebsiella pneumoniae
atggtaaacctggtgattgtttcgcatagcgctcgtctgggcgaaggtgtcggagaactggcccggcagatgttaatgaacgatggctgtaagctggcgatcgccgccggaattgacgatcccaccagcccgatcggcaccgatcccattaaggttatggaagccatcgagtccgtagccgacgccgatcatatcctggtgatgatggatattggcagcgccctgctgagcgccgaaaccgcgctggatctcctcgatccggccattgcggcgaaggttcgcctgtgcgcggcgccgctggtggaaggaacgctggcggcgacggtgagcgccgccgccggggccggcatcgacaaggtcatcgaagatgccatgaacgcgctggaggcaaaacgcgtacagctgggattgccatcgcaaccgcaacacgcggcgttgaccgccgcgccgatcgacgaccgcgatgcgcgctcggtttccgtggtgattcaaaaccacaacggcctgcatgttcgcccggcgtcaaagctggtcgccgcgctggcgggattcaacgccgacctggtgctggagaaaggaggtaagtgcgtcacgcccgacagcctcaaccaaatcgccctgcttcaggtgcgccgtaacgataccttaaggctgcttgctcgcgggccggatgccgatgccgcgctggcagcgttccaggcgctggcggcggagaatttcggcgagcaaacggaggcggcgcctgcgactcagcccgcctgcgccaatcgcgtacagggtaaggtcgtactctattcccagccgcaggagaaggtctcacgggaaaaaggcgtcgccatcggtcagcagcagctgcggctaaaacgggccatcgatcggacgctggaagagcttagcgcgctgacgaccctggcggaggcgaagttttccgccgacatcgcggccatcttctccgggcatcataccctgctcgatgaccctgatttatacgccgccgcctgcgatagggtgcgcgacgagcaatgcagcgcggagtgggcgtggcatcaggtgctgagcgatttaagccaacaatatcgtcatctcgacgatccttacctacaggcgcgctatattgatattgaagatattttgcaccgcacgctgcgtcaccttaacgggagcaacgaagtactaccgcagtttgacggcccctcgatcctcgtggccgacgatatttttccttctaccgtcctgcagctcgatgcggatcgggtgaaagggatctgtctgcaggccggcagtgaactctctcacggcgccattatcgcccgtcaggcgggtatcgcgatgctttgccagcagagcgatgtcctgaccacgctacaaaagggggagaccgtcatccttgatattcccggcaagcgcgtgattcgcgcctag

SEQ ID NO: 256740 - DNA, 1650 bp, Klebsiella pneumoniae
atgtctcaattcttttttaatcagcgcgccaacctcgtcaatgaagtgattgaaggaaccattatcgccagcccgtggaataacctggcgcggctggaaagcgatcccgccattcgcgtggtggtgcttcgcgatctcgacaaaaacaacgtggcagtgatctccggcggcggttccggtcacgaaccggcccacgcgggctttgtcggtaaaggcatgctgaccgccgccgtctgcggcgatctgtttgcctcgccgagcgtcgatgcggtgctgaccgccatccaggccgtgaccggcgatgccggctgcctgctgatcgtcaagaactacactggcgatcgtctgaacttcggcctcgccgcggagaaagcgcgccgcatgggctataacgtcgaaatgctgatcgttggcgatgatatttcgctgccggataacaaacacccgcgcggtattgccgggacgattctggtgcataaagtggccggctacttcgccgaacgcggccacaatctggcgaccgtgctgcgtgaagcgcagtatgccgccagacacaccttcagcctcggtctggccctttccagctgtcacctgccgcaggatgcggaaacgactccgcgccatcatccggatcaggccgaactggggatggggatccacggcgaaccgggcgcttcggttatcgccacgcagaacagtgcggaaatcgttacgctgatggtagagaagctcagcgccgccctgccggaaaccggccgcctggcggtgatgatcaataatctcggcggcgtatcgattgccgaaatggcaattttgacccgcgagctggccaataccccgctgcatcagcgaatcgactggctgataggcccggcgtcactggtcaccgcgctggatatgaaaggcttttccctcaccgccatcgtgctggaagagagcattgagaaagcgctgctctccgcggtcgaaaccgccggctggcagacgccagtgcagccgcgcgcaatcagcgtgatgccctcgtcgctgcgcagtacgcgggtggagtttacgccctcggagaatagcgaggttgcaggctacgtagagcgggtgaccggtacgctatccgatctggaagcggacctcaatgcgctggatgcgaaggttggcgacggcgatactggctccacttttgccgctggcgcacgcgatatcgccgacttacttcagcgccgtcaactgccgctggctaacctcgccacgctgttcgccctgattggcgagcgtctgacggttgtgatgggcggttccagcggcgtgctgatgtcgattttctttaccgccgccgggcagaagctggaacagggggcaagcgtcgccgaagcgctaaacgccggtctggcgcagatgaagttttacggcggtgccgacgaaggcgaccgaaccatgattgacgccctgcaaccggcgctggcggcgctgctggccgaaccggaaaatctgcaggccgctttcgcggcggcgcaggcgggcgcggatcgtacgcttcacgccagcaaagcaggtgcaggacgcgcatcgtacctgaacagcgatagtctgcgcggcaatatggaccccggagcccacgcggtggccatggtgtttaaagcgctggcgcagaaatag

SEQ ID NO: 256741 - DNA, 774 bp, Klebsiella pneumoniae
atgacaacgagcaggcatcctgaatacccgcagcgcgtgcgtaatgagctgcgtttccgtgagttaaccgtattgcgcgtcgagcgtatcggcagcgcattccagcgtatcgtgctgggcggagaggcgctggaaggctttgtctcccagggtttcgacgaccataccaagctttttttccccactgcgggtgctgcgtttacgccgccggaggtgacggatgaaggcattaactggggcgaaggcgtacgtccggcgacccgcgattatacgccgctttacgacgccgaccgtcatgagctggcgtacgacttttttattcacgatggcggtatagccagcagctgggcgctggcggcgaaaccgggcgataagctggtcatcggcggcccgcgcggttcgctggtggtgccggaagattacgcctggcagctgtatgtgactgatgagtcaggtatgcccgcgctgcgccgccgtctgctaggattgcggcagcttccgacgcgcccgcaggtcacggcgatcgtgaccattggcgatgagtcttatcaagattacctggccgatctcgatggttttcatatcgagtgggtggtgggacatcactcctctgccgtggccgagcgtctggcgcaggttgtggttccaaccgaagattattttatctgggtgaccggggaaggcgcggtggtgaaatcactgctggcgcattttgaaggtccggagattgacccgcagctggtgcgttcgcaggcctactggcacagcaagtaa

SEQ ID NO: 256742 - DNA, 579 bp, Klebsiella pneumoniae
atgccggctgcatggtacggtgtgccacaaacccgggagcgcttagtgcttattgcatctaaagattttgatgtcgctttaccttccccgacacatggaattggaaatactccttattcaacggtcaaagattggatcggtaatctaccgaggatagaggcgggtgaaaagcatcatagccttcctgatcatgaggctgcgcgcttatcagagcttaacttgcgtagaattaaatgtacccctgagggtggtagtagagagttttggccagatgaactgattttaaaatgtcatcgtaaccataaaggccacacagatgtctatggccgtctgagctgggataagcctgccagtggactaactacgcgctgtattagttattcaaatggacgttttggacacccgacacaaaatcgagcaatatctgttcgtgaagcagcttgtttacaaacttttcctttggattataagtttactggttctttgcaatctcgggctcgccaaataggaaatgcggttccacctaagatgtctgaggcgatggggaagcatttacttaatgtaatcaaagcctcctag

SEQ ID NO: 256743 - DNA, 1065 bp, Klebsiella pneumoniae; identical to SEQ ID NO: 203142

SEQ ID NO: 256744 - DNA, 2052 bp, Klebsiella pneumoniae
atgaacaactatgcgtatcttattaaagccaaagcaaaggccacagattcaaggaatttattctgctggttcaccgctaaatctgactcgcgcgctgaacgcaaaattctggatatcctggaagacgctgaaattaatgttggccgcggtgccgaccaccagctaccgatccgcacaaactggcatatcgttgatgatcttcccgaagaaaacatcctagatgaaacatggtgcgaccgctacgaacttggtggtgaagacgggttgacctggcagaaaattgtcgcacctgtagttgaggaaactattgaagctcccgatgctgaagatgcaacaaatgctgaagaaagtgaacaggaatatgccaatgacgaaaacgctctgtttcctgtatcaacgatgcctttccgcacgcagctactggcgcaatatatggaaagtgaccgtcatgtttaccatatcagcattccgcatcggggccgtcttgaagcaatggaaatggatcaggataacagcgctatccaggatctgattcttgcggcagaaaatgtccccgccattaaaaattacgacatgccaggtatctggaagtttaccactgcttttaaaaaagcattcccggagggaaagcgatacgaaattgggaagcaaattgagttctctaaattatggtttcagactccccacattgagcgcggcattctcgtaaaagaatgggcagatagaaatcaattaacatctattgatgacgcaacatcagataccagcccggccgaaggaaaaacgtcagatcgtctcactcctttaaccattctgggtctggaatatgagattgccctgggcctgctggcgcgggccaaagagttcgacatttacaatgttccgttcgagatcgatattcaggcaaacggcataatgaataagctcgataataaagaatggctggcgacccgggagctatttatgtctatccccggaggccgggatttttcgcgggcttgtaatattgctgtggtgaaaactacccctcaggatttatggaaagatcctgtcgcacaccgagaatatctaaacaaagtaatgatcgaaactgaccatgctcatcctgacgaactaatcgttgatattgcatgcgggagatcatcctcaccaatgccggcagcaccaatgtcagcaccaggagaggacgcaactgattacactggcaaattgctggctaccgggcgtggggagtatgtggaaggcatcagcgatcccaacgatgaaaagtgggttaaagaagatctcacaaaaccaagagcaaccgcggagaccgccagtcatgtgcagatggaagaagctatcaatgatgaaaccacgccttctgatgagatttcagaaagcgaaactgcagatgagacaactgcaggcgacgctgaatctggtaatgaagcaagtaccttaaataatgattccggtcatcatattattgaagaggactcacctgctgattatcgccatgtaatggtcgaccttgaaactatgggtaaaaagtctaatgccccagttgtatccattggcgcagtaatattcgacccggcaacaggctttctcggcgaaacattttacaaagttgtcagcctcgaatctgcggtctcgtggggtgctgagattgatccatccacggttatatggtggatgaaacaatcgtcagaagcccgctcggaaattgccaacgataacgccattcaactggatgacgccctgctccagtttagcgaattcgttttcgagaatattcccggaggctgtgaaacggcacaaatctggggtaatggtgccacttttgacaataccattttgcgatcttcatttgaacgagcatgccttgactgtccgtgggactaccggaacgaccgcgacgtcagaacgatggttgaacttggcaaaactattggcttcgatgctaaaacctctatcccattccagggtgagcggcataacgcgctggcggatgctcagcaccaggcccggtatgtttctgcaatctggcagcgactgattaaaaactga

SEQ ID NO: 256745 - DNA, 297 bp, Klebsiella pneumoniae
atgtcagccaacgaactggcgttgaaattcagcaccgcacctgctgagcaactaatcggtgccttgcctgttcttgaggtaaaggaagccctgcatgatgaagttgaagatgagattttgagtgaagtcatgatggtgcataaatttgaactggaggccacagaggagattacaaacgcgtttgccaacgcgatgaaactggcgctgacacaacctgcaaaaacagcaaaagcgacgttacgaaaggcgcttaaggaatatccaggctacgggcaggagccaccagcagccccataa

SEQ ID NO: 256746 - DNA, 195 bp, Klebsiella pneumoniae
atgagcaccctgtacgttctgattatcggcgtctgcgcgattacaggtgaatgctccgatgttctgactggcatttatgaatcagagcaacaatgcgttgattctgccgctgagcagcacgtcaaagggcagtgtttaccttacaaacaggctttcgcctgggccgacgaccaacggccagcagtacgcttttaa

SEQ ID NO: 256747 - DNA, 2154 bp, Klebsiella pneumoniae
atgactccattaaatgtcccttcttcggcattaaaagggcgtgcgcttttttcactgatttttttcacctcaccgggattattggcagcggttaatagcgccgatacaacaaaaaaaaccgccgacgagaccatgacggtcgtggccgacggcagcaggcaaagcgccactaacggttatcagccggtcaatacgtcaaccgctaccctgacctccatgccgatgctggatattcctcaggtcgtcaatactgtcagcgaacaggtgctgcaggatcagcacgcgacgaacctcgatgaagcgctgtataacgtcgccaacgtggtgcaaaccaataccctcggcggaacccaggatgcctttacccgccgcggcttcggcgctaaccgcgatggttcaatcatgaccaacggcttgcgcaccgtactgccgcgcagttttaccgccgccaccgaacgcgtcgaagtgcttaaaggcccggcctcaacgctgtacggtattctcgaccccggcggattaatcaacgtggtgaccaaacgcccggagcgcacttttggcggctctgtttccgccacctccaccagctttggcggcggtaccggccgatttgacgtcaccggccccattgacgggacgccgctggcgtatcgggtgattggcgaatatcagcatgaagattactggcgtaatttcggcaaagagaagagcagctttattaacccctctctgacctggttcggcgagcgggggacggtgaacgtgtcatattcgcaccgtaactacagtactcccttcgatcgcggcaccatcttcgatctgaacaccggtcatgcggtgaacgtcgaccgtaaaacccgttttgatgaaccgtttaatattaccgacggttattccgatctcgcgcagctgaatgccgaataccgtctcagcgacgcctggaccgcccgcttcgactacagctacagccaggatcattacaacgacgatcaggcccgggtaatggcctacgactcggcgaccggcaacctgacccgccgcgtcgatgccacacacggttcaacccagaaaatgcactcttcgcgagcggatttacagggtaacgtggttattggcggcttttacaacgagatcctcactggtctggcctatgagaattacgatctgctgcgcaccgatatgatccgctgtaagaacgtcaagggtttcaatatctataatccggtctacggtactgttggcaaatgctccagcgcttcggcatccgacagcgaccagcgcattcagcaggagagctacgcgggctacgttcaggacgcgctctatcttaccgataaatggattgccgttgccggagtgcgctatcagtattacacccagtacgccggtaagggccgcccgtttaacgtcaatacagacagcagcgaccaaaaatggacgccgaaagcgggcctggtttataagctgacgccgtccgtttcgttgttcggtaacgtagcgcagtcgtttatgccgcagtcctctatcgccagctatatcggcaacctgccgccggaagagtccacggcgtacgagctgggcgcaaagtttgagctgttcaacggcgtcaccgccaatattgcgctgtttgatattgataagcgcaacgttctctacacggaatccgtgggtgatgaaaccgtggcgaaaaccgccggtaaggtgcgctctcgcggcgtcgaagtcgacgtggccggatccttgacggataacctgagcgtcatcgccagctacggctataccgatgcgaaggtcaccgacgatccggattacaaaggcaaaccgctgccgaacgtgccgaaacacaccggttcgctgttcctgagctatgacattcataacgtctacgacagcaatacgctgacggtgggcggcggcggtcgcgcggtgagcaaacgttccgggaccaacggcgcggattattatctgcagggctatgcggtggcggatgtgtttgccgcctataagatgaagctgcaatatccggtcaccctgcaggttaacgtgaagaacctgttcgataagacttattacacctcctccatcggcaccaataacctcggtaaccagatcggcgatccgcgggaagtgcagtttacggtgaagatggatttttaa

SEQ ID NO: 256748 - DNA, 822 bp, Klebsiella pneumoniae
atgccacagcgggtgttgcctgcagagcagggaatcgtccttgattccctgtcggccggatatggccagacgttaattatcgacaatattcatctcaccattcctcacgggaaaatgaccgttctggccggtgccaacggttcgggtaaatcgacgctgctgtcgactatcgcccggatgctcaagccgctggggggctgcgtacgtctggacggcgaggtgattcaccagatgccgacccgggaggtttcccgtcggctgggcattctgccgcaatcgccgctgactccggaggggctgacggtttttgaactggtttcgcgcgggcgctatccgtggcaggggctgatgcggcaatggtcgcaagccgatgaacgggcggtggaagaggcgctacggctcaccggcaccgcagaattcgctcatttaccggtggatagcctctccggcggccagcgccagcgctgctggatcgcaatggccctcgctcagcaaacggcgacgattctgctggatgaacccacaacctggctcgatctgcgctatcaggtcgatatcctcgaactgctgcaaactttaacccgcgaacacggccgcaccgtggtgaccgtcctgcacgacctgaactttgcggtgaactatgccgacctgctggtatttctcaaaaaagggcagatcgccggggtgattaatgaacaggaaatctgcacgccggagctgatcaaaaacgtctttgacgtggacgttcagatgtcgctcaacccgcagaccggcaagcccttttttatgccattccgcgctcgtgaggagaaagctttatga

SEQ ID NO: 256749 - DNA, 1026 bp, Klebsiella pneumoniae
atgagcgcctccgcgctgctgctgcagcgccgacaatcccggccccggctggcgctggtattgctgagcctgctgctgctgggcggctcgctggtgcatctcgggctcggcgcgcgctggattgccccgcaaacggtgttgcaggcgctgttccattacgatccgcgcaattttgaccaccgaattatcgttgatttacgtctggtacgtctcgcggcggcgctgctcaccggcgcggcgctcggcgtggcgggcctgctgctgcaaaccgtgatccgcaacccgctgggtgagccgcatattctcggtcttaacgccggcgcttcgctggcggtggtggcgacatcggcgctggggatcagcctcggcggcgtcgcgttagccaggccgctgaccgccgcctgcggcgcggcgctgctgtttggcggcgtgatgctgctgtcgtcgtccggtcgcggtggcgtcacgccgctgcgcattaccctgtgcggggtggcgctgtcggcctttgcctcggcggtgacggcggcgattctgatcctcgatgaacaaacgctactggcgatgcgtacctggctggcgggcgatcttgccgggctgaactggcaaacgctgcgcgctgcgatactcccggcgctggcggggctgacgatcgcgctgatcattgccccgcgtctgaacctgctggcgctgggcgataaggtcgcgctggggctgggggtgaaaatcgttcagacccgcctgctggggctggccgccattgcgctattgtgcggctccgcggtggcggtggccgggccgatcggctttgtcgggctggtggtcccccacgcggtgcgccggctgattagcgaagatattcgcctggcgctgccgctggccgctccggttggcgccctggtgctgctgctggcggatatcgccgcccgcacgctggcggccccccaggagctggcgaccggcgcaatgaccgcgctggtgggggcgccggtgtttattgttatcgccgcgaggttttttaaatga

SEQ ID NO: 256750 - DNA, 729 bp, Klebsiella pneumoniae
gtgcggtcgccgagcagcgccacatcggcggccctggcggtcaaaaaaaggatcatcgccccgggcagcgcccagcagaaggcaacgaccaacagcggccaggtcgccgcgtgcaaactccccgccagccagatcatcgccgtttgtacatcgcgcacgtcggcggtggtcataaaaataccgaccgccgccgccagcgtccacgacacgccgatgccaatgagaataaagcgcgggcgcgaacaatcgcgggccagcgccagaaccagcagcgccaccagcacgccgccgagcattcccgccagcggccgccagaccaggcccaccgccgggaagaacagcaccagcgccaggacgacaatgctggccccctccttcaccccgataagcccgggatccgccagaccgttgcgggtaatgctctgcatcgccgcgccggccagaccgagcatcgccccgcacagcagcgccataaacagcctcggcaggcggatatcaaacagaataaatcgctgctgttcgcccacgttttccccacccagcagcgcatggaacagggtaccggagggcatcgggaaactgccgcgggtcaggccaaacagcgccagcagcaggatgacgagcagcgcaacagcggtgatgtttaatgccgcgggccgcagcagaatgtgccagcggccgcaggtcagcggccgaaagccggcgcgacggacggcatttttcatttaa

SEQ ID NO: 256751 - DNA, 1308 bp, Klebsiella pneumoniae
atgcaagcattgaaaatagctgtaatcggcggcggcagcagctatacgccggaacttatcgaaggcatcatccttcaccatcagcagattccggtcacggagctggcgctggtcgatgttgacgccgggcgcgagaaagtggcgattatcgccgcgctgacccagcgtatgtttaagcgccatggcctcgaacaggttaaggtcagcgtgcatttcagcctggatgaggccattcgcggcgctaaatttgtgctgactcagctgcgggttggtcagctggcggcgcgggcggcggatgagcgtctggggctgaagtatcagttgctgggccaggaaactaccggcgtcggcggatttgccaaagcgctgcgcactattccggtgattttacaggttgcccgcaaggtggaagcgctggcgcccgatgcctttatcctcaattttaccaatccggccgggattgtgacggaagcggtgagtcgctacagcagcgccaaaattatcggcctgtgcaacgtgcccatcaatatgcagcatatgattgccggaatgctggacgcaaaagaagaggaggttcggctgagcttcgccgggctgaatcatatggtctgggtacacaaggtgatgcaggggcgggaagaggtgaccagcaaggtcatcgacatgctgtgtgacggtcaatcgctctcgatgaacaatattcaatcgctgccgtggccggcggagtttctgcgggccctgaaggcgatcccctgtccctatcatcgctattactggctgacgccggcgatgctggcggaagagattgaagcggcaaaaaccaaaggcacccgcgcagagcaggtgatgaaggtggaacaggagctgtttgatatctatgcccggcccgatctggatgaaaagcccgaacagctgagcttccgcggcggtgcgtactactccgaagtggcggtggagctgattaacgccatctacaacaatcttggcaaggagatggtcgtcaacacccgcaacaacggcgcgattcacggcttcgatgatgatgcggtggtggaaattaacagcattattgacgcgcagggcgcacgaccgctggcctttggcgcgctgccgccgatcatgaacggactgacgcaacaggtgaaagccttcgagcgcttgacgattgaggccgcggtccacggctgccgggatagcgcgctgctggcgctggtgagtaacccgctggtcgggaatgtgaccgatgcccgggcgctgcttgatgaggtgttaaccatcaaccgcccctggttaacgcagtttaactaa

SEQ ID NO: 256752 - DNA, 309 bp, Klebsiella pneumoniae
atgccacgtattgtcctgtgctgcgccgccggaatgtccaccagcatgctggttaacaaaatgaaagccgaggcgcaacagcgcgcgctggcgctggagatttacgctgtacccgtcgccgagtttgagcgcgagttgcccaatgccgacgtgattttgctggggccgcaggtgaaatatgaagcggcccggttgacggagcttgctgccccgcacggaaaagccgtggcggtgatcgacatggcggattacggcatgatgcgcggggccgccgtactggataaagcgctcgctctgctgaaccactaa

SEQ ID NO: 256753 - DNA, 1149 bp, Klebsiella pneumoniae
atggataccgatatagccaagagaaatcgacgcgcggccgtttttgaaaatctccgaaacgtcgtcatccgctttcaggcgcacgccgcaggccccttccatatacagaatcggcgcaacgcgagccttcactccttccagacgggcgatgcgggtcatcagcgctttacgcgccagctgcagacgctcatccagaagtttccagaacacagcttcgtcgccgcgggcttccagggcgatgcgcggcaggttgaggctgataacgccgaggttgttgcggccatcgtgcacctgttcgccgtcctcgttttcccacacgccgaggaagctgcggcagcccatcggggttttgaacgagccggtcaccttcacgacctgatcgtagttgaggatatccggatacatgcgcttgctcgcgcactccagcgccagctgtttaatgtcgtagttcgcgtcgccaaacttatggttcaggccgtcgcgaatggcgaagaccagcttggggaacaccgccgttttgcgatttttaccgagtcccgcgatgcgattgcgcagaatggactgctgaatcaggcgcgattcccagctggtaccgaggccgaaaccgaaggtgacgaacggcgtctgaccgttggcggtatgcagggtgttcacttcatattccagcgactggaaggcgtcgtagcactctttctcggtacgggaacgggcataaccttcggcgtcggggatttgccactcttcggcaattttacggtgcttattgaagctttcggtaacaaacggcgccagcacttcatcgatgcggttgatggtcgtgccgccataaatatggctggcgacctgcgcgataatctgcgccgttaccgcggtggcggtagagatggatttcggcggctcaatctcggcgttgcccattttaaaaccctgcgtcagcatgcctttaagatcgatcagcatgcagttgaacatcgggaagaatggcgaatagtcgagatcgtgatagtggatcaggccgcgctcgtgcgccatcactacgtcatgcggcagcaggtgctgacgcgcatagtgtttagccacgatacccgccagcagatcgcgctgggtaggaatgactttactgtctttgttggcgttctcgttgagtaa

SEQ ID NO: 256754 - DNA, 855 bp, Klebsiella pneumoniae
atggctaccaaactgcaggacgagaatactacttgtctggcagctacaccttctgatccacgtcccaccgtgctggtgtttgattccggcgtcggtgggctgtcggtttacaatgagattcggcagcttttgccgaatctgcattatatctacgctttcgacaacgttgctttcccctacggcgagaaaagcgaagagtttattgttgaacgcgttctggagattgtcaccgcggttcagcagcgttaccccctggcgctggccgtcattgcctgtaataccgcaagtaccgtttccctccccgccttgcgcgacaaatttgcgtttccggttgtcggcgtggttcctgcgataaaacccgcggcacgattaacggcgaatggcgttgttggtctgctggcgacgcgcgggacggtaaaacgtccttatacgcgcgaactgattgctcgttttgcgaatgaatgcaaaatcgaaatgctgggatcggcagagctggttgagctggcagaagccaagctgcacggcgagccggttccgctggatgagctgcgacgtattctgcgtccctggctgcgaatgcaggagccgcctgatacggttgtgttgggctgtacgcatttccctctattacaagaggagctgcagcaggttctgccggaagggacgagaatgatcgactccggggcggcgattgcgcgtcgaaccgcctggctattagagcatgaagcgcctgatgcaaaatcggatgatgccaatattgcgtactgtatggcgttaacggctgaaactgaacagcttttgagcgttttgcagcgttacggcttcgaatcgctggaaaaattaccgctttcatag

SEQ ID NO: 256755 - DNA, 1869 bp, Klebsiella pneumoniae
atgattaaaaaagcttcgctgatgacggcgctctccgtcacggctttttccggctgggcgcaggacagcaattcagatacgttagtggtgacagcaaatcgttttcaacaaccggtcaacacggtccttgcgccgaccgatgttgtgacgcgggaagagatcgatcgctggcaggcgaaagatttgaacgatgtaatgcgccgattgcctggcgtggacgtcgcgcaaaatggggggatggggcaatcttcctcgctcttcatccgtggtactgaagccaaacaggtgctggttctggttgatggcgttcccatggcccgaccgggtatcaccaataatcctgacctgaaccagattccgctatcgctggtgcagagagttgaatatatccgcggcccgcgttcggcgatttatggttccggcgcaatgggcggcgtgattaacgtcattacgcattccgataaagaacaatccaaaattaccgctggggtgggttctaaagggtaccaacaatatgacggtactctgcgccatcgctttggcgatacggtcgcgacggttgcgggctcttatgagggcaataaaggctttaacgttcagcctgattcaacctgggatcacgacggcgatcgcgatggtttccgtaataaaacgttttggggcagtcttgagcataaatttaacgagaattttgacggtttcttccgcggacacagctacaccaacaactctgattacgatcttggaagcccgccgtatagtccggccaacagcgcagatgaaaaccagctctataaccaaagctgggatgccgggctgaacttcaattccggtatttactcctctcagcttatcgccagctatcagaaggtaaaggactataactacagcagtatttatggtcgttataatgatgggacgacgctcgacaggatgacgcagcgtaatcttcaatggggcaataacgttattgtcggtcacggctcggtcagcgcaggggtcgattggcagcagcagcgtttaacgtcgtcagatacggcgctgtcggatacctacaagcgtgataacacggggctgtatctgacgggccagcagcaagtgggtgatgtcaccctcgaagcttccggacgtgaagaccacgatgagcagtttggctggcacggtacctggcagactaccgcaggatgggagtttgttgaaaattatcgcctgactatcggttacggtaccggcttccttgcgccttctttaggacaacagtttggctcaacccgatttggtatcaacgcgaatcctaatttgaaacctgaagagtcgaaacagtgggaggcggggctggaagggcttaccggccctgttgactggcgcttatccgcgtaccattacaagattagcaatctgattacctattactccgatcctgttacctatgagggggagtacgacaatatcaatgccgccacgattaaaggcgtggaatggacgggaagtatagataccggtatttttagccatcgcgtaacgttgcagtatgttgatccgcgtaacgatgataacggtgaagtgctggcccggcgttctaaacgacaggcaaaatatcagctggactggtccgtgtttgatgtcgatatggatgtgtcgtggcagtattatgggaagcgttacgacaacaacacctcccaatacaacaatacgcaaagaattttgccgagctacagcacggtagacgtttctgcagcgtatccgatcaccgatcgcctgacagttcgtggtaaaatagctaacctgttcgataaagattacgagacagcttatggctaccaaactgcaggacgagaatactacttgtctggcagctacaccttctga

SEQ ID NO: 256756 - DNA, 1101 bp, Klebsiella pneumoniae
atgacccccgaacaccttcctaccgaacaatatgaagcgcagctggcagagaaagtcgtccgtttgcagaaaatgatggcgcctttcagcgccccggttccggaagtgtttcgttcgccggtcagccactatcgcatgcgcgcagagttccgcctgtggcacgatggcgatgacctgtaccacattatgtttgatcagcagaccaaatcccgtattcgcgtcgataccttcccggccgccagtgaactcattaatcaattgatgactgccgtgattgccggcgtacgcgataacccggtactgcgccataaactgtttcaggtggattatctgaccaccctaagcaaccaggcggtgatatcgctgctgtatcataaaaagctcgaggacgagtggcgccagcaggcggagcgtttgcgcgatgcgctgcgggcgcaaaacctgaatgtgcatctgattggccgcgcaacgaagacgaaaatcgagctggatcaggattatattgatgaacgcttaccggttggcgggcgtgaaatggtctatcgccaggtagagaatagcttcacccagccgaacgcagcgatgaacatccagatgctggagtgggctattgataccacgaaaggcgcaaccggcgacctgcttgagctgtattgcggcaacggcaacttttcgctggcgctggcgcgtaatttcgatcgcgtgctggcaacagagattgctaaaccatccgtcgcagcagcgcaatacaacattgccgcgaaccacattgataatgtgcagattatccgcatgtcggcggaagagtttactcaagcgatgaatggcgtgcgggagtttaatcgcctgcagggcatcgatctgaagagctatcagtgcgagacgattttcgtcgatccgccgcgcagcgggctggatagcgaaacggagaaaatggtgcaggcgtatccgcgtattctgtatatctcctgcaatccggagaccctatgccagaacctggaaacgctcagtgatacccacgaggtcacgcgcctggcgctgttcgaccagttcccgtatacccaccatatggaatgcggcgtactgttaacgaagaagtaa

SEQ ID NO: 256757 - DNA, 360 bp, Klebsiella pneumoniae
atgaaacactcagtacaagatagaggcacgctgctgctggcgctgatcgcaggtttatccattaatggaaccttcgctgcgctattcagttcaattgtccctttttccattttccctgttttgtcgctggtgctgacggtttactgtctgcatcagcgctatcaaaatcgtagtatgcccgtgggtctgccggggcttgctgccgcctgttttattctcggcgtgctggtttatagcaccgttgtgcgcgcggaatatccggacatcggctctaacttcttcccggcggttctgtcggtgattatggtgttctggattggctacaaagtgcgcaaccgcaagagcgcgatcgctgaataa

SEQ ID NO: 256758 - DNA, 165 bp, Klebsiella pneumoniae
atggtcaccatcgtatttagcgccggcgccgaggccctggatgtaggtccggagcagcgtcggcagctggaagagcgcctggtgctgcagctcagaatgatctcgaaaggcgcgtattattggtatcgccgtgaacaagaaaaaatttcaaatcattccgaataa

SEQ ID NO: 256759 - DNA, 1134 bp, Klebsiella pneumoniae
atgcaaagcctgtccccaacatcgcgttacctttccgctctcaaagagggaagccatcaacctgacgacgttcagcgagaagcggtcagccgcctcgatacgatttatcaagaattgcagaataaaccttcggtagcgccgcaaaccggcggcggtctgcgggcgaaattcggcaagctgctgggcaagcgtgaacccgctgtcgaaacggccgcagttcgcggtctctatatgtgggggggagtcggcagaggaaaaacctggctgatggatctgttctttcaaagtctgccgggagaacgtaaacaacgtctgcattttcatcgctttatgctgcgggtacatgaagagttaaccacgctgcaggggcacagcgatccgctggaaatcgttgcggaccgttttaaagctgaaaccgatgtgctctgctttgatgagttttttgtctctgacattaccgatgcgatgctgctgggcggtctgatgaaagcgctgtttgcccgcgggataaccctggtggcgacgtcgaatattcctcctgacgaactgtaccgtaacggtctgcagcgcgcccgcttcctgcctgcgatcgacgcgattaagcagcactgcgatgtgatgaatgtcgacgccggcatcgattatcgtctgcgcacgctgacccaggcgcacctgtggctgtcgccgctgaacgctgagacccggcagcagatggacaaactgtggctggcgctggcgggcgcaaagcgcgagcagatgccaacgctggagataaaccaccgtccgctgccgacgttaggcgttgagaaccagacgctggcggcttcctttgcgacgctgtgcgtggatgcgcgtagccagcacgactatattgcgctttcgcgcctgtttcataccgtcatgctctttgatgtgccggtgatgaccgggctgatggagagcgaggcgcggcgctttatcgccctcgtcgatgaattctacgaacgccacgtcaaactggtggtcagtgctgcggttccgctgtatgagatctatcagggcgagagattaaaattcgagttccagcgctgtttatcgcgcctgcaggagatgcagagcgaggagtatctgaagcgagaacacctggcggggtaa

SEQ ID NO: 256760 - DNA, 399 bp, Klebsiella pneumoniae
atgacctgggaatacgcgctaattgggctagttgtcggcatcattatcggtgccgtcgcgatgcgttttggcaatcgtaaattacgccaacagcaggcgctgcagtttgaactggaaaagaataaagcagagctggaggagtaccgcgaagagctggtgagccattttgcccagagcgccgagcttctggataacatggcgcatgattaccgccagctgtatcagcatatggcgaaaagctccagcaacctcctgccggacactatggcggacgctaatccgttccgcaatcgtctggaagaatccgaagcgggcaacgatcaggctccggtccagatgccgcgcgactattctgaaggcgcatccggtctgctgcgcggcggtgtaaagcgcgattga

SEQ ID NO: 256761 - DNA, 1368 bp, Klebsiella pneumoniae
atgaataaaccaactttgctgttgagtgcgttagcgttaagcattgggttgtcgttgtcagccttacctccggcagcagcgtctttaccgacacaagttccgggccagggcgcgctaccaagcctcgcgccaatgctggaaaaagtgttgccggcggtggtgagcgtacaggttgagggtaccgcgtcacccgcgcaggatatgccggaagagttgaagaaatattttggcgacaacgcgccgcaagagcaggcgcagccttttgaaggactgggttccggggtcatcattgatgccgcaaaaggctacgtgctgaccaataatcacgtcattaatcaggcccagaagatcagcgtccagctcaacgacgggcgtgagttcgatgccaaactggtcggcagcgacgagcagagcgatattgcactgctgcagattctcaagcccagtaatttgacgcaaatcgctatcgccgactcggacaagctgcgggttggcgacttcgccgtcgctgtcggtaacccgtttggcctgggtcagaccgccacatccgggattgtttccgcccttggccgcagcggcctgaaccttgaggggctggaaaactttatccagaccgatgcttccattaaccgcggcaactccggtggcgcgctgctgaacctcaacggcgagctgattggcatcaacaccgccattctggccccgggcggcggcagcgtcggcattggtttcgccatccccagcaatatggcaaaaatcctctctcagcagcttatccagtttggcgaaatcaaacgcggcctgttgggtattaaaggaatggaaatgagcgcggatatcgccaaagcgatgaatcttgacgtccagcgcggcgcattcgttagcgaagtcctgccaaactcggggtcggctaaagcgggcgttaaatctggcgacgttatcgtcagcctgaacggcaaaccgctcaacagcttcgccgaactgcgttcacgcatcgccacgaccgagccgggaaccaaggtgaaattaggactattgcgcgaagggaaacccgttgaagtggaggtcacgctggacaagagcacctcgtcttccgccagcgcagagcttatcgctccggcgttacagggcgcatcgttaagcgacggtcagatgaaggatgggaccaaaggcgtcatcattgataacgtcgataaaggcagccctgccgcgcaggccggcctgcataaggacgatatcattattggcctcaatcgcgaacgcgtgcgctcgattgccgaactgcgaaaagtactcgaaagcaaaccgacggtcattgcactgaacgtcgttcgcggcagcgaaagcatctatctactgctgcgctaa

SEQ ID NO: 256762 - DNA, 1119 bp, Klebsiella pneumoniae
atgtccggacaagtcgtgttatgcttcgcctgtctatccatcaacgatatctgcatcatgcctgcaaagcttttacgttcgatacttatcggtttgatcgtcggcggtctgctgctggccgtcatgccttccctgcgccagtggcagctttcgccgaccacgcaatacgatagcgcggatgaatcccccgccagctataattccgccgtccgtcgcgcggccccagcggtcgtcaatgtctataaccgcgcccttaacagcaccagtcataatcagttaacgctcggctccggcgtgatcatggaccagcgcggctatattctgaccaacaagcacgtcatcaacgatgccgatcagattattgttgccctgcaggatggccgggtctttgaagcgctgctggtcggctcagataccctcaccgatctggcggtattaaaaatcaacgccagcggcggtctgccggttattccgattaacccgaaacgcgtgccgcatatcggtgacgtcgtgctggcgattggcaacccgtacaacctcgggcaaactattacccagggcattatcagcgccaccgggcgtatcggtctgaaccccactgggcgccagaacttcctgcagaccgatgcgtcaatcaaccacggtaactccggaggcgcgctggtgaactcgctgggcgagcttatgggtatcaataccctgtcatttgataaaagcaacgatggcgaaacgccggagggcatcggctttgcgattcctttccagctggcgaccaagattatggataagctgatccgcgatggccgcgtgattcgtggctacattgggatcagcggccgcgaaattgcgccgctgcacgcgcagagcggcggcggtatcgatcaattgcaggggattgtagtgaatgatgtggcgccggaaggcccggcagcccaggcagggatccgcgccaatgacgtgattatttcggttaacgataaacccgccgtttccgccctggaaaccatggatcaggtcgcagagatccgtccgggatcggaaattccggtggtgattatgcgtgacgataaaaaaattacgctgcatatcgccgtacaggaatatcctgcgaccaactaa

SEQ ID NO: 256763 - DNA, 702 bp, Klebsiella pneumoniae
atgaatgaaaccataacattacgccccgaaagcagggcatcgacaaaagatgtcattatcgattacacgctggcatcagtagatgaagttgaacaactgcagcccgcgcttaacctgttagcgcacccatcagttgcccgcggaggccatgatttttttgtccattgctatgaggcgggtacgcaaaataaagcagctgaaacagcaccggcgctacctgatacggtatttcgggactccacgccgtggatgcaaagaagtgggctgctgtgtgccgcagcgggtcatctggatgcactgggaaagacgctgacgcacaatcgtctgtgcgacctggccggccagtattgtgccggcgcggcggatgccgatgctgaaacccgcagcggattttataccgtgcgcagcatatcgctgccggtttaccggcgactgctgcgggacaagcatcctcatggcgtctgcctgcagcagtcactgctgcatctgctggcctggaagagcgaatcaccctgggcgcggcagcaggctcaacggttgctctggcagggcggcgtactgggtgataacggcgaatttgcgctgatgacgctcgatgacgagctgcgggagcggcagtttgcctggccggggctgtggtcgctgctggccgtcaccgggtttctggcgaaattcccggccgggccgatttttgctgattaa

SEQ ID NO: 256764 - DNA, 1128 bp, Klebsiella pneumoniae
atgcaaagcctgtctccaacatcgcgttaccttttagccctgaaagagggcagccatcaacccgacgacgtccagcaagaagcggtgagccgacttgataccatttaccaggaactgcagacgcagcccgcgccggtcgcgtcaggcggcggtttgcgcgcgaaattcggcaaactgctgggtaagcgcgagccggctgccgggacggcacctgtccgcggcctgtatatgtggggcggcgtggggcgaggcaaaacctggctgatggacctgttttaccagagcctgccgggcgagcgtaaacagcgcctgcatttccatcgtttcatgctgcgcgtacacgaagagctgaccaccctgcagggacatagcgacccgctggagatcgtcgccgaccgctttaaagcggaaaccgacgtgctctgtttcgacgagttttttgtctccgatattaccgacgccatgctgttgggcgggctgatgaaagccctgttcgcccgcggcatcaccctggtggcgacctccaatattccgccggatgaactctatcgcaatggcctgcagcgggcccgttttctaccggcgatcgacgccatcaagcagcattgcgatattatgaacgtcgatgccggcatcgattatcgactgcgtaccctgacgcaggcgcacctgtggctgtcgccgctgaataacgacacccgcgaacagatggataaattgtggctcgcgctggcgggcgcgccgcgcgctgccgggccgacgctggagattaaccatcgcgagctgcctaccctcggcgtagaaaaccagacgctggcggcgtcattcgccacgctatgcgtggatgcgcgcagccagcatgactatatcgcgctctcccgactgttccatacggtgatgctgttcgacgtgccggtgatgaccgcgcagctggagagcgaggcccgccgctttatcgctctggtggatgagttctacgagcgccatgtaaagctggtggtcagcgcggcagtaccgctgtacgacatttaccagggcgagcggctgaagtttgagttccagcgctgtctctcgcgtctgcaggagatgcagagcgaagagtacctcaaacgtccgcatatgccctga

SEQ ID NO: 256765 - DNA, 165 bp, Klebsiella pneumoniae
atggtcaccatcgtttttagcgctggcgcggaagcgctggatgtcggccctgagcagcgccggcagctggaggaacggttggtactgcagcttcgaatgatctcgaaaggcgcgtattactggtatcgccgtgaacaagaaaaaatgtcacatcattccgaataa

SEQ ID NO: 256766 - DNA, 927 bp, Klebsiella pneumoniae
atgattaatacaacacgtcccatactcaacctcgatctcgatctgctgcgtacctttgtcgcggtcgctgatttgaacacttttgccgccgccgccgccgcagtgtgtcgtactcagtccgcggtcagtcagcaaatgcaacgcctggaacagctggtgggcaaagagcttttcgcccgccacggccgcaataagctgctgaccgagcaggggatccagctgctgggctatgcccgcaaaattctccgttttaacgatgaagcctgtatgtcgctgatgtatggcagcctgcagggggctctgagcatcggtgcgtcagaagaaacggctgacaccatcctgccgtttttgttaaaccgcatcggctgtttctatcccagaatgacgttggagatcaaagttcacccccatgccgccatcatggagatgttggccgaggggctggtcgatctggcgttgaccacccatcagcctcccggctttacctcttttaccctgagaacatcacctactctctggtattgtgcagcggaatatgtgctggcgaagggggaatctatccccctgatcctgctcgaagagccaagtccattccgccaggatattatcgccgcgctggaaactgctcgcgtcagttggcatctggcccacggagcttcctcgctatcgggcgtgaaagcggcggtgaaggccgggctgggcgtgactgcgcgcccggtcgaaatgatgagcccggatctacgcgtggctggcatcagtgaggggttaccggcgttgccggacacccggtacgtcgtcagctgcaatccgcggacggtgagcgaactgccgcaggcgatttttcagtctctgagccaggagatccatccctgggaaacgggcacagcacttactccggaagagggagggaataccttggttttgtaa

SEQ ID NO: 256767 - DNA, 675 bp, Klebsiella pneumoniae; identical to SEQ ID NO: 139153

SEQ ID NO: 256768 - DNA, 1518 bp, Klebsiella pneumoniae
atgctgcagcgtgcgctctttcggcggcggcgtggtcagcgggtgatccgctttgaacgggccttccggcatgttatcgaggcactgctgaagaatgcgcagactctggcgcagctcttctactttcagcatcacgcgggtgtagcagtcagagacgccccccccggtcgggacttcgaagtcgaagttttcatagccagagtaaggacgccatttacgcacgtcgaagtcgataccggtggcgcgcaggcctgcgccggtggtgccccactccagcgcctctttggcggtataggctgccacgccgacggaacggcctttcagaatggtgttgcgcagggcggccttctcataggagtccagacgcttcggcatccactcgaggaactcacgcagcaggcgatcccagccacgcggcagatcgtgcgcgacgccgccgatgcggaaccacgccgggtgcatacggaacccggtaatcgcttccaccagatcgtaaattttctgccgatcggtaaaggcgaagaagaccggcgtcatcgcgccgacgtcctgaataaaggtcgagatatacagcaggtggctgttgatgcggaacagctcggagagcatcacgcggatcacgttcacgcgatccggtacggtgatcccagccagtttttccaccgccagcacgtacggcatctcgttgacgcagccgccgagatattcaatacggtcggtatacgggatgtagctgtgccaggactgacgctcgcccatcttctcggcgccgcggtggtgataaccgatatccggtacgcagtcgacgatctcttcgccgtccagctgcagaataatgcggaacgcaccatgcgccgatgggtggttcggaccgaggttgaggaacatgaagtcctcgttgtcggtgccgcgcttcatgccccactcttccggtttaaaggtcagcgcctccatctccagatcctgtttggctttggtcagctcaaacgggtcgaactcggtggcacgcgccggataatctttacgcagcgggtgaccttcccaggtcggcggcatcatgatgcgacgcaggttcgggtgaccatcgaaggtaatgccaaacatttcccaggtttcacgctcataccagttggcgttggggaacagtttggtgaaggtcggcagatgcagatcgttttccgacagcgccaccttgagcatgatgtcgcggttgcgatcgatagagatcaggtgatagaaaacggaaaaatccgcggcgggcaggccatcgcggtgcgtgcgcagacgttcgtccatgccgtgcaggtcaaacagcatcacgtaaggcttcggcaatttcttcaggaaatcacccacctccagcagctgttcacgcttcacccataccaccggtacgccggtacgggttggctgaacggtaaaggcatccggcccaaagcggttgcgcagttcgccaatcaccgggtcatcaaggtgatcgcgggtttgccaggctggtgcggcgtcatgcgcggttaa

SEQ ID NO: 256769 - DNA, 1014 bp, Klebsiella pneumoniae
atgaaactctcccgacttgctctgttaaccgttaccgtactcgccagcgccccggtgtggtccgctgacgttgtcaccgtttattccgccgacggcctgcacgacggcgacaacagctggtatcagaaccagtttgccgcttttacgaaggcaacgggcatcaaagtgcagtacgttgaaggcggctccggagcgattgtcgaacggctggcaaaagagcgcaccaatccgcaggcggacgtgctggtgacggtgccgccgtttatccagcgcgccgccaaagaacaattactggccgaatttaagccgcagggcagcgaccagatcccgggcgtccacgaccgctactcgccgctggtgaacaactatctgacctttatctataacagcaggctgctgaaaaccgcgccggccagctggcaggatctgctcgatagccgtttcaggaacaagctgcagtactcgacgccgggacaggcgggcgacggtacggcggtcatgctgcagacgttccacagcctgggcagcaaagatgcggggttcgattatctgggtaaactccagaccaacaacgtcggaccatcggcttctaccggtaagctgaccgcgctggtcaataaaggtgagctgtacgtcgctaacggcgatctgcaaatgaacctgtcgcagatggcgcgtaatccgcatgtgcaaatcttctggcccgcagacgctaaaggcgaacgcagcgcgctggcgctgccctataccatcggtctggtgcaaaacggcccgaacggtgaaaacggtaaaaagctgattaacttcctgctcgataagcccgctcaggccagcgttagcgcgctctcctgggggctgccggcgcgcagcgacgtgacgccggaagacgctaactttaaagcggcgaaagcggcgcttaacggcgtgaaaagctgggaacccaactgggacgaggttgcggcttcactgtcggcggatattgcccgctggcatcaagtcaccgacagcgagtaa

SEQ ID NO: 256770 - DNA, 1551 bp, Klebsiella pneumoniae
atgaagaaaacggctgaagattacctgggtgaaccggtaactgaagcggttatcaccgtaccggcttacttcaacgatgcgcagcgtcaggcaacaaaagatgccggccgtatcgccggtctggaagtcaaacgtatcatcaacgaaccaaccgcggccgcgctggcttacggtctggataaagaagtgggcaaccgtactattgcggtttacgacctcggtggtggtactttcgatatctcgattatcgaaatcgacgaagttgatggcgaaaaaacctttgaagttctggcgaccaacggtgatacccacctgggcggcgaagacttcgatactcgtctgatcaactacctcgttgatgagttcaagaaagatcagggcattgacctgcgcaacgacccgctggccatgcagcgcctgaaagaagccgctgagaaagcgaagattgaactgtcttctgctcagcagaccgacgttaacctgccgtacatcactgcagacgcgaccggtccgaaacacatgaacatcaaagtgactcgcgcgaaactggaaagcctggtagaagacctggttaaccgttccatcgagccgctgaaagtcgctctgcaggatgccggtctgtccgtttccgatatcaacgacgtgatcctcgttggtggtcagactcgtatgccgatggtgcagaagaaagtggccgagttctttggtaaagaaccgcgtaaagacgttaacccggatgaagccgtggcgatcggtgctgccgttcagggcggtgtactgactggcgatgtgaaagacgttctgctgctcgacgtaaccccgctgtcgctgggtatcgaaaccatgggcggcgtgatgactgcgcttatcagcaaaaacaccaccatcccgaccaagcacagccaggtgttctctaccgctgaagacaaccagtctgcggtaaccatccatgtgctgcagggtgagcgtaaacgcgcgtctgataacaaatctctgggtcagttcaacctggatggtattaacccggcgccgcgcggcatgccgcagatcgaagtgaccttcgacatcgatgctgacggtatcctgcacgtctccgcgaaagacaaaaacagcggtaaagagcagaagatcaccatcaaagcgtcttccggtctgaatgaagaagaaattcagaaaatggttcgcgaagcagaagctaacgccgaatctgaccgtaagttcgaagagctggtacagacccgcaaccagggcgaccatctgctgcacagcactcgtaagcaggttgaagaagcaggcgataaactgccggctgacgacaaaactgccattgagtctgcgctgaccgcgctggaatcttctctgaaaggcgaagacaaagcggatatcgaagcgaaaatgcaggcgctggcgcaggcttctcagaagctgatggaaatcgctcagcagcagcacgctcagcagcaggcgggttccgctgacgctcaggcgagcaacgcgaaagacgacgatgttgtcgacgctgagttcgaagaagtgaaagataaaaaataa

SEQ ID NO: 256771 - DNA, 702 bp, Klebsiella pneumoniae
  misc_feature (304)..(313): n is a, c, g, or t
atggtagttaatacatcaggtggccagggagctttatcgttaaaattgcgtgggatatttgcatccggtattaaagattatgatgatgtagcattgaaggttccgctagatacagcacaaaggattatgggcacagatggcgtgagtaaagtacttatattgctgaataataataatgttgatgaatttatagttaagttgaataaatatattgttgacaataagttgccgctggttgtgaaggactggaaagaaacatctattttttatcaacaggtcgagggaatgctctcaggcatatatnnnnnnnnnncgcttattgtcgtgtttatgattggtaattcaataacgatgaatattgctgagagaacgcgtgaaatagccaccctgagagccattggtcttgaggcctcccatgtgacattattattttggctggaaggtgtttttattggcgtgtttggtgccatggggagtgttttggtgggatattgtttagctgcgatgatcaatgtttatgggattgctatgccgccatccccgggtcaatcgataggatatactgcgtttattaagatcgataatgtcgagcttttctggactacgctggttttaccgattttaacatcagctcttgcgtctgttcttccttcgtatcgcgcatcacggctcaatattgctgcggcgtttaaatattcctga

SEQ ID NO: 256772 - DNA, 879 bp, Klebsiella pneumoniae
atgaaacacctgaaactgcgcttacttattcttattacttttttttcttcgtcctgggtaatagccgagactccggcacctcaggctatagatattatacgtttggctgatgatatacgttcgcctaatgtacctttccgctatacggtaactgttcttgaatataaagagggtggcgagcagccggagagtaaacaaattctcgatgtgtcaatgcgttttatgaaacctgaaaatggctcgcgggcagatgcgcgttctttagtccggtttatttatcctccacgggataaagggaagattatgctttctgattggtacgatctctggttttatacacctgaactacgaaaaccgatacctatttcaccggcacaaaggttgagtggccaaatctcaaatgcagacgttatcgtcactaattttgagtacgcctacgattctacaatcgaaggtactgaaccttgcggacagaaagtctgttatagactatcactgatacgcaaatcggataaggtaacttatccaaaggtgatataccttgtagaacaaggagatgatttcaggccttaccaggcatcttattactcccttgataaccaattgctcaaaaaagtctcctataaaaattaccagaaaattttaggtaaatatcggccatctgaaattgtcgtacagagtgctcgatatgcaaaaggctattcagtgatgaaatatagtaacgtaagactggaaaaattacctgagtatttttttacaaaagaggcgatgttaagggggggcaatgaaaatatctctctacgtccttattcccttttttactttagtctctaccttggttcagggacactgtctgtccgcgagtgcgttgcaagataa

SEQ ID NO: 256773 - DNA, 891 bp, Klebsiella pneumoniae
atggaatcagcttatagcgaatcattttggggggccacattatctaaagagtatcaggattataattttttacttacgctagctcccagattgagtagtattgataagtactatgaatcatcaggcaactggtctgcagcacaacgctcaaatagcgaagagcgttacctattaacttataatgattaccgactagctagtcatcgcctgtccgctaatttactattaggcgataatccggcgttttcattatcagaactatataattatacatcacagtttttaattaatgctgagttgtcctggcataaaggccagcagtggcgtcacttctcaaatgataaaaaagaggccgtactggctggcgcatttccatcctcactctattctgtggaggataaacaaggcgttgagtttgcgcttggcgggcagtatacaactgatagctttagcgtattcggcttagaatactattttcagagtgagggatattcgaaaaaggcctggcaggagcagattgatttcattcgcttgatgggatacaggactggctacgattttttagaccgggcgtttgatagttataagtatcttatggcctcagagattggtaacacttcaaataaaggcatgctgttatccaaacattactttaatacctattttagtctgcgtaatcatgaccagtccaccctgcaaccctatgcaatgataaatatagcggatggcagcgtattatttggggcccattttattaaacccttgcaaggtaagtgggagccgtttgagttatatgccggcgcatacacctccctgggaggtcctgaatcagagtttgcgctatttggtgaaacgctaagcatttatgtcggttttaaatactatttataa

SEQ ID NO: 256774 - DNA, 933 bp, Klebsiella pneumoniae
atggtatcacagctatcaacaccttctgtcgctcttatctttgcaggacaaggtaaccctgttattggaatggggtctgatttgtgggatctgaatgcagtcacaaaaaatatttgggactgcgcgagcgatattacccaaattgatattcgccgtttatgcgagcgcgggccgatgagtcgcctggtccagacaacggctcagcaagttgccgttacggctattaacgtgacgctctattgcctctgtcttgaaaaaatgcctgatttgccaatcgtgggttcttgcgggcatagcgttggcgagtacagcgcgcttttcgctgcgggtgcatttaacctggaggcgctttttaggatgatacatacccgttcaaagattatgaatgatttaagtaaaattcataaaggagctatgctcgcggttaagggcgctgattttgaaaccttaactaacatgatttccgcatctggtatacctgtcgaggtgagttgtgataacagctgtcgtcagcaggttatcggtggcacgactgctgatctgggccgtatctcacagatcctttatggtgccggtttagaggtggttaaactgggggttagcggcgcatggcatacgcgtctgatggccgatggtgttcagatgatgcgcgattttttgcaaaaaatcgatatttgttcgcctaaatacagcgtgctgatgaatgttaccgggcaagcagaattccttcctgagcagatcaaagaaaatctggctctacatctgacgcatacggtgcaatggacaaaatctcttgcggctcatttacagaattctcagtcggtaacttttctggagttcagcaataaagcttatttaggacaactcctttatgacttccggcgtttcgcgtcagaaaatgtcgtgcattgtagaaagctgattggcttgtaa

SEQ ID NO: 256775 - DNA, 987 bp, Klebsiella pneumoniae
atgatccctgactatttaacatttactcgttaccaggataaacgagtgattatttatctttatcttttaactatgtttttacttttccttttctggaaaaacaatggttataacttattgccgagtaatgtatttagcctgagcgttatcctggcattaattgtcttttcttttatttacgagctgaaaaactattggggctataaatgtgtcatgaagcatattgatttttcctgttttcaggggaaagctatatcctcgtatgaggcgtttttgtggcatccggcagtcgttaccttctcatactttgcgatgttttatcttctcattacgaactgcctgtcatttatgtcatcgggtcatgcactactttgtattgctattatttcgccaatggctatttatctggcgtttaaatatgcacgttatagctacgtgaagcgaatgaaggattttactgctcaaaaggtagtctggcgcaatttacatcattacgtcggttttaatctttttatcacctttttaatgaatagcttgatagtcagcccgttagcaaatgaggatgatttttctttggcggatggttttttttcagccagattaatgatagcgatgtttattctttgcattattgttttgtttttagatatgatcttcatccgcccatcgaaacgctacatttttctcgggcgattgttcctgagggaatttgacttccatctatcaaagtcaatcccctggctatggctctataataaagcgatgtggcttagattattcctggttttaatcattcagtttatttggatagttttgctcaatgttattttggcattttcgggattgagtatttattttgaattttattttttatcctgctctctgccttcatttttttatttctatctacatgcttactggcattggcataatgattatatcgtcgcatgtgatatgtattttcgttgcgatcgaattgaacgttaa

SEQ ID NO: 256776 - DNA, 222 bp, Klebsiella pneumoniae
atgaaagtcggctttgatggctcccttaccattgccaaaacggcgctggaaacctctctggatatgcttagcaacttgctgagtggctccccatccagtattggtagcattctggcagatcacctgaattcaatgatgtatgaaaaatcaggtatctggtcaaacttcgtctatgatgcagcgacgaactggggcgacgtgatctcttctttacagaaataa

SEQ ID NO: 256777 - DNA, 1032 bp, Klebsiella pneumoniae
atgattaaactttcgaatatcaccaaagtgttccagcaggggaaccgcagcatacaggcgctgaacgatgtcagcctgcatgttcctgccggacaaatttatggcgtcatcggcgcttccggcgcgggtaaaagtacgttaatccgttgcgttaacctgcttgaacgtccaacgcagggcagcgtccaggtcgacggccaggagctgacggcgctttcagaaaaagagctgactcgagctcgccgccagattggcatgattttccagcactttaacctgcttgcctcacgtaccgtgttcggtaacgtggcgttgcctctggagctcgacaatacctctaaagatgaaatcaagcgtcgggtgaccgagctgctggatctcgtcggtctgggagataaacacgatagctatccggcgaatctctccggcgggcaaaagcagcgcgtggccatcgcccgtgcgctggcgagcaatccaaaagtcctgctctgcgacgaagccaccagcgcgctggacccggccactacgcgttcgattctggaactgctgaaggatatcaaccgtcgcctgggcctgacgattttgctgattacccacgaaatggatgtcgttaaacgcatctgtgattgcgttgccgttatcagcaacggccagcttattgagcaggatacggtgagcgaggtattctctcatcccaaaacgcctctggcgcagcagtttatccagtcaacgctgcaccttgatatcccggatgattatcaggcccgccttaaacctgaggctcttgccgatagcgtgcctatgctgcgcatggagtttaccggtcattccgtagatgccccgctgctttcggagactgcccgtcgttttaatgtgaataacaatattattagcgcgcagatggattacgcgggcggcgtcaagttcggcatcatgctgaccgagatgcacggctcgcaggaagatacccaggccgcgatcgcctggttgcaggaacatcatgtaaaagtagaggtactgggatatgtctga

SEQ ID NO: 256778 - DNA, 654 bp, Klebsiella pneumoniae
atgtctgaaccaatgatctggctgctggttcgcggcgtatgggaaacgctggccatgacgtttgtctccggcttcttcggttttgttcttggcctgccggtcggcgtgctgctgtacgtcacccgtcccgggcaaattgtcgctaatgcgaagctctaccgcacgctttcggcggtggtgaacattttccgttcgattccttttattatcctgctggtgtggatgatcccattcactcgcgtgattgttggcacgtcgattggcctgcaggctgccattgtcccgctgacggttggcgccgcgccgtttatcgcccgcatggtggaaaacgccctgctggagatcccaaccggccttatcgaagcatcccgcgcgatgggcgcaacgccgatgcagatcgtgcgtaaggttcttctgccggaagcgcttccgggtctggtgaatgcggcaacgattacccttatcacgctggttggctattccgccatgggcggtgccgtcggtgccggcggcctgggacagattggctatcagtacggttatatcggctacaatgcaacggtaatgaataccgtgctggtattgctggttattctggtttatttaattcaattctctggcgatcgtatcgtccgggctgtgactcacaaataa

SEQ ID NO: 256779 - DNA, 816 bp, Klebsiella pneumoniae
atggcctttaatttcaaaacctttgcggcagtcggcgcgttaatcggttctttggcgctggtgggttgcggtcaggacgaaaaggatccaaaccatatcaaagtcggcgtgatcgtcggcgcggaacagcaggttgctgaggttgcgcagaaagtagcaaaagataaatacggcctcgatgttgaactggttaccttcaacgattacgtgctgcctaacgaagcgctgagcaaaggcgatattgacgttaatgccttccagcataaaccgtatctggaccagcagattaaagaccgcggctacaagctggtttccgtcggcaactcgtttgtctatcccattgccggttactcgaaaaaaatcaaatcgctggatgagctgcagccgggctcgcaggtcgccattcctaacgatccaaccaaccttggccgatctctgctgctgctgcagcaggttggtctgatcaaactgaaagaaggcgttggtctgctgccaacctcactggatattattgaaaacccgaaaaacctgaaaattgttgagctggaagccccgcagctgccgcgctctctggatgatgcgcagatcgccctggcggttattaataccacctacgccagccagattggcctgaccccggcaaaagacggtatttttgtcgaaggtaaagagtctccgtacgtgaacctgattgtcgctcgcgaagacaacaaagatgcggaaaatgttaagaaatttgttcaggcttaccagagtgacgaagtttacgaagcagccaacaaaatctttaacggcggcgcggtgaaaggctggtaa

SEQ ID NO: 256780 - DNA, 408 bp, Klebsiella pneumoniae; identical to SEQ ID NO: 172468

SEQ ID NO: 256781 - DNA, 708 bp, Klebsiella pneumoniae
atgagtgcttttcagtttgcgcagataggcgttattcgctcgccctataaagaaaaatttgccgttccccgccagcccgggctggttaaaaacggcggcggcgaattacaccttttgcctccctataaccaggccgatgccgtacgcggcctggaaaatttcagccatctgtgggtcctgtttgtgtttcatcagaccatggaaggcggctggcgtcctaccgtccgccctccccgcctcggcggtaacgcgcgaatgggcgtattcgctacccgttcgacctttcgtcctaatccaatcggtatgtctctggtcgagctaaaaggtattcgctgccagaaagaacacgtcgtgcttgagttaggcagcctggacctggtagatggaacgccggtcgtggatatcaaaccttacctgccctttgccgaagcactgccggatgccagcgcaagctatgctcaggaggctccaggggcagaagtagcggtgagtttcacgccggatacagaagcgcaaattttaacgctggagcgacgctatcctcgtcttaagtcgtttattagcgaagttctggcgcaggatccgcgaccggcataccgcaaagaagaggagccgggaaaaacctacgccgtctggctgctggattttaacgtgcgctggcgggtgatttcgtccggttttgaagtcttttctctcgaagcacgctaa

SEQ ID NO: 256782 - DNA, 1386 bp, Klebsiella pneumoniae
atgaacgataacaaaatgacgccaggcgaactgcgcgcaacctggggtctggggaccgttttctctctgcgcatgctcggcatgtttatggtcctgccggttctgaccacttatggcatggcgctccagggcgcaagtgaagcccttattggcctggctataggcatctatggactggcgcaggcaatattccaggttccttttggcctcctctccgatcgcattggccgtaaaccgcttatcgtcggcggcttgttaatcttcgttctcggcagcattatcgccgcgctttccgaatcgatctggggcattattcttggccgcgcgctgcaaggctccggagcgattgccgcagcggtaatggcgctgctttccgacttaacccgcgaacagaatcgcactaaagccatggcgtttatcggcgtcagctttggtattaccttcgccatcgccatggtcctcggacctattatcacccaccagttaggcctgcacgccttattctggatgattgccgctctggcgatgctcgggattctgcttacgctgtgggttgtgccaaatagccataatcacgtgcttaaccgtgaatccggtatggtgaaaggctgctttagcaaagtgcttgccgagccaaaactactgaagctcaatttcggcattatgtgcctgcatattatgctgatgtccacctttgttgccctgccgggtcagttggaagctgccggttttcccgcagctgagcactggaaaatctatctggtcaccatgctggtctcttttgttgccgtggtgccgtttattatttacgccgaagtaaagcgcaaaatgaagcgcgtttttctgctctgcgttgccattttactgatcgccgagatcgtactttggggagcgggaggctatttctgggaactggttgccggcgttcaactatttttcctcgcgtttaaccttctcgaagcgttactgccttcgttaatcagtaaagaatcacctgccggctacaaaggaacagcgatggggatttattctaccagccagtttcttggagtagcgattggcggatcgctaggcggctgggtagacggcttttttgattcacaaaccgttttcctgcttggcgccctgctggcaatgctgtggttactggtggccagcaccatgagcgaaccgccttacgttagtagcctgcgggtcgagatccctgccgacgtggtggcggatgaaatgctacagcaacggctacaggctcaagcaggagttaaagaggtactggtagttaacaacgaacgttcggtgtatatcaaaatcgacagtaaggtgactaaccgctttgagattgagcaggtgattaagcagggggcagttcagaccgttcccgcgtaa

SEQ ID NO: 256783 - DNA, 1179 bp, Klebsiella pneumoniae
atgttaaacggcatgaaacccttatctcgctccctgcgctggggaatggtcggcggcggcggcaccagccagattggctacagccaccgctgtgcagcgctgcgcgacaatgtctttaccctgctggccggcgcgctcgatattgatgccgaacgcggccgtcaatttggcgagcagctcggaatcgcccccgagcgctgctacgccgactatcaaacgctatttgcagaggaagccaaacgccctgacggcattgaagccgtttcggtcactacgccgaacaatacccatttcgcgatcaccaaagcagcgctggaagcggggctgcacgttatctgcgaaaaaccgctgtgctttaccgccgccgaggcccgcgagctgctggcgctgagcaaaaagcagaacaaaataatcggcgttacctacggctacgccgggcaccagatgattcagcaggcgcggcagatgatcgcggagggtatgctcggggagatccgcattatcaatatgcagtttgcccacggttttcataatgaagccgttgaactgcaggctgaatctacccgctggcgggtaacgcccaaatatgccggccctagctacgtgctgggggatctggcgactcacccgctatttattgcggaaaccatggtgccaaatctgaatatcacccggctgatgtgcgcacgtcagagcttcgtcaaatcgcgcgcgccgttggaagataacgccttcgtgctgatggaatataataatggcgccgtcggttcactgtggaccagcgcagtcaacagcggcgctatgcactcacaaaaagtccgcgtcattggcgaaaaagccagccttgagtggtgggatgagcgcccaaatcagctcagctatgaggtgcagggcgaacccgcgcgcgttcttgaacgtggaatgccctatttaagtccgcaggcgctggcagacgaccgcatcggcggcggccacccggaagggctgtttgaggcatgggccaacctttaccgccgttacgccatcgctatcgatgcaatggatcgcggtgaccaggcgtttctggataacttctggtatccggacgtcgaagccggactccacggggtctactgggttgagcaatgcgtcaaatccgccgatgcaggcggccaatgggttgattttaactgccaataa

SEQ ID NO: 256784 - DNA, 1401 bp, Klebsiella pneumoniae
atgagtgaacagcagatccttatttctcccgtagcatcacgcggcgataagttaacctggacaacccgaatagcctatggtggaggcgataccgcctgtaacgtcgttttcggcatgatcggcacagttttaacgcttttctatacggattatgtcggcatcagtatcgccacggtcggtctggtaatgctgatctcacgtctgtttgacggtgtttccgatgtcattatgggtctgatggttgagcgcacaaactctcgctggggaaaatcacgcccctggctgctgtggatgagcgccccctacgccgtatcggcgattctgctctttaccgtgccccaaaccaccggaacgctgcagtttctctacctgctggtagcctataacttctgtactaccgtgtgctacaccgcgatcaacctcccctatggcagcctctccgcgatgatgacccggacctcctgggaaagggatatgcttagcatcacccgcatgtcgatgtcgccatttggccgcattctcgccgtggcttgtacattgccgctggtgaaatatttcggcgacgatcaggcagcatggattaaaaccatggccatctgggctttcctggcgctgctgttactgctgttttgcttctacaaatgtgaagaaaaagtggttatcaaagcgcgggaaaagcagggaaacgtagcggtaaaaacgcagctttacgccctcttccgtaaccagtacttctgggccagtgcgatcctctggacagcccagagcgtttattacaccgtggttggtatcgcgctaccttactactgccgctacgtgctaggcgacgatactttctacagctccattttcgtggccgaaaccgcctgcatcattattttcaccttcctgagttccgtccccattcgaaaatacggtaaacgcaatgtggccctttgcggcattgtgctggcgaccataggccaggtgctgtttatgtttaattctgacgactaccactgggcgctggccaacgccattattcgcggtatcggcttcgcgccgctgaatgccgtgctattcggcttctgcggcgacgccgtcgaatatggccagtggaaaacgcgcgtccgccaggagggaatgatcttctctgcggggtctgtcggtacgaagctcggcgcaggcattgccgccgcggttatctccggcctgttaagcatctcgggctacgtcagttccagcagcggatccggcgttcaaccgcaaagcgctatcgacatgattaataacgtttatctctacggctcattcttcctgtggattgtggtcatcatcaccttgctgttttatcggctggataaacagtacccacagattatgcaagagctgaaagagcgcgaggcgcgtggagaaatgtaa

SEQ ID NO: 256785 - DNA, 1185 bp, Klebsiella pneumoniae
atgattaaccctgatatcaccgcgattatcgccagacaagaacaggcgatgatcgcttttcgccgcgacctgcacgcccatccggaacttccctgggaggagaagcgcacgacggatcgcgtcgccgccgaactggaggctatcggtatcccttaccgccgcactcatcccaccggaatcatcgccgacatcatcggcggcaagccgggtaaaaccgtagctctgcgcgccgatatggatgcgctgccggtacgggagctgaacgatccgctcgactataaatcacaaacgcccgggaaaatgcacgcctgcggccacgacgcccataccgccatgctgctgaccgccgcccatgcattatatgatgttcgcgaacagctgacgggcaacgtacggctcatctttcagcctgcggaagagattgccgaaggggcaaaggcgatgatacagcagggggcgattgataacgtggataacgttttcggaatgcatatctggtcgggcacgccgtccggaaaaatctcctgtaacgtcggttcatcctttgcctcagccgatttactgaaagtgaccttccgcggccgcggcggccatggttcgatgccggaggcctgcgtcgatgcggcggtcgtcgcttccgctttcgtgatgaatctacaggctattgtggcgcgagaaacttccccgctggaatctgcggtagtgactatcggcaaaatggatgtcggcacgcgctttaacgtcatcgccgaaaacgccgttcttgacggtaccgtacgctgctttagtcttgaagcgcgccagcggctggaaacggcgattagccgctatgccgagcatactgccgcagtgtatggggcgaccgctcaggttgactactgctacggtacgctaccggtgatcaacgaagagcgcagcgcgctgctggcgcagtcggttatccgcgacgcattcggcgatagcgtccttttcaacgaaaagccgactaccggcggagaagatttcagtttttatatggaaaatatccccggcgcctttgcgctgcttggctcaggaaataaagagaaaggcagcgactacgcgcaccatcacggctgctttaatattgacgagcaggtgatgaaaagcggcgctgaactgtacgcgcagtacgcctggcgctatctgcagcaaaacgcgttttaa

SEQ ID NO: 256786 - DNA, 1212 bp, Klebsiella pneumoniae
atgtctcaaatggtcgcactgtcgattattattttaattctttatatcggcgacgttgtttctacccgcacaaaagcctggattccctcggtatttgtctgcgccgttctgtttttagtcggctactggacattttttccggcagatatcattagccgggccgggatcggtacgccagttgccataatgctcatgtatctgttaatcactaatatgggcaccctgctgtcgctgaaagagctggcgcagcagtggaagaccgtggtcatctctctcgccggtattgccgggatcgcggtggccgtctttgcggtgagcatgatgctattcgatcttaacaccgcgctggtcaccattcctccgctggtcgggggtatcgtgtcatcgctgattatgtcgcagggcgccagtaacgccggcctggtagacctgtcggtttttgccattttgatttacgtgatgcaggggttcgccggatatccgctgaccgcgattatgctgcaacgagaaggcaaaacgctgcttgcccgctaccgcagcggcgaacagcgccctgatgacattgccgaagagcacgcgatgctcgccgtcggcgaggagaaaatgccgcgcctgttcagtaaaatccccgtcagctacaacagcaattactttaaattcctgcgtctggcgctggtcggctgtctggcctgggtcgtcgctgacctcgcaaagccaatcgtgaatatcagccccttcgtactgtgtctgttttttggcgtcgtatttacctcgttaggcttccttgaaaaacataccctgcataaggctaacggctttggcttcgccattatggcgttgatgctctttatctttgatacgttgaacaaagccacgccggagatgctgctgcgtctgctattcccgatggtagtgttaatcgccacggcggtgataggtatgtttgttgtctcctggctggtcggaaaactgcttggcgtcagcggtccgatggcattcgccatctctttgaccgcgctgtacggttttcccgccgactacattattaccaacgaggccatcaacgccctcacccacgatgaaaaagagcgccagatgctcacccaccatatgctgggcccgatgctggttggcggattcgtctccgtcaccatggtttcggtggtgttagccggaattctggtcggctatctgacgccggtgctcggttga

SEQ ID NO: 256787 - DNA, 555 bp, Klebsiella pneumoniae
atgggcgccctgtggccgctgctggtaatgaccgggatgcaccgggtctttaccccaacgatcattcagactatcgccgaaaccggcaaagagggcatggtgatgccgtcggaaatcggcgctaatctgtcgctgggcggctcgtcgctggcggtggcgtggaaaaccaaaaacccggagctgcgccagacggcgctggcggccgcggcttctgcaattctggcggggatttccgaaccggcgctgtacggcgtggcggtacggctgaagcgaccgctgatcgccagcctgattagcggctttatctgcggcgcggtggccggcattgccgggctcgccagccactcgatggcggcgccgggcctgttcaccagcgtccagtttttcgacccggccaatccgatgaccatcgtctgggtgtttggcgtcatggcgctggcggtggggctgtcgtttgtcctgacgctgatgctcggctttgaagatattccgcaagaagaagccgccgccgacgccagacagcgtcaggccggcacccaggcttctcacgcctga

SEQ ID NO: 256788 - DNA, 1425 bp, Klebsiella pneumoniae
atggcgacttttccacagggatttttatggggcggcgcgctggccgccaaccagtccgaaggggcatatctggagggcggcaaagggctgaccaccgtcgatatgattcctcacggggctcaccgcctcgcggtcaagctggggcaggagaaacgcttcgcgctacgcgaagatgagttctacccgagccacgaggcgatcgatttttatcatcgttataaagaagatatcgccctgatggcggagatgggctttagcgtcttccgcacctctatcgcctggagccgcctctttcctgagggcgatgagctggaaccgaacccggaagggatcgccttttatcgctcgctgttcgaggagtgcaaaaagcaccgcatcgagccgctggtgacgctgtgccatttcgacgtgccgatgcacctggtcaccgagtacggctcctggcgcaatcgaaaaatggtggagttcttcacccgctacgcccgcacctgctttgaagcctttgatggcttggtgaaatactggcttaccttcaatgaaatcaacatcatgctgcacagcccgttctccggcgccggtctggtgtttgaagagggggaaaatcaggagcaggtgaaataccaggccgcccatcacgaactggtcgccagcgccttagcgaccaaaatcgcccacgaggtgaatccgcaaaatcaggtcggctgtatgctggcgggcggcaacttctacccatactcctgtaagccggaagacgtgtggatggcgctggagaaagatcgcgagaacctgttctttatcgatgtccaggcgcgcggcgcgtatccagtctgggcggcgcgggtatttcgcgagaaaggtgtgactatcgccaaagaagcgggcgatgatgaaatcctgcgccataccgtcgatttcgtctccttcagctactacgcttcacgctgcgcgtcggcggagatgaacgctggcaacaccagcgccgccaatatcgttaaatcgctgaagaacccgcacatcaaggccagcgaatggggctggggcatcgacccgctcggcctgcgcatcaccatgaatatgatgtatgaccgctaccagaaaccgctatttctggtggagaacggtctcggcgcgcgcgatgaggtggaggctaacggcgagattaacgacgactatcgcatcagctatctgcgcgagcatattaaagcgatgggtgacgccatcgaggacggcattccggtgatgggctacaccagctggggctgtatcgacctggtatccgcctccaccggtgagatgagcaagcgctacggctttgtctacgttgaccgcgacgatgccggccgcggcacgctggcgcgaaagcgcaaaaagtcgttctggtggtataagaaggtgattgccagcaacggggaagatttggcgtag

SEQ ID NO: 256789 - DNA, 486 bp, Klebsiella pneumoniae
gtgactgacgttttactctgtgttggcaatagcatgatgggcgacgacggcgcaggcccgctgctggcggagatgtgcgcggctaatcccgtcggcgagtgggtggtgattgacggcggcagcgcgccggaaaacgatatcgtcgccattcgcgagctgcgccccgagcgcctgctgatcgtcgatgccaccgatatgggcctgaaccccggcgagatccgcatcgtcgatccggacgatatcgccgagatgtttatgatgactacccacaatatgccgctcaactatctgatcgatcagctaaaagaggatatcggcgaggtgatttttttgggtattcagccggatatcgtcggcttttattacccgatgacccagccgattaaggacgcggtcgaagcggtgtacgcgcggcttgatgggtggcaggggcaggggggggttgcggcacttgaagccgcagaggagccggcgttccccggctaa

SEQ ID NO: 256790 - DNA, 411 bp, Klebsiella pneumoniae
atgagcgagacggtggtgttcagtcagctgagccgtaaatttattgatgagaacgacgcgacgcctgaccaggcgcagcaggtggtctattacagcctggcgattggccaccacctcggcgtcatcgactgcctcgaggcggcgctgagctgcccgtggcaggcgtatctggcgtggattgcgaccctcgaagagggcagcaccgcgcggcgtaaaatggaaggcgtgccgaagtacggcgagattgttatcgacagcaatcatgtgacgatgctggctaacgcttttgataaagcgctggcgcgacagacgcccgagcagcaggcgtggagcaaaactatgctcagcatgctgcatgatattcaccaggaaagcgccatctacctgatggtgaggagactccgtgactga

SEQ ID NO: 256791 - DNA, 336 bp, Klebsiella pneumoniae
atgtctatattcccggccgcgacgctgtacggcttcgcgatggcgctgggcctgctggaacagaaaatccacgcccgcgtgccgggcgagcaggacgagcagccgaccgaacttctgcacccggatatggtacagccgctgcgggtgcgcatcgatcgcgaagcgcgccggctggcgggctatcgctacggccggcagattgccgatgactatatgcgcctgctggggcagggcgatagccaggtgatgcgctggctggaggcggaaaaagatccgcgtctgaccgagatcgtcacccatctgaaccaggtcgtagaaggagcgcgtatccgatga

SEQ ID NO: 256792 - DNA, 543 bp, Klebsiella pneumoniae; identical to SEQ ID NO: 173635

SEQ ID NO: 256793 - DNA, 534 bp, Klebsiella pneumoniae
atggtgcgcgccagcgggcacgcccgcgatacccgcgccgatcacccgtttgtcggctacggcctgctgccgatggaagtgcacagcgaacagggatgcgacgtcatctcgcgtctgaaggtgcgcatcaacgaggtctacaccgcgttgaacatgatcgactttggcctcgataacctgccgggcggcccgctgatggtggagggcttcacctatattccgcaccgcttcgcgctgggcttctcagaagcgccgcgcggggatgatatccactggagcatgaccggcgacaaccagaagctgtaccgctggcgctgccgggcggcgacctacgccaactggccgactctgcgctatatgctgcgcggcaataccgtctccgacgcgccgctgatcatcggcagccttgacccgtgctactcctgtaccgatcgcatgacggtggtcgacgtgcgcaagaagaaaagcaaagtggtgccgtacaaagagctggagcgctacagcatcgagcgtaagaactcgccgctgaaataa

SEQ ID NO: 256794 - DNA, 597 bp, Klebsiella pneumoniae
atgcccatttatcagattgacggtatgacgccggttgtaccggacgagagctatgttcatcccaccgccgtgctgattggcgacgtgatcctcggcaaaggggtctacgtcgggcctaacgccagcctgcgcggcgactttggccgcattgtggtgaaggatggcgctaacatccaggataattgcgtgatgcacggttttcccggccaggatacggtcgtggaggaggagggacatatcggccacggtgcgattctgcacggctgtaccatcggccgcaacgcgctggtgggcatgagcgcggtgattattgacggtgccaggattggggagaatagcattgtcggcgcctcagcctttgtgaaagccaacgccgaaatgcccgccaaccatctgattgtcggcagtccggccaaagccatccgcgcgttaagcgaacaggagctggcctggaaaaagcagggaacgcgggagtatcagatgctggtggagcgctgcaagcagacgctgcatcaggtggaaccgctaaaagaagccgagccggacagaaagcgtctcgtctttgacgagaatttacggccaaagtcatcgtcctga

SEQ ID NO: 256795 - DNA, 936 bp, Klebsiella pneumoniae
atgaatcagatgagtaaactcgatacctttattcaacaggccacggaaacgatgcccatcagtggaacctcgcttattgcttctttatacggcgacgccttgctccaacgtggtggggaggtctggctcggcagcgtagcggcgctgctggaagggctgggcttcggcgaacgattcgtgcgtactgcgctgttccgcctgaataaagaagagtggctcgacgtggtgcgcattggccgccgaagcttctaccgtctcagcgacaaaggcctgcgcttgactcgccgcgccgaacataaaatctatcgcgccagcgccccggaatgggacggcacctggctactgctactgtcggaagggcttgagaagagcacgctggcggaggtcaaaaaacagctgctatggcagggatttggcgcgctggcgccgagcctgctggcttcaccgtcgcaaaagctggcggatgtgcaatctctgctgcacgaagcgggcgtggcggaaaatgtcatctgcttcgaagcccactccccgctggcgctctcccgggcggcgctgcgcgcccgcgttgaagagtgctggcatctcaccgaacagaacgcgatgtatgagacgtttatcaagttgtttcgtcctctgctgccgctgcttcgcgactgcgagcccgcagaactgacgcccgaacgctgctttcacattcaactactgctgattcacttctaccgccgggtggtgcttaaggatccgctgctgcccgaagaactgctccccgcgcactgggccggacaaaccgcgcgccagctgtgcatcaatatttatcaacgcgttgcgcacggcgcgctggcgtttgtcggcgagaagggcgaaagctcggtgggggaacttcccgcgccggggccgctctatttccagcgcttcggcgggctgtcgggcgtataa

SEQ ID NO: 256796 - DNA, 1317 bp, Klebsiella pneumoniae
atgacaacgataactcaattagacccgattgaaaccgcatcgcgcgacgagctacaggccctgcaaacccagcgtctgaagtggacccttaagcatgcgtatgagaacgtgccgatgtatcgccgtaaatttgatgcggcgggcgttcatcctgacgattttcacgaactgagcgatctgagtaagtttccctgtaccaccaaacaggatctgcgcgacaactatccgtttgatacttttgcggtgccgatggagcaggtggtgcgcatccatgcgtcttcgggcaccaccggcaagccgacggtggtgggctatacgcaaaacgatattgataactgggccaatattgtcgcacgctccctgcgcgcggcgggcgggacggcgaaagacaaaattcatgttgcctatggttacgggctgtttaccggcggtctcggcgctcactacggcgcggagcgtttaggcgcgacggtcattcccatgtccggcgggcaaaccgaaaaacaagctcagctaatccgcgattttcagccggatatgatcatggtcactccgtcctattgtctgaacctgattgaagagctggaacgccagatgggcggcgatgccagcggctgctccctgcgggtgggcgtgttcggcgcggagccgtggacccatgcgatgcgagcggaaatcgagcgccgactgggtatttcggcgctggatatctacggtctgtcggaggtgatggggccgggggtggcgatggagtgtctggagaccgccgacggtccgacgatctgggaagaccatttctaccctgaagtggtgaatccggacaacggtacgccgctgacggacggcgaacacggcgagctgctgttcactaccctgaccaaagaagcgctgccggtgatccgctatcgcacccgcgacctgacgcgtctgctgccgggcaccgcccgtaccatgcgtcggatggatcgcattagcggacgcagcgacgatatgctgattattcgcggcgtaaacgtcttcccgtcgcagctggaagaggagatcctcaagttcgaacatctggcaccgcactatcagctggaagttaatcgccggggccatcttgattcactttcggtgcgcgtggagctaaaagagagcggtctggcgctgaaccacgagcagcgctgtcagatttgccatcagttgcgtcatcggatcaagtcgatggtggggatctcgaccgatatcagcatcgtcaactgcggtagcatcccgcgttccgagggcaaggcctgtcgcgtgttcgacctgcgcaaggttgccgctaacggataa

SEQ ID NO: 256797 - DNA, 690 bp, Klebsiella pneumoniae
ttgttaaatatcagccgcgccgatcaggacgctttcgctttccgcagccagcagcggacggcgcaggctcagcgcgacggtattctggcgcaggagatcgtgccggtcgacattatcggccgtaaaggggcggtaaacgtcgtgcgtgacgacgagcatccgcgagcggacaccaccattgaacagctttcgcggctaaaaacgccgttccgccagggcggcgtagtgaccgcgggaaatgcctccggcgtcaacgacggcgccgcggcgctgattatcgcaagctcgcagcaggccatcgtccaggggctgacgccccgggcgcgcattgtggccatggcgacggcgggcgtcgagccgaaatttatggggctggggccggttccggcggtacgtaaagcgctggaacgcgccgggctgaacattaacgacatggacttgattgagctgaatgaagcctttgccgctcaggcgttgggcgtgctcagacagctggggctggcggacgatgccccccatgttaatcccaacggcggcgccatcgccttaggccatccgttgggaatgagcggcgcccggctggcattaagcgccagcctggagctgcagcgccgcagcgggcgctatgcgctgtgtacgatgtgtattggcgtgggtcagggcattgccatgatccttgagcgagtgtga

SEQ ID NO: 256798 - DNA, 567 bp, Klebsiella pneumoniae
  misc_feature (4)..(13): n is a, c, g, or t
atgnnnnnnnnnnccggcgataacggcgcgggaaaatccaccctgctgcgggtaatggccgggctgctgtcggcaacgtccggtagcgtcaatctgttgaataagccgatggcgcagtataaaaatcgtcagcgcgccaaaattatcggcgtcctgtttcaggaggccgaaaaccagctcttccacagcaaagtctctgaagaggtcgcctatgggctgcggttacagaaattaccggcagtggaagttgcgcaacgcaccgcggcggcgctgcgtttatgcagtctggagagcgtagctgatgcgcatccgctggatttgcataccgcccagcgccgtatggtcgccgtcgcctgtctggaagccatggcgccagagatcctgctgctcgacgaacccagccgcgattttgatcggcactggctggcaatatttgaagcgtggctgacggtttgccgcaaaagaggaaccagcgtagtggctatcagccatgacgcggcttttacacagcggcacttttcccgccaggtgcgcatggaaaaaggcagactgctgcgagtggtttaa

SEQ ID NO: 256799 - DNA, 678 bp, Klebsiella pneumoniae
atggttacgttagagcagttccgttatcacccgacccgggcaacgggtccttcatcatgctttgatttccattattcgcagcccggcatggtggcgatttttggcgataacggcagcgggaaaagcactctggcgcagatcatagcgggctggtatccggattttctgcccggcgatatcgaaggtcatggtactctgcttggcatccctattggacagcaatcgctggtcgaacgggcgcagaccatccagctggtccagcaatccccctatctccagctttccggttgtaccttcagcgtcgaagaagaggtcgcttttggccctgaaaatctttgccttcacgaagacgagattatgcgtcgtgttgacgcggcgctctcgctgatggagtgccaggagttacgtcaccgccatccgtccacgctctccggtggagaaacccagcgcgtggcgatcgcctgcgcgctggctatgcagccaacgctactgatccttgatgaagcctttagccgcctgacggcgcaagctaccgccatgcttctgacacgtctgcgggactgggcgctggagcagcattcactgatcatcctttttgaacgcaccccttcgccttttcttgcctggtgtcagcagggatggcgactacatgatggagcgctttccccgctatgttga

SEQ ID NO: 256800 - DNA, 708 bp, Klebsiella pneumoniae
atgcacccttttacctccttaacgctctgggcgctggcggcagtgaccacgctgctgctaccgacggatacggtgctgccggtgtatagcaccgcggcgtttcttagtttagtgctgctaaaagcgacgcgacggcgggcaaaatatgtcgcctggctactactctcgctgggcgttggcctgtggctggtccacggcggctggtttacccagtggctgagcggccagccccgcgacccgcagcgctgggcgaacgccatcacgctgtggctgagaattttggcgattgtttccacgtcacagctctggatggagtacgtaccggtacagcgctttattcgcgccctgtttgcctcacgcctgccgccgggcgtcgcttatctgttcgctggcccgctgctggttgtcgaacagctaaagcgccagttgacgattatccacgaagcccaacgcgcccgcggcgtaccgctggacgagaatggatatcagcggctgcgcgcaatgcctgcgctcattatccctctgacccataacgcgcttaacgatctggcgatacgcggggcggcgctggatatgcgggcatttcgtttacatcgtcggcgcactacgctttgggcgccgaaagacagcaccttacaacgtctggcgcgttgcggcatgctgctggcgatggtcgctgaagcgggagcctggctatggttacgttag

SEQ ID NO: 256801 - DNA, 579 bp, Klebsiella pneumoniae
atggctcgtcgccaatttaccagccagtccctggtgctgattgcgatcgccgtcgccatcaacatgatcggcggacagctcatcagtatgttaaaacttcccatttttctcgattcaatcggcaccttaatcagcgcggttctactcggaccggtcattggcatgttgaccggtttactgaccaatcttctgtggggtctgctgaccgatccgattgccgccgccttcgcgccagtggctatggtgattggcctggttgccggatggctggcgagagcgggatggttccgcactttacctaaggtgatcgttagcggggttgtcattaccctcgccgtgaccgtggttgccgtgccgctgcggacggcgctgtttggcggcgtgacgggaagcggtgcggatctgttcgtcgcctggatgcattcggtaggtcagaatctgctggagtcggtggcgattaccgtcttaggcgccaatctggtggataaaattcttaccgcgattatcgtctggaccctgttgcgccagctgccgctgcgtacgttgcgccattttcctgctatgtccgccgtacgctaa

SEQ ID NO: 256802 - DNA, 426 bp, Klebsiella pneumoniae; identical to SEQ ID NO: 175788

SEQ ID NO: 256803 - DNA, 1020 bp, Klebsiella pneumoniae
atgaccatacgcattgcgattaatggcttcggtcgcatcggacgtaacgtggttcgtgctttgtatgaatccggacgtcgtgcggaaatcaccgtggtggcaatcaatgaactggcggatgctgccggcatcgcgcatttattgaaatatgacaccagccatggacgctttgcctgggatgtgcgccaggagagagagcagctgtttgtcggcgatgacgccatccgtctgctgcatgaaccttcccttgaggcgttgccctggcgggaactggcggttgatgtggtgcttgactgcaccggcgcttatggcagccgcgagcatggcgaagcccatcttcaggccggcgcgaagaaagtgctcttttcacatcctggcggcaacgatctcgacgcgacgatcgtgtttggcgtcaaccatgatgagctgcgcgctgagcaccgtatcgtctccaacgcctcctgcaccaccaactgcattattccggtcattaagctgttagatgatgcctacggcatagagtcaggaacggtaaccacgattcactccgcgatgcacgatcagcaggttatcgatgcttaccatccggatttgcgccggacgcgagcggccagtcagtcgatcatcccggttgatactaagcttgctgcggggatcacgcgtattttccctcagtttaacgatcgctttgaagctatcgcggtccgtgttccgacgattaatgtgacggcgatcgaccttagcgtcacggtgaaaaaaccggtaaaagcgagtgaagtcaaccagttgctgcaaaaagcagcacagggtgcatttcatggtatagttgactatacggaattgccgttagtctcgatagatttcaaccatgatccgcatagcgccatcgtcgatggcacgcaaacgcgggtaagtggcgcgcatttgatcaaaacgctggtctggtgcgataacgaatggggctttgctaaccggatgctcgacaccacgttagcgatggccgcacaaggtttcaggtaa

SEQ ID NO: 256804 - DNA, 534 bp, Klebsiella pneumoniae
gtgaaaactttgattctcttttccacccgcgacggacagacgcgcgagatcgcctcgtttttggcctctgaattaaaagagcaggggatcgattcggacacggttgatctcaaccgcactaacgaggtggagtggcctttatacgatcgcgttgtgataggcgcatcaatccgctacggtcattttcatccagcgctggaacggtttgtaaaaacgcatcttcaatcgctacaggcgctgccgggggcttttttctcggtcaacctcgtggcgcgtaagccagaaaaacgaacgccgcaaactaatagctacacgcgcaagtttctgctcaactcgccctggcagccccagcattgcgcggtgtttgccggtgcgctccgctatccacgctatcgctggtacgatcgctttatgattcgtcttattatgaagatgaccggcggcgagaccgatgtcagtaaagaagtggtctataccgactggcagcaggtaggcagatttgcacgggaaattgcgcaaatgaccagcaaatag

SEQ ID NO: 256805 - DNA, 1452 bp, Klebsiella pneumoniae
atgcattttcgcgcgataacccgaatcgttggactgttggtcattttgttttcggggacgatgatccttccgggattaatagctctgatatatcgcgatggtgcggggcgagcgtttacccagacctttttcgttgccctggccatcggttcgctgctgtggtggcctaatcgtcgtgagaagggagaactgaaatcccgggaaggatttctgattgtggttctcttctggaccgtgctgggtagcgtgggggcattgccgtttatctttgctgagcagccgaacctgacggtgacggatgcattctttgaatctttctccggtctgacaacgacgggggcaaccacgctggtggggctcgattcgttaccccatgctattcttttctaccggcagatgctgcagtggtttggcgggatggggatcatcgttctggcggtagcgatactgccgatactgggcgtcggggggatgcagctgtatcgggccgaaatgcccggaccgcttaaagataacaaaatgcggccgcggattgcagagacggcaaaaacgctgtggcttatttatgtcctgctgacggtggcctgcgcgctggcgctgtggtttgccgggatgccggcatttgacgccatcggccatagcttctctactatcgcgattggcgggttctccacccatgatgccagcgtgggttactttaatagcccaacaattaactccattattgcggttttcctgctgatttctggctgtaactacggcctgcacttttcattacttagcgggcgcagcctgaaagtgtactggcgagaccctgaattccgtatgtttatcggcgtgcagtttacgctggtggtggtatgcacccttgtactgtggctgcatgacgtctatagctcggcgttaatgacggtcaaccaggcgtttttccaggtggtgtcgatggcgacaacggcgggcttcacgaccgacagtattgcgcgctggccgctatttttgccggtgctcctcctctgttcggctttcatcggcggctgcgccgggtccaccggcggtggactaaaggttattcgtatcctgctgctttttaagcaaggcaaccgcgagcttaaacgtctggtacaccctaatgcggtctacagtattaaactgggaaaccgtgcactgccggagcgtatcctcgaagccgtctggggattcttctccgcgtatgcgctggtgtttatcatcagtatgctggcgataattgctaccggcgtggatgatttctcggcctttgcttcagtcgtcgccacgctgaacaaccttggaccgggactgggcgtagtggcggataacttcgccacgatgaaccctgtcgcgaaatggatcttgattgctaatatgctgtttggtcgtctggaagtgttcaccttactggtgctatttactccgactttctggcgcgaataa

SEQ ID NO: 256806 - DNA, 615 bp, Klebsiella pneumoniae; identical to SEQ ID NO: 176460

SEQ ID NO: 256807 - DNA, 1332 bp, Klebsiella pneumoniae
atggaatccctggccggtctctataaaaatcatatcgttaccttacaagaacgcacccgcgatgttctggcccgctttaagctggatgccctgttgattcactccggtgaactggtcaacgtctttcttgacgatcatccgtatccatttaaggtcaacccacagttcaaagcctgggtaccggttacgcaggttccgaactgctggctgctggtggacggcgtcaacaaaccaaagctgtggttctatctgccggttgattactggcataacgtagaaccgttgccgacgtcattctggaccgaagaggtggaggtgatcgccctgccgaaagcggatggtatcggcagccagctgcctgccgcgcgtggcaatatcgcttatatcggaccggtaccggaacgtgcgctggggctggatattgcggcggataaaatcaacccgaaaggggcgatcgattatctgcactactatcgctcttataaaactgactatgagctggcctgtatgcgtgaagcgcagaagtcggcggttaacggtcatcaggctgctcatgaagctttcctctccgggatgagcgagtttgatatcaaccaggcctatctgaccgcgaccggtcatcgcgacactgatgtgccgtacagcaatattgtggcgctgaacgagcatgcctccgtactgcattacacaaagcttgatcatcgtgcgcctgcagagatgcgtagcttcctgctggatgcgggcgcggaatacaacggctatgcagccgacctgacccgtacctgggcggcgcatggcgataatgactatgctcagttgattaaagacgttaatgatgaacagctggcgctgattagcaccatgaaggcgggcgtgagctacgtggattatcatgtccagtttcatcagcgcatcgccaaactgctgcgtaaacatcagatagtcaaagacatgagcgaagaagcgatggtggaaaatgacctgaccggaccatttatgccgcacggtattggccaccccttaggtctgcaggttcatgacgttgctggttttatgcaggatgataccggtacccaccaggccgcgccggcaaaatatccttacctgcgctgcacgcgcgttctgcagccgcgcatggtgttgacgatcgagccgggtatctactttatcgaatcgctgctggcgccgtggcgcgaaggacagttcagcaaacactttaactggcagaaaattgaagcgctgaaaccctttggcggtatccgtatcgaagacaacgtcgtgatccacgaaaacagcatcgaaaatatgacgcgcgatctgaaactggcgtaa

SEQ ID NO: 256808 - DNA, 2139 bp, Klebsiella pneumoniae
ttgcttaatccgatcgttcgtaaattccagtacggccaacataccgtaacgctggagaccggcatgatggcgcgccaggcaactgccgccgttatggttagcatggatgacaccgcggtattcgttaccgtagtcggccagaaaaaagcgaagccaggccaggatttcttcccgctgaccgttaactatcaggagcgtacttacgctgctggtaaaatcccgggtggtttcttccgtcgtgaaggccgtccgagcgaaggcgaaaccctgattgcgcgtctgattgaccgcccggttcgcccgctgttcccggaaggcttcgttaacgaagttcaggttattgcgaccgtcgtttccgttaacccacaggttaacccggatatcgtcgcgatgatcggcgcttccgctgcgctgtctctgtccggtattccgtttaacggcccaattggcgccgcgcgcgtgggttatattaatgaccagtacgtgctgaacccgacccaggaagagctgaagtccagcaaactggatctggttgttgcgggtaccgaagccgcagtactgatggttgaatccgaagctgaactgctgagcgaagaccagatgctgggcgcggtcgtgtttggtcacgaccagcagcaggttgttattcagaacatcaacgacctggtgaaagaagccggtaaaccgcgttgggactggcagccggaagtggttgatgccgcgctgaacgcgcgtgtcgctgcgctggctgaatctcgcctgagcgatgcgtaccgtatcaccgacaaacaggagcgttatgctcaggttgacgtgatcaaatccgaaactatcgcgaccctggttgcggaagatgaaaccctggacgctaacgaactgggcgaaatcctgcacgcaatcgagaaaaacgtggtgcgtagccgcgtactggccggtgagccgcgtatcgatggtcgtgaaaaagatatgattcgtggtctggacgttcgtaccggcgttctgccgcgtacccacggttcagcactgtttacccgtggtgaaactcaggcgctggttaccgcgaccctgggcaccgcacgtgacgcgcagaatatcgatgagctgatgggcgagcgtactgactccttcctgttccactataacttccctccgtactccgtaggcgaaacgggaatggtcggctctccgaagcgtcgtgaaatcggtcacggtcgtctggctaagcgcggcgtactggccgtgatgccgactatcgaagagttcccgtacaccgtacgcgtggtttctgaaatcaccgaatcgaacggttcctcctccatggcttccgtctgtggcgcttctctggcgctgatggacgcaggtgtgccggtgaaagccgccgttgcgggtatcgcaatgggtctggtgaaagaaggcgacaacttcgtcgtactgtctgacattctgggcgatgaagatcacctgggcgatatggacttcaaagttgcgggttcccgtgaaggtatctctgctctgcagatggatatcaaaattgaaggtatcaccaaagagatcatgcaggttgctctgaaccaggctaaaggtgcgcgtctgcacatcctgggcgtgatggaacaggcgattaacgcgccgcgcggcgatatctctgagttcgcaccgcgtattcacacgatcaagatcagcccggacaaaattaaagacgttatcggtaaaggcggctccgttattcgcgcgcttaccgaagaaaccggcaccactatcgaaatcgaagatgacggtaccgtcaaaatcgcagcaaccgatggcgacaaagcgcagcacgcgattcgtcgtatcgaagagatcaccgctgagatcgaagttggccgtatctataacggtaaagtgacccgcatcgttgactttggcgcattcgttgccattggcggcggtaaagagggtctggttcacatctctcagatcgccgacaagcgcgttgagaaagtgaccgactatctgcagatgggtcaggaagtgccggttaaggttctggaagttgaccgtcagggccgtgtccgtctgagcatcaaagaagcaactgaacaaactcagcctgcggctgcgccggaagctccggctgccgaacagcagggcgagtaa

SEQ ID NO: 256809 - DNA, 270 bp, Klebsiella pneumoniae; identical to SEQ ID NO: 172714

SEQ ID NO: 256810 - DNA, 945 bp, Klebsiella pneumoniae
atgagtcgtcctcgtcgtcgcggtcgcgacgtgcacggcgtactgttgctggataaaccgcaaggcgcatccagcaacgacgtgctgcagaaagttaaacgactttataatgctaaccgggcagggcatacgggagcgctggatccgctggcgaccggcatgttgccgatttgcctcggggaagcgacaaaattttcccagtatctgctcgattctgacaagcgctaccgcgtgattgctaaacttggccagcgcaccgatacctctgatgccgacggccaggtggtggaagaacgtccgctgacttttagtcctgagcagctggcagccgcgctcgatggctttcgtggtgaaacccagcaggtgccgtcgatgtattcggcgctgaaataccaggggaaaaaactgtacgaatatgcccgtcaggggattgaagtaccgcgtgaatcccggccgattacggtttacgagctgctgtttatccgccatgaggggacggagcttgagctggaaattcactgctccaaaggcacctacattcgcacgattattgatgatttaggcgagaaacttggatgcggcgcgcacgtcactttcctgcgtcgcctggcggtcagtaaatatcccgtcgaacggatggtgacactggaacagctgcaggcgctggttgaacaagccaatgcgcaggatattccggcagcccagctgctggacccgctattgatgccgatggacagcccggcttcggattacccgctggtgaatattccggaaacctccgccgtctactttaaaaacggcaatccggtgcggacatcgggtgcgccgctgcaggggctggttcgcgtcaccgaaggtgatgacgagaagtttcttggcatgggggaaatcgatgatgaaggccgcgtggcgcctcgtcgtctggtggttgaataccctgcctga

SEQ ID NO: 256811 - DNA, 402 bp, Klebsiella pneumoniae
atggcgaaagaatttggtcgcccgcagcgcgtggctcaggagatgcaaaaagagatcgcaatcatcctgcagcgcgaaattaaagacccgcgtctgggcatgatgaccacggtttcaggcgtcgagatgtcccgcgacctggcctatgccaaagtgtttgtgaccttcctgaacgacaaagacgaagccgccgtgaaagcgggcatcaaggctttgcaggaagcgtctggttttattcgctcgctgctgggcaaagcaatgcgcctgcgtattgtgccggaactgaccttcttctacgacaattcattagtcgaaggaatgcgcatgtcgaacctggtgaccagcgtggtgaaacatgacgatgagcgtcgtgtgaacccggacgacagtaaggaggactaa

SEQ ID NO: 256812 - DNA, 528 bp, Klebsiella pneumoniae
gtgaaagtgaagattatcggttccggcgtaggtggtatcaccgaaaccgatgcaaccctggccgctgcctccaacgcgattctggttggctttaacgttcgtgctgatgcatccgcacgtaaagttatcgacgcggaaagcctggatctgcgctactactccgtcatctatcatctgatcgacgaagtgaaagcagcgatgagcggcatgctgtctccggaactgaaacagcagatcattggtctggccgaagtccgtgatgtgttcaaatcgccgaaattcggcgccatcgcaggctgtatggttactgaaggtacgattaagcgtcataacccaatccgcgtactgcgcgacaacgtggttatctatgaaggcgagctggaatccctgcgccgcttcaaagatgacgttaacgaagttcgtaacggcatggagtgtggtatcggcgttaagaactacaacgacgttcgcgttggcgatatgatcgaagtgttcgaaatcatcgagattcaacgtaccatcgattaa

SEQ ID NO: 256813 - DNA, 903 bp, Klebsiella pneumoniae
gtggtaatacagacatctgctcctgataaagaacaggagctccagtatttttcccttctctgggaagatgaagaattaccatggatgccagatattcatgccttacccagttcgtcaatttttaataactggaataaattcctgtctactgctcgttatccactactggtgctggcgctgcattaccgccagccggaagaaaacttaccggaatttgcctgtgcgttgctgctgttgcccgatgcgatgctgaaatcgtcagaacagcgcgatgcggtgcgagtatttcgcgccatgccgctgaatactgatgcattgccccgtgaattgacggaattacgtgatatggcgcagcagcctcccggggtaaaacatctggtctggcacagtgggttatctgcgccgtccgcgcaggcgctggggcgggtggttaatgagttacctttgcccctgcaggctgatatcgccgccggtggtattgtcgattttgagaaaatcagcgctaactacgggcctctggccggatggctgatggtggctgcggcagcagagatggtcagttacggtccggggagccactggctgctacaggcggatggcaaacaggccagtgcgatggttgtcggcaacagtctgccggttacccatgatgaagatgtaagattggctccgttaccttatccggctgggtcgctcagccttgcggtattgctcaatattgcggtttttggagcaactgcccgttttttcccggactggctgttttcctggtacggcgtgttcagcgtgctgctgtcgctggccgtgtctctgcccggcgctgttttcctgctgcgccgtgccctcactgctctgcaacgcccccattttattcaggcagccggacttgcccgcaaggaataa

SEQ ID NO: 256814 - DNA, 687 bp, Klebsiella pneumoniae
atgctggcggttaacggcgaaggagaccaggctgcccgccccccacaaggccatcagcgacagggcgataacccccgatgcgcgctgccagggcagaccggcccgcacgccccgcgcctgagcgccgtccgccgtcactccctgccagaccgccggagcggaccagcggtgaggatgtggcgcctccccggcggtcgtgtccggcgccagcggcgggctgaacatcaggccgcgcagcggaacgcgctgcaggcgctccgtcagccagggcgtcagcagcgtacgccagcgggcaatgccgctcccctcaagcgtgcgccccaggcgcagcagataatcatgggccgggtcggcgcacagctgctgcattcccctttcccccagggacggcagaatggcgcggagttgttgcgccaccccctccggcgtggcgccgggcgggaacagcgcccccaccggctggctgatgcgggtatcctgcggccaggcgctgtcagtcacctgccacaggtataccggcggctgccagcgcagggcctccccgacctgcccgagggtgcgaagatggttatccaggctagcgctggtcgcctgcgcctcatcaagcgccagcacgatgccgtccagcggacggctgcggcgcagcttgcgcagggcggccaggcgctcagtatccggcgccaatga

SEQ ID NO: 256815 - DNA, 600 bp, Klebsiella pneumoniae
gtggccagccagttcgatgattttcgcttcccactctgcgtcgccttccagcgctttcagagcagaaccacgaacgatcggggtgtcgtcgcccgggaaatcgtactgagacagcagttcacgaacttccatctcaaccagttccagcagctcttcgtcatcaaccatgtcgcatttgttcaggaacacgatgatgtacggaacgcctacctgacgacccagcaggatgtgctcacgagtctgcggcatcgggccgtcagtcgcagcaacaaccaggatcgcgccgtccatctgcgcagcaccggtgatcatgtttttaacatagtcggcgtggcccgggcagtctacgtgcgcgtagtggcgagtcggggtgtcatattcaacgtgagaggtgttgatggtgataccacgagctttttcttccggcgcgttatcgatctggtcgaatgcgcgagcggaaccaccgtaggttttagccagtacggtagtgatggcagcggtcagcgttgttttaccatggtcaacgtggccgatagtaccgacgttaacgtgcggttttgtacgttcaaacttttctttagacatcgattgtccctctaa

SEQ ID NO: 256816 - DNA, 543 bp, Klebsiella pneumoniae
atggactatctcactgatttacggtcatgtatctggccgagagaagatcgctactttgttgacggattatccacgattatttttgatatccgcgatttgatctacccatctctggatgaactacgcgacgggtttatgtttattaatattagccctaaatttatgagccactttatcagccatgaacaccaatggctgaaaatcgccgagaaaaaacaggtgatattaattgccgcaaccaggctggaggcgctggccaattactggtatttcaatagtcaggccagaggcgtggtttatacggaatccttatacgctattcgccatgagctgacccgagccataaacggtcgttttcgccgcagtgatataaaaaaaggaaaaatgacccgtaaagagatgcaaatcattggtcatcttgcgcaggggatacagccgaaatctattgccaaaattgagaactgcagcgtcaaaacggtttatacccatcagcgtaacgcggaggtgaagctggattttaaaataaataaattagccatctga

SEQ ID NO: 256817 - DNA, 684 bp, Klebsiella pneumoniae
atgaacgctaatctggcggtcatcgttgataacctcgattatctgctgtgggggcggctggcggacggtatccccggcggcgtggtgctgacgctgctgatggctatcggcgccgccgcgctggcgctgccgggcggcgttctgctggcagctatcgcctggcgctacgaagggatcgtgcggcggctgctatttctgtgggcggaaattattcgcggcatcccgctgatcttcgtgattttctggctgtggtatctgcttcctatgctcaccggcagcgatctcccgggcgcggtcaccgtcacggtggcgctggcgtggtttaccgccgcctcggtgatgcattcagtgctggcgggcctgcaatcgctaccccgtgggcaatacgaagcagcgctgacccagggtttcgctcccgggcaaacgctgcgcctgatcctgctaccgcaggccctgcgtaacgttcagccgtcgctggttgggatatttatcggcctgctcaaagacacctcgctggcctttatcgtcaacgtgccggagctgactaccgtcgccgggcaggtcaataaccgggtgcagatctacccgctggcgatttttgtttttaccggcgcggtttactatctgctgtgctgcggactgagtctgctggcgaatcgccgatatgggagagcgaccgggtag

SEQ ID NO: 256818 - DNA, 753 bp, Klebsiella pneumoniae
gtgatcccgcatctcgactggcatggcgtgctgagcgggcagccgctgcaatggatcatctccggttttctcaccaccgtctgggtcagcatcgccgggatggttctggcgaccgtgctggccatcctgctgctggcgctgcgtctcgggggcggcaggcccggccgttggctggtggcggcctgggtttcactgttccgcaatacgccgctgctggtccagctgctgttctggtattttgccgcctggaatctgctgccgctgggggcgcgggattttattaatgacgatcgcagttggtcgattcttccgggcaacgtctggtggctgacgccggagtttctctgctcaatgtggggactcggggtctttacctcggcgtttctgattgaagagatcgcctccgggctgcgcgccgttagccacggtcagcgggaagcggcgctgtcgcaggggtttacgccctggcaggagctgcgccacattctgctgccgcaggggctggctaacgcctggcagccgattatcggccagtatctcaacctgatgaagctctcttcgctggcgagcggtatcggctttgccgaactgacctatcaggtgcggcaaatcgagagctacaacgcgcatgcgctggaggcgtttgccgtcggcaccgcgctgtatctggcgcttggggtgctgttgggcgtggcgctgacgcgtctcggtccgggaagagctcagcaaaggagagccggttatgaacgctaa

SEQ ID NO: 256819 - DNA, 819 bp, Klebsiella pneumoniae
atgttatcggctctattttcacgctccgcggcatcgtccgcggatttttcgcatctgcagcgcgccagcattgagtttcgcgatgttgccaaaagctacggcgaccatcgggtgctgaacggcgttaacttacaggttgaacccggcgaagtggtggcgatcctcggcccttcgggatcgggcaaatcaaccctgatccggctgatcaaccagcttgaatcactcagcggcggcgaaatactgatcgacggcaaaccgacagcgcagctcaccggcagcgctctgcgccagctgcgcagccgggtcggctttgtttttcagcagtttaatctctatgcccacctgacggcgcaggagaatatcaccctcgcgctggaacgcgttcacggctggggcaaaagcgccgcccgcgaacgctcgctggcgctgctcaaccaggtcggccttgcggataaagcccggcagatgccggcccagctctcgggcggccagcagcagagggtggcgatcgcccgcgccctcgcctcctcgccgcagattattctgttcgacgaacccacgtcggcgctcgatccggagatgatcggcgaagtactgcaggtcatgaaaaacctcgcccatagcgggatcaccatggtggtggtgacgcatgagatgcagttcgcccgcgagattgctgaccgggtggtgtttatcgacggcggcgatattctcgaagtcgcgccgccggccgagttttttgcccggccgcagcacgcccgcacccgccgtttcctgcaaaaggtgctcgatccgctgcaccaggagagtgaggcgtga

SEQ ID NO: 256820 - DNA, 810 bp, Klebsiella pneumoniae
atgcgcattgcaaaaacaaaaatcgcgctggcgctgagcatgctggtgctcgccgcgcaggctcaggccgatcaattagccgatatcaaagccgccggcgtggtcaaagtcgccaccttcgacgccaacccgccgttcggttcggtagatccgaaaacgcataaaatcgtcggctacgacgtggacttcgccgaagcgctggccaaatcactcggcgttaagctggaattggtcgccactaacccggccaaccgcattccgctgctgcagtccggcaaggccgacctgatcgtcgccgatatcaccatcactccggaacgtgcacaggtcattgatttctcaacaccttactttgtgaccggccagcagttcctcgttccggcaaaatcaccggataagctcgatgattacagcaaagcgcgcatcggcgcggtaaaaggcaccaccggcgaacaggcgctgcatcagcgtttcccgcaatcgcgcgtgctctcttatgatgatattccgctggcgctgaccgcactgcgcaacggcaacgtgcaggccatcactcaggacagcaccatcctggccggactgctggcggaagcgccggacaaagctaacttcaaaatcatccccgacctgctgagcaaagaagagattggcgtcggcgtgaagaaaggcgaaccggccctgctgaaagcggtcaatgacgagctggtcaagctggagaaatccggtgaggcggccaaaatttacgacgtctggtttggcccgagcaccaaaaccccgcagccgcgcgcctttactatcgaagcgaaataa

SEQ ID NO: 256821 - DNA, 915 bp, Klebsiella pneumoniae
ttgcccgcgcacgatccggactgtttcctgtgcccgggcaatacccgcgtcaccggcgacaaaaacccgaactacaccggcacgtttgtttttaccaatgactttgcggctttgatgaccgatacccctgatgccccggaaagcgacgatccgctgatgcgctgtcagagcgcccgcggcaccagccgggtcatctgcttctcgccagatcacagcaaaacgctgccggaactgagcgttgaggcgctggaaggcgtggttaaaacgtggcaggagcagaccgccgaccttggaaagagctacccctgggtgcaggtctttgaaaataaaggggcggcgatgggctgctcaaacccgcacccccatgggcaggtgtgggccaacagctttctgcctaatgaggcggaacgcgaagatcgtctgcaaaaagcgtacttcaccgagcacggcgcgccgatgctggtggattacgtgcagcgcgaattagccgacggtagtcgtactatcgttgacactgaccactggctcgccgtggttccttattgggccgcgtggccttttgaaacgctgctgctgccaaaagcgcacgtccagcgcctgactgatttaaccgacgaccagcgcagcgatctcgcgctggcgctgaaaaagctgaccagtcgttacgacaacctgttccagtgctcattcccctactccatgggctggcacggcgcgccgtttaacgatgaagagaataatcactggcagctgcacgcccatttttacccgccgctgctgcgttccgccacggtgcgtaaatttatggtcggctatgaaatgctggctgaaacccagcgtgacctgacggccgagcaggccgccgagcgtctgcgcgctgtgagcgacgtccattttcgcgaatccggagtataa

SEQ ID NO: 256822 - DNA, 1149 bp, Klebsiella pneumoniae
atgagtctgaaagagaaaacccaagccctgtttgctgagaaatttggctacccggccagccatgttatccaggccccaggccgcgttaacctgatcggcgagcataccgactataacgatgggttcgtgctgccctgcgccattgattaccagacggttatcgcctgtgcgccgcgcgacgatcgtaccgtgcgggttattgccgccgattacgacaatcagaccgatgaattctctctcgactcgccgattaccagccacgacacccagcagtggtcaaactatgtccgcggcgtggtgaagcatctccagcagcggaataacgccttcggcggcgcggacctgacgatcagcggtaacgtgccgcaaggcgccgggttaagctcctcggcttcgctggaggtcgccgtcggcacggtgttccagcagctgtaccacctgccgctcgatggcgcgcaaattgccctgaacggccaggaagcggaaaatcagttcgtcggctgcaactgcggcattatggaccagctgatctccgcgcttggtaaaaaagatcacgctctgctgatcgactgccgctccttagggacgaaagcggtgtcgatgccgaaaggcgtcgcggtagtgattatcaacagtaactttaagcgcaccctggtgggcagcgaatacaacactcgtcgcgagcagtgcgaaaccggcgcgcgcttcttccagcgtccggctctgcgtgacgtcacgctgcaagagtttaacgccgtggctcacgagcttgatccggtagtcgccaaacgcgttcgccacgtgctgactgaaaacgcccgcaccgtagaagccgcatcggcgctggaaaaaggcgacctgcagcggatgggcgaactgatggcggaatctcacgcctccatgcgcgatgattttgaaatcaccgtaccgcagattgataccctggtagagatcgtcaaagcgaccatcggcaacaaaggcggcgttcgcatgaccggcggcggcttcggcggctgtatcgtcgcgctggtgccggaggagctggttgataccgtgcagcaggccgttgccagagagtatgaagcgaaaacgggcattaaagagaccttctacgtctgcaaaccgtcgcagggagccgggcaatgctaa

SEQ ID NO: 256823 - DNA, 1044 bp, Klebsiella pneumoniae
atgctaaagcaaacaacggagctggcgccggacggccagccatggaatcttcttaccctgcgtaacgacgcaggcatgacggtcaccgtgatggactggggcgcgacgctgctctccgcgcgcgtgcccctggcggacggtagcgaacgagaagcgctgctcggctgcgcgacccccggcgactatacgcgccaggccgcttaccttggcgcttccgtaggccgttacgctaaccgtattgccaacagccgctttaccctggatggccagctcatcaatctgacgccctccaacgaggctggccatcagctccacggcggaccggaaggttttgataagcgccgctggcaaattgttagcgctgacgctcgccacgcgctgttttctctctcctcccgcgatggcgatcagggctatcctggtaatctgacggcaaccgcgcactaccgcctgaccgacgataaccggatcgctattgagtatcgcgccaccgtggaccagccgtgcccggtgaatctgacaaaccacgtctatttcaacctcgatggcgtgcagagcgacgtgcgcaaccataagctgcaaatttttgccgatgtttatctgcccgtcgaaagcgacggtattccggggggagatctgcaaaacgtcaccctgaccagcttcgatttccgcacgccgaaaaccctggcggacgacttcctgcgcgacgaagatcagcaaaaagtaaaaggttatgaccatgccttcctgctacaggcgctggggaatgccgatactccggccgctcacgtctggtcgcaggacgaaaagctacagatgacggtttatacttccgcccccgcattgcagttttactccggcaactatcttggcggcacgccgtcgcgcacagcgcaggcgtacgatgactggcagggcctggctctggagagcgagttccttccagattctccgaatcatccggaatggccgcagccggattgtgtactgcgccccggcgaagagtacgtcagcctgacggaatatcagtttatcgctcgatag

SEQ ID NO: 256824 - DNA, 753 bp, Klebsiella pneumoniae
atggctgtaactaagctggtactcgttcgtcacggcgaaagccaatggaataacgaaaaccgtttcaccggttggtatgacgttgacctgtctgaaaaaggcgttggtgaagcaaaagcggccggtaagctactgaaagaagaaggcttcagcttcgactttgcttatacctctgtgctgaaacgtgccatccacaccctgtggaacgtgctggacgaactggatcaggcctggctgccggttgagaaatcctggaaactgaacgaacgccactacggtgcgctgcagggcctgaacaaagcggaaaccgctgaaaaatacggtgacgaacaggttaaacagtggcgtcgcggctttgcggtaacgccgccggagctgaccaaagacgatgagcgctatccgggccacgatccgcgctacgccaaactgaccgatgcagaactgccgacgaccgagagtctggcgctgaccatcgaccgcgtcgtgccatactggaacgaaacgattctgccgcgtctgaaaagcggtgagcgcgtgattatcgccgctcacggcaactccctgcgtgcgctggtgaaatacctcgacaatatgggcgaagcagagatccttgaactgaacatcccgactggcgtaccgctggtgtatgagtttgacgaaaacttcaagccgatcaaacactactatctgggtaacgccgacgagatcgctgcgaaagcggctgccgttgccaaccagggcaaagcaaagtaa

SEQ ID NO: 256825 - DNA, 1101 bp, Klebsiella pneumoniae
gtggtcgccgtcgatccgcgcgacggcggcgtgctggcgatggtttccagccccagctatgacccgaatccctttgtcagaggcattggctaccaggcctatcgttcgctgctcgaaaaccccgaccgtccgctgattaaccgtgtcacccaggggctctatccgcccgcgtcgacggtgaagccctacatggcgctgtcggcgctctcggcgggcgtaatcacgccaaccacctccttcttcggcgcgccgacgtggacgctgccgggaacccagcgccgctaccgcgactggctgaagagcggccacggcatgcttaacgtcaccaaagcgatcgaagagtcggcggatacgtttttctatcaggtggcgtttgagatggggatcgaccgtattcacgagtggctgagcaagttcggttacggtcagtctaccggtatcgatcttaacgaagagtatgccggggtgctaccgagccgggagtggaaacagcgggtgcataaaaaaccgtggtatcagggggataccatttccgtgggcatcggccagggctactggattgccacgccgatccagatggttaaagcgctgacgaccctgataaataacggcaaagtgcaaaatccgcatctgctttactccatgaagcaggggaatagggtcgagcgctatcagccaccgcagaatctgccgcagattggcgatccgcattcgccatactgggacgtagtgcgcaacggtatgtacggcatggcgaacctgccaaacggcaccggctataagctgttccataccgcgccgtaccagatcgcggcaaaatcggggacgtcccaggtcttcagcctgaaggagaatcagacctacaacgcgaagatgatcccggttcgcctgcgcgaccatatcttctacaccctgtttgcgccgtatcagcatccgaaggtggcgatggcgctgattctggagaacggcggcggcgatggcgtagtggcaggaccgacggcacgcgccatcctcgaccatatctttgacccggccaacgcgccggctgaacagggtgctgcggctgcggtgccgcaggtggagagcgcggacgcgcagtag

SEQ ID NO: 256826 - DNA, 744 bp, Klebsiella pneumoniae
atgtcgttaagccgaaatacgcttcttattgtgcagacgggcaccccgccggatgaaatcgcctccgaccacggcgatcttccctcctggtttggtcatttactggcgccgtggcgcaataaaatcagcgtggcgcgagtgtttgccggggagacgcttcccgccccggataacgcgaccgtcgcggtgattaccggctcatgggatatggtgaccgaacgcttgccgtggagcgaaatgaccgcggcctggatccgcgaggcaatggcaatagagatgccgctgtttggcgtctgctacgggcatcagctgatggcgcatgcgctgggcggcgaggtggattaccatcctgccgggcgcgaggccggaagcaaaactatttcgctgtcagaaagcgggcgggcggatcgtcttctggccgatcatccggcgccgttcagcgcgcatctgactcatatgcaaacggtcacccgattaccgccgggggcgaaggtgctggcctcgtcgcagcacgatccgcaccagattgtgcgctacggcgcccatgccgtctccacccagttccacccggaaatcacgccggcgattgcccgctcgctgatcgcgtaccgtcaggcggcactgcgcaacgagggtattgacccggataagctgagccttgaggttgaggaaagcccggtggcctcggcgattttgacccgctttgttgccggctatctgccgccggatcgggaaacggcgtaa

SEQ ID NO: 256827 - DNA, 126 bp, Klebsiella pneumoniae
gtgaccgagcacaacggcgttacctgcctgaagctgaccttgctgaacccgatcgtcacgttagatgacgtgaaggtgctgctgagcctggtcgatcgcactgcccaggagctgctggcgcagtaa

SEQ ID NO: 256828 - DNA, 1254 bp, Klebsiella pneumoniae
atgtccaagttgaatccgattcttgctggttccgcacagagtattgatgcctatcagcaagcgatcgcccagaccagccaggctgtcgcgcagtggttgcagcagcctgaaatgtatcaggggaaaagcgttgacgaactgcgtgagcgcatcacccttgatttcaacgaacagggtctgggcaaccaggcggcgattgaacgtgcgatcgagtacttcctgaaagacagtctgtcggtacatcacccgcagtgcgtggcgcatctacactgcccgagcctggtgattagccaggcggcggaagtgctgattaacgccaccaaccagagcatggactcctgggatcaaagcccgtcagccaccatcattgagatcaagcttattgaatggctgcgtgcgcaggtcggctacggcgctggcgattcgggcgtgttcaccagcggcggtacccagagcaacatgatgggcctgatgctggcgcgcgatgccttctttgcccgccagggccactccatccagcaggatggtctgccgggcgatgttcgtcgctacaaagtactgtgttctgaaaacgcccacttctcggtgcagaagaatatggcgctgatgggcctcggctaccgttccgtgacgctggtgaaaaccgacccattcgcgcggatggacgtggcggacctgaaagcgaaaatcgccgaggctcaggctaacggcgagcagattatggcgattgtcgctaccgctggtactaccgacgcgggggccattgacccgctgcgagaaatcgcggctgtcgcggcagagcatcagatctggctgcacgttgacgcagcctggggcggcgcgctgctgatgtctgagaagtatcgcgatcgtctggacggcattgacttagtggattccatcactctggatttccataagcagttcttccagaccatcagctgcggcgcgtttctgttaaaagaagcccgtcactacgagctgatgcgctatcaggcggcctatctgaactctgagttcgatgaagagcatggcgtaccgaacctggtgtccaaatctctgcagaccacccgccgcttcgacgcgctgaagctgtggatgggtcttgaggcgctgggccagaagcagtatgcggaaatcatcgatcacggcgtgacgatggcgctgaacgtagcggattatgtcgcatcgccctactcaaccagcgggttggcgatgcgctgctggcttccggccgcgctaacgtcggggtga

SEQ ID NO: 256829 - DNA, 396 bp, Klebsiella pneumoniae
atggcgaccggcctgaccaccctgcgccacctgaaagacaataacattgcggataaaaccgccgctcagggcgaatggctgaagggcaagctggccgagatgcagaaacgctatccggtgattggccacgttcgcggtctgggcctgatgatcggtattgagatcgttaaaccgaacgaagcgccggatcacatgggctgctacccggcggacggcgaactctccgccctgctgcagaagaaatgcttcgaagcgggcgtgatcctcgagcgcggcggtcgccacggctgcgtgctgcgtctgctgccgtccctgctgatcagcaacgctgagctggaaattttcttcgacaaatttgaacaggccctgctggccgccggcgtaaaaccggtctga

SEQ ID NO: 256830 - DNA, 282 bp, Klebsiella pneumoniae
atgctcaagcagctggcgtacgttattgataaaaaaattgaccatatagctgtcttccagcaccctgaacaggcagagcattgccatttcgcgaaagtagtagatctgccgctgcggctgcactttgctacccacttcgatcaccgagcgggcgaaccgaatggcctcgcgaatgtccggggcgctgtccgcctgcacgccaatcccgatatggtaatggcttatctgattactcagtacaaactcaatgccccgcagcagggtttcctgggcttcgcttag

SEQ ID NO: 256831 - DNA, 426 bp, Klebsiella pneumoniae
atgctgttcgacctgcacggtcactacgatcggaacccgcggtgtatcaaaatcgaaaccaagttccaacaggcgatgaagcgcttcttgcccggcgggcgtagccccttgttccagatactgacaaaacaaggtgtcacgcagacgttgccgccagttggtttcccgcatctctatggcctggcggaccagcagttcggcggtgagcaccgccagttcagcatagcggcttatcgccgcgggatcgccgctgatgcctaccaccatcaccacgcgatcgtcatagataatgggatgattaataccaggatgcacgttgtgaaaacgcgcggcttccgcggcgttgttaatacaaatacgtttcccggtgcgtattacctcccgggcgacttcatgctgttcgccgatacgatgccgttcacctga

SEQ ID NO: 256832 - DNA, 279 bp, Klebsiella pneumoniae
atgactctggatcgtattaacgaatattttgcgtttgcaacatccgccctggtgaccggcgtgggcgtcatgaccgtcagtgaaaagctggcgctggctggccttcttctggggattgtttccgccgtccggctggcgatacatcgccgccgcattgagcaggccagccagcgccgcaacgacctgatcgagcagattctccaccaggctgaaagccgcaacctgtcggaccgcgagcggcagctgctggagcaactgcacggggataacccgacatga

SEQ ID NO: 256833 - DNA, 516 bp, Klebsiella pneumoniae
atgagtattattgcgcagcgccccgtcagacccgccgacagtgacgtgaccgacatggacgacggcggcgcggaggttgtcgttggcaccttctggccgacagtgaagctccgcgatctacgcctcgcggcccgcatcgccggtgatatcaccacctcccggctggcgcacatggcgacagaatccgcgttgcatgttgcggatcagctgaaggactggcgcaggcaacgcgaggcggaaggcagcgagtcgctggcctccgtgctgttcactgctgacggcgaacctgtagacatggtcaatggcgaaagcgcaaaggtttatcgcttccgccgcgcggtctattcctttacgcgcgcccgtgtactggagggctacagggacgttagcaccacgccaaaaggtgacaaagacgccgaagccctggacaggcaaatagacgatctctggcgggacgggcgctggagtatttcagatattcgggaagaaccccgtatttactcggagcttttctga

SEQ ID NO: 256834 - DNA, 891 bp, Klebsiella pneumoniae
atgctgacaccggcacaaagacactttcagaaggtcatggcagagaggcgaggctccagtgatgagcgtgacgctgagacgcgcaccgcgcatgagcagatcctctttcgcctgcatatgcataaatcctcactgagccagatccagtcccgccaggcgaaggccgctgtaaaggccagcatccttcctgagtttcaggggtggattgacggaacgatcgagggcgacagcggacgcgccgatccggttatcaccacgctgatggtgtgggcggtggactgctccgactatgcgctggcgctgcgtatcgggcgctatgtcgttaaacatggtctgagcatgccggaggacaactatcgccgcccggctcccacggtgctgaccgaagaaatctgcaatcccattctgaacctcgccaccacggacgccggagccgatttgtcaggctatatcgccatgctggacgagctggccgacattgtggctgacagtgacatgccggatgaggtccgcgcgaagctgtgcaaggtgagggcgttttgccgtcgcgacacggaagacgcggaaacaaaaggcgaagcgctgaaactctttcgggaagccatgagcctgaacccgggcgcaggcgtgaaacgggagatcgcttctctggtcagcgccctgaaaaaggttccgcagacggttgccgctgagaaacagcaggccgccgcagcgaatgatgatgcgactgatggggctgcatccggcgaggccaacgcagctggggcacccgtagcagaaaaaacaacccgaacacgcaagcagacgaaaacggcggccggcacccaaaaagccacccgcaaaacggcggcaaaaaagacaacgaaaagcgccgccagagaaaacgcctga

SEQ ID NO: 256835 - DNA, 1167 bp, Klebsiella pneumoniae
gtgcttggcgcgctggccgatgttgaggatcgcagcgatctgccagtcggccactttctgcgccgccgccatttcgcgtgctttccctttcactgcctggcgtaccgccagggccacgcgcgcgccggtctgggtaatgtcttcgcccagcaccagtaccgcatcgtaggattcgatatcgcgcaggcttggcgtgtggatcccaccctcgcgcagcactttcagcatcatctgcaggcgcgcttgttcgcctttggcgataccggtatagaagttgtcggcgcccaccagctcgcgcagcgcgaagttgctttcaatgctggcgcgcggggaaccgatgccgatcactttcttcgactggcgcaggatatccgccgccccctgcatcgcctgctcggcgttaagggtgatcagatcgtcgccgcggcgctgtaccggctgacgcggacggtctttcaggttcacgtagccatagccgaaacgaccgcggtcgcacaggaagtagcggttcacggtaccgttatagcggttttcgatacgacgcaactcgccatagcgttcgcccgggctgatgttacagccgatggaacactgctggcagatgctcggcgcaaactgcatgtcccacttacggttatagcgctcggagtgggttttgtcggtgaaaacgccggtcgggcagacttccaccaggttgccggagaactcgctctccagggtgccatcttccgggcggccgaagtagacgttgtcgtgcgcgccatagacgcccagatcggtgccgtcggcataatctttgtagtagcgcacgcagcggtagcaggcgatgcagcggttcatttcgtgcgaaataaacggccccagatcctgattgcggtgggtacgcttggtgaaacgatagcggcggaagctatgaccggtcatcaccgtcatatcctgcaggtggcagttgccgccctcttcgcagaccgggcagtcgtgcgggtggttagtcatcaaccactccaccacgctttcgcggaactgcttcgcttcgctgtcgtcgatagaaataaaggtgccgtcggatgccggagtcatacaggacatcaccaggcgaccacgcgtgtcttccgcgttctgatattgcttcaccgcacactggcggcaagcaccgacgctccctag

SEQ ID NO: 256836 - DNA, 1050 bp, Klebsiella pneumoniae
gtggcgcagtttcccgcccacttcatcctggaacttgttccatgcctgcggggagttccagcccggcgcccaggcgaacgggatctgcgaacgcggggcggacggctggttgttcccttccatggagaaggcgaacatcgtgtctttatcctgcggctgacgcggctcgtgcacgctgatgttagcgcgcatcgccgtgcggccgctgtagcggtgcggttcacgcgccagcttctggccgcggatacggaaggtcgcatccggcgcggcgtctttaatgcccgccagctgcggcagcgcggcaatcgccgcatcaatgacgtggtccagctgagtccagtcaacctgacggttgttgacggtgctgtgcagcgaatgcagccagcgccagctttccagcattacggttttcgcgtcgtagtaagccggatcgtaaacctggaagaaacgttgggcgcggccttcgttgttcaccacggtaccgtcgctttccgcaaagcttgccgcggagagcaccaggtgcgctttgtccataatcgcggtgcgctgatgatccaccaccatcaccagcggcgctttcgccagcgcagcgtcaacgcgcgcggtggaagcatgacggtgaaggtcgttttccagcacgataaccgcgtctgcggcgccgctttccagttcgtccagcgcctcttcaagcgagccgccgccgatcatgcccagtccgacgctgttaaccgcccgggcgaccatggtcaccccgacatcggcgccgcggcctttcagagctttcgccacgttagcggcggcctggaggatctccatgctgccggcgttggtcccggagatgatcagcggttttttcgccccggccagcgcctgaacgataacgtcgactttaccctgcaggtcctggctcaggccgtcaaccgccggcgcgctgtcgtccagcgcatgggcaatagcaaagccgagacgcgcctgatcttccaccggcgcgcggtaggtccacgccgcgatgtcatccaggcgggtgtcatcgacgttggtgacgaatag

SEQ ID NO: 256837 - DNA, 498 bp, Klebsiella pneumoniae
atgctaaaaactgaaatgatcgataagcttaatgcgcagatgaatcttgaactttattcctctctgctttatcagcaaatgagcgcctggtgtagttaccacagctttgaaggcgcggcggcgtttcttcgtcgccacgcgcaggaagagatgacccatatgcagcgcctgttcgactacctgaccgataccggtagtctgccctgcatcacggctatcgcgtcgccgtttgctgagtatgcctctcttgacgagctattccgtgcgacctacgaacatgaacagttaattacgcaaaaaattaatgaactggcacatgcggcaatgaccagtcaggattatccgacgtttaatttcctgcagtggtacgttgctgaacagcacgaagaagagaagctgtttaaatcggttattgataaattaaccctcgcaggtaaaagcggcgaaggtctgtactttattgataaagagctggcaacgctcgacacgcaaaattaa

SEQ ID NO: 256838 - DNA, 240 bp, Klebsiella pneumoniae
atgcaatcgattcatggtcacgaagtgctacaaatgatgatcgcctcaggcgaaacttacaccgtggcgacgcttgaagcggccatcgtcgcgcgtttcggtaaagaagcccgattccacacctgctcggcggaaaatctgagtgcggcggaactggtggcgtttttacagaaaaaaggcaagtttattgccgctgaagaagggtttaatacgcacgaaagtaaaatttgccgccattaa

SEQ ID NO: 256839 - DNA, 1212 bp, Klebsiella pneumoniae
gtgaagaaccgcactctgggtagtattttaatcgtcgccggcaccaccatcggcgcagggatgttagccatgccgttggcatcggcgggcgtaggtttcggcgtaacgttagctttgctgataacgctttgggcgctaatgtgttataccgctttgctgctgctggaagtctatcagcacgtgccggccgacatgggtctgggttcgctggcggcacgctatctgggccgatacgggcaatgggcaaccggcttttgcatgctgtttctgctttacgcactcacggcagcctatatcagcggcgccggcgaactgctggcctcaagcctcaatcagtggctggactggacgctgcctcctgcggcaggcgttctgatctttaccgctatcggtgggacggtcgtctgcatcgggacttcgctggtcgatctttttaaccgctttttattcagcgcaaagattattttcctcgccatcatgctcgcgcttctgctgccgcacattcaccagataaacctgctgactctgccgctacagcaggggctggcgctgtcggccattccggtgatttttacttcctttggttttcacggcagcatacccagtattgtgagctacctgggcggcgatattcgcaagctgcgccgggtatttatcatcggaagctttattcctctggtcgcctatattttctggcagctggcgacgctgggcagcattgactctcctacgtttaccgcgctgctggcgcagaatgccgggctcaatggcctgctggaggccatccgtgaagtggtggcatcgtcgcacgttgagctggcggtccatctgttcgccgacctggcgctggcgacatcatttctcggcgtggcgcttgggttgttcgactatctggccgatctgtttcaacgccagaacagcgccggtggacggctacagagcggtctgattacctttttgcctccgctggccttcgcgctattttatccgcgtggcttcgtgatggcgttaggctatgcgggcgttgcgcttgccgtgctcgcgctcatgctgccttcgctgctggtaatgaagagccgccaacagcaccctgatgccccgtggcgggtcgcaggcggttcagcggcgctgtggcttgtcctgctctgcgggatcgctatcgtagtgattcagtttgcgatagtcgcaggattactgccggcggtgggataa

SEQ ID NO: 256840 - DNA, 669 bp, Klebsiella pneumoniae
atgaaaactggacccctgaacgaaagcgaagtggaatggctggatgatatcctgtcgaaatacgcggtagaaggcaccatcatggatgttgctgaactggatggcctactgacggccatactctccgggccgaccgagattgagcccgcgcagtggctgattgctatctggggcggagcggataatgtgccgcgctgggccaacgatcgcgagcgagaccgtttcgtcaacctgacgctgcagcatatgagcgatattgccgagcgtttaaacgactatcccgatcagttcgaaccgatgttcggcagccgggaagaggaggggcaggagctcaccattgttgaggagtggtgctttggctatatgcgcggcgtgggattaagcgactggtcaggtctgcctgccgagctgcaggcagagctggacgccatcgctctgcacggtaccgaagagcgcttcgaggcgctggatgaactatccgcggaagagtttatcgccagcgttgagcgaattcgtcctgcggccctggcgctttacaactactggactgagcacgctcagcccgcacaagttcagcagcccatcaggaatgagagcaaggttgggcgcaacgatccttgcccgtgcggcagcggtaagaaatataagcagtgctgtttaacgaaataa

SEQ ID NO: 256841 - DNA, 888 bp, Klebsiella pneumoniae
atgttcactggcctctgcgcttttcctctgactccgttacatccacatggcgttgatgaaacggcatttgcccgaattgtcactcgtctcgtcgaatctggggtcgattccctcggcgtacttggctccaccggaagctatgcctggcttagccgtgagcagagaatgcaggtggtgcgccaggcaaaatcgcatgccggacccattccattgatggtcggcataggggcgctggggaccgatcaggttctccgtctggctgaagacgcgcagatggcaggcgccggcgcgctgcttctgccagtaatggcttatcaacccctgacagacgaggagattttgactttttaccagaccgtcacccaacaggtctccgtccccgtctgcgtttacgacaatcccgttaccacgcatgtgacgacttcggatgaacttaaaggcgcgatcgccgcgttacccgggatcgcctcaattaaaatccccggccccgcgaaaaatgaaaccgtccgccggattcagagcctgcggcgccagctaccggcaggggtgagtattggcattagcggggacgcctgcgcggccgatggcctgaatgccggctgcgaagtctggtactcggtgtgcggcggccttttcccgcaggtcgccaaagagataaccgcggcggcagcgcgaggggacgctgagcaggcgacggcaatcagcgccaggctcgcgccgctgtggatgttattcagtaaatatggtggcagcctgcgagtgaccgccgcagcggcaagtatactcgggctgtgcggggaggattgcttaccgcgaccgcagctcccgctttcgtcggatgcctttagcgaaattgcggaaacacttcgcacgctgaagctcctgtag

SEQ ID NO: 256842 - DNA, 504 bp, Klebsiella pneumoniae
atggtaacgccgttacagttagcgcgagtctacgcaacgatcggcagctacggcatctatcgcccgctgtcgattaccaaagttgatccaccggttccgggcgagcgcgtcttcccggaatcactcgttcgtaccgttgttcacatgatggaaagcgtggcgttgcccggcggcggcggcgtgaaggcggcgatcaaaggctatcgcatcgccattaaaaccggtacggcgaaaaaagtagggccggatggccgctatatcaacaaatatattgcttacaccgcaggcgttgcgcccgccagccatccgcgctttgcgctggtggtggtgatcaacgatccgcaggcgggcaaatactacggcggcgccgtttccgcgccggtcttcggtgccatcatgggcggcgtgctgcgtaccatgaacattgaaccggatgcgctggcaacggctgaaaaaagtgaattagtgattaatcaaggcgagggaacaggtggcagatcgtaa

SEQ ID NO: 256843 - DNA, 1488 bp, Klebsiella pneumoniae
gtggcagatcgtaatttgcgcgaccttctcgctccgtgggtgccaaatgcgccggagcgaattctgcgagaaatgacgctggacagccgggtggctgcttctggcgatctttttgtcgcggttttaggtcatcaggcggacgggcgtcgttatatcccgcaggcgatagcgcaaggtgttgctgccattattgctgaggccaaagatgaggcccatgacggcgagatccgtgaaatgcacggggtgccggttatctatctcagccaactcaacgagcgcttatccgcgctggccgggcgtttttaccatcagccttcagaacaactgcgcctggtgggcgtcaccggaactaacggtaagaccaccacgacgcaactgctggcgcaatgggcgcagctgcttggcgaaaccagtgcggtaatgggaaccgtaggcaatggcctgctggggaaagttatcccaacggaaaacaccaccggttcggctgttgacgttcagcacgtcctttctggcctggcagggcagggggcaacgttcgccgcgatggaagtttcctctcacggcctggtgcagcaccgcgtcgccgcgctgcagtttgccgcgtcggtcttcaccaacctgagccgcgatcaccttgattaccacggtgatatggagcattacgaagcggcaaaatggctgctctactcaactcaccattgcggtcaggcgattgttaatgcggacgatgaagtcggtcgccgctggctggcgaaactgccggatgcggttgccgtatcgatggaagatcacattaacccgaactgccgtggccgctggctcaaagccactgcggtgaactatcacgacagcggtgcaaccgttcagtttgcttccagctggggtaacggcgagatagaaagccgcttgatgggcgcctttaatgtcagcaatctgttgctggcgttagccaccctgctggcgctgggttatccgcttgccgatctgctgaaaaccgccgcgcgcctgcagccggtatgcgggcgtatggaagtgttcgccgcgccgggtaaaccgaccgtggtcgttgattatgcccacacgcccgatgcgctggaaaaggcgctgcaggcagcgcgtttgcactgcagcggtaagctgtggtgcgtattcggctgcggcggggatcgcgacaaaggcaagcgtccgctaatgggcgctatcgccgaagagtttgccgatattgtggttgtcaccgacgacaacccgcgaactgaagagccgcgggcgattattaacgatattctggccggcatgctggacgcgggccatgccagagcggtggaggggcgtgcggaagcggtgacgaatgcagtgatgcaggcgaaagaaaacgacgtcgttctggtggcgggcaaaggccacgaggactatcaaatcgtcggcaatcgccggctcgattattctgaccgcgtcaccgtggcgcgtttgctggggacggtagcatga

SEQ ID NO: 256844 - DNA, 1359 bp, Klebsiella pneumoniae
atgattcgcttgactctcagccagctcgccgacatcacgcgcggtgagctgcacggccgcgatgtggcgattgatgacgtcacttccgatacccgtaaagtcacggcgggctgcctgttcgtggcgctaaaaggcgagcgttttgatgctcacgattttgccgaacaggcgaaagctgccggcgcgggcgcgctgctggtcagtcgtcagctgacctgcgatttaccgcaggtggtggtgaaggatacgcgcctcgcgttcggcgaactggccgcatgggtgcgtcagcaggttccggcgcgcgtagtcgcgctgaccggatcttccggaaaaacctcggtcaaagagatgaccgcggcgattctgagccagtgcgggaatacgctctataccgcaggtaacctgaacaatgatatcggcgtgccgatgacgctgctgcgcctcacccaggaacatgactacgcggtcatcgagttaggcgctaatcatcagggcgaaattgcctggaccgttagcctgacccgccccgaagccgcgttagtgaataacctggccgctgcccacctggaaggttttggctctctggaaggcgtggcgaaagctaaaggcgaaatttacaccggcctgccgctcaacggcatcgcgattatgaacgccgacaataatgactggctgaactggcaaagcgtaattggcgagcgtaaaacctggcgtttttcgccgaatgccgccaacagcgatttcacggcaaccaacgttcacgtgacgtcgcatgggactgaatttaccctgcaaaccccatcgggcagcgttgatgtcctgctaccgctcccggggcgccataacatcgctaatgcgctggccgcagcggcgctgtcaatggcggttggtgcgacgcatgaggcgatcaaagcgggcctgaaagatctgcaagcagtaccagggcgtttattcccgatccaactgaccgacagccagctcctgctggatgattcctataacgccaacgttggctcgctaaccgccgcggtacaggtgctgtctgagatgccgggctatcgggtactggtcgtcggcgatatggctgaactcggcgcggaaagccaggcgtgccatcgtcaggtgggcgaagcggcaaaagcggccgggctcgatcgcgtactgagcgtcggtacgctgagcgcagaaatcagcggcgccagcggagttggcgaacattttagcgagaaggccgcgctggtgactcgcctgcgcgagcttaccgcagaacataaaattatgaccattttagtgaaaggttcacgtagtgccgccatggaagtggtagtacgcgcattacaggagaacggaacatgttag

SEQ ID NO: 256845 - DNA, 939 bp, Klebsiella pneumoniae
atggtgaatcggcgccatgcggaaaatgcgctgaccgcgcagcttgaaggaaccgacctgcagaatcaccgagagcgtttccaccacaaatacgccacccataatcaccagcaggaattcctggcgcagcagcacggcgataatacccagcgcgccgccgagtgccagcgaacccacatcgcccataaagacctgtgccggataggtgttaaaccacaggaagcccagacccgcgccaacaatcgccgtacagacgatcaccagttcaccggcgtgacgcaaataagggatatgcaggtagttggcgaagttcatgttaccggtcgcccaggccaccagcgcgaagccggcggcaacgaatacggttggcataatcgccagcccatcgaggccgtcggtcaggttgaccgcattaccggtcccaacgataacaaaataggccagcaggacgtagaacaggcccagctgcggcatcacgtctttaaagaacggcactaccagctgagtcgccggcgtatctttacccgccatatacagcgcaaaggcaacgcccagcgcaatcaccgacatccagaagtacttccagcgagcaatcagacctttggtatctttacgcaccactttgcgatagtcatcgacaaagccgatgatgccgtagccgacgagaaccgtcagtacgcaccagacgtaggggttggatgggtaagcccacagcagaacggagacaacaatggcggtcaggatcatgatcccgcccatggttggcgtaccgcgcttactaaagtgagattccgggccatcgttacgtacaacctggccaaaggagagtttttgcagacgggcgatcatgcgcgggcccatccacagcgagatgaacagcgcggtcagcaggctgacaatggcgcgaaacgtcaggtaggaaaagacgttaaagcctga

SEQ ID NO: 256846 - DNA, 471 bp, Klebsiella pneumoniae; identical to SEQ ID NO: 176947

SEQ ID NO: 256847 - DNA, 939 bp, Klebsiella pneumoniae
atgaaagttgcagtcctcggcgccgctggtggaattggccaggcgcttgccctactacttaagacccaactgccttcaggttcagaactctcgttgtacgacatcgctccggtaactccgggcgtggcggttgatcttagccatatccctaccgatgtaaaaatcaaaggtttttccggcgaagacgccacccctgcactcgaaggcgcggatgtggtgctgatatccgcgggcgtagcgcgtaagcccggtatggatcgctccgatttatttaacgttaacgccggtattgtgaaaaatctggttcagcaaattgctaaaacctgcccgcaggcctgcgtcgggattatcaccaacccggtgaataccaccgtggcgattgccgcagaagtgctgaaaaaagccggcgtttacgacaagaacaagctgtttggcgtaaccacgctggatattatccgctcgaatacctttgtggcggaactgaaaggcaaatcttcatccgatgttgaggttccggtaatcggcggccactcaggcgtaactattcttcctttattatcacaaattccaggcgtgagcttcagcgagcaggaagtggcggatctgactaaacgtattcaaaacgccggtactgaagtcgttgaagccaaagctggcggcggctcagcaaccctgtcgatgggtcaggccgcagcccgatttggtctctctttagttcgcgccatgcagggagagaaaggggtggtggaatgcgcctacgtggaaggtgatggtcaatatgcccgtttcttctctcagccgctactgctggggaaaaatggcgtagagcagcgtcagcctattggcaaactcagtgcgtttgagcaacaggcgcttgaagggatgctggatacgttgcagaaagatatcgcccttggcgaagattttgtgaataaataa

SEQ ID NO: 256848 - DNA, 645 bp, Klebsiella pneumoniae
gtgaaaaaaattgaaagaaagcagaccagggaccacattactcagatgatccgttatgagatcctttccggtgggatgaaacccggagaggagcttgcgcaggaaagtattgcggaacagctggggctctctcgtatgccggttcgggaagcgctacaggcccttgagcaggaagggtttctggtgcgcttgccaaaccgccatatgcaggtcgcgaaactggagcctgaccatgtcagccacatttttcgggcaattgcggtgatggccacggagctttttttattggtgcccgcggcggcaggcgaatcgctccctgcgcgcgcgcgcgcgctggcgcatccgggtgagcggtcgcgggagttggcgttccaccagacgctaatttcatatattgataaccgctatctgcaaaagatttatcagcagtttttggatggctatatcagctatgtcattctgtatctgaaagaggataatcaggagtcggcgcagatactcagctctctgatggacgctatccgtcggggcgatggtgatgagatcgcgcaggaaacgcagcgttatttcctctctctggcagaaataatgcgtcaacacatgaaggattgggaaagtgcagaagcctcgattagggaaaattaa

SEQ ID NO: 256849 - DNA, 666 bp, Klebsiella pneumoniae
gtgcagaagcctcgattagggaaaattaagcttctttcagcgaaagagcaggtcgcggcagtattacgtaaagctatactgtcgcgcgatttagttgaagggcaagaaattacccttgaagggatcgccagcatggtcggcgtctccagtatgcccgtgcgtgaagcatttcagatcctggccgcggatgggctgattaaagtccggcccaataaaggggcggtcgtgctggggattaacgaacaaacgattcgcgagcattatgagattcgcgcgctgctggagagtgaagcggtcgctaaagcctctcgttccgggacggacatttcgcgaattgccgaagtgcactactcggcagaaaaagcgctggccgaaaataactcggctgaatattccgacatgaatcaggcctttcatatggagatatggaatgcggccggaaatgctaaaatgaagctcttgctcagcaatatgtggaacgggctgtcgatgggacataaggtcactgaggaagagtacgcttccatttcgatacgcgagcacaagggcattttacaggccctggagcagcatgatgaagagctggcgcgcctgcgaatgcgggaacatattatccgttcgatggagaatatgctgacgcgctacgttgacgatcccggcgcttga

SEQ ID NO: 256850 - DNA, 222 bp, Klebsiella pneumoniae; identical to SEQ ID NO: 203149

SEQ ID NO: 256851 - DNA, 261 bp, Klebsiella pneumoniae; identical to SEQ ID NO: 203148

SEQ ID NO: 256852 - DNA, 279 bp, Klebsiella pneumoniae
atgacgcaaatcaaagccattcttgcatttctctctgctgcatttcttctgctcatgggtgtatttggtttaggcagaatgagcggtcgtgaaaaagccgaaacggaatctgagaagaaacgaacagaagagaatgcggccgccagcgtcgctgcggcagaacggaaagaggaagccaccagaggggcgagcgatgtacagcagactgttagccatatgcctgatgacgatgttgatcgcgagctgcgcgaaaagtttacccgccccggtggtcgttga

SEQ ID NO: 256853 - DNA, 543 bp, Klebsiella pneumoniae
atgactaaagacgatattttcaacagcatcctcggtaaagaggggggctatgttaacaatccaaatgacaagggcggcccaaccaactgggggataactcaggccgttgcccgggcccatggttattccggtgatatgcgtgatctgacgcgtcagcaggctctggatatcctggccgctgattactggtatgggccgcgctttgaccaggttgcaacagtttctccatcaattgcggcggagttgtgcgataccggcgtaaatatggggccttcagttcaggtgaaatggttccagcgctggctgaacgttttcaacaatcaacagaaactttatccagatcttattgcggacggcctgattggtccccgtagcatcaatgctttgaaatcttatctgaatacccgcggtaaggaaggtgaagaagtgctgctacgcgctcttaattgcagccagggccataggtatcttgaactggctgaacagcgcccggctaatgagtcgtttgtttatggctgggttaaagaacgagtgaaactatga

SEQ ID NO: 256854 - DNA, 279 bp, Klebsiella pneumoniae
gtggtaaataatccggcagctctggtgaatgctgtgatttgtgcggtaattgtgctgatcctgatgttctatcggcgtgatggcgcgcggcatcgcccgggaatttcgatcatcgcttatctcatggtgctggtgtatgccagcattccatttcgtttcctgttcggcctttatgagtcagcgaactggctggtggtgctggggaacatgcttatttgcggagctgttctttggtttagaggaaatgtggcgcgcatgatcgatgcactgaggcattaa

SEQ ID NO: 256855 - DNA, 390 bp, Klebsiella pneumoniae
atgtccgaacctgtttccggtactgccatatcgaccgccgggctgatgggagccagtatttttggcatggtaaccggaattgattatggcgttgtgttcggtgcttttgctggtgccgttttttacgttgcgaccgcggcagatattacccgcatgcgtctggcagcatatttcgttacgtcatttattgttggcgtgcttggcgcaggtttgcttggggcaaagttagcggtgtggaccgggtaccgagaacgcccgcttgatgcgttgggtgcggtcattatttctgcgttgattattaaggtgctgacttttctgaatagccaggacctgaatagcttgttcagtatgctgacccggctacggggaggaggctccagtggtaaataa

SEQ ID NO: 256856 - DNA, 183 bp, Klebsiella pneumoniae
atgaaatcgactgacctgataaaggaattgatagccgccggatgtgaactcaaaaggcaagggaaaggcagtcaccagatatggtggtcgccgataacgggaaaaacattcccggttccacaccctaagggcaacctaccgatcggcaccatcaaatccatcaagaaaacggcggggatttaa

SEQ ID NO: 256857 - DNA, 432 bp, Klebsiella pneumoniae
atgttcttttcagtgggcgttgagacgccaaaagatgaaaacaccgcctacggtatgattgttcctgcgttttcagcttatgagatgggttgcttctccgccgctgatacacaggaccagatcgcgccaatggttaaagaagccattctcttaagcgttgagtgcctggtcgaagatgcagggcgcagcgtcgatgaaatcaaagacgccggctatatggtgtatgcagctaacccagaatataaggactttgacagctggttcatggttgaagttgatttgtctgagttcgaaggcaagccacaacgtatcaatatttcactgcctgatacgcttattaagcgcatcgataatgctgtaaagggtaacgccagctatcgagacagaagccattttctggctgaagctgcccgacacgaactgaagcagtga

SEQ ID NO: 256858 - DNA, 327 bp, Klebsiella pneumoniae
atggccaaatggcggattgccgatatcgtgcatcaggcaggccatttcaacaatgctctcaaacggcccggtgagctcatccagcccgtagcgttcgagcagcttctgctctttcagccggctcagcacctctttagcgatatagcggcccacctgctgaacttccagggagtgggtcaaccgcgtacgcaccgcagcgttgcgctccagcgggaaaacctgagttttttgctgcagccggcggatcgctggcgagttaatgatgcgcccgcgatcgctttcgaaaattcgcaggatttctcgctccgtctcaacgccctgcggtga

SEQ ID NO: 256859 - DNA, 699 bp, Klebsiella pneumoniae
atgaaaatcggcattattggcgcaatggaagaggaagttacccttctgcgcgacaaaatcgacaaccgccagactatcactatcggcggcagcgaaatctacaccggccagcttcagggtattgacgtcgctctgttgaaatcgggtatcggcaaagttgccgccgccatgggcgcgactctgttgatggaacactgtaagccggatgtgattatcaacaccggttctgcgggcggtctggcatcaacactgaaggtcggcgacatcgtcgtttccgacgaaacgcgctatcacgatgcggacgttaccgcgtttggctatgagtatggtcagttgccgggctgtccggccggtttcaaagccgatgagaagctgattgccgccgcagagacctgcatcaaagcgctcaaccttaacgcggtacgcgggctcatcgtcagcggcgatgctttcatcaatggttccattggtctcgcaaaaatccgtcacaacttcccgcaggctgtcgcggttgaaatggaagccacggccatcgcgcacgtctgccacaactatggcgtaccttttgtagtcgttcgcgccatctccgatgttgccgatcagcagtcgcatctcagcttcgacgagtttctcgccgttgccgcgaaacaatccaccctgatggtggaaaacctggtgcagcacctggcccgtggctaa

SEQ ID NO: 256860 - DNA, 801 bp, Klebsiella pneumoniae
gtggctaagtcgtttataacggcgcttaccgccctgctgctgctggccccggtgtggcttttcgccgcgccgcgggtggtgacgctctctcccgccaatacagaactggcgtttgccgccggcattacgccagttggcgtcagcagttattccgattatccccctgaagccgcaaagatagagcaggtctccagctggcaggggatgaatctggaacgtatcgtcgccctcaagcccgacctggtgctggcctggcgcggcggtaacgctgagcggcaggtcaatcagctaagctcgctcgggataaaagtcatctgggtcgaaacgtcgaccattgaagacattatcgcgacgcttcgccagctggcgcagtggagcccgcagccggaaaaggcgcagcaggcggcgcagaatatgcaaagtgagtaccagaagctgaaagcccgctatgccaacgtgccgaaaaaacgcgtttttttacagttcggcgccaaccctctctttacgaccagcaaaggctcgattcaggatcaggttctgacgctgtgcgggggagaaaacatttttgccgccagccgggttccctggccgcaggttagccgtgaaaaggtgctggcaaggcagccgcaggctatcgttatcgccggcgatgccagtaaacttcccgccgttgagcgctattggcagaatcagctaaaaatttcttttattgcgctacatggcgactggtttgaacgcgcgagcccacgtattatcctcgccgcaaaacaactctgtactgcgctcgaacaggtaaaataa

SEQ ID NO: 256861 - DNA, 624 bp, Klebsiella pneumoniae
atgcttgtctattggctggatattattggcaccgccgtgtttgccatctctggcgtcctgctggctggaaagctgcgcatggaccctttcggcgtgctggtattaggcgtggtgaccgcagtgggcggcggaaccattcgtgatatggcccttgctaacggcccggtattttgggttaaagatcctaccgatctggtagtggcgatggtcaccagcatgctgactatcctgctggtgcgccagccgcgtcggttaccgaaatgggtgttgccggtactggacgccgtcggcctggcagtatttgtcgggatcggcgtcaacaaagccttccttgctcatagcggaccgctggtggccatctgcatgggcgtcgtcaccggcgtcggcggagggattattcgcgacgtgctggcgcgcgaaatcccgatgattctgcgtacggaaatctacgcgaccgcctgcatcgttggcggtatcgtacacgcaacggcgcactacactttccaggttccgttagaaaacgcggcgatgtcagggatggtggttacgctggtgattcggctggcggccattcgctggcacctgaagctgccaacgtttgcgcttgatgagaatggacggtaa

SEQ ID NO: 256862 - DNA, 345 bp, Klebsiella pneumoniae
atgagtgatgacgtagcgttgccgctggagtttaccgaagccgcagcgattaaagtaaaagacctgattgcggatgaagacaatccgaacctgaaactgcgcgtgtacatcaccggcggtggctgcagcggtttccagtacggcttcacctttgacgatcaggttaacgaaggcgatatgactatcgagaagcagggcgtcggcctggtggttgacccaatgagtctgcagtatctggtcggcggcgccgtcgattataccgagggactggaaggttcgcgttttatcgtgaccaacccgaatgcgaaaagcacctgcggctgcggctcctcattcagcgtctaa

SEQ ID NO: 256863 - DNA, 810 bp, Klebsiella pneumoniae
atgcgcccgcagtttcgctacaacctgatctccattaaagccgtgtttaccggcgtgattatggcaaccatcgttttccgtatcttcaatggcgataaagcggtcatcgaggtcggtaagctcagcaatgcgccggtcaacacgctgtggctgtatttgatccttgggatgatttttggctgcgtgggtccgttgtttaatacgctggtgctgcgtacccaggatatgttccagcggattcacggcggcaacatcaagaaatgggtgctgattggcggtctgatcggcggtagctgcggcgtgctgggactgattcagccggcagcgtccggcggcggatttaacctgatccccatcgccgcggcgggcaatttttccgttggcctgctgctgtttatttttatcgcgagggtgattaccacgctgctctgcttctcttccggcgcgccgggcggaatttttgccccgatgctggcgctggggacgctgctgggtacggcgtttggtatggcggcgatgccgctgtttccggcgtatcatctggatgcgggaacctttgccattgccggtatgggggcgctgcttgccgcctcagtccgcgcgccgttgaccggtatcgtgctggtgctggagatgaccgataattatcagctcattttgccaatgattattacctgcctcggcgcaacactattggcacaattcctcggcggtaagcctttatactcgactattctgcagcgtactctcgcaaaacaaaaagcggaacaggaagccagggcgcagcctgtcagcggggagaatacttga

SEQ ID NO: 256864 - DNA, 441 bp, Klebsiella pneumoniae
atgcacgctgatgttggcgcgcatcgccgtacgtccgctgtagcggtgcggttcacgagccagcttctgaccgcgaatgcggaaggtcgcatccggcgcggcgtctttgatcgcggccagctgcggcagggcggcaatggcggcgtcaatcacgtggtccagctgcgtccagtcaacctgacgattgttcactgtgctgtgcaacgagtgcagccagcgccagctttccagcatcacggttttcgcatcgtaataggccgggtcgtaaacctggaagaagcgctgggcgcgaccttcgttgttgaccacggtgccatcgctttccgcaaagcttgccgcggagagcaccagatgcgctttttccataatcgccgttcgctgatggtcaaccaccagcaccagcggcgctttcgccagcgccgcatctacgcgggcggctga

SEQ ID NO: 256865 - DNA, 366 bp, Klebsiella pneumoniae
atgcttcgcacgctggccgatgttaaggatcgcggcgatctgccagtcggcgaccttctgcgccgccgccatttcgcgcgctttgcctttcaccgcctgacgcaccgccagcgcgatacgcgcgccggtctgggtaatatcttcaccgaggatcagcaccgcatcgtaagattcgatctcgcgcagcgccggggtatgaataccgccttcgcgcagcactttcagcatcatctgcaggcgttcctgttcgcccttcgcgatgccggtatagaagttgtcggcgccgaccagctcacgcagcgcaaagttgctttcaatgctggcgcgcggggagccgataccaatcactttcttcgactggcgtag

SEQ ID NO: 256866 - DNA, 1338 bp, Klebsiella pneumoniae
atgaaaaccattattcgtactgccgaaacccatccgctgacctggcggctgcgcgacgacaagcagccggtatggctggatgaataccagagcaaaaatggctacgccggggcgcgtaaagcgctctccgggatggcgccggatgaaatcgtcacggcggtaaaagacgctggcctgaaagggcgcggcggcgcgggcttttccaccggtttgaagtggagcctgatgccgaaagacgaatccatgaacatccgttatctgctgtgtaacgccgatgaaatggagccgggtacctataaagaccgcctgctgatggagcagctgccgcacctgctggtggagggtatgctgatctccgcttttgcgctgaaagcttaccgcggctacatcttcctgcgcggagaatatgttgaagcggctcagcatctgcgccgggcgattgccgaagcgaccgaagcgggcctgctcggcaaaaacatactcggcaccggttttgacttcgagctgttcgtccataccggggcagggcgctatatttgcggcgaagaaaccgcgttgattaactctctcgaaggccgccgcgcgaacccgcgctcgaagccgccgttcccggccagctccggcgtatggggcaaaccgacctgcgttaacaacgttgaaaccctgtgcaacgtgccggcgattctggctaacggcgttgagtggtatcagaacatttccaccagtaaagatgccggcaccaagctgatgggcttctccgggcgggtgaaaaatccgggcgtctgggagctgccgttcggcaccaccgcgcgcgagatcctcgaagattacgccggcggcatgcgcgatggcctgaagttcaaggcctggcagccgggcggcgcgggtaccgacttcctgactgaagcgcatcttgacctgccgatggagttcgaaagcatcggtaaagcgggaagccgcctggggacatcgctggcgatggccgttgaccacgagatcaacatggtatcgctggtgcgcaacctcgaagagtttttcgcccgcgagtcctgcggctggtgcacgccttgccgggacggtctgccgtggagcgtgaaaattctgcgcgctctcgagcgcggcgaagggcagccgggggatatcgaaacgcttgagcaactgtgtcgattcctcggaccgggtaaaaccttctgcgcgcacgcgccgggtgcggttgagccgctacagagcgcgattaaatatttccgcgaagaattcgaagctggcattaaacagcagttcagcaatacccatgcaatcaacgggattcagccgaacctgcttaagacgcgctggtaa

SEQ ID NO: 256867 - DNA, 321 bp, Klebsiella pneumoniae
gtgctggggatcccggccagcgacgtagaaggcgtggcgacgttctatagccagattttccgccagccggtagggcgtcacgtcattcgctactgcgatagcgtggtgtgccatattaccgggttccagggcattcagtcggcgatcgagaagaagctggatatcaaaccgggtcaaacgacctttgatggccgcttcactctgctgccgacctgctgtctgggcaactgcgacaaggggccgacgatgatgattgatgaggacactcacagttatctgacgccggaagcgattcctgacctcctggagcggtataaatga

SEQ ID NO: 256868 - DNA, 639 bp, Klebsiella pneumoniae
atgcgcccggcccgcggctgcggactgaagggatcgctattgatgccgcatacccctaccagctggtggttgacgaaggcgcccagcagcgtttcgcccggcgcgttaaagcggtttttgccgctctgccagttttccgccaggcggcgcagcatattgaaatgctgttcaaggctttcaattcgtagcgccgcgaaccccggggcatccggcgtcgtggcggcaattaacaggggtggcatagcatcctccatcaagtcataccgggacgcccggcgggcgcctgcaggggggcggtttcccgcccccctcaggtgcgacttgaacctgaatcagcggaactgtttcaggactgcatcaagtagttgcaacacagcaaccatgagtttcaggatcaaaataataatatccattccgcccatacgcgcgtctcctgtggttaaggagcacaataagctgacgtacctttccgctgcccgttgccagcttatccctgcctgtcgccggcggcgtctgccctggccgatagttcgtcctttccatgaacggcttcccggcccgccgcctgcaacgacaggggtgcgcagcgctgagccacgcgttgccgcgcgggccagtgactgcacgttgttgacgtaa

SEQ ID NO: 256869 - DNA, 570 bp, Klebsiella pneumoniae
gtggtcggtcacgcggccctgcgggaagttataggtgcgattgcggtcgctgcggtcgccgctgcccagcaggttgcggcgcgtggaggcttccgcctgctgacgtttggccacttcggcggcgcggatgcgcgcgcccagcaccgacagcgccttggctttgtttttatgctgagaacgctcgtcctggcactccaccacgatgccggtgggcaggtgggtaatgcggatagccgagtcggtggtgttaacgtgctgaccgcctgccccggaggaacggaaggtatcgatgcgcagatccgccgggttaatgtccggcatttcggcttccggcagctccggcatcaccgccaccgtacaggcggaggtgtggatccgcccctgcgattcggtggccggcacacgctgcacgcgatggccgccggattcaaatttcagccgaccgtaaacgccgtcgccgctgatcttggcgatcacctctttaaagccgccgtgctcaccttcgttggcgctgaggatctctacctgccagcggcgcgattctgcgtaacgggtgtacatgcggaatag

SEQ ID NO: 256870 - DNA, 306 bp, Klebsiella pneumoniae
ttgctccagctggtcgcctttttctttggcgtcacgcagctcttcctgcgccatttcgcgcatttccggatcgtcgagcatcatctgcgcggtttcaatatcctcctgcacctgacgccagtcggtatagcagcgcgccacatcgctcagttgagcatactcccgcgacagcgcgcggaatttatcctgatcggcaatcgtcgcggcatcgccgagcagcgcctgcacttcttcatggcgctcgtacaacgcttccagtttggcaacaatagaagacttcataggcgtgaattcaccctgtcctga

SEQ ID NO: 256871 - DNA, 852 bp, Klebsiella pneumoniae
atgatgacccgctggccctctcctgcaaaactgaatctgtttttatatatcaccggccagcgggccgatggttaccataccctgcaaacgctgtttcagtttctcgattacggcgatacgttgaccatcgaaccgcgtactgacggccaactgcgcctgctgacgccggtggccggcgtgccggacgaggagaatctgatcgttcgcgccgcgcgtctgctgatgcatgccgccagcgaaagcgatcgcctgccggcgggcagcggcgccgatatcagtatcgataagcgcctgccgatgggcggcggcctgggcggtggctcctccaatgctgccaccgtgctggtggcgctcaaccatctgtggggctgcggtctctcggaagatgagctggcgactcttggccttcagctgggggccgatgtgccggttttcgtgcgcggccatgccgccttcgccgagggggtgggtgaaatactgacgccggtagaacccgaggaaaaatggtacctggtggcccacccgggggtcagtattccgacgccgatcatttttcgcgatcctgagctaccacgaaataccccgcgccggtcaattaatacgttattaaattgtgaattcagcaacgattgcgagcttatcgcaagaaaacgttttcgcgaggttgatgccgcgctttcctggctgttagaatatgcgccgtcacgcctgaccggcacaggagcctgtgtgtttgctgaatttaacaccgaatccgctgcccgtcaggtgctggacactgccccggcatggctaaatggctttgtggcgcgcggagttaacctttcgccgctcaagcaggccctgctctga

SEQ ID NO: 256872 - DNA, 1398 bp, Klebsiella pneumoniae
atgcaaactgaaccgcacgtagtgattgtcggcggcggatttagcggcgcggcggtggcgattcatctcctgcgcctggcgccggttggcgtgcgggtcacgctgctggagccgcgcgaggtgcccggcgcgggcgtggcctactccacgaccgaaccgagccacagaatcaacgttcccgccgcgcgaatgcagcttgccggtgaagaggagggcgcgttcgatcgctggtaccgcagccagcctgcttttgcagaagatccgcaggcgctgctggaggatggcgcagtttatccgcagcgcggtcagtttggccgctacgtcgcccagcgtttcgccgaggaggcgcgcgccagcgcagggcggctgacgcatctgcgcgaacaggcgctgagcattcatcatggcgaggtcgttaccgacagcggtcggcggctatcggccgatctactggtgctggccattagccatccgcccccctctctgccgacgctgacgatgccgtttgcgactcatccggcgctcattgctaatccctggcgagcgggcgtgctggaagctatcgcaccggaagcgagcgtcgcgatcgtgggcaccggcctgacgatggcggataccgttgccaccctgacgcggctgggccatcgggggccgataaccgcattttcacgccgcgggctgctgtcccgcagcaacctgagcggcagcggtgacccctggccaggcgaatacgatcgcggatcgctgcgccagcggctgcggcagatccgcgaggatatcgctcgcgcggagcagcaggggctggcctggcaggtggtgatggacgcggtacgtaatcagggacaacgcatctggcaggggctgacggtcgccgatcgccagcgcttcttgcgtcatttgcgcagctactgggacgttcaccgctaccgtatcgctccgcaggtcgccggggttattgagcagcgccagcgcgacggcagcctgcgggtgctggcggcccggctgacggcgctggaaggcgatgcgcaaaggctgacgttaaccctggcgctccggtacggtgaagtacagcgggtgagcgctgaccacgttattttaaccaccggcccggcgcacggggcgctgaccgatagccagccgctgctgcgccagctaagccaggatgggctgattcgcgccgacgcgttcggcctcggcctggacgtcgatcttcgctcgcgggccattggccgggaagggcaagctaatcccaaactactggtttccggccctgccgcgcgggcccgcttcggagagctgatggggctaccgcaggtggctgaccatgccgctgacgtggccgccgaagcgctgcagactctgggcgtcaaacaatccgtccgatgtccggcgttctga

SEQ ID NO: 256873 - DNA, 1407 bp, Klebsiella pneumoniae
atgtcatcacaacgtgaaattcgtctgaacgcttttgatatgaactgcgtcggccatcagtcgccggggctgtgggcccatccgcgcgaccgctcctggcaatataaagacctcgaatattgggtcgacctggcgcgtctgctggagcgcggaaagtttgacgggctgtttatcgccgatgtgctgggcgtctatgatgtgctgaacggcaacggcgatgcggcgatccgccaggcggcgcaggtgccggtcaacgatccgctggcgctgattacgccgatggcgctggtgacggagcatctgggattcggcctgaccgcttcgctctcctttgagcatccctatccgttcgcccgccgtctttcgaccctcgaccatctgacgaaggggcgggtgggctggaatatcgtgacttcctatctggagagcggggcgcggaacattgggcaaaaagcgcagaccgaccatgacgcccgctacgactacgccgatgaatacctggaggtggtctataagctgctggaaggcagctgggaagacggcgcggtgctgcgcgacagggagcgcaggatcttcagcgatccgcgaaaaattcatccgatcaaccatcaggggaacttcttctcggtaccggggatccacctttgtgagccgtcgccgcagcgtacgccggtgctctatcaggcgggcgcctccagccgcggcaagcagttcgccgccggccacgcggagtgcgtatttgtcggcgcgccgtcgaaggtactgctgaaaaagacggtggcggatattcgccgtcgcgccgaggaagccgggcgcgatccgcgcagcattctgatcttcaatatgcagacggtcatcgtcggcgaaaccgaccgtgaagcccaggctaaatggcaggagtataaaccgtacgtcagctacgaaggggcgctggcgctgctctccggctggaccggtatcgaccttggccagtatcagccggaccaggtgctggagtatctgcataccaatgcgattcagtcgatggtggaggcgttttccactgccgatccgaacagccagtggaccgtgcagaagctggcggactgggcgggaattggcggcttcgggccgctggtggtcggcagtccacagacggtcgccgatgagctgcagtcctgggtcgaagagaccgacgtcgatgggtttaatctcgcctatgcggtgacacacgaaaccttccgcgacgtggtggatttactggtcccggagctgcaaaagcgcggcgtgtttaagcaggagtatcgcgaaggaaccctgcgcgagaagctgttcggcgccggcccgcggctggctgcgccgcatccgggtgcaggctatcgccacggcgcgcgggtggcggtcgggagcgaagagaaggtgagttaa

SEQ ID NO: 256874 - DNA, 300 bp, Klebsiella pneumoniae; identical to SEQ ID NO: 176156

SEQ ID NO: 256875 - DNA, 363 bp, Klebsiella pneumoniae; identical to SEQ ID NO: 176155

SEQ ID NO: 256876 - DNA, 339 bp, Klebsiella pneumoniae; identical to SEQ ID NO: 176154

SEQ ID NO: 256877 - DNA, 387 bp, Klebsiella pneumoniae; identical to SEQ ID NO: 176153

SEQ ID NO: 256878 - DNA, 1353 bp, Klebsiella pneumoniae
atggcattagcgatgaaagtcatctctcaagttgcacaacagcgtaagacgctggaagaggccgtgaccacggcgctggaactggcggcaggcaaatccgacggcgcggaagtctccgtcagcaaaaccaccggtatcggcgttagcacccgctacggcgaagtggagaacgtagaattcaatagcgatggtgcgctaggcatcaccgtttatcatcagaatcgtaaaggcagcgcctcttcgaccgaccttagcccgcaggccattgcccgcacggtgcaggcggcgctggatattgcccgctacacctcgccggacccgtgcgcgggcgtggcggataaagaactgctggcttttgatgccccggatctggacctgttccacccggcggatgtttccccggatgaagccattgagctggcctcccgcgcggaacaggcggcgctgaaagctgataaacgtatcagcaataccgaaggcggtagctttaacagccattacggcatcaaagtgtttggtaacagccacggcatgctgcagagctactgctcgactcgccattcgctctccagctgcgtgattgctgaagagaatggcgatatggagcgcgattacgcttacaccattggccgggcgattggcgatctgcaatcgccggagtgggttggcgaagagtgcgcccgccgcaccctgtcgcgcctggccccgcgtaagctatcgacgatgaaagcgccggtgattttcgccaatgaagtggctaccggtttgtttggtcatctggtcggggcgattgccggcggttcggtttaccgtaaatccaccttcctgcttgatgcgctgggaacccagatcctgccggactggctgaccatcgaagagcatccgcatctgctgaaggggctggcctctacgccgtttgatagcgaaggcgttcgtacggaacgccgcgatatcattaaagacggcatactaacccagtggctgttgaccaactactcggcgcgcaagctgggattgaagagcaccggccacgcgggcggcattcataactggcgtattaacggccgcggcctgagttttgcaaagttgcttaaagagatggggaccggtcttgtcgtcacggaactgatggggcagggtgtaagcggcgtcaccggcgactactcacgcggcgcatccggcttctgggtagaaaacggcgaaattcagtatccggtcagtgagataaccattgcaggaaatctgaaagatatgtggcgtaatatcgtgaccatcggcgacgatatcgaaacgcgcagcaacattcagtgcggttctgtactgctgccggagatgaagatcgccggtcaataa

SEQ ID NO: 256879 - DNA, 552 bp, Klebsiella pneumoniae
atgacaaagcagcccgaagactggctcgacgacgtccctggtgatgacgtcgaagatgaagacgatgaaattatctgggtcagtaaaagtgaaattaagcgcgacgccgaagaactgaagcgtcttggcgcggaaatggtcgagctgggtaaaaacgcgctcgataaaatcccgctggataccgacctgcgcgacgcgattgagctcgcacagcgtatcaagaaagaaggccgccgccgccagctgcagctgattggtaaaatgctgcgcagccgtgacgtcgagccgatccgtcaggcgctggacaagctgaagaaccgccacaaccagcaggttgcgctgttccataagcttgaacagatccgcgatcgtctgattgataatggtgatgacgccgttgcggaagtgctgaacctgtggcctgacgccgaccgtcagcagctgcgttcgcttatccgcaacgcgcaaaaagagaaagaaggtaataaaccgccgaaatccgcgcggcttatcttccagtatctgcgtgaactggccgaaaacgaaggctaa

SEQ ID NO: 256880 - DNA, 1029 bp, Klebsiella pneumoniae
atgagccactcacttaagccctggaataccttcggtcttgaccgttccgccagcgcgattgtacgcgccgaaactgaaaaacagctactggatgcctggcagaatgccgttgcaaagcgccagccagctctgatccttggtgaaggaagtaacgtcctgtttctgaaggattattccggcacggtgattatcaaccgtattatgggtatagaagtgagtgaaacacctgacgcctggcatttgcacgtgggcgcgggagaaaactggcatcagctggtacagtttgcgctaaataatggaatgcctggtctggaaaatctggccttaattcctggctgcgccggctcctcgccgattcaaaatattggggcttatggccttgaattaaaaaaggtttgccagtacgttgattgtattgagctggcgaccgggcagaagcaacgactcaccgctgctgagtgtcgctttggctatcgggatagcatttttaagcatgagtatcaggaccgctatgccatcgtagccgttggtttgatcttaccaaaggcatggcagcccgttttgacctatggcgatttaacccggctggatccgcaaaccgtcactccccaacaggtatttgatgccgtatgccatatgcgcatgaccaaacttcccgatccaaaagtgaatggaaatgcgggaagcttctttaagaacccggttgttagctcggagaaggctaatgcgctactgaccgcctatccaaacatccctcactatccacagcccgatggcagcatgaagcttgccgccggctggcttatcgatcaatgccagcttaaaggaaaagtgattggcggtgcagcggtacacagccagcaggcactggtattaatcaatgataatcaagcaaccagtgaggatgtggttaagctggcacactatgtacgtcagcaggttggtgaaaagtttgatatctggctgcaaccagaagtgcgctttattggcgaaacgggcgaagtgaatgccgaggagactatcgcatga

SEQ ID NO: 256881 - DNA, 963 bp, Klebsiella pneumoniae
atgaaagactataccgtccctctgacgctgatatccatattagctgacgctgaattccattcaggtgaacaacttggtgagcgtttagggatgagccgcgccgcaatcaacaaacacattcaaacgttacgcgactggggaattgacgtcttcaccgttccgggtaaaggctacagtttacctgagcccattcagcttctggatgaagagcagatcgccaggcagattgaacacgggcgggtcaccgtgctaccggttattgattccaccaaccagtatcttatggaccgactcggtgagctgcaatccggtgatgcctgcgtggctgaatatcagcaggccggtcgcggccgccgcgggcgtaagtggttctcgccgtttggttctaatctttatctatcaatgtactggcgactggagcagggccctgccgccgccattggtttgagcctggtcatcgggatcgtgattgccgaagtgctgcaaagcctgggggcggataaagtacgggtaaaatggccgaacgacctctatttacaggaccggaaactgtccgggatcctggtcgagctgacggggaaaaccggcgacgcagcgcatatcgttagcggcgcagggattaatttaatgatgcgccgcgttgagtctgacgttgtcaatcagggctggatcagcctgcaggaagcggggatgacaatcgatcgtaatacgttagcagcttgtctaattaaagagctgcgggcggggtttaaactttttgagaacgaaggcttagcaccctatctgacccgctgggaaaagctggataactttattaatcgcccggttaaacttattattggcgataaagaagtcgtgggtatctctcgaggcattgatgctcaaggtgcattattactggagcaagatggggtaataaaaccctggattggcggtgagatatcattgcgaagcgcggaataa

SEQ ID NO: 256882 - DNA, 951 bp, Klebsiella pneumoniae
atgagcctaaaagagcaaacgttaatgacaccgtatctacaatttaaccgcgaccaatgggctgcacttcgtgattccgttccgatgacgctaacagaagaagaaatcacgcggttaaaaggcatcaacgaagatctttccctggaagaagtagcagaaatttatttgccgctgtcgcgtttactcaatttctatatcagctccaatttgcgccgacaggctgtactggaacaattcctgggcaccaacgggcaacgcattccgtacatcattagcattgcgggtagcgtggccgtcgggaaaagcaccaccgcgcgcgtactccaggctttacttagccgctggcctgaacatcgtcacgtagaattgattactacggatggttttctgcatcctaacgccgtactgaaagagcgcggcctgatgaagaaaaaaggcttcccacagtcttatgatatgcaccgcctggttaaattcgtctccgacctgaaatccggggttcctgacgccaccgcgccggtctattctcatctgatttatgacgtcattcctgatggggataaaaccgttactcagcctgatatattaattcttgaaggattaaatgttctgcagagcgggatggattatcctcacgatccgcaccatgtatttgtttcggactttgtggatttttcaatttatgtcgatgcgccagaagaactgcttaagacctggtatatcaaccgttttttgaaattccgcgaaggcgcatttaccgacccggactcctattttcatagctatgctcagctgtctaaagatgaagcaattaatgttgccacatcgctctggaatgagattaatcttctgaatttaaaagaaaacatcctaccgacacgcgagcgagcaagccttataatgaccaaaagcgcaaaccactcagttaatcaggtgcgtttaaggaaataa

SEQ ID NO: 256883 - DNA, 774 bp, Klebsiella pneumoniae
gtggtgaaagtcttcaccaagcgcatcagcaagaaattcaacctgatgctggaaactaaagtgaccgccgttgaagcgaaagaagacggtatctacgtttccatggaaggcaaaaaagccccggcggaagcgcagcgctacgatgccgttctggtcgctatcggccgcgtgccgaacggtaaaaacctcgatgccggtaaagcaggcgttgaagttgacgagcgtggctttatccgcgtcgacaaacagctgcgcactaacgtgccgcacatcttcgcgatcggcgatatcgttggtcagccgatgctggcgcacaaaggcgttcacgaaggccacgttgccgcagaagttatcgccggtatgaagcactacttcgacccgaaagttatcccgtctatcgcttataccgaaccagaagttgcatgggttggtctgacagagaaagaagcgaaagagaaaggcatcagctatgaaaccgccaccttcccgtgggcggcttctggccgcgctatcgcttctgactgcgctgacggtatgaccaaactgattttcgacaaagaatctcatcgcgttatcggcggggcgattgtcggcaccaacggcggcgagctgctgggtgaaatcggtctggcgattgaaatgggctgtgacgctgaagacatcgcgctgactatccatgctcacccgactctgcacgagtccgttggcctggctgcggaagtctttgaaggtagcatcaccgacctgccgaacgcgaaagcgaagaaaaagtaa

SEQ ID NO: 256884 - DNA, 285 bp, Klebsiella pneumoniae
atgaaaagatttttaacgacgacgctgttggccgcaaccttagtttcgggcatggcctgcgcagctgatgccgttatcccctgggctgataacagcggcggtactgaaagtacgcatattgcggctatgggccaggatttaaatatgcagcatcagcagatcacgaagactcgcgaaggcgtgtgggcggcgaattccggtagcatcagcgctgacgaagcggcattgagcagcactaaaccggcttttgcgggcgacccgtctctgatgccccatcagggctaa

SEQ ID NO: 256885 - DNA, 801 bp, Klebsiella pneumoniae
atgaaaaaattattaaaaatgacgctgctggccctggccctggcgcccggcatggcgctagctcagcagcagttttcctcccctgatgaggccgcaagcgcgctggctgaggcaatcggcaggcatgatgaatctgctctcaacgagctgctcggcgatagctggcagcaatttttaccgccggatggcatcgaccctgacgccgtcgctcgctttcagcgtgactggaaggttggccaccgtatcgttctgcaggaaaataccgcctggctggaggtaggccggacagagtggcgtctgccgatacccatcatcaaagataacgatggctggcattttgatatggccgcggctgaagatgagattctcacgcgcgcaattggtcgtaatgaactgtcagccattcaggctatgcacgcttacgttgacgctcagcaggatttttatcaattaaaccacgcctgggcgcagaagattatcagcagcgacggcaagaaagatgggctctactggcccgtcgcgccgggagaggcatccagcccgttagggccagcctttagccccgttgaacccggagagggctatcatggctatcgtttccgtattatcaaagatgggggcaatcatggcgtcgccctgctggcatggcccgcgacatgggggaaaaccggcatcatgagctttatggtcaaccaggataatcgcgtttatcaggctaatttaggtgaagaaacgccgaacaaggcgcaggccatttctcagttttcacctgataatggctggcaggccatcgatcagtaa

SEQ ID NO: 256886 - DNA, 1599 bp, Klebsiella pneumoniae
atgacgctgcctttcaaacccctcgtgctcgccctgctttgcagcgccgggctactcgccgccgcgggtacgctgtatgtaaaaagccgggaaccgcaaaccgctgccgagccccctgccgttacgcagacggctcaggcaaccgccgccgctcagccggttactgccgccttgactcccgcacagatagatcagtgggtcgcgccgattgcgctctatcccgataatctactgtcacaggtgctaatggcttcgacttatccgggcaacgtcgtgcaggcggtgcagtggtcgcaggatcatccgacgatgaaaggcgattcggcggtacaggcggtggcaaatcagccctgggatcccagcgtaaaatcgctggtcgccttccccactctgctggcgttaatgggggaaaacccgccatgggtggaaaacctgggaaacgcatttcttgcccaacctcaggacgtaatggactcggtgcagcgcttacgcgccattgcccggcaaaccggaacgttaaaatccacgccgcagcagaaaatcattaccgccaccagctccgcggctccggcaacgtcaacgtcaacgaccaccgcttcccgcagtagcagcgctgtcacctcctccgccccggcgccagtgattattaagatcgaatccaccgatccgaatgtcgtgtatgtgccggcctataatccctcggtggtttatggcgcctggcctgacgcggcctatccaccggtctacctgccgccgcctcccggcgagcagttcaccaatagctttgtaaaaggttttggttttagcctcggcgtcgccaccacctacgccttattcagcaatatcgactgggatgacaatgaccatcatcatgatgacgatcatcaccatcacgatgatgatcatcacggcggctactcgcacaacggcgataacatcaatatcaacgtgaataatttcaaccatatcaccggacaaaacctgccggggaatcatgccagctggcagcataatcccacctggcgcggtaatattccgtacccaaacgacaacattgcgcagcaattccatcagaccactgttcccggtgggctgagcgcgacccgacatcagccagtcgatcgcaacgcacagcgtcaggctgcaatgactcagctgcagcagcgtaccggcccgacgtcagcagcaggtcactcgaccgcacatgcgccttaccgcgatgcccagcgtcaggccgcatcgcagcagctgcatcagctgacccagcgcaataactatcgcggctatgaccaggcgcaggcggttaatcatagcgccgtacaaccgcaacatcgggaagcgctaaaaacgcaaatccagacttccacagggcagcagcagcgccgcgaacagttgcggaccgcaacgcccgagcaacgccagcagaagctaaatgacctccacgtcaatgcactcagcggtaacgacatccgctctcccgactggcagttgcagcgggaacgcggcctgcagagccgtcatatctcaggtttaaacagcgagcagcgcagcgcggtcagagagcacttatccgcccatcgtgaactgcgccatcgctga

SEQ ID NO: 256887 - DNA, 363 bp, Klebsiella pneumoniae; identical to SEQ ID NO: 191419

SEQ ID NO: 256888 - DNA, 825 bp, Klebsiella pneumoniae
atgtattggatcataaacaaaaatatagaattttggcctgaaaataagcggttaatctcgttgaaaaacccggcgctgagcgtcacattgacggctccggcaagccactgtcttgttcttttactggaagcctcaccggagctggtcagccagcagactttttttaaaaaagtttgggaagatgaggggatcctggttcctgcaaataccttgtatcaaaacatatcgattgtcaggcgcggactgcgcgatgtcggagaaacggataactcattagtcgtgacggtgccgcgtaaaggttttcatatcaatgccaacgttaacattgaaaaacgtgaaaaaatatctttagattcagtaggttctgctgatgcatctctcgcggtgcaggatagcgttgcgggaaaaaaagcaaccactgaatctgtggctactgtgcatacggctgataagaaaaacgcccgctcaaaggctgtcacactcttgattatggcattgagtttactggcgggctttttttctctgcattacctctggcactttaatgatgaaaagcccttttttagcagctatacattagttgaaagcgatcgcggatgtcatttttataccatagatgataatcatgccagcattgataaatttaatagttataagtctttgattttcaaatccggactggactgtaagaagtatccctttgtttatttttccatgtcgcagatgactcctggttttatagtgtttatttgcaggaaaagttacaccgcgaaggcttctgccggatgtgttactctctcttttcgtggaattgtacatgaatag

SEQ ID NO: 256889 - DNA, 474 bp, Klebsiella pneumoniae
atgaatagaataaaaattgtgattggcttttttatttctggcgctctggcaggggggatctataattttgtgaacgataaaatacatcataaggaagagtgtacggcatcgctcgtggtcttcaaggataatacacaaactaatttgaccttaaatttcatgtattcacttgctgaaggtaagggtaccgttgcggtcagcggtagctatctggatggcgggaaactgcagggccatatcagaagagatgtcatctatgatatggtcaaaaatcatgaaactcaccatttccactccagagaaataaaccgatacggtaacattgactctgtgtcggatgagttcctggccagcatcctgcctgacttttacgtttatccaaatgaaaaaataagctatattatttcaaagcaaaatgagcatagctttctgataaaaattgggtcacgaccgctactgtattgtgctaattaa

SEQ ID NO: 256890 - DNA, 549 bp, Klebsiella pneumoniae
atggctatcttcatcatcagcaataaccagtatcttcgagatggcattatctgtgtcggacaatataacgcgatggaaatcaaaagctgtcagtgtgacgacccgcaactcgatcgtttaaactatgaagatattgttatcctgcatctgagtttagaaaacaaatgcaacgccagcaaactttcctcgttaaaccagcgatgcaaagtattactgattctgagttcgtcgcagcatgcactcatctgtgatgcagataccgtgataaatgctaaagcgccgccggaagtcataatgaaagcgctccgctgcctgatcagacgggttaagtgtaaaccgaccaaaaaccagcgcttaagcaaaattgaaaaaatcattctcaacaaaagccttgaaggtaaagatacgcatgttatcgctgaatctctatcgctcaccagtaagattgtcagcaattacagatatgtggcctgtcgaaaaattggcgcagggaagctaactgatttactcattataaaagaccatttaaaggacgattatgccagataa

SEQ ID NO: 256891 - DNA, 1557 bp, Klebsiella pneumoniae
atgaaattaaaaacaatgagcgccgccctcctgctgactttgcctttctgggcctgcgccaaagatgtcaccctcatttacaccaacgatctccatgcccacgtcgaaccctataaagtgccgtggattgccgacggtaaacgggacatcggcggctgggcgaatatcaccacgatggttaagcaggaaaaggcgaaaaatagcgcgacctggttttttgatgccggcgactattttaccggaccctatatcagcagcctgacaaagggcaaagcaattatcgatatcatgaacaccatgccctacgatgcggcgacgataggtaaccatgagttcgatcacggctgggacaatacgctgctccagcttagccaggcgaaattcccgattgtgcagggcaacattttttatcagaacagcgataaagcgttctgggataagccctataccattatcgaaaaagagggcgtgaaaatcggcgtgatcggcctgcacggcgtttttgcctttgacgatacggtatccgccgcaacgcgggtgggtatcgaagcgcgcgacgaggtgaaatggttacagcactatatcgatgaactgaaaggtaaagtggatctgaccgtagctctgattcacgaaggcgtcccggcacgccagtcgagtcagggggggaccgatgtacggcgtgcgctggataaagatattcagaccgcaagccaggtcaacgggctggacattttgattaccggccatgcccatgtcggcacgccggaaccgattaaagtcggtaatacgttaattctttctaccgatagcggcggcatcgacgtagggaaactggtgctggattatcaggaaaaaccgcatcagttcaccgtgaagaacttcgagctgaagactatctatgccgatgagtggaaacctgacccgcagacgcagcaggtcatcgacggctggaataaaaagctggatcgcgtggtgcagcaggttattgctcaagcgccggtcgagcttactcgcgcttatggcgtctcttcaccgctgggtaaccttgccgcggatgccttgatgcaggcggcaggtaaggagacgcagctggcgttaactaactcaggcggtattcgtaatgaaattcccgccggggcagtgagcatgggagccgttatcagtaccttcccgttccctaacgagctggtcaccatggatttaaccgggaagcagctacgtagcctgatggagcatggcgcgggattaagcaacggcgtgctgcaggtctccagaggcctggaaatgaactacgacagcagtaaaccggtgggccagcgcgtcgtatcgtttttgctcaatggtcagccgattgaagatgccacggtttatcatattgccaccaacagcttccttgccgatggcggcgatggttttgccgcgtttacccaagggcaagcgcgtaatacttccggcggctactacgtttcaaatgcggtagtggactacttcaaagccggaaataaggtgacggacgagcagcttaacgacatgcgtgtcgtcgatgtgaagaaatag

SEQ ID NO: 256892 - DNA, 1137 bp, Klebsiella pneumoniae
gtggagactctttttaccattaacgcctgtaaaacctacggttgccgtaacctgggtttatcctctgcggccgactaccgttttccggactatcggctgggttatcccgcgctgtactgcggagcctgcggcagctatccaccgctgtttaatgatgatgagttccgaccctggctggccgcctatctgacggataacgcccggcgctctggctatttttgcccggcctgttatcggcgagatataattcgctatggctacaatccgaagggaacccagcggcttcagtgccgccgctgtgaaaaagtctggacgccaaaacatcaccatagcccggtaatggagagcccgcagcacatctgcagcgtaccgttgattgtgccgtttcagggttatgaggccgggcagaaactctatctcttactcagcttcgacgccgtacgcggcaacgttctccatctttcgtcgaacttcacgccttttccggttggcgtatcactacgctatcgctggcggggaagagaagcgcctcagggcattgcgggcgatatcgttcagcgaatctctcagaccgaagcgggctttttacaacgcagtcaattcgatgagatacagtacggcagcgccgcgccaaagcgtcattcccgcggcgccattctgcgcccggtcatcgccgcacacggccatttcaagctgctcagccgtcgttttccagcgataaaaaggcacatcattgctcatgaatgttttttacgcggcgcggcgatcgttgcctgggcgcctctgtttcgccagcggaaaggagagctgtggtatgtggaagaagagataaacaaccccgccagttcggcaccgtggcggctgcagggcaaaacgcatcatggctggtggcaaaatccgtggcagctctggacgcagggagagaaccgaaaaatggtctgccagcttgccggaacgccggacgagtacgcctcgccccctgacctcgcggccagccgacgcttcacaacctggctggaaaagagacccgagttcacgcgaagcgccctgttttcagcagggcgggtgacgcaaatactggtctcattggctcaagagtataacgcgacgcttacagcagctgcgccaggcgattga

SEQ ID NO: 256893 - DNA, 831 bp, Klebsiella pneumoniae
atgcgcgcgcatccgtatgatgatttagtggtgctggatgtaaccgccagcgagcagctggccgatcagtacctcgattttgccagccatggcttccacgttattagcgcgaataagctggctggcgccagtagcagcagtaaatatcgccagatccacgatgcgttcgagaaaaccggacgccactggctgtacaacgctaccgtcggcgccggtctgccggtcaaccatacggtgcgcgatttgattgatagcggcgataccattttggcgctgagcggtattttctccggcactctctcgtggctgttcctgcagtttgacggcaccgtaccgtttactgatctggtcgatcaggcctggcagcaggggctgacggaaccggacccgcgcgtcgatctttccgggaaagacgtcatgcgtaagctggtgatcctggcacgagaagcgggctacgacatcgagccggatcaggtgcgcgtagaatcgctggtgcccgcccactgtgaagaaggttcggtggatcacttcttcgagaacggtgaagcgctgaacgaccagatgctgcagcgtctggaagcggcgcgcgagatggggctggtgctgcgctacgtggcgcgttttgacgccaacggtaaagctcgcgtcggcgtggaagcggtgcgcgaagagcacccgctggcggcgctgctgccgtgtgataacgtctttgccattgagagccgctggtatcgcgataacccgctggtgatacgcggtccgggcgccggtcgtgatgtgaccgccggggcgattcagtcggatatcaatcgcctggcgcagctgctgtaa

SEQ ID NO: 256894 - DNA, 972 bp, Klebsiella pneumoniae; identical to SEQ ID NO: 203097

SEQ ID NO: 256895 - DNA, 546 bp, Klebsiella pneumoniae
atgagagatcatcacgaagaaggccgtgggcaacgcggacgccacggcgaacatggtgaacacggtcgcagaggcggcggacgccggcagcgcttctttggccacggcgagctgcgcctggtcattctggacatcctcacccgtaatgccagccacggttacgaactgattaaagagatcgaaaccatgacccagggcaactacagtcccagccccggcgtcatctacccgacgctcgatttactccaggatcagggattaatcagcgtggctgacgaaaacggtcgcaaaaaaatcgccatcaccgccgaaggcagccagctgcacgcggaaaaccagcagccgctggagcagattcaggccagactgcaggcgcgaatggtgggttgtgagctacgtaaaaacccgcagatgaagcgcgcgctggagaattttaaggcggtactggatttaaaagttaaccagcaggaaataaccgaagcgcagctaaagcagattgtcggcgtgattgaccgcgcggcgatggagatctcccagctcgactaa

SEQ ID NO: 256896 - DNA, 1380 bp, Klebsiella pneumoniae
ttgaacaggttaccttcaagcgcatcggctctggcctgcagcgcacacgcactgaatcttattgagaagcgaacgctcgatcatgaagagatgaaatcacttaaccaggaggtcagggaatactttaaagagcatgtgaatccggggtttttagcgtatcgaaaatcggtcactgctggcggggattacggagccgtagagtggcaagcgggaggattaaatacgcttgtcgacactcagggacaggagtttattgactgcctgggtgggtttgggatttttaatgtagggcaccgtaatccagttgtcgtttccgccgtcgaaaatcagctcgctaaacaaccccttcatagtcaggaactgctggacccgctgcgggccatgctggctaaaaccctggcggccttaacgccgggcaaactgaaatacagcttctttagcaacagcggtaccgagtcggtcgaagcggcgttaaagctggcgaaggcctaccagtctccgcgcggcaagtttaccttcgtcgccaccagcggcgcgtttcacggtaagtcgctgggcgcgctttcagccactgcgaaatccactttccgtaagccctttatgcccctgctgccgggattccgtcatgtaccttttggcgatatcaatgcgatgcgcacgctgctaagcgagtgccaaaagaccggcgatgacgtcgcggcggtgatccttgagcctattcagggcgaaggcggggtgattctgccgccgccgggctatctgcccgcggtacgcaagctgtgcgacgagtttggcgcgctgctgatcctcgatgaagtccaaaccggcatggggcgcaccggcaagatgttcgcctgcgagcacgaaaacgttcagccggatattctgtgccttgccaaagcgctgggtggcggcgtcatgcccattggcgccacggtcgccaccgaagaggtgttctcggtactgttcgataacccgttcctgcataccaccacgtttggcggcaacccgctggcctgcgcggcggcgctggcgaccattaacgtactgctgacgcaaaacctgcccgcgcaggcggagcagaaaggcgatatgctgctggacggcttccgtcagctggcccgcgaatatccggatctggtgaatgacgtgcgcggcaaaggtatgctgatggcgattgagtttattgataacgaaatcggctatgactttgccagcgaaatgtttcgccagcgcgtgctggtggccggaacgctcaacaacgcaagaacgattcgcgttgagccgccgctgacgctgacccctgagcagtgtgaacaggtgctaaaagcggcccgcctggcgctggcggcgctgagggtttcggtggaagaggcgtaa

SEQ ID NO: 256897 - DNA, 333 bp, Klebsiella pneumoniae; identical to SEQ ID NO: 203111

SEQ ID NO: 256898 - DNA, 984 bp, Klebsiella pneumoniae; identical to SEQ ID NO: 203110

SEQ ID NO: 256899 - DNA, 912 bp, Klebsiella pneumoniae
atgctgagtatcggagcaaaagattataaaactaagctatttgaaaatcatgatgagaatattcattttcttttgaatactccactctcccttcagcgccaggtctgggagtctgcagccataaaggcaacactacctgcgggtgtgtgcatcgaaacggttaacgatacagagataaccgcggaatggatttcatatcccgattcgataaataccagaattattctctatttccacggcggtgggaactctcagggatcgtgtctgactcacagaaaactcgctgcctgtctcgcacaatattctggttgccgaactctggtactggaatatcctctggcgccagaaaatcgatttcctgcggccttattaaattgtcatcaggcctatttatggctgcttgctaatggttattcagcagaggacattatcctcgcgggagactccagcggtggtggactggtcatgtcgcttttactcctgttaaaacagtatcaagatcctttgccggactcgtctgttctgctgtctcccatgttagatttcacactttctggtaagagcataacgctgtgtaaggatctcgatccgctgctttgcatagaagacctgataatgaccgtgaaatactactgttcggacagtgaacgaagcgatcctcttgtctctcccctgtttggtgatttgtctggacttcctcccgtatttattcaggtgggaagcgaggagttattgcgcgatgatgcattacgcctctcccgatatgctaaaaaggctgggatgcaagttgagcttgagatatgggacgggctctggcatgtatttcagtcatcggtgggaaaggtacctgaagcggatgaggcgttacaagccgtagctaaatttatccgaaggagagagtcattgtcgtga

SEQ ID NO: 256900 - DNA, 894 bp, Klebsiella pneumoniae
atgaaattaatcgacttgcacatgcattcggcatatagcaacgatgccgatttcccggtcagcgatctgcttaccatggctaaagcggcgaatcttgcggccctggcgataaccgatcacaactcggcgcgatccgttgaggagtctattcgctatggcagagcaaatagcgtaagcgtgatgaccgggattgaaatcgactgcgcatttgcgggcaataattatcatctgctgggctacggttttcgtcgagacagccgggattttgacgccgtcgaacacaacttccatcgtctggaaactgccgcgacgccgctaaagctggagaaactgcgggcgctggggttccagcttgatgaagatcgcctgtatgccatggccggcgatcgggtcccgcaggaagaggagatggcagaacttattttagaggatgcgcgcaacctgaatcatgatctgctgctgccttaccgcgcggggaatgcgcgcagcgatatgccgttaattaactttttttgggacttttttggccgaggcaaaccctgccaggtgacggtggaattgccgccgatggcggagatggcggcgctgataatcgacaacggcggcattccggtcattgcgcatatcggcgctaacgtgaaggaaaagccgttggcggtgattgaacagatgttgccacttggcgtacgcggcgtggaagtgttctcaagctatcatgatgaggagctatgtcgcgaactttatcactacacgctggataaatcgctgctggcgacctgcggcagtgactttcatggtaaaaacaaacccaatattaagcctggcgactgtagaccatggcgtgacgcgctaccgaaaaccctggaaatcctcgagcaggttgatctttattga

SEQ ID NO: 256901 - DNA, 879 bp, Klebsiella pneumoniae
atgaatggggttatggaacttgaattctggatgcgtgttgccattggtgaagctgaagagagtttgcgtgaggggaataaaggttttggcgccgttatcatcaaggatggtgagatggttgcggcggcgcatgactatgaggaaacagagggagacgcaacctcacatgctgaaatcaacgcgattaaaattgccagccaaaaaattggcaaaaatttaaacgggtgcatactgatatccaccagtgagccttgtcctatgtgcgcatttgccatcgcctggtccgggataagcgaaatagcttttggtttttctattcaggatgcacttgctcaagggcggcggcggattgcatttcagtgcgtcgaggcttttgataaggcgggcacagaggttattgttcataaaggtattctgcagcgggaatgtgcaattctctatcgtgctgacgttcgcagcgaaattaatcatctgcgcaacgcaaccgatgaagaccttaaggcgctgaacgcggattccattgcccgccgtactgcatggttctgccaaaataaagccgggttgaatattggcgatagccatttattagacaccgcacaccgcttacttataacgcgattccacgctgcagaggttgaaatgcccgtggtgaacagaactgagaagcaaattactttccactctatgaatttctgcccaacgcttgaggcatgcagaattctgcgcctcgatacccggcacgtttgcaaactcctgaatgaagagtccaccgatatgttagtgaaaaagatagatagccggcttcgcttctctcgaaattataataacctcagaccatattcctctttctgcgaagaatctatttctattgaggattga

SEQ ID NO: 256902 - DNA, 1425 bp, Klebsiella pneumoniae
atgatagaccccgaagaacagcagtccttcctttttcacgattacgagaccttcggcaccagcccttcgctcgaccggccgtcgcagtttgccgccatccgtaccgatgaagacctgaatatcgtcggtgaacctgaagtgttctactgcaggctcgccgacgactatctgccgcagccgcaggcggtaatggtcaccgggataacgccgcaggaggccaatgccaaaggcgacaacgaagccgcgtttgcccgccgcgttcacgatctgttcacggtgccgaaaacctgcatcgtcggctacaacaacgtgcgcttcgatgatgaagtcacgcgcaatatcttctatcgcaatttttacgatccttacgcctggagctggcagcatgacaactcccgctgggatctgctggacgtgatgcgcgcctgctatgcgctgcgccccgaggggatcaactggccggaaaatgatgagggcttaccgagcttccggctggagcatctgaccgtcgctaacggcatcgaacacagcaacgcccacgacgcgatggccgacgtttacgccactatcgcgatggcaaagctggtgaagactcagcagccgcgcctgttcgactatctttacgcccaccgcaacaagcgcaagctggcgacgctgattgacgtgccgcaaatcaagccgctggtgcatgtttccggtatgttcggcgcggcgcgcggcaacaccagcctggtcgccccgctggcgtggcacccggataaccgtaacgcggtgattatggtcgacctggccggtgatatcgcccctctgctggatctggatgccgatgccctgcgcgaacggctgtatacgccgaaaagcgagttgggcgatctggctgcggtgccgatcaagctggtccacctcaataagtgcccggtgctggcgcagcaaaataccctgcgcccgcaggatgctgaccgattgggcatcaatatccagcgctgtctggagaacgcccagcggctgcgggccaatccgcaggtgcgcgagaaagtggtggcgatttatgccgaagcggagccgtttgtgccgtccgataacgtcgatacgcagttgtataacggctttttcagcgatgccgaccgcgcggcgatgaaaatcgtactcgagacggagccgcgcaatctgccggcgctggacattacctttgccgacaagcgtattgagcgtctactattcaactatcgcgcgcgcaattacccgggcacgctggatgaaaccgagcagcagcgctggttggagcaccgtcgccaggtgtttacgccagagtttttgcaggcctacgccgatgagctacagatgctgtatcagcaatatgcggatgataaagagaagctggcgcagctgaaggcgctatggcagtacgcgcaggatattgtttga

SEQ ID NO: 256903 - DNA, 1932 bp, Klebsiella pneumoniae
atgagccacaagctgggggaagtacacgatggcgcggcaactaccgactggatggcgcaggagcaggagcgcgggatcaccattacgtccgcggcggtgagctgcttctggcccggcatggaccgcagctttgagccacaccggattaatatcatcgatacccccgggcacgtggatttcaccattgaagtcgagcgctctatgcgcgtactggacggtgcggtcatggtttacgactccgtgggcggcgtgcagccgcagtcggaaaccgtctggcgccaggcgaacaaataccacgtcccgcgcctggccttcgtcaacaagatggaccgacccggcgcggattttttccgcgtggtgcagatgatgaccgatcgcctgaaggcgaacccggtaccgattgtgatcccggtgggcgccgaagagcacttcaccggcgtggtggatctcatcaaaatgcgcgctattttgtgggatgacgccacccagggaatgaccttcaggggggcggaagccagcgacgaactgatggataactatctcgaaaccggcgagttgagcgaggcggaaatcgtcgccggactgcgtcagcgcacggtgaagggggaaatccaggcagtgctgtgcggcagcgcgtttaaaaacaaaggcgtgcagcggatgcttgatgcggtggttgagctgatgccgtcgccgctggatattccggcgattcagggcgtggatgagaaagggcagcccgctgaacgtcacccgagcgacgacgaaccgttctcggcgctggcatttaaactgatgaccgacccctacgtcggccaattgacctttatccgcgtctattccgggacgctgaaaaaaggcgatgcggtgtggaatccggtgaaaggcaagaaagagcgcatcggccgcatcgtgctgatgcaggccaacgatcgccatgaagtggacgaactgcacgccggagatattgccgcctgcgtcggcctgaaggatgtcaccaccggcgacacgctgtgcgacccggatgcggtgattacccttgaacggatggagttcccggagccggtgatttcgctggcgatagaaccgaaaaccaaagccgatcaggagaaaatgggcatcgccctgcagcggctggcggcggaagatccgtcgtttcgtctgcatactgacgaggagtccggccagacgatcatttccgggatgggcgaactgcatctggagattatcgttgaccgcatgaagcgcgagtttggcgtcgaggcgaacatcgggcgtccgcaggtgacctatcgcgagacgatccgcaaaacggtcaaagaggtggaaggcaagtttgttcgccagtccggcggtaaagggcagtacggtcacgtggtgctgacccttgaaccgctggcgccgggaagcggtttcgtgtttgaggacgcgaccaaaggcggcgtggtgccgcgcgagtatatcccttcagtcgaaaaagggctgcgcgaagcgatgggcaccggcgtgctggcgggatatccggtggtggatattaaggcgatcctgacgtttggttcgtatcacgacgttgactcctcggagatggctttccggatggcggcgatattcggcttcaaggaaggggcgcgcagggccgccccggttattcttgaaccggtgatgcacgtggaagtggagaccccggaagagtacgccggcaatattatgggcgatctctcttcccggcgcgggatggtgcagggaatggaggagcggttcggcagccagattattcgcgccgacgtgccgctggccgagatgtttggctattccactacgctgcgttcaatgtcccagggccgggcgacctacagcatggaattccaccactacgcggaagccccgcgcaacgtggctgaggcgattatcgccagccgcgccaaaggctaa

SEQ ID NO: 256904 - DNA, 1761 bp, Klebsiella pneumoniae
atggtgactcttcgtcagccctaccgagaaaaagtctcccagatggtcagctggggacactggttcgcccttttcaacatgttgttggctatggcgctcggcagtcgctatctgtttgtcgccgactggccaacgacgcttgccgggcgccttttttcatacgtcagcctcgttggtcacttcagcttcctggtctttaccagctatgtgctgattcttttcccgctaacgtttatcgttgtctctcagcgcttaatgcgctttatctcggtggttctcgcgaccatcggcatgacgctgctgttgatcgacagcgaagtattcacccgtttccacctgcatcttaatccctttgtctgggaactggtcattaaccccgatcagaacgagatggcgcgcgactggcagctgatgtttatcagcgtcccgatcatcttccttctggaaatgctctttgcgacctggagctggcagaaactgcgcagcctgacgcgccgccgccactatgcccggcccgttgcgtggttcttctttatttcttttatcagtagccacctggtctatatctgggcggatgccaatttctatcgcccgataaccatgcagcgggccaatctgccgctttcctatccaatgacggcgcgccgttttctggaaaaacacggcctgctcgacgcgcaggactatcaacgccgtctggtagaacaaggcgcaccggaagccgcttcggtgcagtacccgcttagcgaactgcgttaccgcgatctcggtaccggttataacgtgctgctgattaccgtcgataatcttaactactcgcgctttgagcaaaacatgccggcgctgaccgggttcgcgaaagaaaacgttaactttacccagcatatgagctccggtaacactgccgacagcggcatgtttggcctgttctacggtatttcgccgagctatatggacggcgtcctgtcagcgcgtatccccgcagcgctgattacgtcgctgaatcagcagggctaccagttgggcctgttctcttctgacggttttagcagcccgctgtaccgccaggcgctgctgtccgatttctcgctgccggcggcgaaagcgcaaagcgacgagcagacggcaaaccagtggataaactggctggaccgctacgcccaggatgaaaaccgctggttctcatgggttgcgctcaacggcaccactctggataacgggcagcagcaaaactttgtccggcgctacgccagcgccgctggcgcggtcgatacgcaaattggtcgcgtgctgaatgcgctgcgcgaagcgggcaagctggacaacacggtggttattgtgacggcgggccacggcatgccgctgaacccacagcatgacgcgtttggctggtcgcgcgaagagcttcaggttccgttggtgatccattggcctggcaccccggcccaggagatcgctacgctgaccgataataaagacgtgatgacgacgctgatgcagcgcttacttcacgtctccacaccggcgaatgagtattcgcaaggtgaagacctgtttagcgccgcccgccgccgcgcctgggttaccgcagccaatagcgatacgctggccattaccacgccgaaggttaccgtcgtgctcaatcacaacggtacctacagaacatggaacagcgacggcgagaaaattaaagatcaaaaaccgcagctcagcttgctgctgcaggtgctgaccgatgaaaaacgctttatcgctaactga

SEQ ID NO: 256905 - DNA, 294 bp, Klebsiella pneumoniae
atgcggaaaaaaagcttctgctacggtaatatgttgccctttcacgaacaaacagattttgagtttatgccgcaattatcccgctatagcgatgaacacgtcgaacagctgctcagcgagctgacgagcgttctggaaacacataaagcgcccgttgacctttcactgatggtactgggcaatatggtgactaacctgatcaacagtagcgtcgcgccggcgcagcgtcaggccatcgcccgttcttttgcccaggcgctgcagtcatctatcaacgacgatccagcgcactaa

SEQ ID NO: 256906 - DNA, 306 bp, Klebsiella pneumoniae
ttgctcggcggtaaattcctggaaggtcttctcgctgacgccagccagctctttggacagcgattccagttcgatttcctcaccggcctgcagctgttcgttgcagtagctgtatacctgctgacgtacgttctgacgttcagatttgtccagctgcgcatcggcggcgaaatcatccagcgcctgcagcaggccgcgattttgcgctttcgcattcagcccttcgctggcgccgaggaagtccatgaagaaatccgctactttgcgccctacccgccccttcaggaaggtcaaatagcgcgttga

SEQ ID NO: 256907 - DNA, 327 bp, Klebsiella pneumoniae
atgcgcaatacccagaacctcagtattattcgttcagaaccgccgccggccgccagcgacgagaccacgtggtctctgtcgggggcggccgtgggctttatttcatggctgctggcgctgggtattcccttcctgatctatggcagtaacacgctattttttctcctctacacctggccgttcttcctggcgctgatgccggttgccgttgtggttggcattgcgctgcattcgctgctggacggcaaacttcagtacagcgtctgcgcgacgattctgaccgtcgggctgatgttcggtctgctgttcctctggctactggggtag

SEQ ID NO: 256908 - DNA, 1428 bp, Klebsiella pneumoniae
atgaacactacgattgcacaacaaattgctgatgaaggcggcgtagaagcctatctgcacgcccagcagcacaaaagcctgctgcgctttctgacctgcggcagcgttgatgacggtaaaagcacgctgattggtcgattgctgcacgatacccgacagatttacgaagatcagctctcatctctgcataatgacagcaaacgtcacggtacgcagggcgaaaaattggatctggcgctgctggtggatggcctgcaggccgagcgcgagcagggcatcaccatcgacgtcgcctatcgctatttctctaccgagaagcgcaagtttattatcgccgatacgccggggcacgagcagtacacccgtaatatggcgaccggtgcatcaacctgcgaactggcgatcctgctgatcgacgcccgcaaaggcgtgctcgatcaaacccgtcgtcacagctttatttcgacactgctggggatcaaacacctggtggtggcggtgaacaaaatggatctcgtcgagtttagcgaagagactttcaacaccatccgcgaagcgtatctgacctttgcggagcagctgcctggcgatctcgatattcgctttgttccgctttctgccctggaaggggacaacgtcgccagccagagtgagaaaatgccgtggtacagcggtccgacgctgctggaagtgctggaaaccgttgagattcagcgcgtggtagaaagccagccgctgcgcttcccggtacagtacgtaaaccgcccgaacctcgacttccgcggattttccgggacggtggcctccggtagcgtgagcgtagggcagcgtcttaaggtgctcccgtccggagtggaatccaccgttgcgcgcatcgtcaccttcgacggcgatctgccagaagcggcggccggggaagcgatcaccctcgtcctgaaggatgaaattgatatcagccgtggcgatctgctggtcgatgcggcagtttctctgcccgcagtacaaagcgccagcattgatgttgtatggatggcggagcaggcgctgaccccgggccaaagctacgacattaaaatcgccggtaagaaaactcgcgcccgcgttgatagcgttcgctaccaggtagatatcaacaacctgacccagcgcgaagtggaaacgctgcccctgaacggcatcgggctgatcgatctcacttttgacgagccgctggtgctggataaataccaggataacccggttaccggggggctgatctttatcgaccgtttgaccaacgtcaccgttggcgcaggtatggttcatgaaccccatgaacgggttcaggcgagcgcttcacagtacagcgcgtttgagcttgagctgaaccagcttattcgcaagcacttcccgcactgggacgctcgcgacctgctgggaggcaagtaa

SEQ ID NO: 256909 - DNA, 516 bp, Klebsiella pneumoniae
gtgctcttcgtggaactgcagggcgtcaaccatacgcagcatttcgtcgatgttacggcccagcggcaggtcgttaaccacctgatgacgaacgatgccgttggcgtcgatcaggaaggagccgcgcagcgctacgccttcgtccggatgctcaataccgtaagctttctggatttcacgtttgatgtcagcaaccatcgcgtatttaaccgggccgataccgccctggtctaccggggtgttacgccatgcgttgtgcacgaactcggagtcgaaggaaacgccaaccacttccacgccgcgtttctggaattcttcgtaacgtttgtcgaacgcgatcagctcagacgggcacacgaaggtgaagtccatcggccagaagaacagaacggtaggtttaccgttggtgtgctgtttgaaattgaatttctcaacgatctcaccattacccagcacagcggctgcagtaaaatccggcgcttgacgagtgaccagaaccatttgattctcctgtaa

SEQ ID NO: 256910 - DNA, 393 bp, Klebsiella pneumoniae
gtggacgccctgctcggtgatcttacggatatcgccaaggctgaacacctggaaaccgccggagtcggtcaggatcggtcctttccactgcataaaatcgtgcagatcgccgtgcagcttcatgatctcctgacccgggcgcagccacaggtgaaaggtgttgccgagaataatctgcgcgccggtggcttccacctcttccggcgtcatccctttgacggtgccgtaggtgccaacgggcataaaggccggtgtttccaccacgccgcgctcaaacaccaggcgaccgcggcgggcgcgaccgtcggtggtatccagttcaaatttcatgcttgctcctgcgtcagaaaaacagtccgacgttttcatactcgccacggaatgattccgtag

SEQ ID NO: 256911 - DNA, 1005 bp, Klebsiella pneumoniae
atgagcaaaatgatgatgtctgaagagatgaaaagcgtcccggccgcgccgtcgccgctgcgccgcttgctgtgctgggaaggttttctgctggcggtaaccctggcggtatttatggttaacgccctggcatccccctggttccttaatatctggaatctgtcggacgccacgtttaacttcaccgaaaaagcgatcatcgtgctgccgatggcgatgctgattatcgccagagagatcgacctttcggtagcctcgacgatggcgctgagctcaacggcgatgggcttctgcgcggcagcgggtatggatacgccgctgctggtggccgtcgggctgggcgtggggctgctgtgcggcctgttcaacggtatcctggtgacgcgctttaacctgtcgtcgattgtgatcaccatcggcaccatgagcctgtatcgcgggataacctacattctgctgggcgacaaggcgctcaatcactacccggacagcttcgcctggtttggccagggctacgtgtggggcgcgctctcttttgagtttgcgctgtttatccttctcgctgccgcctttaccttcctgctgcataaaaccaactttggccgccggacctacgccatcggcaataacccgaccggagcctggttctccgggatcaacgtcaagcgtcacaatctggtgctgttcgcgctggtcgggctgatggccggcctggcggcggttctgctgacctcaaggctcggcagtacccgcccgacgctggcgatgggctgggagctggcggtcgtgacgatggcggtactcggcggcgtcaatattctcggcggttccggcagcatggtgggggtgattatcgccgctttcctgatggggctggtgacgtttggcctgagcctgctcaacgtgccgggcatcgtgatgtcgatcatcatcggcgcgatgctgattgtggttatttcgctgccgattattacccggcggatgatgcaacgaagacgaatttaa

SEQ ID NO: 256912 - DNA, 1005 bp, Klebsiella pneumoniae
atgggcaaacagctgcttaaacaccgcgaagcgctgctggcggcggtgatcattttgatgatcggcgctatcggcagccgggcgccgtcgttcgtctcgccgggcaatctggtggagatgtttaacgacaccgccattctgatcatcctcgccctcgggcagatgatggtgctgctcaccaaaggcatcgatctgtcgatggccgccaatctggcgctgaccggaatgatcgtcgctctgctcaacgcccactatccgggtatcccggtggcggcgctgctggcgctggcgaccctgcttggcctgctgatggggatgattaacggcctgctggtctggcggctcggtattccggccatcgtggtcacgctgggcaccatgagtatttatcgcgggattatctttctgctttccgagggtagctgggttaactcgcaccagatgagcgccgattttctcggcctgccgcgcgcctcgctgctgggaatgccgctgctgagctggtgcgccatcgccgcgctgctgctggtaggctatttcctgcgctacagccgcaccggccgggccttgtacaccgcgggcggcaacgcgacggcggcgtactacaccgggattaacgccgggaagatgcagtttgtcagcttctgcctctccggcgcgctggccgggttctgcggctatttgtggatctcacgtttcgctgtcgcctatgtcgatgtcgccaacggttttgaactgcaggtggtcgccgcctgcgtcatcggcggcatcagcaccatgggcggaaccggtcgcgtgctcggctgcctgtgcggggcgctgttccttggagtgattaataacgcgctaccggtgatcggtatttcgccgttctggcaaatggccatttccggcgcggtgatcgtcattgcggtgctgcttaacgaacgaggcaataaaggccacggacggttaatcctgcgcgacgcggcattagcccgacagaaacaggcggtgaaatcatga

SEQ ID NO: 256913 - DNA, 1239 bp, Klebsiella pneumoniae
gtgctgttcgacgagctgtcggtcactgaaaatattttcgtcggccagtatctgcatcgcggcctgctgaagaggctcgactggcccgccatgtaccgcaaagccagcgagatactcacccgcctggaggtgcagattgacccgcgcgcgacgttgaaaaccctcagcatcgcccagcgccatatggtggccatcgcccgggcgctctcctttgaagcccaggtggtgatcctcgatgagccgaccgccgcgctctcacagcatgaaattctggagttttatcaaatcgttgagcgcctgaagcaggacggcaaagcgattctttttatctcgcataagttcgatgagattttcgagctggcagactactacaccattctgcgcgacggcgtttacgtcagctccggagcgataaacgacatcaccgaagagcggatggtggcgatgatggtgggccgcgcgattacccaaacctacccgaaagttgactgtaccccaggggaaacggtgctggaggtgcaagacctctgtcaccccaccgagtttgcccatatcaatttcagcctgcgcaaaggggagattcttggcttttacggcctggtgggcgccgggcgcaccgagctgatgcaggcgctctccggggtctcgaccccctcctccggcaacatcgtactgaagggcaaagcgatgcgctttcgccagccggccgacgccatcaacgccggtatcgtctgcgtgccggaagagcggcagaagcaaggagcgattatcgccctgccgatcgcccagaacatcagcctgccgcagctcagcaaactcaaccccaacggcgtactgaacgacgcccgcgaatggcggctggcggatgagtacgcttcgcgcttacaggtcaaagcttttagctggcggcaggcggtggaaaccctttccggcggcaatcagcaaaaagtggtgatcggcaaatggctggcgacccatcccgaggtgattatcctcgacgaaccgaccaaaggcatcgatatcggttccaaagcggcggtgcaccagtttatgtccgaactggtcagccaggggttggcggtcattatggtctcttcggagctgccggaagtgatgggtatggccgaccggattatcgtgatgcacgaggggctgatggtggccgagtatcgcgccggtgaagcgacggcggaaaccatcgtcagcgccgccagcggcgtgaatcaggaggcagcgtaa

SEQ ID NO: 256914 - DNA, 279 bp, Klebsiella pneumoniae
gtggtgattgctggttttgaagtcatcaaaaacatgttcgattttgccattggcatcgatgaggaagctaatacgatgaataccgtcgtaggttttccccataaaggttttttcaccccagataccgaactgctcgcacacctgatgatcttcatcagacagcagagtgaagttcagcagctctttttcggcgaaacgggagagtttttctggtttatccgtactgattcccagaacttcaacgcctgcttttttcaggtcgtccatattatcgcgtaa

SEQ ID NO: 256915 - DNA, 570 bp, Klebsiella pneumoniae
ttgacagcctcattacaacactatctggttattaccgcgttgggtgctgaccgcccaggcatcgtgaatacgatcactcgtcacgtcagcagctgcggctgtaatatcgaagacagtcggctggccatgcttggcgatgagtttacgtttatcatgctgctttccggttcgtggaatgcgattaacctgattgaatcaactctgccgctgaaaggcgccgagctggatctgcttatcgtgatgaagcgtacaaccgcaaggccgccgcaggcgatgcagaatagcgtctgggttcaggttgaggtgccggattcaccgcacatcattgagcgattcacggctctgtgcgatacgtggaaaatgaacattgccgaactggtttcccgtactcagccgggagcgaacgatgattcagcacagctttttattcaaatcaccgcccacagcccgactacgcaaaatgcatcaaatatcgaacaagcgttcaaagccctatgtacagaactgaatgcacaaggcagtattaacatcgttaattattcacagcatgatgaacaggatggagtttga

SEQ ID NO: 256916 - DNA, 312 bp, Klebsiella pneumoniae
atgttctgcgatagctttaaagtgttggaagagtccttcctgagtcggacggttgtaataaggcgttaccgtcaggcagccaaccacgccgctatcgttaaatcttttagtcaggctaatcgcctctgcggttgcattggcaccggtaccggcaatgaccgggatacgcccgtcggccagttccagcgtctgcatgaccacgtcaccatgctcttcatggctcaatgttgcggactctccggtagtacctaccgaaacaatcgccgaggttccgttggcgacatggtaatcaatcagttttttcaggcttga

SEQ ID NO: 256917 - DNA, 453 bp, Klebsiella pneumoniae
atgctgcctgaaaccgttggtcgtctggcggaaatcaaaaatattatcggtattaaggaagcgacggggaacttaagccgggttcatcagatcaaagagctggtttcagatgactttattctgctgagcggcgatgacgcgaccggaatggactttatgcagctaggcggccatggcgtgatttccgtaacgacaaacgttgcggcgcgtgaaatggccgagatgtgccgactggcgctagcaggtcaatttgccgaagctcgtgcgattaaccagcgtctgatgccattgcataccaaattatttgtcgaacccaaccctatcccggtcaagtgggcctgtaaggcgttgggtcttgtggcgaccgatacgctacgcctgccgatgaccccgattaccgaaaacggtacgaaggttgttaccgcagcgctgaagcatgccggtttgctgtaa

SEQ ID NO: 256918 - DNA, 1035 bp, Klebsiella pneumoniae
atggcttactcagtacagaagtcgcgcctggcgaaggttgcgggtgtttcgctggttctactcctcgcggcctgtagttctgactcgcgctataagcgtcaggtgagcggcgacgaggcctatttgcaggctacgccgcttagtgaacttcacgcgccagcaggtatgattctgccggttcaggtgggtgattataatattccggttgcggccagcaccggtaacacaggcaaagcgctggatattcgtccgccagcccagcctctggcgctggtcagcggcgcgcgcacgcagtttaacggtgataccgcaacgctgatggtggaaaacgggcgcagcggttcgctgtgggcgcaggtggcaagcatcgtgcagtcgaaaaactacactatcgctaaacgcgacgatgccagccagacgctgaataccgactgggtcgaatggaatcgcctcgatgaagaccagcagtatcgtggtcgctatcaaatctcagttaaacagcagggctaccagcaggcggtgatcgtgaagctggtgaatctggagcaggcgggtaaacctgttgccgatccggcttcgctgcagcgctacagtaccgccatgctgaacgtcatttccgaaggtctggatctgaacgcgaccagcgcgcagaacgctgcgcagaaaaatgccggggcaaccttcgacgtgcagagcggggctgatgataccggcctgccgatgctgatcgttcgcgcaccgtttaatctggtatggcaacgcctgccgggcgcgctggaaaaagtgggtatgaaggtaactgatagttctcgctctcagggtaacttgtccgtgacctataaaccgctttccgacagcggctggaccgatctgggcgctcgcgacccacagctggtgtccggcgattataaactgcaggtcggggacctcgataaccgcagcagtctgcagttcatcgacccgaaaggccatactctgacgcagtcgcaaaatgatgccctggttgccgtattccaggccgcattaagtaagtaa

SEQ ID NO: 256919 - DNA, 1146 bp, Klebsiella pneumoniae
gtgcagaaagtccgcgaagccgagcgcgcgatggtggtcgatcagttccgcgagcacgaaggtgagatcatcaccggcgtggtgaaaaaagtgaaccgcgacaatatcacactggatctgggtaacaacgctgaagccgtgatcctgcgtgaagatatgctgccgcgtgaaaacttccgtccgggcgaccgcattcgcggcgtactgtacgctgtccgtccggaagcgcgtggcgcccagctgttcgtcacccgttccaaacctgagatgctgatcgaactgttccgcatcgaagtgccggaaatcggtgaagaagtgctggagatcaaagcggcggctcgcgatccgggctctcgtgccaaaatcgcggtgaaaaccaacgacaagcgcatcgacccggttggcgcttgcgtcggtatgcgcggtgcgcgtgtgcaggccgtgtcgactgagctgggtggtgaacgcatcgatatcgtcctgtgggatgataacccggcgcagttcgtgattaacgctatggcgccggcagacgtcgcgtccatcgtggtggatgaagataaacacaccatggatatcgcggtagaagcgggcaacctggcgcaggcgatcggccgtaacggtcagaacgtccgcctggcttcacagctcagcggctgggaactcaacgtcatgaccgttgacgatctgcaggctaagcaccaggcggaagcgcatgccgctatcgataccttcaccaaatatcttgatattgatgaagatttcgcgacagtgctggttgaagaaggcttctcctcgctggaagagctggcctatgtgccgatgaaagaactgctggaaatcgacggtctggatgaagccaccgttgaagcacttcgtgagcgtgcgaaaaacgcactgactacgctggcgctggctcaggaagaaagcctgggagataacaaacctgccgatgatctgttgaatctcgaaggtctggatcgtgccctggcattcaaactggctgcccgtggtgtttgtacgctggaagatctcgccgagcagggcgttgatgacctggctgatatcgaagggatgaccgacgagaaagctggcgagctcatcatggccgctcgcaacatttgttggttcggcgacgaagcgtaa

SEQ ID NO: 256920 - DNA, 1689 bp, Klebsiella pneumoniae
gtgaacttcgccttcggtcatgttagcgaacatgttttccagtttagatttctgctgacgcgccagcttaacttcacggaatttgccctgacgatacagcgccacttcacgcgcttttttctcgtcacgcactacggtcacttcatcaccggcagccggcacaccggacaggccgaggatttccaccggaatggacggacccgcttccagcacttcgcgacccagttcgtcacgcatcgcgcgcacacggccatattcgaagccgcacagaacaatgtcgcccttgtgcagagtaccttcgcgaaccagaacggtagctaccggaccacgacctttatcaaggaaggattcgatgaccgcgccgctcgccataccgttgcggaccgctttcagctcaagaacttcagcctgcagcaggatcgcgtccagcaggtcgtcgatgccggtacccgctttcgcggaaacgtggacgaactggctctcgccgccccactcttccggcagaatgccgtactgggacagttcgttcttcacgcgatccggatcggcttctggcttatcgatcttgttcaccgccactaccaccggtacctgcgccgctttagcgtgctggatagcttcgatagtctgcggcatcacgccgtcgtctgccgccaccaccagaaccacgatatccgtcgcctgcgcgccacgagcacgcatggaggtaaacgcggcgtggcccggggtatccaggaaggtgatcatgccgttgtcggtttcgacgtggtaagcaccgatgtgctgggtaataccacccgcttcgccggaggcaaccttggtagaacgaatgtagtccagcagcgaggttttaccgtggtcaacgtgacccataatggtcacgaccggtgcgcgcggttcagccgccgcgccggtgtcacggtcgctcattacggcttcttccagttcgttttcacgacgcaggataactttgtggcccatctcttcggcaaccagctgtgcggtttcctggtcgatgacctggttgatggtcgccatggcgcccagcttcatcatcgctttgatgacctgagagcctttaacggccatcttgttggccagatcgccaacggtgatggtttcaccgatgataacatcacggttaaccgcctgagccggcttctggaagccttgctgcagagccgaacccttacgatgtttaccacctttaccgccgcgaacggccgcacgggcttcttcacgatcggctttcgattcagcgtgtttgttgcctttcttagccggacgcgctgctttcgcattacgtccacggccgcgaccgccttcaacttcacgatcgttatcgtcttcagcctgacgcgcatgctgagaagttgttacgtgatagtcagtggtctcttcaggcgtttctggcgcttcagtccagttcttttcgttttcttcagccatacggcgtgcttcttccgctacacggcgcgcttcttcttcaagtttgcggcgtgcttcttcttccgatttgcgcttcaattccgcggcttcgttctcgcgacggatcttttcagcctgggcggttttggtcatttcgtcggtatgttgattgctcactttgtctttttccgcagcttcacgtttcgctttatcagcgacttcacgtttagcttgttctgcggcctcacgttcagcttttaa

SEQ ID NO: 256921 - DNA, 186 bp, Klebsiella pneumoniae; identical to SEQ ID NO: 180137

SEQ ID NO: 256922 - DNA, 276 bp, Klebsiella pneumoniae
atgagccttgaatttatcagcgggctggtagtcgttctgcttggcttaatcgctggcgcgtttgggttaggccatgcgcgcgggaccagcaaggcggaagccaaagccgagcagcagcgcactgaagaaaacgccgctgctaccgtcgccgcggcagaacgccgggctgatgcaacgaaaggggccagcgatgtacaggaagacgttaagcgtatgggcgatgacgatgttgatcgcgagctgcgcgaaagatttacccgccccggtggtggttga

SEQ ID NO: 256923 - DNA, 1653 bp, Klebsiella pneumoniae
atgtccggcgtgcgtaccccaacccgtcagttcagctcctgcgtgctgatcgagtgcggcgacagcctggattccatcaacgccacctccagtgcgattgtgaaatacgtttcccagcgcgccggcatcggcatcaacgccgggcgcattcgcgcgctgggcagcccgatccgcggcggcgaagccttccacaccggctgcattccgttctacaagcatttccagaccgcggtgaaatcctgctcgcagggcggcgtacgcggcggcgcggcaaccctcttctacccaatgtggcatctggaagtggaaagcctgctggtgctgaaaaacaaccgtggtaccgacgccaaccgcgttcgtcacatggactacggggtacagatcaacaagctgatgtacacccgtctgctgaagggcggcgatattaccctgttcagcccttccgacgtcccgggcctgtatgacgccttcttcgccgatcaggacgagtttgagcgcctgtacacccagtacgagcaggacgacagcattcgcaagcagcgtattaaagccgttgagctgttctcgctgatgatgcaggagcgcgcctctaccggccgcatctatatccagaacgttgaccactgcaacacccacagcccgttcgatccggtagtcgccccggtgcgtcagtctaacctgtgcctggagattgctctgccgaccaaaccgctggaagatgtcaacgacgaaaacggcgaaatcgcgctgtgcaccctgtcggccttcaacctcggggctatcgacagcctcgacgagctggaagagctggcggtgctggcggtgcgtgctctggatgcgctgctcgactatcaggattaccccatcccggcggctaaacgcggtgcgatggggcgtcgtacgctgggtatcggcgtgatcaacttcgcttactatctggcgaagcatggcaaacgctactccgacggcagcgccaacaacctgacgcacaaaacgttcgaagcgattcagtactatctgctgaaggcctctaacgagctggctatcgagcaaggcgcctgcccgtggttcaacgaaaccacctatgcgcagggcatcctgccgatcgatacctataagaaagatctggacggcatcgtcagcgaacccctgcactacgactgggaagcattgcgcgagtccattaaaactcacggcctgcgcaactcaacgctctccgcgctgatgccgtccgagacctcgtcgcagatctccaacgccaccaacggcattgagccgccgcgcggccacgtgagtatcaaagcgtccaaggacggtatcctgcgccaggtggtgccggattacgaaaacctgcagaacgcctacgagttgctgtgggagatgccgaacaacgacggttatctgcagctggtgggtatcatgcagaagtttatcgaccagtcgatctctgccaacactaactacgatccgacgcgcttcccgtccggaaaagtgccgatgcagcagttgctcaaagacctgctcaacgcctataaattcggcgtcaaaacgctgtactatcacaacacccgtgatggcgctgaagacgcccaggatgacctggccccgtccatccaggacgacggctgcgaaagcggcgcttgtaagatctaa

SEQ ID NO: 256924 - DNA, 930 bp, Klebsiella pneumoniae
atgacgcaatttgcttttgttttcccgggacagggctctcagagtgtcgggatgctgtcagatatggcggccgcttacccggtaatcgaagagacgttccgtgaagcctctgcggcgttgggttacgatctgtgggcgcttgcacagcagggcccggcggaagaactaaataaaacctggcagacccaaccggcgctgctgaccgcttccgttgcgctctatcgcgtctggcagcagcagggtggaaaagcgccgatgatgctggctggccatagccttggcgaatattcagcgctggtatgcgcgggcgttatcaattttaccgacgccgttcgccttgttgaactgcgcggtaagttcatgcaggaagcggttccggaaggtaccggggcgatgtctgcgatcattggtcttgacgatgctgcgattgcgaaagcctgcgaagagtctgccgaagggcaggtggtttctccggtgaactttaactcgccgggtcaggtcgttattgccggtaataaagaggccgtagaacgcgcaggggcggcctgtaaggctgcaggcgctaaacgtgctctaccgctgccggtcagcgtcccatcccactgcgcgctgatgaagcccgcagcggagaaactggccgttgagctgcaaaaaataacctttaacgcgccagctattccggtcgtgaataacgttgacgtgaaaagtgaaatggcgcctgaagctattcgcgatgcccttgtccgtcagctgtatagcccggttcagtggaccaaaaccgttgaatttatggcatcacagggcgtagagcatctgtatgaagttggcccgggtaaagtcctcaccggtctgactaaacgtattgttgacaccctgaccgcttccgcgcttaacgagccggcagctatgtctgcggcgcttgagcaataa

SEQ ID NO: 256925 - DNA, 954 bp, Klebsiella pneumoniae
atgtatacgaagattattggtaccggcagctatctgcctgagcacgtgcgtacgaacgctgaactggaaaatatggtcgatacgtcagacgagtggattgtcactcgtaccggtatccgtgagcgtcgtattgccgcgccgaacgaaacagttgctaccatgggccttgaagccgctaagcatgcactggatatggcgggcgtaaagccggagcaaattggtctgattattgttgcgaccacctccggtacccatgcgtttcccagttcggcttgccagattcaatcaatgctgggtattaaaggttgcccggctttcgacgtcgctgcggcctgcgcgggtttcacctacgcgctcagcgttgccgatcaatacgtgaaaaacggcgcggtcgattacgcgctggtgatcggcgctgatgtcctggcgcgtacctgcgatcctgccgatcgcggaaccattatcattttcggcgacggcgcaggtgccgtggtgctgggggcttccgaagagccgggtattatctctacgcatctgcatgcggacgggagctacggcgaactgctgacgctgccgaacgccgatcgcatcgatccggaaaacccgatcttcctgaccatggcgggcaacgaagtctttaaagtggccgtgaccgaactggctcatatcgtcgatgaaactttagctgcgaataatctcgagcgttcgtcgctggactggctggtgccacatcaggctaacctgcgtattatcagcgccacggcgaagaagctgggcatgtcgatggacaacgtcgtcgtcacgctcgacaggcacggtaatacttcagccgcttctgtgccttgtgcgctggatgaagccgtgcgcgatggccgcattcaacgtggtcagcttattctgctggaagcctttggtggcggtttcacctggggttccgcgctggttcgtttttag

SEQ ID NO: 256926 - DNA, 2151 bp, Klebsiella pneumoniae
atgaaaaaaatcacgagcgtttgcccttattgcggggccggttgcaaacttaagctggtcgtcgaaaacaataaaattatccgagccgaagccgctgatggcgtcaccaaccaaaatcagctgtgccttaaaggctattacggctgggattttctcaacgatacccagctgctgacgccgcgtctgcagcagccgatgattcgctatcaaaaaggcggcaaattcaccccggtaagctgggatgaggctatccgctatacggcgaaaaaactgcgtgaaataaaggagaagcatggcccgcgcgccattatgacgaccggttcatcccgcggtaccggcaatgaaaccaactatgtgatgcagaagttcgcccgcggcgtgctccacaccaataacgtcgactgctgcgcccgcgtctgccacggcccgtcggtagccggacttcagctggcgctgggtaacggcgcgatgagcaactcgatcagcgatatcgaaaactcaaaatgcctgctggtcttcggctataactgcgccgactcccaccctatcgtcgcccgccgggtgattaaagcccgggaaaacggcgcgaaaatcatcgtctgcgacccgcgccgtatcgaaaccgcccgcatcgccgatcgccatctgcagctcaacaacggcagcaacatggcgctggtcaacgccttcgcccacgtcctgctggaagaggatctctataaccacgattacgtcgaccgttttaccgaggggctcgacgcctatcgcgaaacggtaaaagactattcacctgaagccgttgaggagatagtcggcgtgccggccgctgaaattcgccaggcgatgcgcatgtttgccgccgccccctccgcgaccattatgtggggcatgggcgtcacccagttcggccaggcggtggacgtcgtcagagggctggccagcctcgcgctgttaaccggtaacctcggacgcgccaacgtcggcgtaggcccggtgcgcgggcaaaacaacgttcagggtgcctgcgatatgggcgtattgccaaatatgttccccggctaccaggacgtcaccgacgccagcgttcgcgataagtttgctaaagcatggggcgttaacccggcggtcatggacgaccaggtcggcacccgaatcaccgaagtgccgcacaaagcgctggccggcgaaatcaaagcctactacatcatgggggaagatccgctgcaaacggaagccgatttgggcctggtgcgcaaagggattgaggcgctcgatttcgtggtggtgcaggatatctttatgaccaaaaccgcagagatcgccgatgtgctgctgcccgccacctcctggggcgaacacggcggcgtcttcacctgcgccgatcgcggtttccagcgcttcgagcaggcggttatcgccaccggcaacgttaagcgcgactgggaaatcatttgcctgctggccagcgaaatgggctacccgatgcattacgacaataaccagcaaatctgggacgaaatgcgcgagctttgccccctgttctacggcgtcacttatgaaaaaatgggcgatatgaaccacgttcagtggccgtgtccgacgctggatcaccccgggacgccgtggctgtataaagataatctcttcgacacgccgaccggcaaaggccagctgtttgccgccccgtggcgagcgccggccgaaaccccggatgaagcctacccgctggtgctctgtaccgtgcgcgaagtgggccactactcgtgccgttcgatgaccggtaactgcgcggccctgcagtcgcttgccgatgagccgggccgggtgcaaatcaatcgcgccgacgcgcagcgtctcggcatcgccgatcagcagctggtgtgggtgagctcgcgacgcggtaaggtgattacccgcgccgacattagcgatcgcattaaccagggcgcggtgtatatgacctaccagtggtgggtgggtgcctgtaacgagctgacgcaggataatctcgatccgatctcgaaaacgccggaaaccaaatattgtgcggtgaaggtagaggctattgcggatcagcgctgggccgagcagtatgcatggaacagctacagcgagatgaaagcccgcctgaaagcggccgtgaacgtgtaa

SEQ ID NO: 256927 - DNA, 510 bp, Klebsiella pneumoniae
  misc_feature (487)..(496): n is a, c, g, or t
gtgccggtccccgcggggtcgctgatcgacgctcgcggcgtccccacgaccgacccggcggtgatgcagacgtcgccgctgggggcgctgctgacctttgccgaacacaaaggctacgcgctggcgacgctgtgtgaaattatcggcggcgcggtatccggcggtaaaacctcgcatcaggagaccctgcagggcagcgtggacgctatcttcaactgcatgaccaccattattctcagcccggaagcgttcgatgcgccggatatgcagcgcgagaccgaagcgtttatcgcctggtgtaaacagtcgccgcacgagccggacgcgccgattctggccccgggcgagtgggaagaggctaaccgccagcagcgcctggcggagggcattccgctggacgccggaagctggcaggcgatttgcgccgccgccgaagaagtcggtttacccgccgacaccctcgcgcggctgcggcagaagctggccnnnnnnnnnnttttcccgccatga

SEQ ID NO: 256928 - DNA, 879 bp, Klebsiella pneumoniae
atggggctgccgatcggtacgccggtagcggtcggtatgattgacgcccacgcgggcggcatcggcaccgtcggcgtgcttaacggcgcggttaacaatatggcctacgtcttcggtacctcttcctgcaccatgaccacgactcaggaagcggtattcgtgcccggcgtctgggggccgtattactcggcgatggtgccagggttctggctgagtgaaggtggtcagagcgcggccggagcggccatcgaccagctgctgagcttccaccccgccgccgcagaagctaagtcgctggccaaagcgcgcggcgtcccgctaccggtttatcttgccgatagcgtgctggcgaaggtagataatccgtcagcggcggtcaaacttgccgagggcctgcacgtggtgcccgagtttttaggtaaccgggcgccgctggccgatccgcaggcgaaagcgattatcgccgggctggggatggagcgggatctggacaatctgatggcgctctacgtcgccggattgtgcggcatcggctacggtctgcggcagattattgacgcccagaaggcgtgcggcatccgcagcgagaatatcgtcatcagcggcggggccggtcagcatccgctggtgcgccagctgctggcagacgcctgcggagtgaacgtggtgagtaccgaatccagcgaaccggtgctgttaggttcggcgattcttggcgcggtggccggtcatatcgcaccttccctgccggaagcgatgaagcagtttacccgggtggataaaacctaccgctgcgtagaacaatttagcgccgatcatcagcggcgctatgaggcgtataaaatgctacagcacacggcgcggctgattcgcgagtaa

SEQ ID NO: 256929 - DNA, 801 bp, Klebsiella pneumoniae
gtgaaacgaattaatgcgctaaccatcgccggtaccgacccgagcggcggcgcggggatccaggcggatctcaaaaccttctcggcgctgggcgcttacggctgctcggtcatcaccgcgctggtggcgcaaaatacccgcggcgtccagtcggtgtaccggatagagcctgattttgtcgccgcgcagctcgattccgttttcagcgatgtgcgcatcgataccaccaaaatcgggatgctggcggaaaccgatattgtcgaggcggtggcggaacggctggcgcgttatcagattaaaaatgtggtgctggatacggtcatgttggcgaaaagcggcgatccgctgctctcggcgtcggcggtggaaacgctgcgccagcgcctgctgccgcaggtctcgctgatcactccgaacctgccggaagcggcggcgctgctggatgcgccgcatgccagaacggaacaggagatgctggagcagggcagagcgctgctgggcatgggctgtggagcggtattaatgaaaggcggccatctcgatgatgcggaaagcccggactggctgtttacccgcgatggggagcagcgctttaccgcgccgagagtccagactaaaaatacccacggtaccggctgtacgctatcggcggcgctggcggccctgcgtccgcgttacgaggattgggggcgaaccgtggcggaagccaaaggctggctgtcggcggcgctggcgcaggcggattcgctggaagtgggacacggcatcggtccggtacaccattttcacgcctggtggtaa

SEQ ID NO: 256930 - DNA, 942 bp, Klebsiella pneumoniae
atgagcaaagaagatgatattcggctggatcaaaaggtccgcgccgcgtggatgtactacattgccgggcagaaccagagcgagatcgccagccagcttggcacgtcgaggccggtggtacagcggctgatcgccgccgcgaaagaagaagggattgtgtcgatcgggctgcatcatccggtggccaactgcctcgattatgcgctgttactgcaggaaaagtaccggcttatcgagtgcaatatcgtgcccgcctttagtgaagaaagcaccctggatagcgtctccttcggttgctatcagctgatggctcgctacctgcaggacgataaagagaaaatcatcggtctgggttccggcctgaccctgaaaaaagcgctgcagcgtatcgatttcgacagtcagaatacccgctgcgtcgcgctaatcagcgccatggacgccgacggccagtgcaactattacgatgatgtcccgctgctgctgaccagcaaaattaaggcgaagtactatcaatggcccgcgccgcgctacgcgcagacgcaggaagagtacgacatgtggtgcaccagccggctgttccgcaacgtctccgccgtcgcccgccaggcggacgttatttttgtcggcattgggccattaggcacccaaagccctatttttaaagacggctttatcaatcaggcccagatggatgaagtgacggcgcaaggcggtatcggcgagattatggggcgctttatcgatgccgaaggcggagtggtggatagcgaaatcaacagaatgattaccagctacgatatccgccagaatcagtgtccgcgcatcgcggtggcatgcggcgagtacaaacgcccggcgattctggcggcgcttaaaggcggctggatcaacggtctggtgaccgacgagcacaccgcccgctggctgctgacgcgctaa

SEQ ID NO: 256931 - DNA, 345 bp, Klebsiella pneumoniae; identical to SEQ ID NO: 176756

SEQ ID NO: 256932 - DNA, 2334 bp, Klebsiella pneumoniae
atgtcggtaccggagctgaaaatcaccggtaacgtgaagcaaaacaaagtcgacgtgagcggttcgctgcagggcaacagctatatgcagtggaaaatccccggcctgcatctggctctgggccccaacagcgccgacgtgaaaggcgagctgggagttaaagatcttaacctcgacgccaccattgacgcgccgcatctcgataacgccctgccgggcctgggcgggacggcgaagggattagtaaaagttcgcggcaccgtcgatgcgccgcagctgctggcggatatcaccgcccgggcgctgcgctggcaggagctatcggtggctcaggtgaacgtgaagggcgatgtgaaatccaccgaccagattggcggtcatcttgacgtacgcgtggaccgcattagccagccgggcgtgaatatcagcctggtgcagctcaatgcgaagggcaacgagaaacagcacgacctgcagctgcgggtgcagggcgatccggtttccggacagctgtcgctggcaggcagttttgaccgcaaagaggagcgctggaaaggcacgctgagcaatacccgcttccagacgccggtagggccggtggcgctgacgcgcaacatcgcgctggattaccgtaacctcgagcagaaaatcagcattggaccgcactgctggactaacccgaatgccgaactgtgcgtaccgcagaccattgacgccggcgcgagcgggcgcgcggtagtgaatctcaaccgtttcgacctggcgatgctgaagccgtttatgccggaagagacgcaggccagcggcgtgtttagcggcaatgccgacgtgagctgggacaccaccaaagaggggctaccgcagggcaaggtcaccctgagcggacgtaacgtgaaggtgacccagacggtcaacgacgcgccgctgccggtggcgttcgataccctgaatcttacggccgatctgcacaacaatcgcgcccagctgggctggctgattcgcctgaccaacaatggtcaactggatgggcaggtgcaggtcaccgatccgcagggccgacgtaatctgggcgggaacgtgaatatcagcaacttctcgctggcgatgatcaaccctatcttctcgcgcggtgaaaaggcggaagggcggctcaatgcgcgtctgacgctgggcggcaacgtacagagcccgcagctgtacggccagatgcagctgaatggcgtggatattgacggcaactttatgccgttcgatatgcagccgagccagctggcgatgaatttcaccggtacccgctcgaccctacaagggacggtgaataccagccagggccatattgcgctcagcggtaacgccgactggacgcagattgacaactggcgcgcgcagattgccgcgaagggcagccgggtgcggataaccgtgccgccgatggtgcgcctggatgtttcgccagatgtcgtctttaccgccacgccaagcctgtttaacctggatggtagcgttgacgtgccctgggcaagaatcgtcgtcaatgaagtgccggaaagcgccgttggggtctcttctgacgaagtcatgctggataaaaatctgcagccgattaagcagcagagcgccggtattccgattaacagcaacctgacgattcatgtaggcaacaacgttcgcctcgacgcctttggtctgaaagcgcgtctgaccggcgatttgaaagtggctcaggataaacaggggctgggcctcaacgggcagattaatatcccggaaggccgcttccatgcctacggccaggatctgatcgtgcgtaaaggcgaactgctgttctccggaccgccggatcagccgctgctgaacatcgaagccattcgtaatccggatgccaccgaggacgacgtgatcgccggcgttcgcgtgaccggttcggccgatcagccgaaagcggagattttctccgatccggccatgtcgcagcaggaagcgctctcttacctgctgcgcgggcagggtttgggcagcggacagagcgatagtgcggcaatgacctccatgcttattggtatgggggttgcacaaagtggtcaggttgtgggtaaaatcggcgagacgtttggcgtaagtaatctggcgctggataccgaaggggtgggcgactcctcccaggtggtggtcagcggctacgtgctgccgggtctgcaggtaaaatatggggtagggatctttgactccctggcgacgttgacgttacgttatcgcctgatgcctaagctatatatggaagccgtgtctggcgtagaccaggctctcgatttgctctatcagtttgagttttag

SEQ ID NO: 256933 - DNA, 216 bp, Klebsiella pneumoniae
atgaagcgcattattagcttcgatacggaattcgatgtcggacagcttaccggtcaggtcgagtacagactcaagatcgccttttacatcatagaaatcgacggtctcttttgccaggttccagtgttcttcatagcggttggcgcagataacgccagccagcatcagatcctgacgaatacccagcggagcctgggtatcaggcacaaagcgtaa

SEQ ID NO: 256934 - DNA, 555 bp, Klebsiella pneumoniae
gtggatccactgctgtactttcggatcgacaaagctataggtaatcacttcctggtagcctttgtcattaagcaacgttttcacgcgcttaagcgacagatccgcttcgcggtgggtgcccataatcaggcccgcttgtaccggttcatcaggaatattgttatagccatagacgcgggcaacctcttcaaccaggtcttcttcgatctccatgtcgaaacgccagctcggcgccacggcatgccactcatcctgtccttcggtaacttcacagcccagacgacgcagaatgtcgctaacctgcgtatcttcaatgtgatggccaatcagacgatccagtttgctgcggcgcagacggatggtcgcaggtttcggcagagtcgcttcattggtaacgtcaataatcgggcccgcttcaccgccgcaaatatccatcagcaggcgggtagcacgctccattgcctgatactgcaacgcggagtccacgccgcgctcgtagcggtgcgaagcgtcggtatgcaggccatggcggcgggcgcggccggtaatagatag

SEQ ID NO: 256935 - DNA, 294 bp, Klebsiella pneumoniae
ttgcgtttcatcgtttacgccggagtgctcgccgccgaaaataccgcccatggcgagtgctttctggtggtcagcgataaccagagtatcgctatccagcttcgcctcggagccgtcaagcagaaccagcgtttcaccttcatgcgccatacgtacgatgattccgccttcaatgcggtctttatcgaatgcgtgcatcggttgaccgagctcaagcagaacgtagttggtcacgtcaaccacggcatcgatggagcgaataccgcagcggcgcagcttctctttcatccatag

SEQ ID NO: 256936 - DNA, 900 bp, Klebsiella pneumoniae
gtggaatacctgggtaaaaaaggtctcctgacccttcagatgacgaccctgcgtgagctgcctgctgaagagcgtccggcagccggtgcggttatcaacgaagcgaaagagcaggtccagcaggcgcttaacgcgcgcaagtcagcgctcgaaagcgcagcgctcaacgcgcgtctggcctcggaaaccattgatgtctctctgccggggcgtcgtatcgagaacggtggcctgcatccggtgacccgtaccatcgaccgtattgaaagtttcttcggtgagctcggttttaccgtcgcgactggcccggagatcgaagatgattatcacaacttcgatgcgctgaatattccaggccaccacccggcacgcgctgaccacgacactttctggtttgatgccacgcgcctgctgcgcacgcaaacatcaggcgtacagatccgcaccatggctaatcagcagccgccaatccgcattattgcccccggccgcgtgtatcgtaacgactacgatcagacgcataccccgatgttccatcagatggaaggtctgatcgttgacactaacatcagcttcaccaacctgaagggaacgctgcacgatttcctgcgtaacttctttgaagaagacctgcagattcgttttcgtccgtcctatttcccgttcactgagccgtctgcagaagttgacgtaatgggtaaaaacggtaaatggctggaagtgctcggctgcggtatggtgcatccaaacgtgctgcgtaacgtgggcatcgatccggaaatctattccggctttgccttcggcatgggtatggagcgtctgaccatgctgcgctacggcgtgaccgacttacgcgcgttcttcgaaaacgatctgcgtttcctcaaacagtttaaataa

SEQ ID NO: 256937 - DNA, 1419 bp, Klebsiella pneumoniae
atgaaaatcaaaactcgcttcgcgcccagcccgacaggctatctgcacgttggcggcgcgcgtactgctctctattcctggctttttgcacgtaaccacggcggtgagtttgtgctgcgtattgaagataccgatcttgagcgctccacgccggaggccattgaagccatcatggatggtatgaactggctgagcctggaatgggatgagggtccgtacttccagaccaagcgttttgatcgctataacgccgtcattgatgaaatgctggaagcgggcacggcctataaatgctattgctctaaagagcgtctggaagcgctgcgtgaagaacaaatggcaaaaggcgaaaagccacgttatgacggtcgctgccgccatggccacgaacatcatgctgatgatgaaccttgcgttgttcgttttgccaacccggaagaggggtccgttgtttttgacgaccagatccgcggtccgatcgaattcagcaaccatgagctggacgatctgattattcgccgtaccgatggttctccaacctataacttctgcgtcgtggttgacgactgggatatggaaatcacccacgttattcgtggtgaagaccatatcaacaatacaccgcgccagattaacatcctgaaagcgctgaatgcgcctgtgccggtttacgcccacgtttcgatgattaacggcgatgacggtaaaaaactatccaagcgtcacggcgcggtcagcgttatgcagtatcgcgacgacggctacctgccggaagcgctgctgaactatctggtgcgtctgggatggtccagcggcgaccaggaaattttctctcgtgaagagatgattaagctgtttagcctgggagcggtgagcaaatctgcgagcgcgttcaacaccgaaaaactgcagtggctgaaccatcactatatcaactcgctggccccggaatatgtggcaacgcatttacagtggcacattgagcaggaaaatatcgacacccgtaacggcccgcagctggctgagctggttaagctgctgggcgaacgctgcaaaacgctgaaagagatggcggcgagctgccgttatttctatgaagattttgccgagtttgatgccgatgcggcgaaaaagcacctgcgccctgttgctcgtcagccgctggaagtggtacgcgataaattagccgctatcagtgactggactgcggaaaatgttcatcacgcgattcaggcgacggctgatgaactggaagtcgggatgggcaaagtcgggatgccgctgcgagttgccgtaaccggcgcaggccagtctccggcgcttgatgtgaccgtgcatgcaattggcaaatcccgtagcgtagaacgtatcaataaggcgctggcctttattgctgaacgcgaaagccaacaatcctga

SEQ ID NO: 256938 - DNA, 393 bp, Klebsiella pneumoniae
atgatgaaacttaaagataaaatgacgccagcggagctcgccgagagtcttaacctcgcccgacaaaccattaaccgctgggccagagaacaaaaatggcggacggaaccgatacccggagtcaaaggggggcgcgctcgtcttatcgtcatcgacaggccggttatcgatttcctcgcaaatattccggcgctacggcatctggcgatagataatcagctggctgaacagcccgtcaaatactttgtgaatgatgctgacgccatatggcggcagattgtcgaaaccatgcacctgatgaccccgaccgaacagttacacctgcgcgatcttcttgcgcgcgaggggattagcggatttctctcccggcttggtattactgatgcaaagtag

SEQ ID NO: 256939 - DNA, 354 bp, Klebsiella pneumoniae
atgctcaaggaacgaatgacacctgaagaaatagcgcatctgactggcttcagtcggcaaaccataaacaaatgggtacgtaaagaggggtggcaaacctccccgcgccccggcgttcagggcggtaaagcgcgcctcgtacatgtcaatgagcaggttcgcgaattcatacgcagcgcgcagcgcgtggccgaaaacccggtcccctactccgcaacggataacgaactggaatctctgcttcttacgctgtgcaaagagatgacgccgggtgagcaaaagttgctgatgtcgctgctgttgcgtgaagggatcaccggattactcaaccgactgggtatccgcgatcggtga

SEQ ID NO: 256940 - DNA, 1395 bp, Klebsiella pneumoniae
atgcaccgtcacgccgtcggcatctgcgcccggctcgaactgataggtcagacgcagcttcagattgccctggtgccagaagttcggatagtccagcttactgacctgctccgcgccttctttaatcagcatacttttttcaaagttaagcaaatccggcgtctcgcgactggcctgcttccaccatttatcgaagtggcgagcggagatgacgtcatggctgatgcgctggtcgtagaactcaaacagcgtttcgtcgtcgacaagaatgtcgcggcggcgcgacttatgctccagctcttcaatctcgttgcgcagcttcaggttgtcacggaagaaggcgtggcgggtctgccagtcaccctccaccagcgcatggcggataaacagttcgcggcacagcgccgggtcaatctggctgtagttgaccttacgggccgcgacgataggcagaccgtaaacggtgaccttctccgtcgccatcaccgcgccctgcgcgcgctcccagtgcggttcgctgtaagaacgtttgagcaagtgctgagcgaccggctcgacccattccggctctatgcgtgcggcgatacgcccccacaggcggctggtttccaccagctcggcgaccatcgtccatttcggcggctttttaaacagcccggagccggggaagatagaaaagcgagcgttgcgcgcgccggtgtattcctgcttatcggtatctttcataccgatgtgcgacagcaaaccggtcagcagcgcggtgtgaatttcgcgatactctgccggttcgctattcaccggcaggccgagctctttaacgacctgacgcagctgagtgtagatatcctgccactcgcgcacgcgcaggtagttgagaaaatcgacccggcactggcggcggaactggttcgaggagagcgctttttgctgctcgcccaggtagttccacaggttgacgaacgccatgaagtcggactctttatcgtggaagcggcgatgcttctcatcggaagcctgctgcttatccattggccgctcgcgcgggtcctgaatagagagcgccgaggtgataatcatcgcctcgcgcacgcagccgtgtttttgcgcctccagcaccattcgcgccagacgcgggtccaccggcagctggctgagctggcgccccatcggcgtcagcttataggcggtctgctgttcgtcagtggtaatcgcccccagctcttccagcagacgcacgccgtcctgaatattgcgtttatccggcgcttcaacgaacgggaaagcggcaatatcgccgagtccgagcgcggtcatttgcaggataaccgacgccaggttggtgcgcagaatctccggatcggtaaattccgggcgcgacaggaagtcgtcttctga

SEQ ID NO: 256941 - DNA, 333 bp, Klebsiella pneumoniae
atgggcctggaacacgcggttctgctcgctattggagagccgcgcatacagcggcagcacctcggtgtggcgcagattcagcttgttaagcgcatcggcggtatcgcgaatttcccgctcgccgctcataaaaatgaggatatcgccagcgctttcacgtcccagctcgtcaacggcgtcaaaaatcgcctgcagttgatcgcgttcggtgtcatcggcgtcctcaacgatgggccgatagcgcacctcaaccgggaaggttcgtccggacacttcgataatcggcgcgttgttaaagtggcgcgagaagcgttccgggtcgatggtcgctga

SEQ ID NO: 256942 - DNA, 723 bp, Klebsiella pneumoniae
gtgttcatcgatcgcgaacaggcgggtcgcttttttgccgtccggcacctcaagggccagaatctgctcgcggaagcgatcctcagcgatcgccttcagcgccttctgctggctcgaccaggcgaaatcgtccatcgcttcacgggtaataccgaagcgttgcgcaacgttttccgccgtgatgccgttgtgataaggcccttccggccaggtgaggatggagatcagtccatcttccagctcgccgtggcccatgcgatagccatcgcgcgctttgcgcaggtagtagggcagctgggtcatattttctgttccgcaggcgacgaccacctcggcctggccgctttgcagctgcatcatgccgtccgccagggcctgaagtccggagccgcactggcggttaaccgaatacgcggtgctctcctgcgggatccccgcccgcagctggcagatacgggcgataaaaccgctttcggcgatttgcccgacgttgccgacgatcgtttcgtcgatatcctgcggcgcaagtccggcgcgggcgatcgcttcgcgaatgaccgctgctccgaggtcatgctggtgggtatgcttaagactgccgttaaacgtgccaatagcggtacggacgccgctgacaaccacaatatcattagcctgtgtcatcgtttttctccttacagcaccatgccgccgccgacgttaatcacttcaccgttgatatag

SEQ ID NO: 256943 - DNA, 735 bp, Klebsiella pneumoniae
atgaaacttgccagtaaaaccgccattgttaccggcgccgcgcgcggtatcggctttggcattgctcaggtgcttgcgcgggaaggcgcgcgagtgatcatcgccgatcgcgacgcgcacggcgaagccgccgccgcgtccctgcgcgaatcgggcgcacaggcgctgtttatcagctgcaatatcggtgaaaaagcgcaggtcgaagcgctgttttcccaggccgaagaggcgtttggcccggtggatattgtggtgaataacgccggaatcaaccgcgacgccatgctgcacaaactctccgaagcggactgggacacggtgatcgatgtcaatctgaagggcacttttctctgtatgcagcaggccgccgtccgcatgcgcgagcgcggcgcgggccgcattatcaatatcgcttccgccagctggcttggcaacgtcggacaaaccaactattcggcgtcaaaagccggcgtggtgggaatgaccaaaaccgcctgccgcgaactggcgaaaaaaggcgtcacggttaacgccatctgcccgggctttatcgataccgatatgacgcgcggcgtcccggaaaacgtctggcaaatcatgatcaacaaaatccctgcgggctacgccggggaggcgaaagacgttggcgagtgcgtggcgtttctggcgtctgacggcgcgcgctatatcaacggtgaagtgattaacgtcggcggcggcatggtgctgtaa

SEQ ID NO: 256944 - DNA, 723 bp, Klebsiella pneumoniae
gtgttcatcggtcgcaaacaggcgggtcgcttttttgccgtccggcacctcaagggccaggatctgctcgcgaaagcgaccctccgcgatcgccttcagcgccttctgctggctcgaccaggcaaaatcgtccatcgcttcgcgggtaataccgaagcgttgcgcgacgttttccgcggtgatgccgttgtgataagggccttccggccaggtgagaatggagatcaggccatcttccagctcgccatggcccatgcgatagccatcgcgcgctttacgcaggtagtagggcagctgggtcatattttcagtgccgcaggcgacgaccacctcggcctggccgctttgcagctgcatcatgccgtccgccagggcctgaagtccggagccgcactggcggttaacggaataggcggtgctctcctgcgggatccccgcgcgcagctgacagatgcgggcgataaaaccgctttcggcgatttgcccgacgttgccgacgatcgtttcgtcgatatcctgcggcgcaatcccggcgcgggcgatcgcttcgcgaatgacggcggccccaaggtcatgctgatgggtatgtttaagactgccgttaaacgtgccaatagcggtacggacgccgctgacaatcacaatatcattagcctgggtcattgtttttctccttacagcaccatgccgccgccgacgttaatcacttcaccattgatatag

SEQ ID NO: 256945 - DNA, 729 bp, Klebsiella pneumoniae
ttgcgctatctgacccccggctgcgtcatcaatctcggcaccggtattcccaatgacgtgattggcgccatcattcacgaggaacagctcggggagcaggtcaccatcaccgtcgagtcagggatctacggcgggcagcaggcgggtggcgtggatttcggtatcggccgtaatctgagcgcgatgattagccaccaggatcaaatgctctactacaacggcgcaggggtcgacatcacctttatgggcgccggcgagattgacccgcacgggcacgtcaatgccacacggctcggcgcatcctgccccggcgcgggcggttttatcgatatcacccagaatgcccgccacgtcgtgttctgctcctcttttaccgccaaagggctggagatcgcctgtgaacacggggcgctgcatatccgccgcgaaggcgaagtgcgtaaattcgtcgccggggtaaaccagatttcttacaacggcgaactggcccgcgccaaaggacaaaccatgcattacgtcaccgaacgggcggttttcgaactgcgcccggaaggaccggtgctgacggaaatcgcccccggtatcgatcttgagcgcgacatcctggcgcatatggattttcatccggcgatcgccgcggatcttcaggttatggacagccgattgttcgccccgccgccctgcggtctcgcggaacatctgtcccggaattcatcctctgactcataa

SEQ ID NO: 256946 - DNA, 945 bp, Klebsiella pneumoniae
atgctacgttacgcgctacggcggatctcgctgctgatcccgatgatcttcgccgcctcggtgattatcttcctcatgctgcgcctgggcaccggcgacccggcgctcgactatttgcgtctgtcgaacctgccgccaacgccagagatggtcgcctcgacccgcgtgatgctgggactggatcagccgcttatcgtccagtacggcagctggctgtggcaggcgctgcatctggatttcggcatctcgttcgccactcagcatccggtgctggatgacatgctgaacttcctgcccgccacgctacagctggcgggggctgcgctggtgttgattctcctcacctccgtaccgctcggtatttgggcggcgcggcatcgtgatcgcctgccggattttattgtgcgggttatcgcctttcttggcgtgtcgatgcccaacttctggcttgcctttctgctggtgatgttcttttcggtttacctgcaatggttgcctgcgatgggctatggcggctggcagcacatcattctaccggcggtgtcgattgcctttatgtcactggcgatcaacgctcgtctgctgcgcgccagtatgctggaggtcgccgggcagcgccatgtgacctgggccagactgcgcggtctgaacgagaaacaaaccgaacgtcgtcatattttgcgtaacgcttcgctgccgatgatcaccgccgtaggaatgcatatcggcgagctgattggcggcacgatgattatcgagaatatctttgcctggcccggcgtggggcgctacgccgtctcggcgatatttaaccgcgactatccggtcattcagtgctttacgctgatgatggtgattgtttttgtggtctgtaacctgatggttgacctgttgaatgccgcgctggatccgcgcattcgtcgccatgaaggagcgcgttcgtga

SEQ ID NO: 256947 - DNA, 1569 bp, Klebsiella pneumoniae
ttgtctatcatccgcaccaccctgctggcgctattcgcctgcgctccgttgctggcctgcgccgcgcccaatgaactcaccaccgcatggccggtcaacgtggggccgcttaatcctcacctctacacgcccaatcagatgttcgcccagagcatggtctatgagccactggtaaagtatcaggcggatggttcggtaaaaccctggctggccaaaagctggacccaatcggcggacggcaaagtctggattttcaccctgcgcgatgatgtgacattttccaacggcgaagcgtttgacgcccatgccgccgcggagaacttccgcgtggtgctcgataaccgccagcgccacgcctggctggagctggtcaatcagattgtcgatgtcaaagcgctcagccaaaaccaactgcaaatcaccctgaaaagcgcgtattacccgttcctgcaagagctggccctgccgcgtccattccgctttatcgccccgtcgcagtttaaagacaatgagaccctgcacggcattaaagcgccgattggcaccggcccttgggtactgaaagcatcaaaactcaatcagtacgacgtgctggtgcgtaacgagcgctactggggcgaaaagccgcagattgaaaagattaccgtcaaggtgatcccggacccgacgacccgcgctgtagcttttgaaaccggagatatcgacctgctgtacggtaacgaagggctgctgccgctcgacaccttcgcgcgctttagccagaacccggcataccatacccagctttcccggccaatagagacggtgatgctggcgctaaattccgccaaagcgcccaccagtgagctgttggtgcgtgaagcgctgaactacgcggtgaataaaaaatcgctgattgataacgctctgtacggcacgcagcaggttgcggatacgctgtttgcccccaccgtgccttatgccgacattggcctgacgccgcgccggtacgatccgcagcaggcgaaagcattgctggaaaaagcgggctggctactgcctgcgggaaaagagattcgcgagaaaaacggccagccgctgcgcgttgaactgtcgttcattggcactgacgccctgagcaagtcgatggcggaaatcattcaggccgatatgcggcagattggcgtggacgtggcgctggtcggcgaggaagagagcagtatttatgcccgccagcgcgatggtcgcttcggcatgattttcaaccgcacctggggggcgccgtacgatccgcacgcctttatgagttcgatgcgcgtgccgtcgcacgccgattttcaggcgcagcagggtttagccgacaaaccggttattgataaagagattggcgaggtgctggaaaccaccgacgaaccccaccgtcaggcgttgtaccgcgacattttgacccgtctgcacaatgacgcggtttatctgcccatcagctatgtctcgacgatggtggtcgccagaccggagctgggggcgattccttacgcgccgatcgcgtctgaaattccgtttgaacagattaaaccggtgaaaccctga

SEQ ID NO: 256948 - DNA, 537 bp, Klebsiella pneumoniae
gtggcggtttacggcctgatcttcttcctgccgacccaggttgcggcgctgctcggcactaaagtggggtttgtggcatcggtggtgaccgcgatcccgtgggtggcagcgctgttcggtacctggctgattcctcgctactccgaccgcaccggcgagcggcgtaatattgcggcattgaccctgctggcggcggcaattggcattgcggtctccgggctggtggcgccggtactggccatcatcgcgctgtgcgttgccgccgtcggcgtcattgccgtacagccggtcttctggactatgccgacgcagctgttatccggcacggcgctggccgcaggcattggtttcgtcaacctgtttggcgcgatcggcggatttttagcgccgattatacgcgtccaggctgaaacgatgttcggcaataattctgccggattattgacgctcgcctgcgtggcggttatcggggttgttattatcttttcactgcgcgtgagccgcacggtaccgcaggccggcagcgtacagcattaa

SEQ ID NO: 256949 - DNA, 804 bp, Klebsiella pneumoniae
atgaacgcaattttatcgaacccatttaaagcggggttattgcaaggggaagcacaaattggcctgtggctgagctcgacctcctcttatatggctgagattgccgccacctcgggttacgactggctactgattgacggtgaacatgcgccgaatactattcaggatctttatcatcagatacaggccattgcgccctacgccagccagccggtgattcgtccggtcgagggcaatcgtagcctgattaaacaggtgctggatattggcgccagaacgctgctgatccccatggtcgataccgcagaacaggcgcgggacattgtctcggcgacgcgctatccgccgctggggacccgcggcgtcggcgccggggtagctcgcgccgcgcgctggggaagggtagagaactatatggcgcaggccaacgatgagctgtgcctgctgattcaggttgagagcaaaaccgccctcgataatctggatgcgatccttgaagtcgaggggattgacggcgtctttatcggcccggcggacctgtcggcctcgctgggctacccggataacgccggtcatcctgaagtgcagcgggttattgaacagagcatccgccgcattcgcgcggcgggaaaggcggccggattcctggccgtcgatccggagatggcgcacaaagcgctggcgtggggggcgaatttcgttgccgttggcgtcgataccaacctctataccagcgcgctggataaacgactggcgatgttcaggccggtagccgaacaggcggagggcaaggggagctactag

SEQ ID NO: 256950 - DNA, 1179 bp, Klebsiella pneumoniae
atgaacgacacgcgctttgaacactgtattaaatgcaccgtttgcaccaccgcctgcccggtcagccgggttaatccgcgctacccggggccaaaacaggccgggccggacggcgagcgcctgcgcctgaaagacggcgcgctctacgacgaggcgttaaaatactgcattaactgtaaacgctgtgaagtcgcctgcccttcagacgtcaaaatcggcgatattatccagcgggcgcgcatggaatacggccggcaaaagcccacgctgcgcgataccatcctcagccacaccgatctgatgggcaccctctccacgccgtttgctccgctggtaaacgccgccaccgggctgatgccggtacgtcgggtactggatgccgcgctcaaaatcgatcaccgccgctcgctgcccaaatatggcttcggcacctttcgccgcgcgtatcgacagctggctggccaacaggcgcagtacgccgagcaggtggccttctttcacggctgctatgtgaactacaacaatccgcagttgggtaaagatcttatccgggtgctcaacgccatgggcatcggcgtgcagctattgcataaagaaaaatgctgcggcgtgccgctcattgccaacggtttttttgcgaaggcgcgtaaacaggcacagagcaacgttaccgcgatgcgggaaaataacctgccagtggtggcgacgtcctcgacctgcacttttacgctgcgcgatgaatatccgcacatccttgatatcgataatcacgatgtgcgcgaccgggttgaactggcgacccgctggatctggcgtcagctggacgccggacggaagctgacgctgaaatcgctgccgctgaaggtgatctatcacacgccctgccatatggagaagatgggctggtcgctgtatacccttgagctattgcggctgatccccggcttgcagctggaggtgctcgactcgcaatgctgcggtattgccggcaccttcggcttcaagtcggagaattacgactcatcgcaggcgattggcgcgccgctgttccgacaaattgaggagagcggcgcggacctggtagtgaccgactgtgaaacctgtaaatggcagatagagatgtccaccagtaaacgctgcgagcatcccatcactctgctggcgcaggcgctggcctga

SEQ ID NO: 256951 - DNA, 753 bp, Klebsiella pneumoniae
gtgctggtcggcagcaacccagcatcgcagatttatgtcggcagcaagcgcaaagcgtgtgaagaggtaggcttcgtctcccgctcgtacgatctcccggaaaccaccagcgaagcagagctgctggaacttatcgacaccctgaatgcggatagcgctatcgacggcatcctggttcagctgccgctgcccgccggcattgataatgtcaaagtgctggagcgcatttcgccggacaaagacgttgacggtttccacccgtataacgttggccgcctgtgccagcgcgccccgcgcctgcgtccatgcacgccgcgcgggatcgtcacgctgctcgagcgttacaacattgatacctacggcctgaacgcggtggtcattggcgcctccaacatcgtcggacgcccgatgagcatggagctgctgctggcaggctgtactaccaccgtaacccaccgttttaccaaaaacctgcgtcatcacgttgaaaacgccgatctgctgattgtggctgtaggtaaaccgggctttattccgggcgagtggattaaagaaggcgcgatcgtgatcgatgtcgggattaaccgcctggaaagcggcaaagtggttggcgatgtcgtttatgaagatgccgccgcgcgcgcgtcgtacattacgccggttcccggcggcgtcggcccgatgaccgtagccacgctcattcagaacacgctgcaggcgtgtgaagagtatcacgatattcaggaggcctga

SEQ ID NO: 256952 - DNA, 1386 bp, Klebsiella pneumoniae
atgttaaaaatttttaatacactgacgcgccaaaaagaagaatttaaacctatccatgccggggaagttggcatgtacgtgtgtggtattaccgtttacgacctctgtcacatcggccatggccgtaccttcgtctccttcgacgtggttgcgcgctatctgcgttttttaggctacaagctaaagtatgtgcgcaacatcaccgacattgacgacaaaatcatcaagcgtgccaatgaaaacggcgagagctttgttgcgctggtggaccgcatgattgccgagatgcacaaagactttgacgcgctgaatatcctgcgcccggatatggagccgcgagcgactcatcacattgcggaaattattgagattaccgatcagctgatcgctaaaggccacgcgtatgttgccgacaacggcgacgtcatgttcgatgtgccgaccgatccgaactatggccagctgtcgcgtcaggatctcgaccagctgcaggccggcgcgcgcgttgatgtcgttgacgtcaagcataatccaatggactttgtgctgtggaagatgtcgaaagagggagagccaagctggccgtcgccgtggggcgcgggccgtccaggctggcacattgagtgttcagcgatgaactgcaaacagctgggcaaccattttgatattcacggcggtggttcggatctgatgtttccgcaccatgaaaacgaaatcgcccagtccacctgcgcccacgacggcgagtacgtgaactactggatgcactccgggatggtgatggttgaccgcgagaagatgtcaaaatcgctgggcaacttctttaccgtgcgcgacgtcctgaagttctatgacgcggaaaccattcgctacttcctgatgtccggccactatcgcagtcagctgaactacagcgaagagaacttaaaacaggcgcgttccgcgctggagcgtctgtataccgcgctgcgcggaaccgataaaaccgcagagccggccggcggcgaagcgtttgaagcgcgcttcattgaagcgatggacgacgattttaatactccggaggcttattccgtgctgtttgatatggcgcgtgagattaaccgcctgaaaaccgaagatgccgccgcggccaacgcgatggcggcgcatatgcgtaagctctctgcggtgctcggtctgctcgaacaggagccggatgccttcctgcagagcggcgcgcaggcggacgacggggaagtggcggaaatcgagtctttgattcagcaacgtctggacgcgcgtaaagcgaaagattgggcggcggcggatgccgcgcgtgaccgtctcaatgagatgggcatcgtgctggaagatggcccgcagggtaccacctggcgccgtaagtag

SEQ ID NO: 256953 - DNA, 1134 bp, Klebsiella pneumoniae
gtgcgtagcggtttaaatgacgacgagcagtacggttgcgttgtcccgcccattcatctctccagcacctataacttcaccggatttaacgaaccgcgcgcccacgactactctcgtcgcggtaatccgacacgtgatgttgtgcagcgcgcgctggcggagctggagggcggcgcaggagcggtcctgacgaataccgggatgtcggcaattctgctggtgactaccgtcttcctgaaaccgggcgatctgctggtggcgcctcacgactgctacggcggcagctaccgtctgtttgatagcctggcgaagcgtggctgctatcgcgtgctgtttgtcgatcagaatgacgaacaggcgctgcgcgccgcactggcggaaaaaccgaagctggttctggtcgaaagcccaagtaatccattgctgagagttgtggatattgcgaaaatctgcggtctggcgcgtgaggctggagcggtcagcgtggttgataacaccttcctgagcccggctttgcagaatccgctggcgctgggcgccgatctggtgttgcattcatgcaccaaatatttgaacggtcattctgatgtggtggccggggtggttatcgccaaagatccggcgaccgtcaccgaactggcatggtgggcgaataatatcggcgtcaccggcggggcgtttgatagctatctgctgctgcgcggtttacgtacgctttctccgcgtatggaagtggcgcagcgcaacgcgctggcgattgtcgactacctgaaaacccagccgctggtgaaaaaactgtaccatccgtccctgccggaaaaccaggggcatgagattgcggcgcgtcagcaaaaaggctttggggcgatgttaagcttcgagctggatggcgatgagcagacgctgcgtcgtttcctgagcgggttatcgctatttacgctggcggaatcgctgggcggcgtggaaagcctgatttctcacgccgcgacgatgacccatgcgggcatggcgcctgaagcgcgtgcggccgccgggatctcagaaacgcttctgcgtatttcgaccggtattgaagatggtgaagatttaattgccgacctggaaaatggcttccgggcagcaaacgaggaataa

SEQ ID NO: 256954 - DNA, 1068 bp, Klebsiella pneumoniae
gtggaaaaccagtttacgccgtccacgtcctggagcacctccgttggcggcggtattggcgaattctactctaacctgcacccggcttttgctgatggcgttgtgtatgccgccgatcgtaaaggcaccgttaaagccctgaattcaggcgacggcaaagaggtgtggtcggttaacctggccgagaaagacggctggttctcccgcgcgcctgcgctgctctccggcggcgtgaccgtctcgggtggccatgtgtatatcggtagcgaaaaagcgaaagtttacgcgctgaataccagcgacggcaccgtcgcatgggaagcaagcgtagcgggtgaagcgatttcccgtccggtcgtcagtgacggtatggtgttgattcacaccactaacggtcagctgcaggcgctgaacgaagctgacggcgcggtgaaatggaccgttaacctggatatgccagcgctctctctgcgcggcgaatccgctccggctaccgcatacggcgcagcgattgtgggcggcgataacggtcgcgtcagcgcggtgctgatgcagcaggggcagatgatttggcagcaacgtatctctaccgccaccggtccgacggaaatcgaccgtcttaacgacgtcgatacgacgccggttatcgtgaacggtgtgatttatgcgctggcctataacggcaacctgacggctttggatctgcgcagcggccagattatgtggaaacgcgagctgggttcagtgaacgatttcatcgtcgacggcaaccgtatttacctggttgatcaaaacgaccgtctgctggcgctcaccaccgacggcggcgtgacgctgtggacgcaaagcgatctactgcaccgtctgctgacggcgcctgtgctgtataatggcaacctggttgttggcgatagcgaaggctatatgcactgggtcaacccggaagatggccactttgtggctcagcagaaggtagacagctcaggcttcctgaccgatccggttgttgctgacggcaaactgctgattcaggcgaaagacggtacgctgtacgcgattacgcgttaa

SEQ ID NO: 256955 - DNA, 1479 bp, Klebsiella pneumoniae
atgatacctgtggtcgcgcttgtcgggcgccctaacgttggaaaatccacgctttttaaccgcttaacgcgcactcgcgatgcgttggtcgcggattttccggggctgactcgtgaccgtaagtacggtcgtgctgaagtggaaggccgcgaatttatctgtatcgataccggcgggatcgacggtaccgaagatggcgtagaaacgcggatggcggaacagtcgctgctggcgattgaagaagcggacgtggtgctgtttatggtcgatgcgcgggcgggcctgatgccggcggactcggcaatcgctaaacatctgcgctcccgcgaaaagccgaccttcctggtggcaaacaaaactgacggcatcgatgccgatcaggcgatcgccgatttttggtcgctggggttaggcgagatttatcctatcgccgcttcacacggtcgcggtgtcaccagtctgctggagcacgtcctgctgccgtgggttgatgaggtgaacccgccggaagaagtggacgaagacgcggcatactgggcacagtttgaagccgagcagaacggcgaagcagttgaagagccggaagaagattttaacccacaggatctgccgattaagctggcgatagtgggtcgcccgaacgtgggtaagtcaacgctcaccaaccgtatcctgggcgaagaccgcgtagtggtctacgacatgcccggaacgacccgcgacagcatctacatcccgatgcagcgcgacgagcgtgaatacgtgctgattgacaccgccggcgtgcgcaaacgcggtaagatcaccgatgtcgtcgagaaattctcggtgattaaaaccctgcaggcgatcgaagacgccaacgtggtgctgctggtgattgatgcgcgggaggggatttccgatcaggatctctctctgctgggttttatcctcaacagcggtcgctcgctggtgattgtcgttaacaaatgggacggcctgagccaggaagttaaagagcaggtgaaagagactctggactaccgtctgggctttatcgactttgcccgcgtgcactttatctccgcgctgcacggcagcggcgtaggcaacctgtttgaatccgtgcgcgaagcgtacgacagcgcaacccgtcgcgtgggtaccgctatgctgacccgcatcatgaccatggctgccgaagaccatcagccgccgctggtgcgcggtcgtcgcgtgaagctgaaatatgcccacgccgggggttataacccgccgatcgtggttattcacggtaatcaggttaaagatctgccggattcgtataagcgctacctgatgaactacttccgtaaatcactggaagtgatgggcacgccaattcgcattcagttcaaggaaggggaaaacccgtttgccaacaaacgtaatactctgacgcctaatcagatgcgtaagcgtaagcgcttgattaaacacatcaagaaaggcaaataa

SEQ ID NO: 256956 - DNA, 987 bp, Klebsiella pneumoniae
atgcacgataaggctttcacttttcagacgcttcacccggataccatcattgatggtttatttgatttgggtatgcgggtagattccggtcttactccgcttaatagctatgagaaccgagtttaccagtttcaggacgaagatcgtcgccgctatgtggtgaagttctatcgtcctgagcgctggtctgccgaacaaatcctcgaagaacaccacttttcgcttcagctcgttgaggacgacatgcccgttgcggcgcctttgtcgtttaacgagagcacgcttcaccaacatcagggattctttttcgccgtcttccccagcctgggtggacgtcagtttgaggcggataatctcgatcagatggagtgggttgggcgttatcttggccgtatgcatcaaacgggacgcaaacagcgctttgtcgctcgtccggagataggcaccaatgagtatcttctggagccccgacaggtctttgagctctccccgctgattcctgctggcctgaaagatgcctttctcagcgctaccgataaactcattgacgcggtaatggcgcaatggcacggacgcgccaatattttacggttacacggtgattgccatgcgggaaacatcctctggcgcgatggccccttgtttgttgatttagatgattcacgtaacggccctgctatccaggatctgtggatgctgttgaacggtgataaacccgagcagcgtatgcagcttgagatgattattgaagcgtatgaagagtttagccctttcaatacggatgagattgctctcatcgagcctttacgtgcaatgcggttagtttattatctggcgtggttgttaaggcgctgggaagatcccgctttccctaaaaatttcccatggttgaccggggaagattactggcgcgggcagacaacaacttttcttgagcaggtaaaggttctgcaagaaccgcctcttcagttaacgccaatgtattaa

SEQ ID NO: 256957 - DNA, 270 bp, Klebsiella pneumoniae
atgaaatgtaaacgcctgaatgaagtgattgaactcctccagccggcctggcagaaagaacctgaactgaatttgatgcaatttttgcaaaaactagcgaaagaagcgggttatgctggcgaattgagcgatctttccgacgatattctgatctaccatttgaaaatgcgcgactcggcaaaagaggccgttattccgggtatccagaaagattatgaagaagattttaaaaccgccttgctacgcgcccgcggcgtgattaaagagtaa

SEQ ID NO: 256958 - DNA, 582 bp, Klebsiella pneumoniae
atgcagggtgaggtaataaccggtgttgtgctggcggggggaagaggcacgcgcatgggaggaatagataaaggattacagctgctgaatggtaaggccctgtggcgtcatgtcgccgatacgctgcagcctcaggtcgccaggctggtgattagcgctaaccgcaatcttgattgctggcgaagcagcggctacccgattattaccgactctctgaacgactttcccgggccgttggccggcatgctttccgtaatgcatcaggtcgagggcgaatggtttctgttttgtccgtgcgatacgccatttatcccatcatttctggcgactcgcttaatacagcacaaaacatcagccctggccgtttgggtacacgatggtgaacgagaccatccggccattgctctggtaaatcgcaaggtgatcggcgaactggaaacgtatctggccgcaggagagcggcgggtaatggtatttctgcacaaaattggcggtcatagcgtcgattttagcgatgtaaaatcagcatttataaacgttaatactctcgacgatttgcaacatatgcaggtgccattatga

SEQ ID NO: 256959 - DNA, 507 bp, Klebsiella pneumoniae
atgatcccacttttagccatcgccgcctggagcggtacaggtaaaacaaccttattgaaggctctgattccggcactgcgcgcagaaggtttacggccagggctaattaaacatacccatcacgatatggacgtggataagccgggtaaagacagttatgaactgcgtaaagccggagcggctcagactattgtcgctagttcgcagcgttgggcattaatgacggaaacgccagataagccttcactggatctggcatggctggtcagccgaatggatgcctcaacgttggatttagtcctggttgagggttttaaacatgaacccgtgcccaaaatcctgctttatcggcacaacagcgggcatagtacagaagaattagtgtttgacgataatgtgattgctatcgccagcgataggccggtcgagacgtcgcttccactgttagatttaaacgatgttccgcagatagccgcttttattatgcagtggttaaaaggggtttag

SEQ ID NO: 256960 - DNA, 336 bp, Klebsiella pneumoniae
atgaacagtgatgtcttcattctcggcgtcgtggtcggctgcgtgaactatctctttcgctatctgccgctgcgcctgcgcgccggaaacgtgcgtccgactcgccgcggcccggtcagcgtcctgctcgataccatcggcatcgcctccatttgcgcgctgctggttgtctccagcgtgccggaaatcctccatgacgcccgccgcctgctgcccacattagcaggcttcgccgcgttgggcctggcgttttggaaaacacgcagcataattacgcctacgcttttgagcgcgctaacctacggtgttgtctggaaaatcagcgtatggctataa

SEQ ID NO: 256961 - DNA, 747 bp, Klebsiella pneumoniae
atggaaaaccctgacgcattgatgcacactccccccgctgacgaggcgacgctggctgaaggcattaaggacagcctgccgatcgtcatcagctatattcccgtcgccttcgccttcggtctcaacgccactaagcttggctttactccgctggaaagcctgttcttctcctgcattatttacgccggcgccagccagttcgtgatcaccgccatgctggccgcaggaagctcgctatgggtcgccgcgctcaccgtcatggcgatggacgttcgccatgtgctgtacggcccgtccctgcgcagccgcattcagcgcgcgatgagcaagaaaaaaaccgcgctctgggcattcggcctgaccgatgaagtttttgccgctgccaccgctaagctggtccgcgacaatcgacgctggagcgataactggatgatcggcatcgcttttatgtcctgggcttcatgggtcttcggcacgctgatcggcgcttattcgggcagcggcctgctgactaactttccggcagtggaagcggcgctgggctttatgctgccggcgctgtttatgagctttttactcgcctcattccagcgcaagcagtcgctgagcgttaccgccgcgctggcaggcgcgctggctggcatgattctgttttccatacccgcggcgatccttgccgggattgtctgcggctgcctgaccgctctggtgcaggccagcattcaggggatgcccgatgaacagtga

SEQ ID NO: 256962 - DNA, 996 bp, Klebsiella pneumoniae
atgcgacatacagcgatccttgccacagcgtttaccgccctcatttccaccaccgccttcgcggcggatctgcctggtaaaggcattaccgtaaaaccagcacagagcacaatttcggaagagaccttccagaccctgctggtcagccgcgcgctggaaaagctcggctataccgtcgataagccgagcgaagttgactataacgtcgcctacacctcgatcgccgcaggtgataccacctacatcgccaccaactggcagccgctgcatgacgatatgtacgctgccgccggcggtgatcaaaaattctaccgcgaaggcgtgtttgtgaatggggcggcgcagggctacctgattgataagaaaacggccgagcagtaccacatcaaatctatcgaccagctaaaagatccgaaaatcgccaaactttttgacaccaacggcgacggcaaagccgatctgaccggctgtacgccaggctggggctgtgaagcggtcatcaaccatcagcttgatgcctacggcctgagcaatacggtagtgcacaatcaaggcaactatgcggcgatgatggccgataccatcgcccgctataaggagggcaaaccggtgatctactacacctggacgccttactgggtcagcgacgtgctgaagccgggtaaagatgtcgtctggctgcaggtgccgttctcttccctgccgggcgaacagaaagatattgataccaaactgccaaacggcatgaactatggcttcccggtgaacacaatgcatattgtcgccaacaaagcctgggccgagaaaaacccggcggcggcgaaactgttcagcatcatgaagctgccgattgccgatatcaacgccgaaaatgccatgatgcacgcgggacatggttctgaggcagatatccagggccacgtcgatggctggatcaaagcccaccagcagcagtttgacggctgggtggaagaagcgctggccgcgcagaaatag

SEQ ID NO: 256963 - DNA, 249 bp, Klebsiella pneumoniae
atgctggccctgtcgatggtggtgattgcctcaatgattgccgttggcggtctcggccagatggtactacgcggcatcggtcgccttgatatgggtctggccaccgttggcggcgtcgggattgttatcctcgccattattcttgaccgtctgactcaggccgtaggacgggactcgcgcagccgcggcaaccgccgctggtacgcaaccggccctctggggctgattactcgccctttctgtaaataa

SEQ ID NO: 256964 - DNA, 567 bp, Klebsiella pneumoniae
atgctctctggcactcatcggcattgcacgggctttacgtcgcaggatggcgaaaaagacgttacacgccccattttcacaggatcaattttgaatatttactcaaaacgctgcgtgatacgaccgtttaacgccgatgatatcgagccttttatggcatatcgcaacgatgccgaatggatgcagtaccaggggtttaagggcctgacaaaggaagcttatgccgaggcgttgctgggaaacgcttctcttacgcagggcatgcagctcgcggcgatcgataccgcgaccgggactttgattggcgatctctacttaaaacaagaaaacgagaccatctggcttggctacaccgttagcccgcggtatgcaggtcagggttacgcccttgaaactgcgatggcggtcattgactggtgtaagcagcaaggttttttagccgtaaaagccggcgttgtggcagataatcttccctcaataaatttactgaacaaactcggattttcctgttcctgcacggaggatgatgagcagatttttgttttaaacatacaacccgctcattaa

SEQ ID NO: 256965 - DNA, 552 bp, Klebsiella pneumoniae
atgaaacgagctgtgaacgccctacaaaactttggaaaatccctctatgggccggtacttatcttgccgatagtgggtctgtttatcgcttttggcaacgtgttgggcgacggcaaccttgcggaatatctgcccttgctcggccatcctttaattcagaatatcggccagctcattgctaaatcagcggtatcggtactggtgaacctggtgctgatcttcgccattgggatccccgtaggcctggccgcccgcgataaaggctacgcggcgctcattggcctggtgacgtttatcgtctttatcaacgccatgaatatcacactgcagctgcagggccagctcgcggcgccggaacagatgaaagcagccggccagagcatggtgctgggcggccaggtgcttaagatgggggtcttcgccgggatcctcaccggcgcgctttcgggctacagtcttatatcggttacgggtatgaatcttacgtattcggcctgccaccctgcgaatgcgccaatctgccggtgcccgctatcgacgatcagggaatga

SEQ ID NO: 256966 - DNA, 642 bp, Klebsiella pneumoniae
ttgaacaatcaaaatcagaaattacagtctgcccttgatagccaggccataaaggaaagtgagttaaagcttactgataaaagcattaaaaatgcctacgcactcggcgttttctatctgactcaggcgctatcggatgtgaataaaatggctgacaatgatgtgaagctgtcgccttcggcgctggtttcaggctttaacgatgcttaccataaaaagctgaaaatcaaagaaggtgaaatagaaaccatcgttaacacccttaatgagcaaatgtcatctaagtacgttgatattgaaaaaagaatcatggccaaaattaaaaataaaaaatatgaggttttgcctaatggtgtctatttcgtgattgataaacaagggaagcaaccttacaagcagaatgagtccttatccctgaatatactggagaaaaagcttgatggtaccccgatactcaatacgatgaattccaggatgatatacgacaaacaaatcgatcccctgatggccaaagttttatctgcgggcttaaaaggcggcgcggtcacgctatatggtcaggctggttcgctgtacagcacgacgcccgctgacataaatcctgatacgttaatctcaattacctttgaactcattccctga

SEQ ID NO: 256967 - DNA, 612 bp, Klebsiella pneumoniae
atgcgcttccgcgacttcatcgaaaatttcggtgacgatacgccccagtccccagctcttctcaacgtgaataccgatggattccgccagcacttttgccgcatcgaagttatccagatccgccatctcggtttccggacggtatttcttgatcgcttcgcgcatggtcagtttttcaaacggtttgccgaagtcgaacacctggtcgccgtacggcacttcggttttacccagcacggtctgcgccagcgtgcggaacagagactcggtcagttcgatcagatctttatagtccgcataggccatatagagttccatcatggtgaactctgggttatgacgtacggaaataccttcgttacggaagttacggttgatctcgaatacccgttcaaagccgccgaccaccagccgtttcagatacagctccggcgcgatgcgcagatacatatccagatcgagcgcattatgatgggtgataaacggacgcgcggaagcgccgccggggatcacctgcatcatcggggtttccacttccataaagccgcgcgcaaccatgaactgacgcatggtggcgaggatctgcgaacgcaccttgaaggtgtggcgtga

SEQ ID NO: 256968 - DNA, 948 bp, Klebsiella pneumoniae
atgtttgtcggcctgatgatcttcctcagcggtagccgctacttccgtgatacccgcggcgtcgataaacaggcgctgcggacggtgaagtttgtgctgccgacctggggctggctggtggtgatgctctgcgttgcgccggtgttctttacgctgttgctggaaaataactggtccggctatctgctggcgatagtttgcgtgttcgccgcccagatggtagcccgcattatggtcaaatccccggaacatcgccgcgcgctgtggcagatcgttctgctgatgctggccggtaccctgttctgggttctggcgcagcagggcgggagctcgattagcctgttcatcgaccactttgtgaaccgccgcttgctgaatattgaagtgccgaccgcgctcttccagtcggttaacgccgtggcggtgatggcggcgggcgtcgtactggcgtggttgatgcgtccggaaggttccgttcgctcggcgctgcgcgtatggctgaagttcgcctttggcctggtgctgatgggctgcggctttatgctgctggcgcttaatgcacgccacggcgcggcgcaagggcaggcatcgatgggcatgatggtggccggactggcgctgatgggctttgccgaactgtttattgacccggtggcgatggcgcagattacccgcctcaatatgcccggcgttaccggcatgctgaccggcatttatatgctggcgaccggcgcggtcgctaactggctggcgggcgtcgtcgcccagcagaccaccgagtcgcaaatcagcgatacggcaattgccgcgtatcagcacttctttgcgcagatgggtgaatggacgctgggctgcgtggcgatcattgtcgtcatcgccttcgccgccgcgttcagcgttggcaaacgccgcgcggccgccggtgagcttcccggaggcggcgcctag

SEQ ID NO: 256969 - DNA, 618 bp, Klebsiella pneumoniae
atgactaaaaaaattcttaccacgccaattaaagatgaagatttagccgatattaaagctggcgatattatttacctcaatggccatattgttacctgtcgcgatgtggcgcaccgtcgcttaattgaaggtggccgcgaattacccgtagacgttaacggtggcgctattttgcacgctggtccaatcgtccgcccaattaaaggcgaagacgataagtttgaaatggtctccgttggtccaaccaccagtatgcgcatggaaaaattcgaaaaagaattcattgccaaaacgggtgtgaaattaatcgttggtaaaggcggaatggggaaaggcaccgaagagggctgtgcggagcataaagcgctgcactgcgtattcccggcaggctgtgcggtagtggcggcagtatgcgtggaagagattgaagatgcgcagtggcgcgatctgggaatgccggaaacgctgtgggtatgccgggtgaaagagtttggcccgttaattgtttctattgatacgcatggtaataacctgtttgaacagaacaaagttattttcaatcagcgtaaagagattgtcgctgatgaaatatgccagaacgtaagttttatcaaataa

SEQ ID NO: 256970 - DNA, 900 bp, Klebsiella pneumoniae
atgagcaaaagtgaacagatatcccatatgaccaatattatggccaagtttgtgggatacaccggcaaagtcttgcccgatgacgtcactgcaaaactggaagatttgcataaaaaagagaccagtaaactggccgacgtcatctttacgaccatgattgagaaccagcgcctggcgaaagagctcgatcgtccttcctgccaggataccggggtgattcagtttctggtggagtgcggggcgaacttcccgctgatcggcgaactggaagcgctgctgcgtgaagcggtgatcaaagcgaccgtcgattctccgctgcgccataacagcgtcgaaacttttgatgaatacaataccggcaaaaacgtgggtaaagggacgccgacggtattctgggagattgtcccggattccgaccagtgcagcatttatacctatatggcgggcggcggctgctccctgccggggaaagcgatggtgctgatgccgggcgcgggttatgaaggcgtcactcgctttgtcctcgatgtgatgaccagctatggcctgaacgcgtgtccgccgctgctggtgggcgtgggcgtggcgacttccgttgaaacggcggcgctgctgtcgaaaaaagcgctgatgcgtccgattggttcgcataatgagaatgagcgtgcggcttcgctggaaaaaatgcttgaagacggcatcaataaaattggcctcgggccgcagggcatgtccggtaatacttccgttatgggcgtgaatattgaaaacaccgcgcgccatccatccaccatcggagtggcggtgaacgtcggctgctggtcgcaccgtaaagggcatatcgtttttgataaagacttgaactacaccattacgtctcacagcggagtgaatttctga

SEQ ID NO: 256971 - DNA, 1968 bp, Klebsiella pneumoniae
atggtacataagactgagccagttagagagttagatattaaatatgatgataacggccatccttcttggtgttcttttccatcgcataagaatgttcaggttcgtggggcttgcgatgtgccacctcatctgcctgggcttataatacttgtccatggtgttaactccacaggtgaatggtatcaaaaagcagagtctgcattatgtgcaggattgaataaacgccttggacttgaaggcactaattttgagttaaaggctaacatatatagtggggatgataaaataaaatcagatgagaaaggtgtccaaataagaactccaatgtctccagtagtagaaaggaaattagttactgacaatggccggtcacctgtaattcgattttattggggctactcatcaccattaggtgacgaagataagtttgttattcctttggtaagtattaaaggtgatgattatcatcagatgaagcgagatggcatcccattggatgatattttgaaaaaaggtccttatatatggggcggcggtccttttcagaatggcacgaataatcttcattcgctttggagtaaaaaaggattcaatgaagatttagccaatatacctggtgcaaaagttcaatatggtaatgaagacaaagatcgcttactaaccacagcaccaccacgaaactattatgctcatgccgcgaagcggttagctgatttattggatcttattcgagagaaatatcctaaggatacagttaccataatttcacatagccagggaactatggtttcaatggctgctactgcactggcaaataaagcacctgatgctctatttataatgaattcaccttatgcccttcataatagtcaattgaataccttttcaatgccacctgaagaatgcatttcaccatctggtcgagaaagtactctgtcagcaataattgataaagttgcacttcaatcaacacatttatcttcgttaggctatgaggggttgtgtgtaggtcaatcacaggataataaaaactggaagccagatataattcttgtaacttctgacaaaaatgaaacgagaaatatccaggaaagagataatcacgggaggacttatgtttatttcaatccacatgacagagttatgggttccctccctctgcattcgatagggtggcaaggtttcccaaatgatgaaaaagggaatcctcatccacttatcacccagcataaggggtatttattccagcgaatgcttgccagaaatacaccttgtggtatagctcccgagtcaaaaactccattcggtcgattgccagatggtaaacccttttgggatgatgaaggagatgaataccagagcagtggttttgtgtacccagatccacctcactggcaaactgtattcattaatgccgaggaagtacctgaaccaattaaggaaaatgaactaagtgattttgataaaacaagagtcggtgctgagcatggcccacaggaaaaaaacggttggggagagcgtgatcctaaaactggttataagaatgacgatacttacgataatttcattaatttgtatcccgatcaagatgtcgttattggtgtcaaaaaacaatcggaatatggtacttacggtagcgtaactccagtaacccgtaaggagacgtttgacgaaaaagatcgcaggatacgttcatatgtcgcacaacctacagatcacagtaccttacccagtaatttaaattttatgtcacgagtcgttgcttatgatttacccattggttactgtgaatcgggttgggataaggcttttatcactgatctacgccgtcgagcagactggactcagggactggatacatatttaaaaaacggaattccaaacaatgttactgtgccagaaataatcagcacagaaacagcattggaagaaatgattcgtgtgaagtccaaagaatacggatattga

SEQ ID NO: 256972 - DNA, 1557 bp, Klebsiella pneumoniae
atgaacagcacctccgccgacttccagaatctgtaccaggccctgagccacagcgccgcccgcagcccggatgccctggcgctggcgtttgaggatcggcgctatctgtaccgcgattttcatctgcgggtacagcgggcgatggcgcagcttgatcgcggctggtcgctgcgcaaaggcgaccgtattctgctggcctggggcaatcaccccgctttttgcgaagtcctttttgccgcgctgggtttgggcatcgaagtggtgcctttcagcaccaagcttaagcaggccgaaagcgaggcgctggtaggccatatcgctccccaggttgtcctgttcgatgcgaccgtacaggactggctgaaaaacacccctgacgcgcgtgcggtttcactcagcgaatggcaggcgctctgccttcccgaaccgctgacccgcccgccggtcccggttaaccgcgacgatacggcggtgatgatgttcacctccggcaccaccggagagcctaaaggggcgattatcacccacaataacctgctctgcgcgattgacgcctatacgcaaaaactgaatctcaccgccgcggatagcaccattctggcggtgcctatctatcacatcaccggcctgtcggcgctgctggcgctgtttattagcctcggcgcgagcatctggctgcagcatcggttcaatgccccgcaggtgatcaccaccctgcgcgagcagaacattacctttctgcacggctcgcccaccatttttatccttctttgtcaggctgcgcgtgagcagagcgccagccatcccggcgattttccggcattgcgcacgattgcctgcggcgcgggccacctgagcgatggactgatcaaggagttaaaaaccctgttcccgcataccgcgattcagccgatctacggcctcaccgaaacgacctcgcctgcgacgatttttccgggcgacgtctggggcagcgataaatgcggcagttcaggtcaggcgatcccgggtctcgccattaccatccgcaacgatcgccagcagcccctccccgccggacaaatcggccatatctggctaaaaggcgatgtggtgatccgcgaatactggcagcacagcgagcgacgtccgagctgcgatgcgcagggctggttttgtaccggagatctgggctatctcgacgacgaaggctggctgtacatcaaagaccgcagcaaggacatgatcaatcgcggcggcgagaaaatttactcactggagctggaaaacattctctctacctatcggggagtacgggaagttgccgtcatcccgacccccagcccggtctacggcgaagagcccgtggcgtttatcgtgccggatggccagcatcacctgaccagcgaagagatcctcgactggctcaaggtcaaaatcgcccgttttaagctaccggcgcgcattattttcacccgtgctttaccgcgtacccacaacggcaaagtgagcaaacagcagctcaaaaagcgtctcgcagaatccatcatcacgctatcaacggaggataaaaagtga

SEQ ID NO: 256973 - DNA, 519 bp, Klebsiella pneumoniae
atgcagcgagcctttcgctacgcgatatttcacctgcgccagcaccttcgccccgtagcgtctggcggcgagaacggcgtgcaggacttccagcttcatcacctcttcatcggtcgtgaggttaccgtcttcatcagcatgggtgccgcgcacaatgaccacgtccagaggaagggccggataaaacagatattcgtcgccgcgaaacgtgacgtgctcgatcagattgggtcgttcgcgggtgcgggcgttcatccttccgccctctatgcgcggatcgacaaaggtaccgagaccgacgggagaaagccgccccggcagtccggcggccatcgcgctatagagatgaacgatctgcccctgcggcaggcaccaggcttccacttcgttgttgttgatcatcgccatccagcgcggcgccaggccccagtgcgaaccgataaggcgggtcaccatacccggatgggcaaagtgctggataccgcgctggcgatcgctttgccccgcggcatgcagtag

SEQ ID NO: 256974 - DNA, 2064 bp, Klebsiella pneumoniae
atgctgatcttctgcggctgcgttggtcagagcggcggcggctgggcgcactatgtcggccaggaaaaactgcgtccgcagaccggctggcagccgctggcgtttgctcttgactggcagcgccctgcgcgacatatgaacagcacatcgtacttctataaccactccagccagtggcgctatgaaaccgtgaccgcgcaggaactgctgtcgccgttagcggataaatcccgctacagcggccacctgattgatttcaacgtgcgcgccgagcgtatgggctggcttccgtcggcgccgcagctgggcaccaacccgctgcgtattgcgcaagcggcaaaaaaagcgggcatgacgccggtcgattacaccgtcaaatcgctgaaagagggttccattcgctttgccgcagagcagccggaaaacggtaaaaaccatccgcgcaacctgtttatctggcgttccaacctgctgggctcctcgggtaaaggccacgagtacatgctgaagtacctgctgggtacggaaaacggtattcagggcaaagatctcggcaagcagggcggcgtgaagccggaagaagtggagtggaaagataacggtctcgacggcaagctggatctggtggtgaccctcgacttccgtctgtcgagtacctgcctctactccgacatcgtgctgccgaccgctacctggtatgaaaaagacgacatgaatacctcggatatgcatccgtttattcatccgctgtctgccgccgtcgacccggcctgggaatcgaaaagcgactgggatatctacaaagatatcgcgaaaaagttctccgaagtgtgcgtgggtcatctgggtcaggaaaccgacgtggtaacgctgcctatccagcacgactccgccgccgaactggcgcagccgctggacgttaaggactggaaaaaaggcgaatgcgacctgattccagggaaaaccgcgccgcatattctgaccgtcgagcgcgattatccggcgacatacgaacgctttacctctatcggcccgctgatggagaaaatcggcaacggcggtaaaggcatcgcctggaatacccagagcgagatggatctgctgcgcaagctcaactacaccaaagcggacggcccggcgaaaggccagccgatgcttaacaccgccattgatgcggcagagatgattctgaccctggcgccggaaaccaatggccacgtggcggttaaagcctgggcggcgctcagcgaatttaccggtcgtgaccatacgcacctggcgacgaataaagaagaggaaaaaatccgcttccgcgatattcaggcccagccgcgcaaaattatctccagcccgacctggtccggactcgaagatgagcacgtttcctataacgccggctacaccaacgttcacgaactgatcccgtggcgcacgctttccggccgccagcagctgtatcaggatcaccagtggatgcgtgattttggcgaaagcctgctggtttatcgtccgccaatcgacacccggtcggtgaaaacggtgatgggcgcgaaatccaacggcaacccggagaaggcattgaacttcctgacgccgcaccagaagtgggggatccactccacctacagcgacaacctgctgatgctgacgctgtcgcgcggcgggccgattgtctggatgagcgaagcggacgccaaagatctggggatcgaagataacgactggatcgaagtgtttaacagcaacggcgcgctgaccgcccgcgcggtggtaagccagcgcgtaccggccgggatgaccatgatgtaccacgcgcaggaacgtatcgtaaacctgccgggttctgagatcaccgaacagcgcggggggattcacaactccgtgactcgtattacgccaaagccgacccatatgatcggcggctatgcgcagctggcctacggctttaactactacggcacggtagggtctaaccgcgacgagttcgtggtggtacgtaagatgaagaatattaactggttagatggcgaaggtaacgaccaggtacaggagagcgtaaaatga

SEQ ID NO: 256975 - DNA, 831 bp, Klebsiella pneumoniae
atgattctcgaagatcagagcggtattggtatccgcgttggcttgcgggatatccgagtcgctatccgaatcggcatcgctgtccgaatccgaatcgctgtcggagtccgagtcactgtcggagtcggaatcgctgtcagagtccgaatccgagtcactgtcggagtccgagtcgctgtcggagtcggagtcgctgtcagagtcagaatcgctgtcagagtccgaatcgctgtcagaatccgagtcgctgtcggagtccgagtcgctgtcagagtccgagtcactgtcagaatcggaatcgctgtcagagtcagaatcgctgtcgctatccgagtcgctgtcagaatccgaatcgctgtcgctatccgagtcactgtccgagtccgagtcgctgtcggagtccgagtcactgtcggaatcggagtcgctgtcgctatccgagtcgctgtcggagtccgagtcactgtcagagtcggaatcgctgtcggaatcggagtcgctgtccgaatccgagtcactgtcagaatcggcatcgctgtcagagtcagaatcactgtccgaatcggaatcgctgtcagagtccgaatcgctgtcagaatccgagtcactgtcagaatccgagtcactgtcagaatcggaatcgctgtcagagtccgaatcgctgtccgaatccgagtcgctgtcggagtcagaatcgctgtcggaatcggagtcactgtcagagtcggcatcgctgtcggaatcggagtcgctgtcagaatcggaatcgctgtcagagtcggaatcgctgtcggaatccgaatcgctgtccgagtcagagtcgctgtctga

SEQ ID NO: 256976 - DNA, 918 bp, Klebsiella pneumoniae
  misc_feature (164)..(173): n is a, c, g, or t
atgaaaataaccaaagaccaggtggtctacgccatgtcgcgcgataacgcacctgtcgctaccgtcagcagcggaagcgaagtgctgtttgaaacctgcgactgcttctccgaccaaatcacctccgccgatgccgtgttcaacgagctggactggcagcgcannnnnnnnnncccggcgaccgggccggtctacgtcgagggcgccgagccgggtgatgcgctcaaggtcaccatcaagcgcattaccctgagcagccagcaggcggtgatggtcaccgcgccgcagctcggagtgattggcgatgagcttgatgccccgaaggtcactatcgtccccattgaaaacgaccatgccatactgcccggcaacgtgcgcgtcccgctcaacccgatggtcggcgtgatcggcgtcgcgcctgccggggaagccatctcctgcggcacgccggatagccacggcggcaatatggactgcaaaatgattaccgccggcagcaccctgtggctgccggtcaacgttcccggcgcgctgttcgggctgggggatttacacgccgcgatgggcgatggcgaagtctcggtctgcggtctggaaatccccggcgaagtgctggtcgaactgacggtggttaaaaaccgccgcttgccgctgccgatgctcgaaaacagcgagaccctgtttaccctcgcctcggcgctgaccctcgatgatgccgccgccctggccacccgcaatatggcgcactttatcgccgacaatacctccctggcgctggctgaagcgatcagtattctgagcatcgccggcgacctgcaaatctgtcaggtagtcgacccgctgaaaacctgtcgttatgccttacccaaatcagtggctgaacagctctccctgagcatcgaaggggagcaggcatga

SEQ ID NO: 256977 - DNA, 1128 bp, Klebsiella pneumoniae
atggctgaagttattttcaacaaactggaaaaggtctactccaacggcttcaaggcggtacatggtatcgatctgaaaatcgcggacggcgagtttatggttatcgttgggccgtccggctgcgccaaatcgactaccctgcgcatgctggctggtctggaaactatcagcggcggcgaagtgcggatcggcgaaaaaatcgtaaataatctcgcgccaaaagcgcgcggcattgcgatggtgttccagaactacgcgctctatccgcatatgacggtgcgcgagaacctcgccttcggtctgaagctgagcaagctgccaaaagaccagattgaggcccaggtaaacgaagcggcgaaaatccttgagctggaagaactgctggaccgcctgccgcgtcagctctccggcggtcaggcacagcgcgtagcggttggccgcgcgattgtgaaaaagccagatgtattcctgttcgatgaaccgctctctaaccttgacgccaagctgcgcgcctcaatgcgtattcgtatttccgacctgcataagcagctgaaaaaatccggtaaaccggcgaccaccgtctacgtcacccacgatcagaccgaggcgatgaccatgggcgaccgcatctgcgtgatgaagctgggccatatcatgcaggtggataccccggacaacctctatcacaagccgaaaaacatgtttgtggccgggtttatcggcgcgccggagatgaatattcgtcccagccagctggttgagcaagcgggtcgcctgcatctgaccgttggcgacgggctgctgccgctaaatgaccgactgcagagcaaggtcgacacccataagaaccagcaggtgttctttggcgtgcgtccggaatttgtctccatctccgatgaaccgtttgctgaaggctcctgcccgggcgagatggtgcgcgtggaaaacatgggccatgaattcttcgtctacctgaaggtggccgattatgaactgaccgcccgcgtgccttcagatgaagcgaagccaatgattgagaaaggacttcatcgcacggtgcatttcaaattcgatctcaacaagtgtcatatctttgacgccaaaactgaacagaacatctctctgtga

SEQ ID NO: 256978 - DNA, 705 bp, Klebsiella pneumoniae
ttgcgcgttcaccagatcttcaaccgcgcggatctcctccggcttcatcgcctcaaaatgcgagaagtcgaagcgcagcgctttgtcgttgaccagggagcctttctgcgcaacgtgcgtaccgagaacctgacgcagcgccgcgtgcatcaggtgcgtcgcggagtggttcagacggatacgctggcggcgagcctgatcgacatctgcctgtacggcgtcgccgaccttcagcgaaccgccattcagtttaccaatatgaccaattgcctgaccgtatttctgtgtatcgctgaccaggaaggagaaaccggcgcccttcagctcgcctttatcccccacctggccgccggattcagcgtagaacggcgtctggtcgaggatcactacggcttcctgaccggcgttcaccgcatctaccgctttgccatcgataaacagggcagtcactttgccgttcagttccaggctgtcatagcctttaaactcagaggcgccgtcaacgcggatcatcgcgttgtagtccgcgccaaaaccgctggattcgcgtgcgcgacggcgctgctcttccattgcggcttcaaagccggcttcgtcaaccttgatgttgcgttcgcggcaaacgtcggcggtcaggtcaaccgggaaaccgtaggtatcgtacaggcggaaagcggtttcgccgtccagcgtgtcgccctgtag

SEQ ID NO: 256979 - DNA, 747 bp, Klebsiella pneumoniae
gtggatgcccattgcgtcgaagttttcaatagagcagacgatgatgcagttgtcgtttttatcacgcaccacttccatctcgtactctttccagccaatcagcgactcatcaatcagcagctcattcgtcggcgagagatccagaccgcgttcgcagatttcttcgaactcttcacggttgtaggcgataccgccgccggtgccgcccatagtaaaggaaggacggatgatgcacgggaagccaacttcagcggcaaccgccagcgcttcttccatggtatgtgcgatcccggaacgcgcggtgtcgaggccaattttcttcattgccacgtcgaaacggcggcggtcttccgctttatcaatcgcgtcggcggtcgcgccaatcatggtcacgccgaactctgccagcacgccctgacgctccagctccagcgcgcagttcagcgccgtctggccgcccatggtcggcagaaccgcatccggacgctctttctcaatgatcttgcgcaccacttcccagtgaatcggctcgatgtaggtagcatcggccatttccgggtcggtcatgatggtggccgggttagagttcaccagaatgacgcggtagccctcttcgcgcagcgctttacacgcctgggcgccggagtagtcaaactcacacgcctgaccgataacaatcgggcccgcgcccagaatcaggatgctttttatatctgtacgttttggcatggctctcttaactcctga

SEQ ID NO: 256980 - DNA, 684 bp, Klebsiella pneumoniae
atggatctggcgaaggaagtaaccaccgcagaaacctacagctggacgcagggaagctggacccttgcgggtgacctgccggaagccaaagcggaaagcgagctgccgtttcacgtggtggcctacgatttcggcgccaagcgcaacattttgcgcatgctggtagaccgcggctgccgtctgacggtggttccggctaagactcctgccgaagaggtgctgaagatgaatccggacgggatcttcctgtccaacggtcccggcgacccggcgccttgtgactacgctatcgacgcgattgagaagtttctggaaaccgacgttcctgtattcggcatttgcctcggccaccagctgctggcgctggcgagcggcgcgaagaccgtgaagatgaagttcggccaccacggcggcaaccatccggtaaaagatattgataacaacgtggtgatgatcaccgcgcagaaccacggtttcgcggtggatgaagcgtctatgccggccaacctgcgcgtcacccataagtcgctgttcgacggcaccctgcaggggattcatcgtactgacaaaccggcgttcagcttccagggacacccggaggcgagccccggcccgcacgatgccgcaccgctgttcgaccattttatcgagttaattaagcagtaccgtcagtccgcgaaataa

SEQ ID NO: 256981 - DNA, 972 bp, Klebsiella pneumoniae
atgagtaagatttttgaagacaactccctgactatcggccatacgccgctggtacgactgaaccgcatcggtaacgggcgcatcctggcaaaggtagaatcacgtaacccgagctttagcgtaaaatgccgtatcggtgccaatatgatttgggatgccgaaaaacgcggcgtgctgaaacccggcgttgagctggtagaacctaccagcggtaatactggtatcgcgctggcctacgtggcggcggcgcgcggttacaaattgacgctgacgatgcccgagacgatgagcatcgaacgtcgtaaactgctgaaggcgctgggcgccaatctggtcctgaccgaaggcgcaaaaggcatgaagggcgccatccagaaggccgaagagatcgtcgccagcaatccggagaaattcctgctgctgcagcagtttagcaacccagccaacccggaaattcacgaaaaaaccaccggcccggaaatctgggaagataccgatggtcaggtcgacgtcttcatctccggcgtcggtaccggtggtacgctgaccggcgtgagccgctatatcaaaggcaccaaaggtaaaaaagatctgattaccgttgccgtagaacctaccgattccccggttatcgcccaggcgctggcaggcgaagagcttaagcccggcccgcataaaattcagggtattggcgcaggcttcattcccggcaacctggatttgaaactggttgataaagtggtggcgatcaccaacgaggaggcgatctccaccgcacgccgtctgatggaagaggaaggcattctggctggtatctcttccggcgccgccgttgccgctgcgctgaagctgcaggaggatgaatcctttaccaacaagaatattgtggttatcctaccctcttcaggtgagcgctatttaagcactgcattgtttgcggatctgttcacagagaaagaactgcaacagtaa

SEQ ID NO: 256982 - DNA, 762 bp, Klebsiella pneumoniae
atggtttcatcatccgtaacgaccccgcgcagtggcgtctactatttttcgcagggttggaagctgatcgggctgccggggatccgtcgatacgtcttcctccctctactcgtcaacatcgtgctgatgggtggcgcattctggtggttgttcacgcgactggatagctggatcccttctttgatgagccatgttcctgaatggctgcaatggcttaactatctgctgtggcccatcgtcgtcatttctattctgctggtgttcggctacttcttctcgactatcgccaactggattgccgcgccctttagcggcctgctggccgagcagcttgaggcgcgtctgactggcgcgacgcctccggacgtcggaattttcggtatcctgaaagatgtgccgcgcatcatgaagcgcgaatggcagaagtttgcctggtatctgccgcgggcgatcgtccttttgcttctctattttattcccggtttcggccagaccgtcgccccggtgctgtggttcctgttcagcgcctggatgctggcgattcaatactgcgattatccttttgataaccataaagtgccgtttaaaaccatgcgccaggcgctacgcacccgcaaagtcaccaacatgcagtttggcgctctgaccagcctgtttaccatgatcccggtgctcaacctcgtgatcctgcccgtcgcaatttgcggcgcgacggcgatgtgggtcgattgctaccgtgacaaacacgcgatgtggaaatag

SEQ ID NO: 256983 - DNA, 573 bp, Klebsiella pneumoniae
atgcggcatcgtcaggctatcccagccgtcaggcttcagggcgctgtcgttgagatcgaccacctggctgtactccgagttggtcgacaggctatgcgcatacgggtcggtgacttcatactgttcaaccttgcgcgactgcgggtgataaaccgtcatcgcatagcggtagaacgcgcctttcagatcgctgcccccctgccacgaccacgcgccggaagcgctgtcgcgggccataggatggctgccaatcacttttttgtccgcgctgtagaccaccacatccacctgctgagcagtcggcgcccagacgcggaaggtgacgccgccgtcggtcaactgcgcgccgtagctcagcgcttccgccgcttcggcataggtgtcatccaggacgcccgccgtctgcacctgggtggcggaaatcaggatcccgtcctctgcggcggcaatggcgaccgtttcgccctgcagcagctcgtcaacgttcgcattgtccggcagcttaaaagccgcatagctggaaagatgcgggaaacgcatgctgacctgttgattgaccgtagtcggcgttag

SEQ ID NO: 256984 - DNA, 1047 bp, Klebsiella pneumoniae
atggtcatgatcggctattccgactcggcgaaagatgcgggcgtaatggccgcctcctgggcgcagtaccaggcgcaggacgcgttaattaaaacctgtgaaaaggccggcattgagctgacgctgttccacggccgcggtggttctatcggtcgcggcggcgcgccggcgcacgcggccctgctctctcagcctccgggaagcctgaaaggcggcctgcgcgtcaccgaacagggcgagatgatccgctttaaatacggtctgccggaagtcaccatcagcagcctgtcgctttacaccagcgcgattctggaagccaacctgctgccgccgccagagccaaaagcgcaatggcgcgacatcatggccgagctgtccgacgtctcctgcgagatgtaccgcggctacgtgcgtgaaaataaagatttcgttccttacttccgttccgctacgccggagcaggagctgggtaaactgccgctgggctcgcgcccggccaaacgtcgcccgaccggcggcgtcgagtcgctgcgcgccattccgtggatcttcgcatggacgcaaaaccgcctgatgctgccagcctggctgggtgccggcgctgcgctgcaaaaagtcgtcgaaggcggcaagcagagcgagctggagagcatgtgccgcgactggccgttcttctctactcgtctcggcatgctggagatggtctattcaaaagccgatctgtggctggcggaatattacgatcagcgtctggtgaagcccgaactgtggaagctgggcgaagagctgcgcgaactgctgtctgctgacatcaacgtggtgctggccatcgccaacgattcccacctgatggccgacctgccgtggatcgcggagtccatccagctgcgtaatatctataccgacccgctgaacgtacttcaggccgaactgctgcatcgttcacgcctggcggaagagaaaggtgaaaaaccggatccgcgcgttgaacaagcgctgatggtcaccatcgcaggcgttgcggctggtatgcgtaacaccggctaa

SEQ ID NO: 256985 - DNA, 648 bp, Klebsiella pneumoniae
atgacccgaaagatttccgcgcttatgcttggtatgagcctggtcctggcgagcagccaggctgttgcccacggccaccatagtcatggcccggcgctgaccgaagcagagcaaaaggcgagtgaaggcatttttgccgaccaggatgtaaaggacagggcgctgagcgactgggacggtatctggcagtcggtaaatccctatctgctgaacggcgatttagatgccgtgctggagcagaaggccaaaaaagccggtaaaagcgtggcggaatatcgggaatactataagaagggctatgccaccgatgtggaccagattggtatcgaagataacgtcatggagtttcacattggaaaaaccgtgaatacctgtaagtacgcctattccggttacaaaatcctgacctacgcatccggtaaaaaaggcgtgcgctacctctttgaatgccagcaggcggattcaaaagcgccaaagttcgtccagtttagcgatcacaccattgcgccgcgcaaatcccaacatttccatatctttatgggcaatgagtcgcaggaagcgctgctgaaagagatggataactggccgacctactacccttacgcgctgcataaagagcagattgtcgacgaaatgctgcatcactaa

SEQ ID NO: 256986 - DNA, 1173 bp, Klebsiella pneumoniae
  misc_feature (1137)..(1146): n is a, c, g, or t
atggagttcagtgtaaaaagcggtagcccggagaagcagcggagcgcctgtatcgtggtcggcgtctttgaaccacgtcgtctctcccccatcgccgagcagcttgataaaattagcgacggttatatcagcgccctgctgcgtcgcggcgagctggaaggcaaacctggccagactttattgctgcaccatgtgccgaacattctgtcggagcgcattctgcttattggctgcggtaaagaacgcgagctggatgagcgtcagtataagcaggttattcagaaaaccatcaatacgctgaatgatactggttcaatggaggccgtctgcttcctgaccgaactgcacgtcaaaggccgcaataactactggaaagtgcgtcaggccgtcgagaccgccaaagagacgctatacagcttcgaccagttaaaaaccaacaaaagcgagccgcgtcgcccgctgcgtaaaatggtcttcaacgttcccacccgtcgcgagctgaccagcggcgaacgcgctatccagcacggtctggcgatcgccgccggcatcaaagcggcgaaagatctgggcaacatgccgcccaacatctgtaacgccgcgtatctggcctcccaggcgcgccagctggccgatacctatagtaagaacgtcattacccgcgttatcggcgagcagcagatgaaagagctgggaatgaactcttatctggcggtcggcaacggctcgcagaacgaatcgctgatgtcggttatcgaatacaaaggtaacccggcggaagacgcgcgtcctatcgtgctggtgggtaaaggcctgacctttgactccggcggtatctccatcaagccttcagaaggcatggacgagatgaaatacgatatgtgcggcgcggcggcggtgtacggcgtgatgcgcatggtggcggaacttcagttgccgttgaacgttgtcggcgtgctggccggatgtgaaaacatgcctggcggccgcgcctatcgtcctggcgacgtgttgaccacgatgtccgggcaaacggtggaagtgctgaacaccgatgccgaaggtcgcctggtgctgtgcgatgtgctgacttacgttgagcgtttcgagccggaaacggttatcgacgtggccacnnnnnnnnnnatcacaatccgctggcccacgagctga

SEQ ID NO: 256987 - DNA, 204 bp, Klebsiella pneumoniae
atggccaatatcggcggccgtcctggcggagcgattaccgcaggctgcttcctggcgcgctttacccgtaaatacaactgggcgcatctggatattgccggcaccgcctggcgttccgggaaagccaaaggcgcgaccggtcgtccggtggcgatgctgtcgcagttcctgctcaatcgcgccggatttaccggcgaagagtaa

SEQ ID NO: 256988 - DNA, 150 bp, Klebsiella pneumoniae
gtggatttcgacctcaatcctgacttcttcgctgaagtggtgattggcctggccgatgaagatggcggcgaaattaacgatatttttgcacgcgtgctgctttgccgcgagaaagaccacaagctctgccatatcctgtggcgcgaataa

SEQ ID NO: 256989 - DNA, 837 bp, Klebsiella pneumoniae
gtggcttttcatattcatgccgctcgtctgcggctgtatcatttactcttcgatcaaaatcgccgttccggtcgtcattttgagggactttgcggcatatttgccctgctcagcgtgctggtgatatttatcgagtccgggctcggtacgcaatatcatctgacattagacgaatggcatattttcgtctggctcgaacttatcgtcacggcggtttttacttttgagtattttctgcgcattatcagctggccgaatccgctaaagtatattttcagcttctggggaattattgacctggccaccattttaccgctttatgttatgtggctatggcccgagatcagtattgagtacgtgtttgcctggcgggcgatgcgcgccatccgggcgttgcgcatccttaagctactgcgctttatgccgtcgctgaatattttctggtccgctatcgtcagcgcacgccaccagctgatcctgttctattcttttattgccattgtgatggtgatctttggctccctgatgtatctggttgaggggccgcgatacggttttactacgctaaatgcgtcggtttactgggcgatagtgacgataaccacggtagggtatggcgatattacgccgcatacgccgctggggcgcattttggcatccatacttatcttaattggctactcgattattgcgatccctaccggcttaattaccagccatatgaccgccgcctttcagaatcgccgcacgcagcgccagtgtccgcactgtcagcatcacgctcatgaaaaaggtgctcgctactgcaatgcttgcggcagcgaactgccggaataa

SEQ ID NO: 256990 - DNA, 249 bp, Klebsiella pneumoniae
atggcccattgccgcttccgccgccggatcgagcaggctgtcggaaaccggatagccggataccgcctgcaggctgagtggggtgatgaacgcttttgccgcctccgtcatcgcgacacgcacttccgcgccgcgttcacgcagccggcgcaccagttccggggttttatacgccgcgatgccgccgctgacgcccaggacgatttttttacccgccagagtcatcatgatgtcttcctgttgccgtag

SEQ ID NO: 256991 - DNA, 666 bp, Klebsiella pneumoniae
atggacggaatggaaaatctgatgccacgggagaagatgctgcaatacggcatcgaaacgctaacggatgttgagctgctggcgctttttctgcgcgtcggcacgcgtcgtcaggatgtgctcagctatgcccaggcgttactgcagcgttttggctcactctacgctctgctttccgctgataaagcgcaactgattgctgtggacggactggggctggcgaaatatgcgcaactgaagggcattgccgagctggcgcgacgctattttagctcgcagctggtcgaggaggccgcgctggtcaccccctcgatgacgcgcgagtttttacaaagccagctgacggaagaggagcgcgagatctttatggtgatctttttagataatcagaaccgggtgttgaaacatagtcgtcttttttctggtactcttagccacgttgaggtgcatccgcgagaaattgtacgcgaagccatcaaagtgaacgccgccgccgtgatccttgcgcataatcatccctccggtagcccggagccaagtcaggccgacagactgattaccgaaagggtgataaaatgttgtagattcatggagatacgcgtgcttgatcatctggttatcggccgcggtgcgtatgtatcttttgccgaacgtggctggatttag

SEQ ID NO: 256992 - DNA, 666 bp, Klebsiella pneumoniae
atggagatacaggaaaccctcatgccgagggaaaagatgcagcgttacggtatcgaagttttatcggatatcgagctgttagcgctgtttttacgtaccggtacgcgcacgcaggacgtgatgacattttcgcgagagctgctgcagcgatttggctcgctgtacggcctgctttcggcggaagagtcacagttcgctgagatcgaaggcattggtctggcgaaatatgcgcagctaaaagggattgctgaactggcgcgacgctatttcagcctgcggatgacggaagagccctcattggtcaccccgtcgatgacgcgggagtttctgcaaagccagctggccgacgaagagcgcgagatcttcatggtgatctttttagacaatcagaaccgggtattgaaacatagccgacttttttctggtactcttagccacgttgaggtgcatccgcgagaaatcgtacgcgaagccatcaaagtgaacgccgccgcggtgatcctggcacataatcatccatccggaagtcctgagccgagtaaggccgacagattgattaccgaaagagtgataaaatgttgtcgattcatggatatacgtgtgctcgatcaccttgttatcggccgcggagcgtacgtatcttttgctgaacgcggctggatttag

SEQ ID NO: 256993 - DNA, 1809 bp, Klebsiella pneumoniae
atgcgtgttcttgatggtgcggtaatggtttactgcgcagttggtggtgttcagccgcagtctgaaaccgtatggcgtcaggcaaacaaatataaagttccgcgcatcgcgttcgttaacaaaatggaccgcatgggcgctaacttcctgaaagttgttggtcagatcaaaacccgtctgggcgcgaacccggttccgctgcagctggcaattggtgctgaagaaggtttcaccggcgttgttgacctggtgaaaatgaaagccatcaactggaacgatgcagaccagggcgtaaccttcgaatacgaagatatcccggctgacatgcaggacctggctgatgaatggcaccagaacctgatcgaatccgcagctgaagcttctgaagagctgatggaaaaatacctgggtggtgaagaactgactgaagaagagatcaaaaaagctctgcgtcagcgcgttctgaacaacgaaatcatcctggtaacctgtggttctgcgttcaagaacaaaggcgttcaggcgatgctggatgcggtaattgattacctgccatccccggttgacgtacctgcgatcaacggtatcctggacgacggtaaagataccccggctgagcgtcacgcaagcgacgacgagccgttctctgcactggcgttcaaaatcgctaccgacccgttcgtgggtaacctgaccttcttccgcgtgtactccggtgtggttaactctggtgataccgtactgaactccgtgaaagctgcacgtgagcgtttcggtcgtatcgttcagatgcacgctaacaaacgtgaagagatcaaagaagttcgcgcgggcgacatcgctgctgctatcggtctgaaagacgtaactactggtgacaccctgtgtgacccggatgcgccgatcattctggagcgtatggaattccctgagccggtaatctccatcgccgttgagccgaaaaccaaagctgaccaggaaaaaatgggtctggctctgggtcgtctggctaaagaagacccgtctttccgcgtatggactgacgaagagtctaaccagaccattatcgccggtatgggtgagctgcacctcgacatcatcgttgaccgtatgaagcgtgaattcaacgttgaagcgaacgtcgggaaacctcaggttgcttaccgtgaagcgattcgcgcgaaagttaccgatatcgaaggtaaacacgccaagcagtctggtggtcgtggtcagtacggtcacgttgtgatcgacatgtacccgctggagccgggctctaacccgaaaggttacgagttcatcaacgacatcaaaggtggtgtaattcctggcgaatacatcccggccgttgataaaggcatccaggaacagctgaaagctggtccgctggcaggttacccggtagttgatatgggtatccgtctgcacttcggttcttaccacgacgttgactcctctgagctggcgtttaaactggctgcgtctattgcctttaaagaaggctttaagaaagcaaaaccagttctgcttgagccgatcatgaaggttgaagtagaaactccggaagagaacactggtgacgttatcggtgacttgagccgtcgtcgcggtatgctgcgcggtcaggaatccgaagtaaccggcgttaagatccacgctgaagtaccgctgtccgaaatgttcggttatgcaactcagctgcgttctctgaccaaaggtcgtgcatcatacaccatggaattcctgaagtatgatgatgcgccgaacaacgttgctcaggccgttattgaagcccgtggtaaataa

SEQ ID NO: 256994 - DNA, 1275 bp, Klebsiella pneumoniae
atgacagataaacgcaaagatggttcgggcaaactgttgtactgctctttttgcggcaaaagccagcatgaagtgcgtaagctaatcgccgggccatccgtgtatatctgcgacgaatgcgttgatttatgtaacgacatcattcgcgaagaaattaaagaagtcgcgccgcatcgcgagcgcagcgcgctgccgacgccgcacgagattcgccaccaccttgatgactacgtcatcggtcaggaacaggcgaagaaggtgttggcggtcgcggtatacaaccactacaagcgtctgcgcaatggcgataccagcaacggcgtagagttgggtaaaagcaacattctgctgatcggaccgaccggttccggtaaaacgctgctggcggaaacgctggcgcgcctgctggatgtgcctttcaccatggcggatgccaccactctgaccgaagccggttacgtgggtgaagacgttgaaaacatcatccagaagctgctgcagaagtgcgactacgacgtacagaaagcccagcgcggtatcgtctacattgatgaaatcgacaaaatttcccgtaaatcggataacccgtcgatcacccgcgatgtctccggcgaaggcgtgcagcaagcgctgttgaagcttattgaaggcaccgttgccgcggttccgccgcagggcgggcgtaagcatccgcagcaggagttcctgcaggttgatacctctaagatcctgttcatctgcggcggcgcctttgcaggactggataaggtcatttctcaccgtgttgaaaccggttctggtatcggtttcggcgcgacggttaaggctaaatccgacaaggccagcgaaggcgagctgttgtctcaggttgaaccggaagatctgattaagtttggtctgattcctgagttcatcgggcgtctgccggtggtggcgaccctgagcgagctgagcgaagaagcgctgattcagatcctcaaagagccgaaaaacgccctgaccaagcagtatcaggcgctgttcagccttgaaggcgctgagctggagttccgcgacgaagcgctggatgctatcgctaagaaagcgatggcgcgtaaaaccggcgctcgcggcctgcgttctatcgttgaagccgcgctgctcgataccatgtacgatcttccgtcaatggaagatgtggaaaaagtggtcatcgatgcctcggttatcgatggtcagagcaagccgctgctgatttacggcaaaccggaagcgcagcaggcatctggtgaataa

SEQ ID NO: 256995 - DNA, 585 bp, Klebsiella pneumoniae
atggccctggtgccgatggtcattgaacagacctcacgcggcgaacgttcatttgatatttactcccgtctgctcaaggagcgcgtcatttttctgaccggccaggtagaagatcacatggctaacctgatcgtggcgcagatgctgtttctggaagcggaaaacccggaaaaagatatctatctgtacattaactctccgggcggcgtgattaccgccgggatgtctatctatgacaccatgcagttcattaagccagacgtgagcaccatttgtatgggccaggcggcctctatgggcgcattcctgctcaccgccggggcgaaaggcaagcgtttctgcctgccgaactcacgcgtgatgattcaccagccgctgggcggctaccagggccaggcgacggatatcgaaatccacgcccgcgaaatcctgaaggtgaaaggtcgcatgaatgaactgatggcacatcatacgggtcaatctcttgagcagatcgagcgtgacaccgagcgcgatcgcttcctgtctgcctcagaagcagtggaatacggcctcgtcgactccattttgactcatcgtaattga

SEQ ID NO: 256996 - DNA, 723 bp, Klebsiella pneumoniae
gtggtagttctcctccagatccttatcctgcatgatgtgcacgaatgggcgcgcccggctgtgcttccacgccccggcaagctcatcgagcaggttttccgccgggttatggccggtgccgcagtagccctgcttcagccactgttcgaggatcagcccgccttcggtatgacaggacgcggagtcggcgttgtactcatacaccttgagcccgcgctcatccatacagaaatccatacgaccggtaatcatatgatggcgtcggcgctgccacgagaggcgcaggcgcggccagagaattttcggaatatcgaacagcgccagcaggctatcgtccttcatcaccttgtcggtagcgtgcaggtacatcagatgcagctcgttggtggctttgatgagctcctgctcggcgctttcggtaatagtgaaatactggtatgggtctttattgatgacgtggccgttggcttcgacataggctttttgcagggaatctttctcgttgagccagttgccgcgaaactggcctttgttcggcaaccgcgcgcctttaatcgccatcgcctcacccggcagcaccggctgcggcaggctgaattcggtatcggcggtttggatcatccagccaaggatttcggtatcggcaaaggtgtctttaatcgtgtagaggccatttttcacttccagcgtcagctcgcgggtccactgctgcccctgcggtag

SEQ ID NO: 256997 - DNA, 1518 bp, Klebsiella pneumoniae
  misc_feature (706)..(715): n is a, c, g, or t
ttggctgttgttgaagccgtttccaacgaaaaggcgctgccgcgtgagaaaattttcgaagcgttggaaagtgcgttagcaacggctactaagaaaaaatatgaacaagagatcgacgttcgcgtagaaatcgatcgtaaaagcggtgatttcgacacattccgtcgctggctggttgtggaagaagttacccagccgacgcgcgaaatcacgctggaagctgcgcgtttcgaagatgaaagcatgaatcctggcgattacgtcgaagaccagattgaatctgtcacctttgaccgtatcactacgcagactgcgaagcaggttatcgtacaaaaagtacgtgaagccgaacgcgcaatggtcgttgatcagttccgtgagcacgaaggtgaaattatcacgggcgtagtgaagaaagtgaatcgcgacaacattacgctggatctgggcaacaacgctgaagccgtgatcctgcgtgaagacatgctgccgcgtgaaaacttccgtccgggtgaccgtatccgcggcgtactgtacgcagtccgtccggaagcgcgtggcgcgcagctgttcgtgacgcgttccaagccggaaatgctgattgaactgttccgcattgaagttccggaaattggtgaagaagttctcgaaattaaagcggcggctcgcgatcctggctctcgtgccaaaatcgcggttaaaaccnnnnnnnnnnatcctggctctcgtgccaaaatcgcggttaaaaccaacgataagcgcatcgatccggtgggggcctgcgtcggtatgcgcggcgcgcgcgttcaggcggtctcgactgaactgggcggcgagcgtattgatatcgtgctgtgggacgataacccggcgcaatttgtcattaacgccatggctccggctgacgtcgcctctatcgtggtagatgaagacaagcacaccatggatatcgcagtcgaagcgggcaacctggcgcaggccattggccgtaacggtcagaacgtccgtctggcgtctcagctgagcggctgggaactgaacgtcatgaccgttgatgacctccaggctaagcatcaggctgaagcccatgcagcgattgataccttcactaaatatcttgatattgatgaagatttcgccacgctgctggttgaagaaggtttcgccactctggaagaactggcctatgtgccaatgaaagaactgctggaaattgacggtctggatgaaccgaccgttgaagcacttcgtgagcgggcgaaaaacgcgctgaccacgctggcgctggccaaagaagagagcctgggagacagcaaacctgccgacgatctgttgaatctggaaggtatggatcgcaccctggcattcaccctggccgcccgtggtgtttgtacgctggaagatctcgccgagcagggcattgatgatctggctgatatcgaaggcttgaccgacgagaaagccggagaacttatcatggccgctcgtaatatttgttggttcggcgacgaagcgtaa

SEQ ID NO: 256998 - DNA, 426 bp, Klebsiella pneumoniae
atgctgttcaacctgcacggtcaccacgaccggcaccagcggcgcatcaaaagcgaagccaagctccatcaggcgatgaagcgcttcctgtccggcgggcgaagcgccttgatcaagatattgaccaaacagggtatcgcgcagacgctgtcgccagttggtttcccgcatctctatggcctggcggaccagcagctcggcggtgagtaccgccagttcagcatagcggctgatcgctgcgggatcgccgctgatgcccaccaccatcaccacgcgatcgtcatagataatgggatgattaataccgggatgcacattctggaaacgcgcggcttccgcggtgttgttaatacaaatgcgtttaccggtacgtatcacctcacgggcgatctcatgctgctcgccgatacgatgccgttcacctga

SEQ ID NO: 256999 - DNA, 1176 bp, Klebsiella pneumoniae
atgaagattgttatcgcgctggattcgtttaagggtagctgtagcgcgcaggccgcttgcgcagcggtagcacaggggttgcgccgggttgacgaggggctggagctggtcgaaatgcccgtgtcggacggcggagaggggctgctctcggcccttgcggaaagtccgcagctgaagggcgcaaggtggcagcagcagcattgcacctcgccttacggtctctccgtagaggccgcgtttctgatcctgcccggcgaacgggccattatcgagatggcgcaaagctgtgggctggagctcacgccgaaagcgcagcgggatgtgcgtctggccagcagctttgggctgggtgagcaggtaaaagcggcgctggatgccggatgtcggcatttgattatcgggctgggcggcagcgcgaccaacgatggcggtatcggttttgcccaggcgcttggcgcccgcttctggcgcgaggacggcacgctgctgccggttcccgcggcgggtcaggatcttgcgcatattcagcgcatcgatttaagcgccatggatccgcgcttacgacaggccgaaatacaggcctcctgcgacgtcacgaatcctctgcttggggaaaatggcgccacctgggtgtatggcgcgcagaaaggcgcggacgaggccgcgctcagggaactggaggcgggtatggcgcactacagtcggcagcttacgcaaacgctcggctacgacgtcagcgaacggcccggcgccggggccgcgggcggtatgggggccgcgctgatcgcttatgcgggcgccacgctgcgcccgggcattgacctggtgctggaactgcttaacgccgaccgccatcttagcgatgccgcgctgaccatcgtcggggaaggctggctcgatcgtcagagcgcctttggtaaagccccggtgggcgtggcgggcaaagcggcgcgccacggcgtaccggttgtggccctttgcggcggacgcgatgagagcagtcggcaattgtatcaacaccatattgacgcgatgtggtctatttgccagcgccctatgccgctggcggagtcgatgaacacatgcgaacagctcctcgccgacgcagcggagaatgttctacgaacctttctgagcgggcggcgcggagaggcacataagcggataactgtatga

SEQ ID NO: 257000 - DNA, 492 bp, Klebsiella pneumoniae
gtggcctgtcttctgttccggctcgacttcaacgtactcggcgttattcatttgttcgaacgccagttcgcggacgcgataagaaagggtcgcggagaacagcatgttcaggcgctgagtggccggcggcatgcggcggaacagccagcggatatctttaataaagccgagatcgtacatgcgatcggcttcgtccagcacgacaacctgaatggcgccgaggttaatgtggttctgcttcgcgtaatcgatcagacgaccagtggtgccgatcagaatatcgacgccgctttccagcactttcaactgcttatcgtagccgtcgccgccgtaagccagacccagcttcagaccggtggcctgcgccagtggctcagcgtcggcgtggatctgtaccgccagttcacgcgtcggcgccataatcagcgcgcgcggttggttaacctggcgatcggcgatagccgggtgagagagaagataatgaaacgttga

SEQ ID NO: 257001 - DNA, 330 bp, Klebsiella pneumoniae
atgagcgataaaattattcacctgactgacgacagttttgacacggacgtactcaaggctgacgggctgaccctcgtcgatttctgggcagagtggtgtggtccgtgcaaaatgatcgccccgattctggatgagatcgctgaagagtatcagggcaaactgaccgtagctaagctgaacattgaccagaacccgggcactgcgccgaaatacggcattcgcggtatcccaaccctgctgctgtttaaaaacggcgaagtggcggccactaaagttggcgcactgtccaagggtcagctgaaagagttcctcgacgctaacctggcgtaa

SEQ ID NO: 257002 - DNA, 1053 bp, Klebsiella pneumoniae
ttggcgatcctattcatcctgttactgattttcttttgtcagaaattagtcaggatcctcggcgccgcggtggatggcgatatcccaaccaatctggtgctctcgctgttggggctcggcatcccggagatggcgcagcttatcctgccgttaagtctgttccttggcctgctgatgaccctcggcaagctgtacaccgaaagtgaaattacggtgatgcacgcctgcggcctgagcaaagccgtgctgatcaaggcggcgatgatcctcgcgctgttcaccggcgcggtggcggcggtgaacgttatgtgggcggggccgtggtcgtcgcgccatcaggacgaggtgctggccgaagctaaagctaaccccggtatggcggcgctggcccagggccagttccagcaggccagcgatggtaacgcggtgatgtttatcgaaagcgtcaacggcaaccgcttccatgacgtcttccttgcccagctgcgtccgaaaggcaatgcgcgcccctcggtggtggtggcggattccggcgagctgtcgcagcagaaagacggctcgcaggtggtgaccctcaacaagggcacccgctttgaaggcaccgcgatgctgcgcgacttccgcattaccgacttcaataactatcaggctattatcggccaccaggcggtgagcgccgatccggacgacaccgaacagatggatatgcgcaccttgtggaaaacccacaccgaccgcgcgcgcgccgaactgcactggcgcttcacgctggtggcgaccgtcttcattatggcgctgatggtggtgccgctcagcgtggtgaacccgcgtcagggccgcgtgctgtcgatgctgccggcgatgctgctttacctggtgttcttcctgctgcaaacgtcgattaagtcgaacggcggcaaaggcaaaatggacccggctatctggatgtgggcgattaacctgctctattttgcgctggcggtgctgttaaacctgtgggacacggtgccgatgcgccgcttccgcgcccgttttaataaaggagcggcctga

SEQ ID NO: 257003 - DNA, 1809 bp, Klebsiella pneumoniae
atgcgtgtgcttgatggtgcagtaatggtttactgcgcagttggtggtgttcagcctcagtctgaaaccgtatggcgtcaggcaaacaaatataaagttccgcgcattgcgttcgttaacaaaatggaccgtatgggtgcgaacttcctgaaagttgttggtcagatcaaaacccgtctgggcgcgaaccctgttccgctgcagctggcgattggcgctgaagaagcgttcaccggtgttgttgacctggtgaaaatgaaagccatcaactggaacgaagaagatgcaggcgtaaccttcacctacgaagatattccggcagacatgcaggaactggccgaagaatggcaccagaacctgatcgagtccgctgctgaagcttctgaagagctgatggaaaaatacctgggtggcgaagaactgactgaagaagagattaaaactgctctgcgtcagcgtgttctgaacaacgaaatcatcctggtaacctgtggttctgcgttcaagaacaaaggcgtacaggcgatgctggatgcggtaattgactacctgccatccccggtcgacgttcctgcgatcaacggtatcctggacgatggtaaagatactcctgctgagcgtcacgctagcgatgatgagccgtttgctgctctggcattcaaaatcgctaccgacccgttcgtgggtaacctgaccttcttccgcgtgtactctggtgtggttaactctggtgataccatcctgaactccgtgaaagctgctcgtgagcgtttcggtcgtatcgtacagatgcacgctaacaaacgtgaagagatcaaagaagttcgcgcgggcgatatcgctgctgctatcggtctgaaagacgttactacgggtgatactctgtgtgatcctaacgcgccgatcattctggagcgtatggaattccctgagccggtaatctctatcgctgttgaaccgaaaaccaaagctgaccaggaaaaaatgggtctggctctgggccgtctggctaaagaagacccgtctttccgcgtatggactgacgaagaatctaaccagactatcatcgccggtatgggtgagctgcacctcgacatcatcgttgaccgtatgaaacgtgaattcaacgttgaagcgaacgtcggtaaacctcaggttgcttaccgtgaagcgattcgcgcgaaagttaccgacatcgaaggtaaacacgctaaacagtctggtggtcgcggtcagtatggtcacgtcgtaatcgacatgtacccgctggagccgggctctaacccgaaaggttacgagttcatcaacgacattaaaggtggtgtaattcctggtgaatacatcccggccgttgataaaggcatccaggagcagctgaaagctggtcctctggctggttatccggtagttgatctgggcgtgcgtctgcacttcggttcttaccacgacgttgactcctctgaactggcgtttaaactggccgcttctattgccttcaaagatggctttaagaaagcgaaaccagttctgcttgagccgatcatgaaggttgaagtagaaactccggaagagaacactggtgacgttatcggtgaccttagccgtcgtcgcggtatgctgcgcggtcaggaatccaacgtgactggcgttgtgatccacgctgaagttccgctgtctgaaatgttcggatatgcaactcagctgcgttctctgaccaaaggtcgtgcttcttactccatggagttcctgaagtatgatgatgcgccgaacaacgttgctcaggccgtaatcgaagcccgtggtaaataa

SEQ ID NO: 257004 - DNA, 840 bp, Klebsiella pneumoniae
atggccagcacgactaaacccgcccgcaaaaagtttcgcgttgcggtttccggcgccaccgttgacgggcgcgagatccagccgcagcacctccgcgatgcggcggcgagctacaacccggacgtttacggcgcccgcgtaaacgttgagcactatctctccatgcttcctgacagcaattttggcgccatgggggatgttgtggcattaagcgcggaggatatcaccgaagggccgctggccggtcgtacggcgctctatgccgagatcgacgcgtcggcacgaatgaaggagctcaccgatgaaggaaaaaaaatctattccagtattgagctgcatccgcagtttgcccttaacggcaaggcgtatgtggtcggcctggcgatgaccgacactccggcaagtctggggactgagcgccttaaatttgccgcgcagcagcgcgcgcaggtgatggcgttcaataaccagcagatcgaggcgccgctgttctctgatgcgcttgaagctgaagtgatcgaactggcagctcatcgcagcgaggagagcgtcaactggttcaaccgcgtgatgggcatccttggcaaaggccagaaaaccgacgatcagcgtttcagtcagttgcatcaggttgttgaagccgttgctcaatctcaggcagaccagattgaccggttcagtgccctggaacagaaccgccaacaggataaagccaccattcagcaactgaccagcgaacttaacgagctgcgcggtcagcttcagctccagcccgcagaaaattacagcgcacgaccggcggcaaccggcaacagcagcgcgcagcttgcagacttctaa

SEQ ID NO: 257005 - DNA, 1035 bp, Klebsiella pneumoniae
atggaaaaccagacccgcgaactatttgataagtacattgtgcgccaggcacatctgaacggtgtctcaccctcagccgttgccaatcgtttcagcgtcgatccgactatccagcaaaaactggaacaggccgccatggagtcggatgacttcatgaagctggttaaccactttggggttaaagagcaggaagggcagaaagtaaaaattggcagtaagggaccgatggcgagcaccaataacagctcggacggcaccaaccgccgtaaccctgcaccgaaccataacaaagagccgcagaactaccactgccgcaaaaccaactatgactatgcgctttcgtatgcggagctggacgcgtgggccggtcaccctgaatttcagtcattaatcagtaatgcgatggctcgtcagctggggctggatcgccagatgattggctttaatggcacgcattactctgaaaactccgaccgcacgacctacccgttattgcaggattgcggcgttggctggctgcaaaaaatccgcaatgaagcgccgcagcgcattatgccgggtatcacgctgacctcccgtgatgagaataacgcggtaattgcgtcaggcacctacggcaatattgatgccgccgtgcttgatgcgcgtcacagccttatggatccctggttccgccgcgctcccggcctggtgactgtgctctcgtccgatctgctgctgaaagtgaacctgccgaaagtgaacgcgctcagccagaccaatccgaataccgaactgctggccgcgcagctcattgtcagccaggaaaagatcggcggcctgccgacggtctttgtcccgggtattcctgaagacgtcgtgctcatcaccaacctgaaaaacctctctgtgtattaccagaaaggctccctgcgtcgctctatccgcgaagagccgcactacaaccgcgtggcgacttaccagtccagcaatgatgactatgtcattgaagagtacggcatgattgccatgatcgacggcgtgacattcgcctga

SEQ ID NO: 257006 - DNA, 483 bp, Klebsiella pneumoniae
atgactaagaaaaaagcccacaaacctggatcagccaccattgcgctgaataaacgcgctcgtcatgaatactttatcgaagatgaatacgaggcgggtcttgccctgcagggatgggaagttaaatctctccgcgcaggtaaagccaatattggcgacagctatgtcattttgaaagatggcgaagcctatctgtttggcgccaacttcacgccgatggcggtagcgtccacccactacgtatgcgacccaactcgtacccgtaagcttctgctcaatcagcgtgaactggataccctatacggacgtatcaaccgtgaaggttacaccgtggtcgctctttccctgtactggaagaatgcctggtgcaaagtcaaaatcggcgtagcgaaaggtaagaaacagcacgacaagcgcaccgatataaaagatcgcgagtgggcagttgataaagcccgcattatgaaacacgcaggtcgttaa

SEQ ID NO: 257007 - DNA, 438 bp, Klebsiella pneumoniae
atgcctcagattagccgtaccgcgctggtgccgttcagtgctgaacagatgtatcaactggtaaatgatgtaaagtcctatcctgattttctgccgggctgtaccggtagccgggttctggagcttgggccgacgcaaatgactgcggcggttgacgtatccaaagcgggtatcagtaagaccttcacaacgcgaaatacgctcaccagtaaccagagcatcctgatgagtctggtcgatggtccgtttaaaaagctgattggcggctggaaatttatccccttaagcccggaagcgtgcaaaattgagtttcatctcgattttgaattcaccaataagctgattgaaatggcgtttggtcgtatcttcaaagaactggccatgaatatggttcaggcattcacgacgcgcgctaaagaggtctacagtgccggctaa

SEQ ID NO: 257008 - DNA, 291 bp, Klebsiella pneumoniae; identical to SEQ ID NO: 173528

SEQ ID NO: 257009 - DNA, 267 bp, Klebsiella pneumoniae
gtggtttaccgtcctgacatcaaccagggtaactatctggcaccaaccgatgtagcaaaagttcgtgtcggcatgacgcaacaacaggttgcctatgccttgggtacgccgatgatgtcggatccgtttggcactaatacctggttctacgttttccgtcagcagcctgggcatgaaaaagttacccagcagacgcttaccctgacctttaacagcagcggtgtgctgaccaacattgataacaaacctgccctgacggcggagtaa

SEQ ID NO: 257010 - DNA, 477 bp, Klebsiella pneumoniae
atggcagttgcgaacgttgtcttctttattatctacggcggcttattgctcactctcagctggcacgatctgcgctatggcttgctacccgataaattcacctgccctctgctctggagcgggctgctttactatgtatgtatgtcgccggtcaatctgccgcatgcggtatggggagcgatagcaggctatctggcctttgcgttgatttattggttctacaggggagcacgtgggtctgaaggtatcggctacggtgatgtaaagttactcgccgcactcggagcctggcatggctggagagctttaccgcagctggttcttatcgcaacgattctggcatgcgctgccgtagcagtagtgattctacgcaccagagaaagagaggcattacataacccgctaccttttggcccttttctggccgtagcgggtttatcatctgaaggtgtgacctttcttagtccgccactttaa

SEQ ID NO: 257011 - DNA, 477 bp, Klebsiella pneumoniae
atgaaaggtgatgtcaaaatcataagttatctcaataaattattgggaaatgagctggtcgcaattaatcagtactttctccatgcgagaatgttcaaaaactggggcctgatgcgcctcaatgatgtcgaataccatgaatccatcgatgaaatgaagcatgccgataagtatattgagcgtattttgtttcttgaggggatccctaacctgcaggacctcggtaaactccgcattggggaggacgtcgaggagatgctgcaatctgacctgaggctggaactggaaggggcaaaggatctacgagaagccattgcctatgccgacagcgtccatgactacgtcagccgggatatgttaatcactatccttgcagacgaagaagggcatatcgattggcttgaaaccgaactggatctcatagctaaaattggtctgcagaattatcttcagtcgcagattaaagtggcggactaa

SEQ ID NO: 257012 - DNA, 195 bp, Klebsiella pneumoniae
atgtacgtttgtctgtgtaatggtgtgaacgataaaaaaattcgtcaggctgtgcgccagtttcatcctcagtctttccagcagttgcgcaaatttattcccgtgggaaatcaatgcggtaagtgtgtgcgtgcggcccgcgaaattatggaagatgaattaacccgcatgccggaatatcaagagattgcctga

SEQ ID NO: 257013 - DNA, 384 bp, Klebsiella pneumoniae; identical to SEQ ID NO: 177051

SEQ ID NO: 257014 - DNA, 546 bp, Klebsiella pneumoniae
atgtctgaagctcctaaaaaacgctggtacgtcgttcaggcgttttctggttttgaaggtcgcgtagctacctcgttgcgtgaacatatcaaattacacaatatggaagagctgtttggcgaagtcatggtgccgaccgaagaagtggtcgaaatccgcggcggccagcgtcgtaaaagcgaacgtaaattcttcccgggctacgtgctggtccagatggtgatgaacgacgcgagctggcacctggtgcgcagcgtaccgcgtgtgatgggctttatcggcggcacttctgaccgtccggcgcctatcagtgacaaagaagtcgatgcgatcatgaaccgtctgcagcaggttggcgataagccgcggccgaaaacgctgtttgagccgggtgaaatggtacgcgttagcgacggcccatttgccgactttaacggcgtggttgaagaagtggactacgaaaagtctcgtctgaaagtgtccgtttctatcttcggtcgtgcgacgccggtcgagctggactttgcccaggtagaaaaggcttaa

SEQ ID NO: 257015 - DNA, 429 bp, Klebsiella pneumoniae; identical to SEQ ID NO: 177049

SEQ ID NO: 257016 - DNA, 255 bp, Klebsiella pneumoniae; identical to SEQ ID NO: 256386

SEQ ID NO: 257017 - DNA, 1299 bp, Klebsiella pneumoniae
atgcaagtttcagttgaaaccactcagggccttgggcgccgtgtaacgattactatcgccgctgacagcatcgagaatgctgtcaaaagcgagctggtcaacgtagcgaaaaaagttcgcattgacggcttccgtaaaggcaaagtgccgatgaatattgttgctcagcgctatggcgcttccgttcgccaggacgtgctgggcgacctgatgagccgtcatttcgttgacgcgatcatcaaagaaaaaatcaatccggccggcgcgccgaactacgttccgggcgaatacaaactgggcgaagacttcacctacgcggtagagttcgaagtgtatccggaagttgaactgcagggtctggacgcgatcgaagttgaaaaaccggttgttgaagtcaccgacgctgacgttgataccatgctggaaactctgcgcaagcagcaggcgacctggaaagaaaaagaaggcgcggttgacgctgaagatcgcgtaaccatcgacttcaccggttctgttgacggcgaagagttcgaaggcggcaaagcctctgacttcgtactggcgatgggccagggtcgcatgatcccgggcttcgaagacggtatcaaaggccacaaagcgggtgaagagttcaccatcgacgtgaccttcccggaagagtaccacgcagaaaacctgaaaggtaaagcggctaagttcgttatcaatctgaagaaagtcgaagagcgtgaactgcctgagctgaccgaagagttcatcaaacgtttcggcgtggaagatggttccgtcgctggcctgcgcgctgaagtgcgtaaaaatatggaacgcgagctgaaaggcgctgtgcgtaaccgcgtgaagtctcaggctatcgaaggtctggttaaagccaacgagatcgacgttccggctgccctgatcgacagcgaaatcgacgtgctgcgtcgtcaggctgctcagcgtttcggcggcaacgagaaacaggctctggaactgccgcgcgagctgttcgaagagcaggctaaacgtcgcgtcgttgttggtctgctgctgggcgaagtgatccgcaccaacgagctgaaagctgacgaagagcgcgtaaaagccctgatcgaagagatggcttctgcgtacgaagatccgtctgaagtcgttgagttctacagcaagaacaaagagctgatggacaacatgcgcaacgtggcgctggaagagcaggctgttgaagccgtgctggcgaaagccaaagtgtctgaaaaagccacttccttcaacgaactgatgaaccagcaggcgtaa

SEQ ID NO: 257018 - DNA, 237 bp, Klebsiella pneumoniae
atggttgtgctgacgaccggagacatcgaggatttcctggttattcaccagttcgcccagcgtgatgttattcagaaaaccggtcagtcgctcgctcagatcgcgccacagcgcgtgagtaaggcacttatcgccgccctggcagccgcctttaccctgacaacgggtggcgtcaacggattcgtctactgcgctgataacttcgccaactgcgatgctacccgcttctttacctaa

SEQ ID NO: 257019 - DNA, 1215 bp, Klebsiella pneumoniae
atgaaattaccgatctatctcgattactccgcaaccacgccggtggacccgcgtgttgccgagaaaatgatgcagttcctgaccctggacgggacctttggtaacccggcctctcgttcacaccgttttggctggcaggctgaagaggcggtagatatcgcccgtaatcagattgccgagctggtcggcgctgacccgcgcgaaatcgtttttacctccggcgcgacggaatccgataacctggcgattaaaggtgcagccaacttttatcagaaaaaaggcaagcacatcatcaccagcaaaaccgaacacaaagccgtgctggatacctgccgtcagctggagcgcgaagggtttgaagtgacctacctcgccccgcagcgtaacggcattatcgatttaaaagagctggaagccgcgatgcgtgatgacaccatcctggtttccattatgcacgtgaataacgaaatcggcgtggtgcaggatatcgctaccatcggcgagatgtgccgtgcccgcggtatcatttaccacgttgacgcgacccagagcgtgggcaagctgcctatcgatctgagccagctgaaagtggacctgatgtccttctccggccacaaaatctacggcccgaaaggcatcggcgcgctgtacgtgcgtcgtaaaccgcgtattcgtatcgaagcgcagatgcacggcggcggtcacgagcgcggcatgcgttccgggacgctgccagtccaccagatcgtcggtatgggtgaagcttaccgtatcgcgaaagaagagatggaaagcgaaatggcccgcctgcgcggcctgcgtaaccgtctgtgggacggcgtaaaagatatggaagaggtctacctgaacggcgatctcgagcagggcgcgccgaacattctcaacgtcagctttaactacgttgaaggcgagtcgctgattatggcgctgaaagacctggcggtctcctccggttcagcctgtacttccgcaagcctcgagccgtcctacgtgctgcgcgcgctggggatgaccgacgagctggcgcatagctctattcgtttctctttaggtcgttttactaccgaagaagagattgactacaccatcaatctggtccgtaactccatcggccgtctgcgcgaactctctccgctgtgggaaatgttcaagcagggcgtggatttgaacagcattgaatggtcacatcactaa

SEQ ID NO: 257020 - DNA, 1029 bp, Klebsiella pneumoniae; identical to SEQ ID NO: 215511

SEQ ID NO: 257021 - DNA, 960 bp, Klebsiella pneumoniae
gtgaatttctccaccttttgccgccgtaccctcctcgccagcggtctggcgattttaggaattagctcagcgctggcggcagactggccgcggcagataaccgacagccggggaacgcacacgctggaaagccagcccctgcgaattgtttccaccagcgtgacgctgaccggctcactactggcgattgacgcgccggtagtcgccagcggcgctacgacgccgaacaaccgcgtcgccgacggtcagggatttttacgtcagtggagcgatgtggcgaaagcgcggaagctgtcgcgcctctacattggcgaaccgagcgctgaggccgtcgctgcgcaaatgccggatctgattctgattagcgccaccggcggcgattcggcgttgacgctctacgaccagctttccaccatcgccccaacgcttgtcattaactacgatgacaaaagctggcaggccctgctgacccaactggggtcgatcaccggccatgaaaaacaggcggcagagcgaattgcggaatttgatactaagctggcggcgctgaaagagaagatgaagctgccgccgcagccggtcaccgcgctggtctacaccgccgcggcccatagcgccaatatctggacgaaagagtccgctcaggggcagatgcttcaacagctgggctttacccttgccgatctgcccgccggtctgcatgccagccagagtcaggggaaacgtcatgatatcgtgcagctgggcggtgaaaatttagccgccggacttaacggtcagagcctgttcctgttcgctggcgaccaaaaagacgccgatgcgatttacgccaacccgctgctgtcgcatctgcccgcagtcgaaggtaaacgcgtttatccgctgggaacggaaacctttcgcctggattattacagcgccgtactggtgctgcagcgcttagccgcgctctttgcttaa

SEQ ID NO: 257022 - DNA, 345 bp, Klebsiella pneumoniae
atggttgccatccacgatgttcttatacatcttagtacggccgttcacgtcatcagacttaacggtgagcatttcctgcagggtgtatgctgcgccatatgcttccagcgcccacacttccatctccccgaagcgctgaccaccgaactgtgccttaccacccagcggctgctgagtaaccaggctgtaagaaccggtagaacgcgcatgcatcttgtcatcaaccaggtggttcagtttcagcatgtacatgtagccaacggtaacctggcgctcgaattgctcaccggtacgaccgtcgaacagggtgatctggccggaagtcggcaggccaccaagctgtaa

SEQ ID NO: 257023 - DNA, 978 bp, Klebsiella pneumoniae
atgagttggttaactcccgatctcatcgacattctgttaggcatccttaaggcggtagtgattctactggtggtggtcacctgcggcgcgtttatgagctttggcgaacgtcgtctgctgggcctgttccagaaccgttacggacctaaccgcgtgggctggggcggttcgctgcagcttgtcgccgacatgatcaaaatgttctttaaagaggactgggttccgcgcttctcggatcgtgtgatctttactctggcgccggtgatcgcctttacttcgctgctgctggccttcgccatcgtgccggtcagcccgacgtgggtggtggccgatctgaacatcggtatcctgttcttcctgatgatggcgggcctggcggtctatgcggtgctgttcgccggctggtcgagcaacaacaaatactcgctgcttggcgcgatgcgtgcttctgcccagaccctgagctacgaagtgttcctcggcctttccctgatgggcgtagtggcgcaggccggttcattcaacatgaccgatatcgtcaataaccaggcgcatctgtggaacgtcatcccgcagttctttggtttcgtgacctttgcgattgcgggcgtagcggtatgtcaccgtcacccgtttgaccaaccggaagcggaacaggagctggctgacggttatcacatcgaatactccggcatgaagttcggtctgttcttcgtcggtgaatatatcgggattgttaccgtatcggcgctgatcgtgacgctgttcttcggcggctggaatggcccatggttacctcctttcatctggttcgcgctgaaaaccgcgttctttatgatgatgttcattttgatccgcgcatcattaccgcgtccgcgctatgaccaggtaatgtcctttggctggaaggtatgcctgccgttaacgctgatcaacttgttggtaacggcggctgtcattctctggcaggcgcaataa

SEQ ID NO: 257024 - DNA, 414 bp, Klebsiella pneumoniae
gtgggcggtaaactgcgccacggcgatccgggcgtgcgtctgattgaagcctccgccagcggccttgagtacttttccgcggtaccggcaagcttccaggctgaagaagggaaatggcgtatcgcgccttactaccatctgttcggcagcgacgagctgtcgcagcgtgctccggtattccagagccgcatgccgcagccgtacgttaagctcaacccggcagatgccgcgaagcttggcgtgaacgaaggggcgatggtttccttcagcgttgatggccaggcgcttagcctgccgctggtaatctcggcggggctgacggcagggcaggttggcttaccgatgggcttgccagggattgcgccggtgctgaccggagcgcgtattgatactctgcaggaggcgaaagcatga

SEQ ID NO: 257025 - DNA, 168 bp, Klebsiella pneumoniae
atggatgaaaaacagctaatcgaagcgcttcgcattgttggtagttatgtgattgatagtttacccggtggaacttacgtactaacacctattgagccgggcgaaatcaaaaacaccgaatcttctcacgaagaatgtaaaagcttcttccggcaggatcaaagctga

SEQ ID NO: 257026 - DNA, 438 bp, Klebsiella pneumoniae
atggttattagtatccgccgttcacggcatgatgaagggaaaaaactgattgcgatctggtgtcgatcggtcgatgcaacgcacggttttttatcaaaagcatatagagcggagctggaagagctggtgagctcattcttacccgaagcgccgctgtgggtagcagtaacggagaaaaatgagccggtcgcctttatgcttctaacgggggaacatatggatgcgttatttgttgatcctgccgttcgcggctgtggcgtgggtaagcttttgattaaacacgccttgtcgttagcgcccagactgacgactaacgttaacgagcagaatgaacaagcggtcggattttataagaaaatgggctttaaggtgacaggccgttctgaaacggacgatcttggaaaaccgtatccgttattgaatttggtacatgagtaa

SEQ ID NO: 257027 - DNA, 930 bp, Klebsiella pneumoniae
atgccaattcgggtgcaggacgagctaccggccgtcaatttcttgcgtaatgaaaacgtctttgtgatgacgacaactcgcgcgacgacccaggaaatccgcccgctgaaggtgctcatccttaatctgatgccgaagaaaatcgagactgagaatcagtttttgcgactgctttccaactctcctctgcagcttgatatccagctgctgcgcatcgatgcccgcgaatcacgtaataccccagcggaacacctgaacaacttctactgcaactttgaagatatttgcgatcagaattttgatggcctgattgttaccggcgcgcccttaggtttggttgagtttaatgacgttgcctactggccgcagatcaaacaggtgctggaatgggctaaagatcatgttacctcaacgctatttgtctgttgggctgtacaggcggccctcaatatcctctatggtatccctaaacagacgcgctctgagaagatttccggcgtctacgaacaccatatcctgcaaccacatgccttattaacccgcggctttgacgatagctttctcgcgccgcactcgcgctatgccgatttcccggcggcgctgatacgcgactacaccgacctggagattctggcggaaacggaagagggcgatgcctacctgttcgccagcaaagacaagcgcatcgccttcgtgaccggtcatccagaatatgatgcaaacaccctggccagcgagttcttccgcgatgtggaagcgggcctcgatccccaggttccacacaattatttcccgcaaaacgatccgcagaacaaaccgcgcgccacctggcgaagccatggcaatctactgtttatcaactggctgaattattacgtctaccagatcacgccatacgatctacgccatatgaatccgactctggattaa

SEQ ID NO: 257028 - DNA, 456 bp, Klebsiella pneumoniae
gtgtgtaaagcgcgcgaacgcgacctggcggtcaactttgttatccgtgaagagcatttatggaacgtggcgcgctatatgcccaccagcctgggggaacttgacagcctcggactctcgggcagcgagattcgtttccacggtaagacgctgatcgccctcgtcgagaaggcgcaggcgctgccggaagaggcgctgccagagccgctgcaaaatctgatcgacatgcccggttaccgcaagctgtttaaggatatcaaagcgttagttcagaccgtaagcgccgagaagggcgtgagcgcggagctactggcttcaagaagacagattaatcagctgctgaactggcactgggggctaaaaaacggcaacgggcagcctgaactggtttccggctggcgcggtgaattgatggccgatcgcctgaatgcgctattaagcgactacccgcgctag

SEQ ID NO: 257029 - DNA, 819 bp, Klebsiella pneumoniae
ttggcccagaagggaaagaaaacggtcgttatcgacttcgacatcggcctgcgtaaccttgacctgatcatgggctgtgaacgccgggtcgtttatgatttcgtcaacgtcatccagggcgatgccacgttgaaccaggcgcttattaaagataagcgtacggagaatctctatattctcccggcctcccagacgcgtgacaaagacgccctgacccgcgaaggcgtagacaaagttctcgaagaactgaaaaaaatggattttgattttatcgtctgtgactcccctgcaggcatcgaaaccggtgcgctgatggcgctgtattttgctgatgaagccatcatcaccaccaacccggaagtctcctccgttcgcgactccgaccgtatccttggtatcctggcctccaaatcccgtcgcgcggaaaggggcgaagatccaattaaagagcacctgctgctgacgcgctataacccaggccgcgtaaacaagggtgacatgctgagcatggaagacgtgctggaaattctgcgcatcaatctggtgggcgtgattccggaagatcagtccgtgctgcgcgcgtcaaaccagggcgagccggtgattctggatgacgcctcggacgcgggtaaagcctatgccgatacggttgaacgtctgctggataaattatggcattactcgacttttttctctcgcggaaaaagaacacggccaatattgcgaaagagcgcctgcaaattatcgtcgcggagcgccgtcgcggcgacgctgaaccgcactatcttccgcagttgcgtaaagacattcttgaggtga

SEQ ID NO: 257030 - DNA, 666 bp, Klebsiella pneumoniae
gtgaaaaatctgcttgttgcctggatagtcttcctgctttacggctgcgccacctatcctcaggccatcaaaccgacgccagaaaaaccgtcgtccgggccagaaatctatatcgtcaatcacggctggcacaccgggattatcctggccgccaatgacgtgaacaaaattctgccgcagcttaacgtacgctttcctcagcgggaacagtggtatgaaatcggctggggcgataaaggtttttatcaatcgcaggagataaccacccgacttacgctgcaggctatgttctggtcatccggcgcggtaatgcacgtagtcgccttttcaggagcgcccgaaagctatttttccgcaagcgcaatgacggcattaagccttaccccgggccagaataatagcctgctgcgctacatcggtcgcagctttgcccgtaatgaacgaggggagctgataccgttgaaaaaaggcatctacggagacagtcagttttacgcagcaaacggccgctacgggatatttaatacctgtaataaatggacggcaaagggactggaaagcgcgggaatgaccatgaacacttcgttaaaactgacggcgggaagcgtgatgaaggcggtagaagagaataaaggctgcctgaatcgatactgctatcctctgtaa

SEQ ID NO: 257031 - DNA, 609 bp, Klebsiella pneumoniae
atgaaatactgcgtactggcgctgagcctggcgtcggcctttccggcgcacgcctgggtgccgcaaaccggcgatatcgtttttcaaatctcccgctcatcgcaaagcaaagccattcagctggcgacccattccgcttacagccacaccggtatggtggtgatccgtaataaaaaaccttacgtctttgaagccatcgggcccgtggtttacacgccgctgcaaaagtgggtcgcgcagggtgaggacggtaaatacatcgttcgtcgggtacgtggcggactttcggttgtgcaacagaagctactggcacagacggcgaagcgctacctcggcaaaccttacgacctctttttctcatggagcgatgaacgtcagtactgctcagaagtagtgtggaaggtctatcatcgcgccctcaatttacggccaggcaagctgcaaaagctgagcgaattcgacctcagatccccgctcgttcgtgccaaactcagagagcgttacggtcaggcgatcccgatggacgaaaccgtcatctcgccgcaggcgctatttgacgcgccgcagctggaaaccgttgaaaaaaactggcctctgttcccgaggtaa

SEQ ID NO: 257032 - DNA, 222 bp, Klebsiella pneumoniae
gtgttaaaaatcctcaccgatgaacgcacgcgtcgtcaggtgaacaacctgcgtcacgcgactaacagcgaactgctgtgcgaagcgttcctgcatgcctttaccggtcaaccgttgcctaacgatgaagacctgcgtaaagagcgcagcgatgaaatcccggaagcggcaaaagagattatgcgcgaactgggcatcgacccggatacgtgggaatactaa

SEQ ID NO: 257033 - DNA, 948 bp, Klebsiella pneumoniae
atgtttatcggcctgatgattttcttaagcggcagccgccacttccggcatacccgcggcgtcgataaaccggcgctgcgggcggtgaagttcgtgctgccgacctggggctggctgctggtgatgctctgcctggcgccggtatttttcacgctgctgctgcaaaacaactggtccggctatctgctggcgatcgtctgcctgttcgccgcccagatggtggcgcggatcatgatcaaagccccggagcatcgtcgcgcgctgtggcagatcgtcctgctgatgctcgccggaacgctgttctgggtgctggcgcagcagggcgggagctcgattagcctgtttatcgaccacttcgtcaatcgtcgtctgctgaactgggacgtgccgaccgcgctgttccagtcagttaacgcgatagcggtgatggcggccggcgtggtgctggcgtggctgatgcgcccggaaggcagcgtgcgttctgtgctgcgcgtctggctgaaattttctttcggcctgctgctgatgggcggcggctttatgctgctggcgctcaatgcccgccatggcgcggctgacggtcaggcctcaatgggcatgatggtcgccgggctggcgatgatgggctttgccgaactgtttatcgacccggtggcgatggcgcaaatcacccgtctgaacatgcccggcgtcaccggcgtattgaccggcatttatatgctggccaccggcgcggtggccaactggctggcgggcgtggtcgcccagcaaaccaccgaatcgcaaatcagcgatacggcgattgccgcctatcagcatttcttcgcgcagatgggcgaatggaccctcggctgcgtggcggtgatggtcattatcgcctttgccgcggcctgtagcgtcggcaaacgtcgtgcggctgccggtgaaattaccggcggcggcgcctga

SEQ ID NO: 257034 - DNA, 219 bp, Klebsiella pneumoniae
gtgcaggaagctgacttcctggcccacgttgataagctgtctgaagacgcattcgatgaccagtgcaccggcgccaacccgcgctatccgctgattgccgagctgaaacagattctgctggatacctactacggtcgtcattacgtcgaaggcggcgtggaagagaagaaagaagtcgcgccgggtaaagctgagaaaaaagcgaagaaatccgcttaa

SEQ ID NO: 257035 - DNA, 1527 bp, Klebsiella pneumoniae
atgatgaaactggatccgtacatcaacgtcgatccgggtaccatgagcccaatccaacacggggaagtgttcgttaccgaagacggcgctgaaaccgatctggacttaggtcactacgagcgcttcattcgcaccaagatgactcgtcgcaacaacttcaccaccggccgtatctactctgatgtcctgcgcaaagagcgtcgtggcgactacctgggcgcgaccgtgcaggtgatcccgcacatcaccaacgcgattaaagagcgcgtgctggcgggcggcgaaggtcatgatgtggtgctggttgaaatcggcggtaccgtaggcgatatcgagtcgctgccgttccttgaagcgattcggcagctggcggtggatatcggtcgtgaaaacgccctgtttatgcatttgaccctggtgccatacatggccgccgcgggcgaagtcaaaaccaaaccgacccagcactccgtaaaagagctgctctccatcggtattcagccagacattctggtttgccgctccgatcgcgccattccggcgaacgaacgcgccaaaattgctttgttctgcaatgtgccagaaaaagccgttatttcgatgaaagacgtcgattccatttataaaattccgggcctgttgaaatctcaggggctggacgattatatttgtaaacgattcagcttaaactgtccggaagcgaacctggcggaatgggaacaggttatctacgaagaagcgaacccggcaggcgaagtcactatcggtatggtcggcaagtacattgaactgccggatgcctataaatcagtgattgaagcgctgaaacacggcggtctgaaaaatcgcgttaccgtcaacatcaagctgattgattcgcaggatgtggaaacgcgcggcgtcgaaattctgaagaatttagacgctatcctgattcctggcggcttcggctatcgcggcgtcgaaggtaagatcgctaccgcgcgctatgcgcgtgaaaacaacattccatatctgggtatttgcctgggtatgcaggttgcgctgattgagtttgcgcgcaacgtagcggggatggaaaacgccaactcaacggaatttgtgccagactgtaagtacccggtcgtggccctgattaccgaatggcgtgatgaagacggtaatgtcgaagttcgctctgataagagcgatctcggcggcacgatgcgcctcggcgcacagcagtgccagctggctgaagatagcctggtgcgccagctgtatggcgaaccaaccattactgagcgccatcgtcaccgctacgaagtcaacaacatgctgttgaagccgattgaaaatgcgggcctgcgcattgcgggccgttccggggatgatcagttggtcgagatcatcgaggtgcctaaccatccgtggttcgtcgcctgtcagttccatccggagtttacttcgacgccgcgtgatggtcacccgctgtttgccggctttgtgaaagccgctggcgagtaccagaagcgtcaggcgaagtaa

SEQ ID NO: 257036 - DNA, 714 bp, Klebsiella pneumoniae
atgaaaaacacactggctacccggcgcgggatgcgcggtttactggcagctctattactgctcgccaccagcggttttagcgctcaggcccaggccggcgtggcgctgggagcgacccgcgtcatctatcctgccgggcaaaagcaggttcagctggcggtcaccaacaacgacgaaaagagcacttatttgattcagtcatgggtggagaatgccgatggcgcgaaggacggtcgctttgtcatcaccccgccgctgttcgccatgcagggaaaaaaagagaataccctgcgcatcattgatgccaccaacaaccagctgccgcaggatcgggaaacgctgttctggatgaacgtcaaagcgatcccgtcgatggataaatcaaagctcagcgaaaacactctccagctggcgatcatcagccgcatcaagctctattaccgcccggcaaagctggcgctgccgccggatcaggctgccgaaaagctgaagttccgccgcggcgcaggcacgcttacgctgatcaaccccactccctactacctgacggtcaccgaactcaacgccggtacccgggtgctgaaaaatgcgctggttccgccgatgggtgaagccagcgtcagcttacccgccgatgcgggtcgcgagattacataccggacgattaacgactacggcgcgctgactccgcggatgaagggcgctacccaataa

SEQ ID NO: 257037 - DNA, 264 bp, Klebsiella pneumoniae
gtggcgttttacggcgttgccgatggtaaaaacccggacgtgctatcggtgggcgaaggaccggggatagcgaccggcgtgggcgttgctctgtttgataaaaccggcagccaaatcccgctcaatgcgccgccaggaagctggtcgccgctgcacaccggcccgaccaccctgcattttgtcgctaaatatcgagccaccgggaatcaggtgaccgggggagcggccaacgctcaggcatggttctccctgacctaccagtaa

SEQ ID NO: 257038 - DNA, 417 bp, Klebsiella pneumoniae
atgctgggtgccggcactggtatggacggtaacgctaacggcggcaacatgtcttccgaagagcaggctcgtctgcagatgcaacagctgcagcagaacaatatcgtttacttcgatctggacaaatacgatatccgttctgacttcgctgcaatgctggacgcgcacgctaacttcctgcgtagcaacccgtcttacaaagtgaccgtagaaggtcatgcggatgagcgcggtacgccggaatacaacatcgctctgggtgagcgtcgtgctaacgccgttaagatgtatctgcagggcaaaggtgtttctgctgaccagatctccatcgtttcttacggtaaagaaaaacctgcagtactgggccacgacgaagcggcttacgccaaaaaccgtcgcgccgtactggtttactaa

SEQ ID NO: 257039 - DNA, 879 bp, Klebsiella pneumoniae
  misc_feature (705)..(714): n is a, c, g, or t
atgagcagtaacttcagatatcatctattgagtctgtcgttactggttggcatagcggccccctgggccgcttttgctcaggcgccaatcagtagtgtcggctcaggctcggtcgaagaccgcgtcactcaactcgagcgtatttccaatgcgcacagccagcttttaacccaactccagcaacaactctccgataatcagtccgatattgattccctgcgcggccaaattcaggaaagccagtatcagctgaatcaggttgttgaacgccagaagcagatcctgctgcagatcgacggtctgagcagcggtggcggcgcgacgggcgcgcaaagcccgtcgtcagccagtgagcaaggcgctgcggcaagcgcgccagcggcttcatcaggcgctccggcgtcgaccggcgatgcaaacagcgattacaacgcggctatcgcgctggtgaaggatgcttcccgccaggacgacgcgatggcggctttccagaacttcgtcaaaaagtaccccgattcaacgtatcagccgaacgccaactactggctcggtcagctgaattacaataagggtaaaaaagacgatgcggcgtactatttcgcttccgtggtgaaaaactaccctaaatctccaaaagcgcccgatgcgatgtttaaagtcggcgtaatcatgcaggacaaaggcgataccgcaaaagccaaagcnnnnnnnnnncctaaatctccaaaagcgcccgatgcgatgtttaaagtcggcgtaatcatgcaggacaaaggcgataccgcaaaagccaaagcggtttatcagcaggtggtcagtaaatttcctggcaccgacggagccaaacaagcgcaaaaacgccttaacgcgctcggatga

SEQ ID NO: 257040 - DNA, 396 bp, Klebsiella pneumoniae
gtggttcagaccggcgccgacgatgatcatcgaacggccgtgggtcttatcggcgttatcggcaaactcccgcgcggtgcggataatatgcgcccgggaaacgccggtgattttctccgcccatgccggggtatacgctttgaggtcatcgtagctgctggcgcagttttcatcgccgagtccgcgatccaggccgtagttcgccatggtcaggtcgtagacggtggtgaccagcacggtagaaccgtcggccttctgcaggcgttttaccggcagtttgtgcagcagcacgttttccagctcgactttattaaagtgctcggtaccttcgccgccaaaataggggaagccgacgttagcgatatcgtcgtggccgcccagcaggctcaggcgtag

SEQ ID NO: 257041 - DNA, 393 bp, Klebsiella pneumoniae; identical to SEQ ID NO: 209836

SEQ ID NO: 257042 - DNA, 429 bp, Klebsiella pneumoniae; identical to SEQ ID NO: 209835

SEQ ID NO: 257043 - DNA, 183 bp, Klebsiella pneumoniae
atgccggtgaaaaaagtgaccagcgttatgttcggcggcgaaaacctcgacgtgctgtacgtcacctcaatggcgcagccgcccctcccgcgcttcccggaagataatcagctgcgcggcagcctgttcgccctgtacgacctgggcgtgaccggcgtagcggaacggcgttttgccggctaa

SEQ ID NO: 257044 - DNA, 276 bp, Klebsiella pneumoniae
atgctgcgtactatggttgacgatctgaaaaatcagctgggttcaacggttgttgtgttagctacggtcgcagaaggtaaggtttctctgattgcgggtgtgtctaaggatgtgacagaccgcgtgaaagcaggggaactggttggtatggtcgcccagcaggtgggcggtaaagggggcggtcgtccggatatggcgcaggccggcggtaccgatgcgtctgctctccctgctgcgttggccagtgtgaaaggctgggtaagcgcaaaactgtaa

SEQ ID NO: 257045 - DNA, 186 bp, Klebsiella pneumoniae
atgctgattctgactcgtcgagttggtgagaccctcatgattggagatgaggtcactgtgacagttttaggggtgaagggtaaccaggttcgtattggcgtaaatgcccctaaagaagtctctgttcatcgtgaagagatctaccagcgtatccaggctgaaaaatcccagcagtccagttactaa

SEQ ID NO: 257046 - DNA, 786 bp, Klebsiella pneumoniae; identical to SEQ ID NO: 189332

SEQ ID NO: 257047 - DNA, 966 bp, Klebsiella pneumoniae
atgctgctgcagcatcttcaggagcatcaaaaactggcgccgttcagcggtgcgccggcagtaagccaacatctggtgccggaatccatccgctccacctccgtggccgtggcgatttccgggttcggtttgctgattaatcgctcggcgctgatgacacggcatctgtctgcgccagcggactgggatgacctgaccgatccccgctatcagggggcgctgctgatgagcagtccgtcgcgttcggataccaaccatctgatggtggagtcgctgctgcaacaaaagggctggattaaaggatgggaaacgctgttgacgagtgcgggaaacctcgtgaccatttcatcccgcagctttggggtagcggataagattaaaagcggcctgggcgtggccggtccggtgattgataactacgccaatctgctgctgaacgatccgcacctggcttttacctattttccgcagtcggcggtttcgccgacctatgtcgcggtgcttaaaaacagtcagcacgccagcgaggcgcggcggtttattcgctatctgttaagcccggagggccaggcgatcctcgccgatgctaataccgggaaatacccggtaacgccgctggcggcgggcaatccgcgggcggcgcagcaggcggtgctgatgaatcagccgccactgaactatcggctgatcctcaaacgccagcgtctggttcaacggatgttcgatacggcgatcagctttcgtcttgcccagctaaaagatgcctggcgagcgctgcatagcgcggaggcccgactcaagcgtccgctgcccgagatacgcgcgttgctgacccgtgtgccggtcgatccggcgagcagcgaggatgaagcctggctggctcagttcgacaataagagcttcgcggaacagcagatgatggaggtggcagctctggtttctcaacaatcagcggcaggcgattaa

SEQ ID NO: 257048 - DNA, 303 bp, Klebsiella pneumoniae
atgcgcaccggcgccaatcaccgtggcgcgcacggtttgcgccggaaactgcacgttcatctcccgcagccgcggatgctcgtgcagcgccgtggccagcagcggcccgatatccgcaaaacagaacgggtcggcaggctggttgcggtagcactcgcccactccgccggaaagggtaatcacctcgggtaccgcgcctgcgggcagcaggccggtttgcatcagccgttgcgccagcggagagagcgtgccgtcgataacttcgacgatcagatctgccatcagacgcgctacctgcgctaa

SEQ ID NO: 257049 - DNA, 480 bp, Klebsiella pneumoniae
atggctcccggcgaccagcccggcgaggtgatgcgcgccattgaagtcatcggctcgatatcctgcgtgctgctcggcgcttatccgatggtgctgctgctgacccgctggtttgaaaagccgctgatgcgcgtcggtaatctgctgaaaatcaataatatggccgccggaggcatggtggcgacgctggccaacaacatcccgatgttcggcatgatgaaacagatggatactcgcggcaaggtcattaactgcgcgttctccgtctccgccgctttcgcgctgggcgaccatttaggcttcgccgccgccaacatgaacgccatgatcttcccgatgatcgtcggcaagctgatcggcggcgttaccgccattggcgtggcgatgctgcggaggcgcaatcgtgaaaactcgccagctgctgagcgtcggcatcgatatcggcaccaccaccactcaggtgatcttctcccgccttga

SEQ ID NO: 257050 - DNA, 801 bp, Klebsiella pneumoniae
atggcttatagcttctcacgaagcataaaatatcttggaccacttagacatgaaccgcaggcagtttattcatcgagcccatatgatgcaaatactgtcggattaaaaggggagtttacagcttcacttcttcatcgttatcgcgcaaagtatgtccattataaatcaccttcagtaattgacggaaaggtgaacatggaagaaaaatatgatactttaaacaatgcctgtaaagactggctttctttcttaggtgttgttgaagaggttagaacaagtgataaaggaaaattaggctatgagctttatgttaaaacttctgatggagagaggtggcaggatttaactcatgttggtgttggagttagtcaagttctaccgattgttcttatgttccttaattcatcaccttctgatgttttgatcttcgaacaacccgaattacatttacaccctaaggtccagtcaaaattatgtgatctcttcctgattatggctaactcaggacgccaatgtatagttgaaactcatagtgaatatatgattaacagattgaggcttcgcgtagctcaagatttcgatggtaattgtttagctaaatccgttttgtattttataaataaaaataacggcatttctgattttcaacgcattggtattaataaatatggtgcaattcctgattggcctgctgagttttttgatcaaactgataaagaaatagaaagaattttgatggaagcaagcattaaaaagaacaaagataaagtgaagaggtttaacaatgacagcagttattaa

SEQ ID NO: 257051 - DNA, 381 bp, Klebsiella pneumoniae; identical to SEQ ID NO: 173970

SEQ ID NO: 257052 - DNA, 549 bp, Klebsiella pneumoniae
gtgattgaacggctgcagggtcagttctttaacgaacccgcccacgcctttcattttgatgctgtagaaaagaatcaggataaacacgccaagcgccatcgacagggtgatgttgacgtccgcagacggaaccacgcgcagtgctggcaggccgaaaatgtgttcaccgatgtatggcaacaggtcgataggcagcaggtccatcaggttcatcaggaatacccaaacgaacacggtgagggccagcggagcgataaccttgctcttgccgtggtacatgtctttaacgctgccatggacgaagccgatgatcatctcgataaaggtctggaattttcccggtacgccgctggtcgcctttttggctacgctacggaacataagcaggaacaacagaccaagcaccaccgagaagaacatggagtcaatgttgagcgtccagaaggtggccggggggttatgcggatccaccagcgagaaagtacgcaggtccagctgaaggttattcagatggtgtcctatgtattcctgcggcgtcatattttctga

SEQ ID NO: 257053 - DNA, 1233 bp, Klebsiella pneumoniae
atgcgaccgaaagaagttcaggcatcggcagtcagtacgatgttcagagatgaaagtagaggtttgctttccagcaaagtcgttattgttctcggtttacttagcgccgttgctgcattatccactgatatgtacttgcctttatttccagctatcgccagcgatctgcatacgacgcctgacaaagttcagcttagcatcaccgcttttatggtgggcttaggtattgggcagctgtttattggaccattatccgatcattacggcagacgtaaattattgctgggcgggatggccctattaaccatcgcttcattagctggcgctatatctacgaacattcagctgctcattgttacacggttctttcagggactgggaggagcggctggtatcgttctttcccgagcaattatttctgatctgtgcccggggactaaagccgctcgatattttaatctggtgctagcgatacaggggatcgcccctgttattgcaccattacttggaggagtggctgcatggtttatctggccggtggtttttgtttttatggctacaatatcattagtttccactctgctcagtagtcattttattagcgaaaccttaccccgtcatcagcgattacctttcaatctgaatgagtttatcagtcagtttatcgagttgctaagcaataagaaatatattggttatactctaattttttcaatccagtttggggcgctatttgcttatatatcagcatcaccatttatctatcaatcgacgttcgatttatcctcaggaaagttcgctgtaatattctctatcaacgccggagcaatgatgtttggtagtatagtcagcgctcgctatgttatgaaatttggtgaagataacctcataaccatgggggtgataagcacgctggtgatatctatattgctttgtatcgttgacaatatttctcatttccagtttgagatcgcggcggtactactgttaatgatgatgtttactatggctttgacatttggcaatgccgcgagtatggccatggcggcatcctctcacttaaagggaacgggttctgctattttaggggcttttcagtttggtatcgctgcgataaccccgtcactgcttggatttggagacccgttgtcattactgccgatgtcgctgattatcgcgggatgttgtttaattgccatcatggcattgttattgacaggtaaaaaaggatag

SEQ ID NO: 257054 - DNA, 576 bp, Klebsiella pneumoniae
atgggtcaccgcatccagaccaccgaaggcgcacagggacttcggcatctccatcaccaggttggcatcaacaatcgccatatccggggtcagggcatagtcagccagcgggtacttctgcccggtggcgtcatcggtaacaacggcgaacggcgtcacttccgagccggtaccagacgtggtggtgatcgccaccattttggctttaacccccatttttgggaacttgtagatacgtttacggatatccataaagcgcagcgccagctcttcgaagtgggtttccggatgttcgtacatgacccacatgattttcgccgcgtccatcggggagccgccgcccagggcgataatcacgtccggtttgaaagcgttcgccagctcagcgcctttacggacgatggtcagagtcgggtcagcttccacttcaaagaaaacttctgtttcaacgccagccgctttcagtacggaagtgatctgatccgcgtagccgttgttaaacaggaagcggtcggtgacgatcagcgcgcgtttgtgaccatcggtgatcacttcgtccaaagcgactggcagtga

SEQ ID NO: 257055 - DNA, 303 bp, Klebsiella pneumoniae
gtgaacccggaaatcaccgaccgcttcgagttcttcatcggcggccgcgaaatcggtaacggctttagcgagctgaacgatgcggaagatcaggcgcagcgtttccaggatcaggtcaacgccaaagcggcgggggatgacgaagcgatgttctatgacgaagactacgtcaccgcgctcgaatatggcctgccgccgaccgctggcctgggcattggtatcgaccgcatggtgatgctgtttaccaacagccataccatccgcgacgtgatcctgttcccggcaatgcgcccgcagaagtga

SEQ ID NO: 257056 - DNA, 414 bp, Klebsiella pneumoniae
atgaaaaaaataaagctaattgttggcagcgtgatctgtgcaagttatttattagcgtcagtgttatcaatggcaagtgataaaataaacagtaatgccgtccattttgataaaggcagcagcggtacgataataaaaagtaccgtgaccgggaacgatgtcaatgattttacgctggtggcgaaagcgggccagatgatgcatatcagcatgacgagcccgtggccgcatccttattttaatgttatcgcgcctgataataatgccatttataacggttcaatgagcggagatacctttgagcagcgtctggccgtcagcggtcaatatacggtgcgggtctatcagatgggcggcgcgcgtgatgaaggtaaaaccagcggttatgcgctgacgtttaaaatcaccgactaa

SEQ ID NO: 257057 - DNA, 339 bp, Klebsiella pneumoniae
atgaaaaataaacttattttattagcagttttggcccttacaggctgtaagtctctggaatatgtgcgttcccttgatcccgtggctaaaggggaaactccaaaaaccgtagaggcatttatggagtgtatttctcttaaatggagcactagcggtggccagctaagcacgttaccgctggccaacggaatgagtatcgggcagcagcagccgatggggggctatgatgttgttttggatgctaagaggacggcaaacggtacagaatatgtcttatatgaaagagtaccgtttttaacatcaggtagttatcagcaatcattaaaagattgtcgataa

SEQ ID NO: 257058 - DNA, 213 bp, Klebsiella pneumoniae
atgttcctcggcatggggttcgtgctggcgtttctgtttctgctgattttcgccatccagggcatgtccgccgccgtcaaccgcttcttccccgaaccggctgtcgcgccgaaggcggcacctgcgcccgccgccgcgcacgctgacgatttcgcccgcttaaagccggtgattgccgccgctctccaccaccatcgccgacttaacccttaa

SEQ ID NO: 257059 - DNA, 1011 bp, Klebsiella pneumoniae
gtgggcggcgttctgctgcttcagctggccctcgaggttggtgagcatcccgcccggcacctgggccacgaggatacggctgtcggtgcccttcagctggccttcgaaggcgtggtatttcctgcgcacctcgcggaagtacgccgcgatgctctccagcctgaggatatccagcccggtgtcgtgctcagtacccgccagggtggcgaccagcgcctcggtggccgggtggccgtaggtggcgctcatggaagagatggcggtatcaacgccgtcgacgcccgcctcgatggccttcagcagggccatctccgccatcccggtggtggcatgagcatgcaggtgcagcctgacgtcatagcgcttcttgatttcgctgaccagcgcaaaggcggcccccggggtgagaatgcccgacatgtctttaatcgcgatggagtcgacgccggtctccagcagctgttcggtcaggtcaagccaggtctgcagggtgtgggccggactggtggtgtaggagagcgtcccctgggcgtgggcgccgtggctgcgcaccgcctgcagggcggctttcatgttgcgcgggtcgttcatggcgtcgaagacgcggaacacgtccatgccgtttttgacggcgcgctcaacgaagcgctccaccacatcatcggcgtagtggcggtagccgagcaggttctggccgcggagcagcatctgcaggggggtcttcggcatggcctttttgagctcgcgcaggcggacccaggggtcctcgccgaggaagcggatgcaggcgtcaaaggtggcgccgccccagcattcaagggaccagtagcccgcgtcgtcgagctgagcggcgacggggagcatatcgtcgaggcgcaggcgggtggcgaaaagggactggtgggcgtcgcgcaggacgacatcggtaatggcaacggtcatggattcctccgtgaattaagggttaagtcggcgatggtggtggagagcggcggcaatcaccggctttaa

SEQ ID NO: 257060 - DNA, 258 bp, Klebsiella pneumoniae
atggctgctcagcgaaaactgcccgcgcagtgcaccgttctgcaggttaatgctggccttatagtgcccgttctccgccgctatccggtacagtcgttcggtttgcgcatcgacgctcttgtcctgcttcagcagattatttttctgcagccagcgggcatatttaaacaggacatcggtatcagcagacgcctcaggaataatctggtgtttacaggtaaacaccatggcggcgcttatatcgctcagcggctctga

SEQ ID NO: 257061 - DNA, 258 bp, Klebsiella pneumoniae
atggctgctcagcgaaaactgcccgcgcagtgcaccgttctgcagattaatgctggccttatagtgcccgttctccgccgctatccggtacagtcgttcggtttgcgcatcgacgcttttgtcctgcttcagcaggttatttttctgcagccagcgggcatatttaaacaggacatcggtatcagcagacgcctcaggaataatctggtgtttacaggtaaacaccatggcggcgcttatatcgctcagcggctctga

SEQ ID NO: 257062 - DNA, 582 bp, Klebsiella pneumoniae
atggacggacccgcttccagcacttcgcgacccagttcgtcacgcatcgcgcgcacacggccatattcgaagccgcacagaacaatgtcgcccttgtgcagagtaccttcgcgaaccagaacggtagctaccggaccacgacctttatcaaggaaggattcgatgaccgcgccgctcgccataccgttgcggaccgctttcagctcaagaacttcagcctgcagcaggatcgcgtccagcaggtcgtcgatgccggtacccgctttcgcggaaacgtggacgaactggctctcgccgccccactcttccggcaggatgccgtactgggacagttcgttcttcacgcgatccggatcggcttctggcttatcgatcttgttcaccgccactaccaccggtacctgcgccgctttagcgtgctggatagcttcgatagtctgcggcatcacgccgtcgtctgccgccaccaccagaaccacgatatccgtcgcctgcgcgccacgagcacgcatggaggtaaacgcggcgtggcccggggtatccaggaaggtgatcatgccgttgtcggtttcgacgtggtaa

SEQ ID NO: 257063 - DNA, 822 bp, Klebsiella pneumoniae
gtggatacggaattgctcaagactttcctcgaggtgagcagaactcgccactttggccgagccgcagaggcgctttatctgacgcagtcagcagttagctttcgtattcgtcagctggagaaccagctgggggtgaatctttttacccgccatcgcaataatatccgcctgacgtcagccggagagaaactgctgccctatgccgaaaccctgatgaacacctggcaagctgcgcgcaaggaggtcgcaaatgcctcccggcataacgaattttcgatcggagccagcgcttcgctatgggaatgcctgcttaacgagtggttaggaaagctctatacagagccctataacctacaatttgaggcgcgaatcgcgcagaggcaatcgttggtcaaacagctgcacgaacgtcagcttgatttactgatcacgaccgaatcgccgaagatggatgaactaagcagccagttgctgggtaattttaccttagcgctttattgcgcctcgccggctaaaaatacaaatgaattgaattatttgcgcctggaatggggtcctgactttcaacaaaatgaagcgggattgatcggaaatgatgatattcctctcctgaccaccagttctgccgaattagcgtatcagcagctcagcgcgcttaacggctgcacgtggttgcctgtactctgggcgcaggaaaaaaataacctgcatactgtcactgacagcgtgacgctttcaaggcctctttatgcgatttggctacagaacagcgataagcaagcgcaaatccgtgagatcctgaagcacagcatattaggatag

SEQ ID NO: 257064 - DNA, 1023 bp, Klebsiella pneumoniae
atggcgtttgtcaccgggcctacgtccttttacgtgatgcgccttctgctcggcgccgccgaagcgggactctatccgggcattatttactacctcaccctctggtttggccgcgaagagcgcgcaaaagccaccggcctgttcctgctgggggtctgtctggccaatattatcggcgcgcctttgggcggattgttattaagccttgatggcatgtccggctggcacggctggcagtggatgttctttatcgaagggctgcctgcgatagcgctggcgttcgtcgtctggcgcagactgccggataaaccagccgacgcccgctggctggacagcgacgatgtgcaagccattaacgcggtactggcgaaagaagccgaggaaacgcgccatacgccgagccgtttctccctgaaaaccgcgctgtccacccgagtgtttttgttgctggtgctgatttactttacccaccagttttcggtttacggcctgagttatttcctgccggggatcatcggtagctggggccagcttactccgctgcagattggtctgctgaccgccatcccgtggattgccgccgccgcgggtgggatcctgctgccgcgattcgcccgcacggaacagcgttcccgcagcatgctgatggccggatatctggtcatggcgaccggcatggcgattggcgccattgccggccacggtgtggcgctgcttggcttctcgctggccgctttcatgttcttcgctatgcaatccatcatctttaactggctcccgtccatcatgagcgggcatatgctggcgggcagcttcggcctgctcaactgcctcgggctgtgcgggggctttctcgggccgtttattctcggcgcgtttgaggaccgcaccggtgcggcaacgtccggcttatggttcgctgtcgcgctactgattatcggcgcgctggtgtccctgtttctcaaaagttcctcatccccaggctccgtatcggcgaaacaggcccacggcgaaaaagtgtaa

SEQ ID NO: 257065 - DNA, 570 bp, Klebsiella pneumoniae
gtgcattgccagctgcttaaccagctcttcgtcagcgcctttagcggcaaccagaacgccgatacgcgcaccgtgctggtagctgcccagaacgtcgccttccagaacagcgatacgacggatgttgatgttctcgccgattttagcaaccagcgcaacacgttcttcttcgaactgcgctttcagaacttcaacgtcggagattttacctgcaacagcggcgtccagtactttgtcggcaaatgcctggaaaccaccatctttagcaacgaagtcagtctggcagttaacttccagaatgtaaccgtagttgccttcgattttggttttgatcacgccgtcagcagccacgttgcctgctttcttcgccgctttgatcgcgccggatttacgcatgttttcgattgccagctcgatgtcgccattcgcttcagtcagcgcttttttgcaatccatcatgcctgcgccagtacgttcgcgcagctcttttaccagggaagcggtaatttcagccattctaaaatcctcgggagatgtggatactgcccggccaaaggccaaacagcgtaa

SEQ ID NO: 257066 - DNA, 321 bp, Klebsiella pneumoniae
atgcgcactcgtgagctggacaagctggaaaacagcctgggcggtatcaaagatatgggcggcctgccggacgcactgttcgttatcgacgctgaccacgagcacatcgctatcaaagaagcaaacaacctgggcatcccggtatttgctatcgttgataccaactctgatccggacggcgtagacttcgttatcccgggtaacgacgatgcaatccgcgcagtaagcctgtacctgggcgctgttgctgctaccgttcgtgaaggtcgctctcaggacctggcttctcaggcggaagaaagcttcgtagaagctgaataa

SEQ ID NO: 257067 - DNA, 540 bp, Klebsiella pneumoniae
gtgcagcgtaccttcgcgtaccagaacggtagcaaccggaccacgacctttatccaggaaggattcgataaccgcgccgctcgccatacctttacgaaccgctttcagctccagaacttcagcctgcagcaggattgcgtccagcagttcgtcgatgccggtacccgctttagcagacacgtggacgaactggctttcaccgccccactcttccggcagaatgccgtactgggacagttcgtttttaacgcgatccggatccgcttccggcttatcgattttgttcaccgcaaccacgaccggcacacccgccgctttcgcgtgctggattgcttcgatggtctgcggcatcacgccgtcgtctgcggccacaaccagaaccacgatatccgtcgcctgagcaccacgagcacgcatagaagtgaacgcggcgtggcccggggtatccaggaaggtgatcataccgttgtcggtttcgacgtggtacgcaccgatatgctgagtaatgccgcccgcttcgccagaggccactttcgttga

SEQ ID NO: 257068 - DNA, 231 bp, Klebsiella pneumoniae
gtgcggttgagcgtcctgatcatcactgaccccggctccgtctgccagcgttcgataatccacacggtggcgctgggtgaaaatgtcgtcgccatcaccagctcattgctttgcgctgcacagggtctcagccaggcggtcaacagcatcagcgcgagcattttgctcactatcccgccccgacgaagagacatgtttgtgatcccgttcataaatattgaaataccgtaa

SEQ ID NO: 257069 - DNA, 807 bp, Klebsiella pneumoniae
atgagcgccctgcaaattatctatcccaacgatatgcttcatccgtcacaacctgacgagatgtttttagctgagtacacttatgcctgccaaagcagtattacctgcctgttactctcatcagaggctgtggcgctgggcgactaccgcttttcatccagtttttcagccaatatgccggtactgtggcgcggatggatgctgcacccggatgagtacgaaagtttatcccgagcggtggaaaagcgaggcgctcgcttattaacgtcatgccagcaatatcttcaatgccaccatttgccgggctggtatgaaagttgtcgggatctcacgccagaaaccatcgtgactagcgaagatgctgactttgctgccctcactaaggaatatggttggcctgcttattttgtgaaggactatgtaaagtcgctcacaacctcccgcggctcaatcgctcgcaatgcgcaagaaattgatgaaatcatcacattgattaaacagtttcgcggtgaaattgaaggaggagtttgcctgagacgcgtggagaaatttgatacatccagcgaaaggcgattctttgttctcgatggcaaagttcatgccgcaaacggcgatattcctgccagggttagcgaaatcgccgcacgtataaacagccctttttactctatagatgttatcaatgatgaagctggtgctttgaggctcgtcgagatcggtgacggccaggtatcggatatcaaagagtggtccgttgagcgttttgtgaaaatgctgagtgactatgcggtaagtcaggaaatttaa

SEQ ID NO: 257070 - DNA, 315 bp, Klebsiella pneumoniae
atgatacgtgaacagatcgaagcaaaacttagggcagcgttcgacccggtgtatcttgaagtcgtggatgaaagctatcgccacaacgttcctgcgggctctgaaagtcattttaaagtggtgttggtaagcgatcgcttccttggcgagcgttttcttaatcgtcaccgtatgatttacggaacgttgactgaggaactatcaagcaccgtgcacgctctggcgttgcatacctacacaatcaaagagtgggaagggctacaggataccgtctttgcttctcctccttgtcgcggagctggaagtatcgcgtag

SEQ ID NO: 257071 - DNA, 531 bp, Klebsiella pneumoniae
atgcaggaaatagttaagacagtgccgctgttatgttttttactgctgggctgtgatcgggcagaaaaagaagcaccgcgcggcagcgggaagagcagctacgtggcggctaatctgctgggctataaccatatggcaggcacgaatatcaactggttctccgtcaacggctatcgggggcacgccggggggtttacctgctgcatatcgctgccggaaaaatggcggcccaatatgcaggtggtagtggagtgggaggtggatcctgacccgtttcccaaaaatatgcccccaatgggaacaaaagaatttcgtgattatgcgaaagctcatgaagcaaattatcgccactataaagcggtggccactattcccgaatatgaagattcctgcggcctgcaggtgcatttcttgccctgtcagcagattaaagtaacggccacctgtcacgggccgactcatcctgaccacccgattaaagaacctttcgatctgccggagcctgcccagtgcccgccagaaacgccatga

SEQ ID NO: 257072 - DNA, 492 bp, Klebsiella pneumoniae
  misc_feature (452)..(461): n is a, c, g, or t
atgtcactcatcaccagtaatgacgacctcgatgccctggtcgcgcgggtacgaaaggcgcaacaggcctatgccagcttttctcaggagaaggtcgataaaatcttccgcgccgccgcgctggccgccgccgatgcccgcattccgctggccaaaatggcggttgccgagtccggcatgggcatcgtggaagataaagtcatcaaaaaccactttgcctccgaatatatctacaacgcctataaagatgagaaaacctgcggggtgctgtctgaagatgacgcctttggcaccatgaccattgccgaacccatcggcctgatctgcgggattgtccccaccaccaatccgacctccaccgccatttttaagtcgctgattagcctcaaaacccgcaacggcatcgttttctccccgcacccgcgggcgaaaaacgccaccaaccgtgcggnnnnnnnnnngcggcggagatcgtgctgcgcgcggcggtag

SEQ ID NO: 257073 - DNA, 336 bp, Klebsiella pneumoniae
atgggcggcatggccagcctgatgggcaagctgccgggcatggggcagatcccggacaacgtgaaagcgcagatggacgacaaagtgctggtgcgtatggaagcgatcatcaactcgatgacactgaaagagcgcgctaagccggaaatcatcaaaggttcgcgtaagcgccgtatcgccgccggctgcggcatgcaggtgcaggatgtgaaccgtctgctcaagcagttcgacgacatgcagcgcatgatgaagaagatgaagtcgaaaggcggcatgatgaagatgatgcgcgggatgaaagggatgatgccgccaggcttcccgggtcgttaa

SEQ ID NO: 257074 - DNA, 249 bp, Klebsiella pneumoniae; identical to SEQ ID NO: 138230

SEQ ID NO: 257075 - DNA, 339 bp, Klebsiella pneumoniae
atgggcggtatggccagcctgatgggcaagctgccgggcatggggcagataccggacaacgttaaatcgcaaatggacgacaaagtgctggtgcgtatggaagccatcatcaactcgatgacgctgaaagagcgcgctaaaccggaaattattaaaggttcgcgtaagcgccgtatcgccgcaggctgcggaatgcaggtgcaggatgtgaaccgtctgctcaagcagtttgacgatatgcagcgcatgatgaagaagatgaagtcgaaaggcggcatgatgaagatgatgcgtggaatgaaaggtatggtgccgccaggtttccccggaggccgatag

SEQ ID NO: 257076 - DNA, 213 bp, Klebsiella pneumoniae
atggcaacgctccggcggcaaaccgatggcgaatgtggctccctcttctaccagcaccacgtcgttctggcggtaaaccaggttctgacggatggatgggatctgaatatgaatttgcgtttcgtggccgagctgttcgaccacctggacttcaccttcgagggtgacgtcggcaatatcgctgggcagcagatgctccggacggatacctaa

SEQ ID NO: 257077 - DNA, 915 bp, Klebsiella pneumoniae
atgattatggcgggcgaacgtggtatttcccccgaacgtcacgcgcagctgctggccgaaatgggccttgataagccgctgtggcagcaatatgcccactatatctggggcgtgctgcacggcgatttaggcatctcgctgaaaagccgcattcccgtgtggcaggagtttgtcccgcgctttaaagccactcttgagctgggcgtctgcgcgatgatcttcgccgtcgccgtcggcattccggtgggcgtgctggctgcggtaaaacgcggctccatctttgaccacaccgcggtgggcctggcgctgaccggctactcaatgcctatcttctggtggggcatgatgctgattatgctggtttcggtgcagctaaacctgacgccggtctccgggcgtatcagcgatacggtgttccttgacgataccctgccgctgaccggctttatgctgatcgacaccgccatctggggcgagcagggcgactttattgacgccttaatgcatatgatcctgcccgctatcgtgctgggcaccatcccgctggcggtgatcgtgcgtatgacccgttcgtcgatgctggaagtgcttggcgaagactatatccgtaccgcgcgcgccaaaggcctgacccggatgcgggtgatcgtgatccacgcgctgcgtaacgcgatgctgccggtggtcactgtgattggtctgcaggtgggcaccctgctggcgggcgccatcctgaccgaaaccattttctcatggcctggtttaggtcgctggctgatcgacgcgctgcagcgtcgcgattatccggtggtgcagggcggggtgctgctggtggcgacgatgattatcctcgtcaacctgctggtcgacctgctgtacggcgtggtgaacccgcgtatccggcataagaagtaa

SEQ ID NO: 257078 - DNA, 486 bp, Klebsiella pneumoniae
atgcaagggacagcagcaggtgactattttttatccagaatggatttaagtgaaagatctaataatttgacaactttagtgtttttacaaggtatcgatgacagtcgcagagccattgaggacacatatggtacaggactaggatttcaaagagcgggtaccgatgaggtaggagcttatggttatattatacagagtttaaccgggggagaatacaatcgtacagatggcggtttcctgtcctcaaaagttgtaaccgaatttggcttccttggtttaactatatctctattatattttctaaaaataataagctctgttaaagaatataattcctctgaaaacattgttgtaaagatggcagcatccgctttaattgcgttttctgtagaattcttcttacgaggatatggatacttttccccgagcctaattttggttgtagcacttgcattatctgcggcaagaataaaaaaaagatcgtaa

SEQ ID NO: 257079 - DNA, 540 bp, Klebsiella pneumoniae
ttgctgcagggcttcaatttgcttaatcgggccaacgacgccaggctgatccgggtcgataccttcacgagcgtttttcagcatcgccagcgcgtgcagcgggatatccggacgggaccaggcatcaggagccggagacaggtcatcagtattggtttcaccggtcactttaaaaacggtcacggtgattttatcggccagctgaggacggctcaggaaccactcagcatctgcccaggattgcatcacctgtttggcatatgcgttgcccgctttggctttctcttctacgtcgtagaaattatcgaacatcagcagggtgtgggacagcgctttggcggcaatcggcgccagctttgcgtcgtcgagcgcgtcaatcaggggatgaatattgtaaccgccctgcatggtgcccagcagttcgatagctttttcaggggtaaccagtggggaggtcgcttcgcctttagcgatcgcggcaaggaatccggctttaacataggcggcttcgtcgacgcctggcggtacgcggttaattaa

SEQ ID NO: 257080 - DNA, 855 bp, Klebsiella pneumoniae
atgggccttgataaaccgatgtggcagcagtacgtcaactatatttggggcgtgatgcacggtgatttgggcatctcgctgaaaagccgtattccggtctgggaagagttcgtaccgcgctttaaagccacgatggagctgggcgtctgcgcgatgatttttgccgtcattgtcggtatcccggtaggcgtgctggcggcggttaagcgcggctctatcttcgaccacacctccgttggcctcgcgctgaccggctactctatgcccatcttctggtggggcatgatgctaatcatgctggtgtcggtgcagctcaatctgacgccggtttccgggcgtatcagcgataccgtcttccttgacgataccctgccgttgaccggatttatgctgatcgataccgcgatttggggcgagccgggcgactttattgatgcggtaatgcatatgatcctgcccgcagtggtgctggggacgattcccctggcggtgatcgtgcgtatgacccgttcgtcgatgctggaagtgctgggtgaggattatatccgtaccgcgcgcgcgaaaggcctgacgcggatgcgggtaatcatcgtgcatgctttacgtaacgcgatgctgccggtggtcacggttatcggcctgcaggtcggtacgctgctggcgggggctatcctgaccgaaaccatcttctcctggccgggccttggccgctggctgattgatgcgctgcagcgccgcgactatccggtggtgcagggcggggtgctgctggtggcgacgatgattattctcgtcaacctgctggtcgacctattgtacggcgtggtgaacccgcgtatccggcataagaagtaa

SEQ ID NO: 257081 - DNA, 501 bp, Klebsiella pneumoniae
gtgactgaaacttcatcccgccgctctgactatgcccgtctgctggatcgcgcgattcgcattctggcaatgcgcgaccatagcgaacaggagctcaggcgcaaactggctgcgccggtgatgagcaagaacggccctgaagcgctaaacgtaacgccggaagaggtcgataacgttgtcgaatggtgtattgagaaccgctatctggacgacgatcgctttgtcggccagtttattgccagccgcagccgcaagggatacggcccggcgcgcgtccgccaggagctaaagcagaaggggatttcccgcgagacgatagagtcagccatgcgtgactgcgaaatcgactgggcacagcttgctaaagagcaggcgcagagaaaatatggcgaacccttgcccaccgtatttgcagaaaaagtcaaaattcagcgctttttgctctaccgcggctatctgatggaagatatccaggaaatctggcgaaattttgcagattga

SEQ ID NO: 257082 - DNA, 321 bp, Klebsiella pneumoniae
gtggtgaaaaacaaaattgccgcgccgtttaaacaggccgaattccagattctctacggcgaaggtatcaacttcttcggtgagctggtcgatctcggcgtgaaagagaagctgattgagaaagcgggcgcctggtacagctacaacggcgataaaattggtcagggtaaagcgaacgcgatctcctggctgaaagagaacccggctgcagcaaaagagatcgagaagaaagttcgtgaactgctgctgagcaatcaggactccacgccggacttcgcggttgatggcaacagcgaagcagaaaccgaacaagatttctga

SEQ ID NO: 257083 - DNA, 204 bp, Klebsiella pneumoniae
atggtcaactttattaggttgttgtcacaagaaaaaaaagtgagtgttaattctatattctccagttcagtacaactttcggatggcattatcgttaaaattaatgatttttattatcgtgtcaacttaagtctggatcaaaaaacatacagcctggtagaggtttcgttagtaaccccagatgttgaaatcgtgaaaaactga

SEQ ID NO: 257084 - DNA, 270 bp, Klebsiella pneumoniae
atgatggattgcatggcgaagaacatgaaggcggccagcgagaagccaagcagcgccacgccgtggccggcaatcgcgccaatcgccatgccggtcgccatgaccagatatccggccatcagcatgctgcgcgaacgctgttccgtccgggcgatacgcggcagcaggatcccgccagcggcggctgcgatccacgggatggcggtcagcagaccgatctgcagcggagtaagctggccccagctaccgatgatccccggcaggaaataa

SEQ ID NO: 257085 - DNA, 498 bp, Klebsiella pneumoniae
atgatggatgtatcacagctgacgcctcgtcgcccgtacctgctgcgggcgttctatgagtggctgctggataaccagctgactccgcatctggtcgttgatgttactctgccgggcgtacttgtgccgatggagtatgcgcgtgatgggcaaattgttctcaatattgctccgcgtgctgtcggtaacctggagctggcgaacgacgaagtgcgttttaacgcgcgcttcggtggtgtgccgcaaaatgtttccgtgccgatggctgccgtactggcggtttacgcgcgtgagaacggcgcaggtacgatgtttgagcctgaagccgcctacgatgaagatgtcaccagcctgaatgatgacgaagaattgccaggtaacgacagcgaaacggtcatgtcggtgattgatggcgataagcctgacaatcatgatgacgatccggatgatacgccgccgccccgtggcggacgtccagcgctacgcgttgtgaagtga

SEQ ID NO: 257086 - DNA, 249 bp, Klebsiella pneumoniae; identical to SEQ ID NO: 138230

SEQ ID NO: 257087 - DNA, 354 bp, Klebsiella pneumoniae
atgaagccaaaagaagtactttgccaatgggttgacgcatttaataatgcagatatagaaaccatctcagaattatatgatgataatgcaataaaccatcaggttgccaatgagccagttgttgggaaagaggctataaagaaaatgtttgaacaagatttttctcacgcacaaatggtttgtatcgttgaaaacattttcgaagatgggcaatgggcaattttagagtggcgtgacccattcggtttgagaggttgcggtttttttcaaatagtaaataataaaattttatttcaaagaggctactgggataagctatctttcttgaagttgcgcaatttacctatggaataa

SEQ ID NO: 257088 - DNA, 354 bp, Klebsiella pneumoniae
atgaaagccgtgattcacgccctgatagaaataggcctcgtagactttatggtgttccttcaacgcctgttcataggcaggccagccttcattaatgccgctatcgaggccggcatagtgcagcagcagcggtgctttaattttatcgacctccttcagcggcggctggcgaccgtaaaacggcaccgcacaggccagctcggggatcgccaccgccgccgcgttgctgacgccgccgccgtagcaaaaaccggtgataccgaccttccccgtcgcctgtggatagttcgccataaacgcgaccgccgcaaaaaaatcattcatcagcttcacgggatcgactttctgctgtag

SEQ ID NO: 257089 - DNA, 381 bp, Klebsiella pneumoniae
atgagggatcggagtcacatcagtaatattagtgatgcggaaaccagcggcgttcagtgcacgaatggtagattcgcgacccggacccggacctttgaccataacttccagattcttgatgccgtattcttttacggcttctgcgcaacgctctgctgcaacctgagctgcgaacggagtggatttgcgagaaccacggaaaccggaaccaccggctgttgcccaacccagtgcgttaccctgacgatcagtgatggtaacgatggtgttgttaaaagaagcatggatatgagccacgccgtcagagacttgttttcttacacgcttacgtgcacgaattggtgcctttgccattattcaatcaccccgattatttcttga

SEQ ID NO: 257090 - DNA, 330 bp, Klebsiella pneumoniae; identical to SEQ ID NO: 176522

SEQ ID NO: 257091 - DNA, 561 bp, Klebsiella pneumoniae
gtgagagtacgcaaaaccagcgctgataccgtcatagatatcataggtcagagaggtgccgtagccgtcgccgttctgtttattccagtcacgaccattgttggtggaaccttcaccgctggtgctaccgtttttaccctggtactgcagagcaaagttcagaccgtcaaccagaccgaagaagtcggagttacggtaggtcgccacgccgttagcgcgagactgcaggaagttatcagaaccgtaggtgtcgccgccgaattccggcagaacgtcggtccaggaagtcacgtcgtatactacgccgtagttacgaccgtagtcgaaagaacccgcgtcgccgaatttcagacccgcaaatgccagacgagtccaggactgcttgtcagaaccttctacgttgttcgcctgaacgttgtattcccactggccgtaaccggtcagctggtcgttgatctgagtttcgcctttgatgcccagacgcatgtaggtctggtcgccatcggaagatttgtcgtcagagaaatagtgcagaccgtcgattttaccgtacaggtctaa

SEQ ID NO: 257092 - DNA, 276 bp, Klebsiella pneumoniae
gtgcttatctttaatcagggctatgatttcctgctcaagctcctcatcttccagcagcataatatgcccttcgaagatggcttctttttcttcaccgaaagtttcaccagctttggttttgatgacctccagctgggcggaggccttggcgcggccgctcaggaaacgttcgacttcctgatcaaccttatcggcagaaattttcttccggtcgatgacaatttcatcttccttcagcagcaatgctttgccgaaggcgatacccggggatgctaa

SEQ ID NO: 257093 - DNA, 258 bp, Klebsiella pneumoniae; identical to SEQ ID NO: 211207

SEQ ID NO: 257094 - DNA, 591 bp, Klebsiella pneumoniae
atgttacaaaacccgattcacctgcgcctggagaagctggaaagctggcagcacgtgacttttatggcctgcctgtgcgagcggatgtaccccaactacgctatgttctgtcagcaaacggaatttgccgatggccagctttatcgccgtatcctcgatctgatctgggaaacgctgacggtaaaagatgcgaaggtgaatttcgacagccagttggaaaagctggaagaggcgattccggccgctgatgattacgacctgtacggcgtctatccggccatcgatgcctgcgtcgcattgagtgaactgcttcattcgcggctaagcggcgaaacgctcgaacacgccatcgaagtcagcaagagttcgatcaccaccgttgcgatgctggaaatgacccaggctggtcgcgaaatgaccgacgaagagctcaaagaaaacccggctgtcgaacaagaatgggatattcagtgggagatttttcgtcttctggccgactgcgaagaacgcgatattgaactgatcaaagggctacgtgcagaccttcgcgaggccggtgagagcaatattggtataaattttcagcaatga

SEQ ID NO: 257095 - DNA, 240 bp, Klebsiella pneumoniae
gtgattcgtaccaacgagctgaaagctgacgaagatcgcgtaaaaggtctgatcgaagagatggcttccgcttacgaagatccgaaagaagtggtcgagttctacagcaagaacaaagagctgatggacaacatgcgcaacgttgcgctggaagagcaggccgttgaagccgtgctggcgaaagctaaagtgtctgaaaaagccacttccttcagcgaactgatgaaccagcaggcgtaa

SEQ ID NO: 257096 - DNA, 594 bp, Klebsiella pneumoniae
atgatcagtttgtttctgttctcaccgctttttaagcattttcgagagatttatccagagatggaactttctcttgtggaagagggaacttttggtttgcatgaaaaactttctgccggagagctggatcttgctattgttatcatcaacgactctccgaaagagttagttacggtacccttgatgacgcagcagcatgtagtatgtatgtcagataaacatccgctggcaaaaaaagatagtattgattgggaagatctacaatatgaaccattgatattaatgaaaaaagattcctggcacaggaaaaccattattgaagaatgtacaaaacggggaattcatacgcatatttttctgtcatcaaacaggattcaaactaaccttgatctcgttgcaaagaatgaaggtatttcttttatcctggatgcggttgatcttaaagcggaaaaaataataactaaagcaatgactgaaccaacatatgttacgattggtttggcctggaaagaagataaatatctatcatatgcaaccagagcattaattaaatttatgggggattatattaaagaacattttacaattaaataa

SEQ ID NO: 257097 - DNA, 237 bp, Klebsiella pneumoniae; identical to SEQ ID NO: 210711

SEQ ID NO: 257098 - DNA, 222 bp, Klebsiella pneumoniae
gtgttaaaaatcctcaccgatgaacgcacgcgtcgtcaggtgaataacctgcgtcacgcgaccaacagcgagctgctgtgcgaagcgtttctgcatgcctttaccggacaaccgttgcctaacgatgaagacctgcgtaaagagcgcagcgatgagatcccggaagcggcgaaagcgattatgcgtgaactgggaatcgacccggatacgtgggaatactga

SEQ ID NO: 257099 - DNA, 306 bp, Klebsiella pneumoniae
atgctcatgcttaatatcagtgtggcaaaatacattgtgaaggaatttacgtcaaaacaactcaatgatttaaatgagttatctcaaaagttaatagaagaactcaaggagttacctgagcgtgaagtgaaaaaaggaattcgtcgtagtccggaggaagttaagtctttcattttaaagattatggaaaaaaatcctggtatcagtgcaacacacgcgttgcgtgaatttcgtgactcgggaaattcatttgaggaaaaacgttttcgggctgagtttatggccctgagagaggctaaaccttaa

SEQ ID NO: 257100 - DNA, 252 bp, Klebsiella pneumoniae
gtggatgcgatcaaggcgaagaaacaggatccgagcggcgccttcgtgtggaccacctacgcggcgctgcagtcgctgcaggcaggcctgaatcagtctgacgatccggcggaaatcgctaaatacctgaaaggcgcgacagtagacaccgtgatgggcccgctgtcgtgggatcagaaaggcgacctgaaaggcttcgagttcggggtctttacctggcatgcgaacggtacggcgaccgacgccaaataa

SEQ ID NO: 257101 - DNA, 285 bp, Klebsiella pneumoniae
gtgcgcgtacagcggcaggcctttggacgcagcagctgctttggcgttcgccagagaaacggccaggatagcgttcgcaccgaagttagatttgttttcagtaccgtccaggtcgatcatgatcttgtcgatgccagcctgatctttagcatctttgcccaggattgcctgagcgatcgggccgtttaccgcagcaacagctttggttacgcctttacccaggaaacgggatttgtcgccatcgcgcagttccagcgcttcgcgggaaccagtagaagcacctga

SEQ ID NO: 257102 - DNA, 198 bp, Klebsiella pneumoniae; identical to SEQ ID NO: 212907

SEQ ID NO: 257103 - DNA, 426 bp, Klebsiella pneumoniae
gtggccggttttctgctctggctcaacttcaacgtactcggcgttgttcatttgttcgaacgccagttcacgtacgcgataagaaagggtggcggagaaaagcatgttcaggcgctgattcgcgggcggcatacggcggaacagccaacgaatatctttaataaagccgagatcgtacatgcgatcggcttcgtcgagcacgacaacctgaatagcgccgaggttaatatggttctgtttagcgtaatcgataaggcgaccggtggtaccgatcagaatatccacgccgctttccagcactttcagctgcttatcgtagccgtcgccgccgtacgcgagtcccagcttcagaccggtcgcctgcgccagtggttcagcgtcggcatggatctgtaccgccagttcacgcgtcggcgccatgattag

SEQ ID NO: 257104 - DNA, 348 bp, Klebsiella pneumoniae; identical to SEQ ID NO: 214251

SEQ ID NO: 257105 - DNA, 399 bp, Klebsiella pneumoniae
gtggcccatctcttcggcaaccagctgtgcggtttcctggtcgatgacctggttgatggtcgccatggcgcccagcttcatcatcgctttgatgacctgagaacctttcaccgccatcttgttagccagttcgccaacggtgatggtttcgccgattacgacgtcacggttaacggcctgcgctggcttctggaagccctgctgcagagcggaacctttacggtgcttaccgcctttaccgccgcgaacggccgcgcgggcttcttcacgatcagctttcgattcagcgtgtttgttgcctttcttcgccggacgagccgctttgctgctacggctacggccgcgaccgccttcgacttcacgatcgttatcatcttcagcctgacgagcatgctgtga

SEQ ID NO: 257106 - DNA, 453 bp, Klebsiella pneumoniae
gtggatcgtgagctcactctgtgggaatctcgcatcattatggaatacctggatgagcgtttcccgcatccgccgctgatgccggtttatccggtggcccgtggggaaagccgtctttacatgcagcgtatcgaaaaagactggtattctctgatgaatactattcagaccggtaccgcttcgcaggccgatactgcacgtaagcagctgcgtgaagagctgcaggccattgcgccggtcttcacccagaagccgtacttcctgagcgatgagtttagcctggtggactgctacctggctccgctgctgtggcgcctgccggttcttggcgtcgagctggttggtgctggcgcgaaagagcttaaaggctatatgactcgcgtatttgagcgcgactctttcctcgcttctttaactgaagccgagcgtgaaatgcgcctcggtcggggctaa

SEQ ID NO: 257107 - DNA, 249 bp, Klebsiella pneumoniae; identical to SEQ ID NO: 138230

SEQ ID NO: 257108 - DNA, 321 bp, Klebsiella pneumoniae
atgcgcactcgtgagctggacaagctggaaaacagcctgggcggtatcaaagacatgggcggcctgccggacgcgctgttcgttatcgacgctgaccacgagcacatcgcaatcaaagaagcaaacaacctgggtattccggtatttgctatcgttgatactaactccgatccggacggcgttgacttcgttatcccgggtaacgacgacgcaatccgtgcagttagcctgtacctgagcgctgttgctgctaccgttcgtgaaggccgttctcaggatctggcttctcaggcggaagaaagcttcgtagaagctgaataa

SEQ ID NO: 257109 - DNA, 222 bp, Klebsiella pneumoniae
gtgtttacgagcggtttcgtcggtcaggaagataccggttgcttcagcaacaacgtcaacaccaacttcgtcccacttcaggttagccgggtcacgttcagcggtaacacggatttttttaccgttaacgaccagatgaccgtctttcacttcaacggtaccgtcgaaacgaccgtgagtggagtcatacttcagcatgtaagccatgtactctgcgtctaa

SEQ ID NO: 257110 - DNA, 288 bp, Klebsiella pneumoniae
atggttcacgaagaactgatcgcagctcagagcagcgtcttttaccgcttcgcttgcagcgcgcttagtaccaacgaaaaggattttacctttacgagcagcgatcttgttcagttcagccagagcttcgttgaacatcggtacggttttctcaaggttgatgatgtgaactttgttacgcgcgccgaagatgaaaggcttcattttcgggttccagtaacgggtctggtgaccgaagtgaacaccagccttgagcatgtcgcgcatggaaacagttgccatgtttaa

SEQ ID NO: 257111 - DNA, 234 bp, Klebsiella pneumoniae
atggaggcggcaaccttatttttcagcgaagtcgcgtccattttgcccagccagctgagtttttctttaccctcgttaatatccagctgcgagacaaaattttcatacccggagaacatcaccatcaccagcaaaccgcccaccagggtcatatccaccagcgacagcagggtcagaatcatatccgactcgctgacgctaaaaatatgcggcagtatgtggaagatctcctga

SEQ ID NO: 257112 - DNA, 285 bp, Klebsiella pneumoniae
atggaaagagtaagcatctttcatcaggaattcacgggaacgcattacgccgaaacgcgggcgaacttcgtcacggaatttggtctggatctgatagaagttcagcggcagctgtttgtaagagctcagctcattacgaatcaggtcggtgatgacttcttcatgagtcgggccgagtacgaacggacgttcgccacggtcagcaatacgcagcagttccgggccgtactgttcccaacgaccactctcttgccacagctcagagggctgaactaccggcattaa

SEQ ID NO: 257113 - DNA, 369 bp, Klebsiella pneumoniae
gtgaacgtcttcacgtttcttaactgcagtacctttgttgtctgcagcatcagaaagttcgttcgccagacgcagagccatggatttatcaccacgtttacgagcagcttcaacgatccaacgcattgccagagcattacgacgaaccggacggacttcaactggaacctgataagtagaaccaccaacgcggcgggacttaacttcgacagtcgggcgaacgttgtcgagagcgacttcgaatgcttccagttcatttttaccagagcgctgagccagggtctccagcgcgctgtatacgattgcttctgcagtagattttttaccatctaccatcaggatatttacaaatttagccagcagttctga

SEQ ID NO: 257114 - DNA, 369 bp, Klebsiella pneumoniae
gtgaacgtcttcacgtttcttaactgcagtacctttgttgtctgcagcatcagtgagttcgttcgccaggcgcagagccatggatttatcaccgcgtttacgagcagcttcaacgatccaacgcattgccagggcattacgacggaccggacgaacttcaactggaacctgataagtagaaccacctacgcggcgggacttaacttcgacagtcgggcgcacgttttcgagcgcaacttcgaaggcttccagttcagatttaccagaacgctgagccagggtctccagcgcgctgtatacgatagtttctgcagtagattttttaccatctaccatcaggatattgacaaatttagccagcagttctga

SEQ ID NO: 257115 - DNA, 387 bp, Klebsiella pneumoniae; identical to SEQ ID NO: 211058

SEQ ID NO: 257116 - DNA, 210 bp, Klebsiella pneumoniae
atggttgaaggccgcatgaagaaattcaccggcgaagtttctctgactggtcagcctttcgttatggagccgagcaaatctgttggccagctgctgaaagagcacaacgctgacgtgactggcttcatccgctttgaagtgggcgaaggcattgagaaagttgagactgactttgcagcagaagttgctgcgatgtccaagcagtcttaa

SEQ ID NO: 257117 - DNA, 210 bp, Klebsiella pneumoniae; identical to SEQ ID NO: 138792

SEQ ID NO: 257118 - DNA, 276 bp, Klebsiella pneumoniae
atgagctttgaaattatcgcggggctggtggttgtcatcctgggtgctatcgctggcgcgttcggcattggtcatgctcgcgggaccagtaaggcggaagccaaagccgatcagcagcgtaccgaagaaaacgccgttgctactgtcgccgcggcagaacgccgtgctgaagtcacgaaaggggccagtgatgtacaggaagacgttaagcgtatgggcgatgactatgttgatcgcgagctgcgcgaaagatttacccgccccggtagtcgttga

SEQ ID NO: 257119 - DNA, 303 bp, Klebsiella pneumoniae
gtgactgcagttgacgctaaaggcgcaaccgtagaactggctgacggcgttgaaggttacctgcgcgcttctgaagcttcccgtgaccgcgttgaagatgccaccctggttctgagcgtaggcgacgacgttgaagctaaattcaccggcgttgatcgtaagaaccgtgcaatcagcctgtctgttcgtgcgaaagacgaagctgatgagaaagatgccatcgcaactgttaacaaacaggaagatgcaaacttctccaacaacgcaatggctgaagctttcaaagcagctaaaggcgagtaa

SEQ ID NO: 257120 - DNA, 291 bp, Klebsiella pneumoniae
atgaccgcccgtgaagtcatggacattgacgaagcccgggaaaaatatgctcgcgggcttgctatctcgctgacggacaggcaaattgatgaccagcttttaaaccgactccgtcagtctctggaaccccaccgttcgggaaccattccagtgcacctctactatcagagggcggatgcacgcgcgcggttgcgtttcggcgcaacatggcgcgtctctccgagcgatcgtttacttaacgatctgcggggccttatcggctcggagcaggtggaactggagtttgactaa

SEQ ID NO: 257121 - DNA, 300 bp, Klebsiella pneumoniae
atgcccggtgacgtgatactgggcgttcagaatgcgttcgtgacgcagacgggcgaagtatgccccggactctgcgctttcagcgtcacctgctgtcaggaagggttccgcgtagtggtaaatttcaccggcggtgatcccttcctgactgctgatactttccgtgctgtcctgcggcgtcagcgcttcccggtagttgtagtcccgggtggccacccttccgctcaccacgttatatgcagtctgaatatcccagatactctcctgcccgctgtcgctcatcccggcctggttgcgtaa

SEQ ID NO: 257122 - DNA, 237 bp, Klebsiella pneumoniae
atggtggtccttggcaatactgctgaaaccctcgcgctggtagaaaaagtcccgggaattaacgccattaactacggcggtctgccgcagaaggagggcgcaagacaattcggcaaggccatctatctgaccgaagaggaaatcgccgatagcagagcgctgaaagaaaaaggcattcggctggagatgcgtcaggtacccgcccactcggccgagctcctcaacgaacaactttaa

SEQ ID NO: 257123 - DNA, 276 bp, Klebsiella pneumoniae
atgagctttgaaattatcgcgggactggtggtcgtcatcctgggtgctattgctggcgcgttcggcattggtcatgctcgcggggccagtaaggcgaaagccaaagctgatcagcaacgtaccgaagagaacgccgctgctactgtcgccgcggcagaacgccgtgctgaagtcacgaaaggggccagtgatgtacaggaagacgttaagcgtatgggcgatgactatgttgatcgcgagctgcgcgaaagatttacccgccccggtagtcgttga

SEQ ID NO: 257124 - DNA, 228 bp, Klebsiella pneumoniae
atgcttggcaacaatggtttgaccgaaggggtactggccgagattgaacaagcgttagagcaccatgaacttatcaaggtgaagatcgcctcggaagatcgcgaaactaaaaccttgatcgtggaagctatcgtgcgcgaaaccggcgcctgtaatgtacaggtcatcggtaaaacgctggttctgtaccgcccgactaaagagcgtaaaatctcgctgccacgctaa

SEQ ID NO: 257125 - DNA, 252 bp, Klebsiella pneumoniae
gtggatgcgatcaaggcgaagaaacaggatccgagcggcgcgttcgtgtggaccacctatgccgcgctgcagtcgctggaagcgggcctgaatcagtctgacgatccggctgaaatcgcgaaatacctgaaaggggcaacggttgagaccgtgatggggccgctctcctggaacgagaagggcgacctgaaaggcttcgaattcggtgtgtttacctggcatgccaatggtacagcgaccgacgccaaataa

SEQ ID NO: 257126 - DNA, 153 bp, Klebsiella pneumoniae
atgttggtctgtggcgacaaagaggtagaagccggcaaagtcgccgtgcgtacccgtcgtggcaaagacttgggcagcctggacgtaaatgaagttatcgagaagctgcaacaagagattcgcagccgcagtctaaaacaactggaggaataa

SEQ ID NO: 257127 - DNA, 189 bp, Klebsiella pneumoniae
atggcgcactgcctcggcgcatactgcccgaacattctgttcccgtacgcgcgcgagtgcatcaccagcctggtttcccgcggtaccttcccgcaacttaaccttgcgccagtgaacttcgacgcgctgttcatgaactatctgcagcagcaggctggcgaaggtgctgaacaacatcaggatgcctga

SEQ ID NO: 257128 - DNA, 219 bp, Klebsiella pneumoniae; identical to SEQ ID NO: 137666

SEQ ID NO: 257129 - DNA, 177 bp, Klebsiella pneumoniae
atgtttatcggcggcggcatttcgccattgcttatgggctggctcattcagtttggcggcggctgggaaaatccagcgggttatatctacgccttctttaccatggcgggatgtgcgctgctggggatgttattacagctcatgaccaccgataaaacgccgcgcaaagcgcattaa

SEQ ID NO: 257130 - DNA, 141 bp, Klebsiella pneumoniae; identical to SEQ ID NO: 196234

SEQ ID NO: 257131 - DNA, 726 bp, Klebsiella pneumoniae
atgaactggcgcgtttacgcttcgtcggtcattggcagcagccaccgacaaaataaccttccttgtcaggatgccttttgctaccgcaatttgggcgatcgtctggtcgccgccgtatgcgacggcgcaggctcagccgcttatagcgaacagggtgcggttttagtcgcccgagagctggccgaacggctggcgaaattcaccgccgcgcctgatgaacagcagctggcgacgctgatagcgagcgtgcgtgaggtcgttctgctggcggcgcaggagcgagggctttccgcaggcgattttgcctgtaccgttgtggccgcatggctcggggaaaccgcctcagtggtgctgcatatcggtgatggcgtcgcggagttgagcatcgactctgagcagcacttctcgttacctgaaaacggtgaatacgccaaccaaacctggtttctcaccagccacgactggcgcgaacatttacgcatccgtcagtttgctggcagagccacgcaactggtgatgatgtccgacggcgtgcagccgtttgcgctaaaccggcgcggcgatgcgctattctccccctttatggaccctgttttgcgttatttgccgcaggtctctgaggttgaagggagtgaggcgatacgcgccacgcttgacgacccgcgcacctgggcgataaccggcgatgataagacgcttctggtagctctgcgtaatgaagcataa

SEQ ID NO: 257132 - DNA, 1374 bp, Klebsiella pneumoniae
atgaagcataaaaaagcccctgggtgttataacgagcaacgtcgcgcggtacgcctgggaaaactgattaagagcggcggcgctggcagcgtctattttctggcggatgacccttcccgcgtcgcgaaaatctatcatcccaatatcgataccggctattaccagcgcaagcttagcgccatgcttgcgcagcgcccggaaattcccgcgcctgctgacggtgaagcgatcgtccaactggcgtggcctgactatttgctcttcgacgagcgcaagcgggttattggctttgttatgccggtgctcgatacccggcgcactattgagctggagtatattttgcagtcgcggcaggcgaaggcgcagaatctgccggaggggattggcgccaaagtgagcctggcctgcaacctcgccaccctggtctcggcgttacacgcgcgccagcaccgggttatcgacatgaagccggtcaacctgcgtttttatcgcgacagcctgtacatcgcgctgcttgactgcgatggctttagcatccagggcgagggcgagcgtttcccggccgggcagttcacgccggattacctggcgcctgagttccagcgcattggccaggtgccgggcgaacaggaagaggctcaggaccgcttctcgctggcggtgattattttccagctgctcaaccacggcattcatccctatagcggccgcgcgcaggcggcaaaagtgcctgatgatttacccggtcgcatcgccgccggttgctacgcctacggcatcaatgccgcaaagaatatctctccggtaccggccagtacccatcacctgctgcccgctgggctacgcaagctattcgatcgcgcctttagcgattcgcctgcccaacgtccttccgccgatgaatgggcgaagatcctgcgtccttatgcgctacgcagtacgcaaaaaattgttctctgtagtaagaaacaccagcatttcgccgggatgccgtgcctggtctgcgcacgtgaaaaacaggttgttgaggggataaagcaggcgaagcagcataagcggacacaaaccgttagtccaaagcctgcgcccgcaaagcggcagcctcgcgtggcgccagccgctgcggtacctcgtcagtcaactgggccggggccgttaacgctgctgtggcgcaatatgcgcagcaaagttcctgcatttgtttggcatggcgcgctggctgtgattagcacgctggtgatggccatattagcgcgtaattttacccaactgagcggtccctggcatgcctggtacgataatgcggcgttaatcctgctttttgtctggatagccgttatggggctgctggcgattcttcggagtaagccataa

SEQ ID NO: 257133 - DNA, 2337 bp, Klebsiella pneumoniae
atgattacgccgaagttaaaacacctgctggtcatcttgtctttgattgcgctttttgtcgcgccgaatatggtgctctttctctggtctgcaccctttatgttggtggataagctttcgcttttaccggcggcgctgaatgctccccagcgtttattgctctacggcctgtggctagggggaactctctacttttccgccctgatgtgggtggcgattacccggcgcaataaaggctatctgattgctgccgtggcgcagattgtttttgttatcggtatcaccttattcaatgtcccaattggcgagcaaaaccagcggcgctggcagagtatgaatcagctggcatcgcccgcctgggcggattttctctatgaccgtcatgcccgttttattcagataatcctgcgtggggaaccgtttaatcagcacaagattgtcgagcaatttatcgcgcagaaaaagccattagcggagctgccgcttggctggagtgaaaaagatgccgccgccgcggatgcgctctggcagcaggcactgggctatcgcgaacaagaagcgaaagcattacccaaaataacggattatctcagctggatgccggaccgtggcgatctgacgctggccgcggctatcctgacgctgacaacggatgcggacaaatcgcgggcggaaagagcctttcggcaggcaatcgccattgcgccggaaaactctgacgcctggctgggttgggcgttagcgctgatccagtcccgcgataatgagcgggtgcgaaattcgcagtttcaggcgcttacgcaaagcattacgagcggattattgatggcggagggcctgaaggatagcccgcgccagcctgcgctacagcagcggttagcggcgtatatcgcgcaaatgccgtctgacgaccggcaaatcctacatattctgcaggccagaatgcagacgcgctcctgcgatttgccattggaccggtatgcaacggaaaaaggcgaaggtagcaaggtgttgcctttatcgaaatcgatcgtgtttaaagaaggccccgtgcgtggcatcagcacagttaacgagcactttccggggcacgtcagcattgagccagaaagatatgggatcggcaaagagacggtgccgccgatgctctacccggcgataaataaatatatcaagtcggcgacgacggtactctcgctggatacagacgccagcggcgagctgttaaacgtggtggttgagtgcagcagcggcgttcccgagtttgataaagcggcgctccactacgcgccgcagtggcgttttcactctaatcggcagggaaagcgcctgctgatgccggtgacctttatcagcgatcgcctgtctccgaatgaacactatcgggaaatggaatcacgggcgatgcgtatctcacggctggcggcccggcataataaacctggaatggaagccgccgcgcaagagatggccgctcaattcacccggatgaaagcgctttttccgcagaagaaactgagcgcggaagaggcgcgcaatttacagcttatctacttcaaaaaacgagaaaaaacgaccaaaggcagaatagaaggttttaccgaaatgaccgaggcgatggaagcgctggtcgaaacgcatccctactatgcgccgttattgaaggatttggcgctgagaaagagctatgtttcctttgacgagaaacgggcgacgtgggcgcaactgctggcgctggctccggaggatccgcaggtgtggatggggtggggcagcctgtgggccgagcgcgatcctgaactgtacatcggcgcaatgatctactccctgttgctacagccactcgccgaggataccgagcagaaaatagcgaatatcaaaactaagctactgatgcgggttggcatgggcgagcgtaatgcgattctttcggcaaaagtgtacgcggattatgctgatatcctcggggaaagagcgaaaggtgaagagaccgcaaaagccggggaaatcttgccggcgagcaaaaagctggaccgccatgaaacgctcgttccctttgacccgccggtgagtatgacggttgatatcgacaagaatgcggtgttgaacgcgtctttcttcggcgttgagtggaaggcgccgcaaatgcagggcgataaacggactgagcttaccgttgatattgataaaaacggcgcgccgacgctggtgctggtgagcaaaagcagcgaagtggaacagtacgatgcgcgggcggtcgatatgctctggcgctggaagttcaaaccgcagcccgatggcaggcagataaccatcggcgtgaattttcagcactag

SEQ ID NO: 257134 - DNA, 609 bp, Klebsiella pneumoniae
atgtatgatttagaattcatggcatggctgaaacaatccatcgaaaagaaccgcaagaacggttattgcggctacaatagaacagttagcgttaaagggttaagtaaggcagatttaaaagcagttgaagaggtcatttcaaccttcacagtaaagaagcgccccgccactaaacaaactgacttccaaccatccacagtaaaacgagcacgtaaaacaatggataaccggtactacctgtattttaatcaggttggttcatatcgtcgtttgggttcatcggtagaagatgttatttcgggtgctgtccgtctggacacttcattaacccgtgagacttcaccgcgtagaatcttcaatatgatgaaagaactaacctcaatcagtacaagtgatattgaaaagcattttaacgttgattatgaatcagcaaaaaggctttctcagaaatgcagggctgttattaacgctcttgattaccatcttgagaaaggaaatatcaaattatcatttaatccgtactttgaagaagaattactgattgatgattttgatgtagaagccgatgcaaaggcttatcttgaacataaagcaaaaaaggcagcataa

SEQ ID NO: 257135 - DNA, 828 bp, Klebsiella pneumoniae
atgagtgaaattattaaagaaccagttgaacagattaaacaagcctttaaggagaggatttcaagccccttgtggggttatgtgtttttctcatggctcggatttaactggcagaatatcgcaattttattcatgagtaaaaaagaggttgaggcaaggatttctaacattacttcgcaggattggttttttgttcattatattgtattaccagtgattgttggtgctgctttagctgctatctccccctatcttcagcagtggctcttaactgcgcaaaaaaaggcagatgataaaaggaaagagaataatcttgctgaggagttgagattgctcgatgatgatatgattaagaagaaaaaggctattgagctagcgaacattgccgaactaactgagaaaagtgaaaaagataaacttgaacgccaaaatgcaagaaatgagagtagattggcactaatcaagttacgtgaagctacactaacaaaatcgactcaagctattgagaaattatacgaggactcacacgtaaagctcaatgaaattcaaagcgagattaaacttgctgaggaaaggtacaaggttaaagtcgaaaccattaataatgctgctgtagcactcaataaaataggtgagctttatcataagtacgaaaatatgaacaccaatgaagagtttgtttcatttctgaaagagattaaaaacaagggtctctttggttcagcctttctagataacaatttcaattcaatgactgaaaaggaaattatctacggggcgttgaaacaagttcctgaaaacatcgagcaaaataaacgctcaatatag

SEQ ID NO: 257136 - DNA, 924 bp, Klebsiella pneumoniae
atggtgaagtctccggtaattcagcttagaaatatgattcattctggcactgtaggaatgcagcctattttgatgcaggcgataattattgcaaaaaaactcggtcaaaaggattttggagattggcttgagagtgaatacaggggatatccctctaaaagcctaactccaccctatcgacttttaaacttgccttattattcgcaactgaataacggtcagtggcagaatatgaatttagatagaacttttcttaaagatttgctggagcacgacactttttatctttttaagatgtgtgcggttcaaaatccccttgcggaagttgagcgtttcgcaacatctggtgaaagcctcactgcatatgtaacggaggatgttaggcagttttttgttcgcttgttcggagattaccccagctttgcacaattccctacggcctctcagatgtcaaaaatcgttgcagatgtcaaaatgatgattttgaactgggcgatagacttagaaagtaaaggaattttttgcgaagagctggaaattacctcaatagaacttcaaaaagagattattcaagtgaataacaataccaataattttttctctaccgttaccaataatggttcaattgtggctggtaacactggcgacattaatcagcaaaactctatttcagttgatgacattgcatcccttgagcgtgagctaaagagtcacggtcttgatgataatgatgttgctgaattgaaacagcttcttgagcaatcacctaaaccagcctcaaaagaagaagttgaaaaaggtttcggctcatggattggtaagatgacaggtaaggcttttacaggtgcgttaaaggtcgctggtgcggcggctccagccgttcttactaacgcaatctgctgctacttcgggatccctgtttaa

SEQ ID NO: 257137 - DNA, 396 bp, Klebsiella pneumoniae
atggtcagcgcgctgtatgccgttttaggtgcgttattgttagtgaagttctcatttgacgtggtgcgtctgcgcacccaataccatgtaggctacggtgacggcggctttagcgagctgcaggttgccatccgcgttcacggcaatgccgtcgaatatgtgccgattggcctcattttgctgttatttatggagatgaacggcgctcagacctggatggtgcacgtttgcgggattttattgattgtcgggcgactgatgcactcctggggttttcatcaccgcgtctactactggcgccgctccggcatgagcgccacctggtgcgcgttgttgctaatggtgctggccaatctctggtatatgccctgggagttggttttctccctccgttag

SEQ ID NO: 257138 - DNA, 522 bp, Klebsiella pneumoniae
atgccggatggcggctgtcgccttacccggcctacagggtcctctcacagtctcatacccgtaggcccgcgcaagcgcagcgccgccgggcaagatatcaggcacggtatctgtaattccgctggttggcggctgtcgccttacccggcctacagggtcctctcacaggctcaaacctcgcaggcccgcgcaagcgcagcgccgccgggcaagatatcaggcacggtacctgtaatttcgccgggtggcggctacgccttgcccggcctacagggtcctcttacaggctcatacctcgcaggcccgcgcaagcgcagcgccgccgggcaagatatcagacacggtacctgtaatttcgccgggtggcggccgccgccttgcccggcctacagggtcctctcacaggctcatacctcgcaggcccgcgcaagcgcagcgccgccgggcatgaggagatttacttcccggcttccggatgggtatcgaacgccgccatcaccgccgccagcgccgcttcgctga

SEQ ID NO: 257139 - DNA, 1299 bp, Klebsiella pneumoniae
atgatcgttggaaaaactgccagtgagatcttcgataatatccgccatctggtacaaagcggcgcgctcaagcctggcgatattttgccgccggtccgcgagctggcgggcaagctggcggttaaccgcaataccgtcgctgccgcctataagcgcctggtaacctccggtctggccgtcagtcaggggcgtaatggcaccgccattaaaacgcataatactcttcccgcccttgaagggggcgatccctcttccccgctgaaggatatttccagcggcaatcccgatcccgctcgcctggcgaacctcaagcactccctcggcgcgattgctttagcgccacgtctgtacggcgatgcggcggttgagccccggctggtcgcgtgggccagtcgctgggttaacccggatctggagatggacgccgagattaacctcgccagcggcgccgtcgatgcgcttgagcgcctgctatgcgccctgttgctgcccggcgatagcgtggccattgaagatccctgctttctcagcagcatcaatatgctgcgctatgccggttttcacccttcgccggtgccggtcgacggggaaggcatgcagcctgagccccttgaagaggcgctgcgcaacggcgcccgggcggtcattatcaccccgcgcgcgcacaatccgaccggctgtagcctcagcgagtcccgcgcccgggcaatacgcgaaatactggcccgctatccgcaggttctggtaattgttgacgatcatttcgcgctgctctccgccacgccctggtactcccctatcgccgcggaaagccagcgttgggcgctggtacgctccctgtcaaaaaccctggggccggatatacgtctggccatcgtcgccagcgacgccgacacgtcggcggcgctgcgcctcaggcttaattccggtagccaatgggtcagccatctgttgcaggatctggtcatcgcctgccttaacgacaacgcctttatggcctctctggcggaaacccggcgccactatcgtcaacagcatgaaaagctgattgccgccctcgccagccgcggaatcacccacctgacgccaggagacgggcttaatttttggttcccgctggaggagccgagtcagccggtggcgcttcgtctagcgcacgccggctggctggttcgcgaaggcgaaacgttcggtatccgcgaaccagcgcacgggctacggctgtcgcttgcgacgctaagcgagaatgaaattaataagctcgccaatgacttataccagatattacaacaacagtga

SEQ ID NO: 257140 - DNA, 897 bp, Klebsiella pneumoniae
atgatggatcaaaagcagattgaagaaattgtacgtagcgtgatggcgtcaatgggacaaccgcaaacgactacgcaagcgcctgaggcgacggtggcgaaatgcgccagccagtgtgaggtggcggcggagagctgcacgctggatttaggttcgccagaggcgaaaggctggattggcgtgcagcagccgcatcgcgcggaagtgctggccgaactgaagcgcagcaccgcggcgcgcgtgtgtaccggccgcgccggcccgcgtccgcgcaccctcgcgctgctgcgctttctcgccgaccactcgcgctccaaggatactgtgctgaaagaggttccggaagagtgggtgaaaacccagggattgctggaggtacgctccgaaattagcgacaaaaacctctacctgacgcgcccggatatgggccgtcggctgagtccggaggcgattgaggcgctgaaggcgcagtgtgtggcgaatcctgacgttcaggtggtggtgtccgatggcctctctaccgacgcgatcaccgtcaactatgaagagatcctgccgccgctgctgtcggggctgaagcaggccgggctgaaggtcggtacgccgttcttcgtccgctacgggcgggtcaaaattgaagatcagattggcgaaatcctcggcgcgaaagtggtgatcctgctggtgggcgaacgtccagggctggggcagtcggaaagcctctcctgttacgccgtttattcgccgcgcgtggccaccaccgtcgaagcggaccggacctgtatttcaaatatccaccagggcggcacgccgccggtagaagccgccgcggtgatcgtcgatttggccaaacgcatgctggagcagaaggcttccggcatcaacatgactcggtaa

SEQ ID NO: 257141 - DNA, 684 bp, Klebsiella pneumoniae
gtggttggtgccggaggcgtaatcgccggcggattccggcgaccagtcgccgaggaataccgaaccggcgctggtgatgccgtcgaccagttcgcgggcgttacgggtctgaataatcaggtgctccgggccgtactggttggaaatcgccacgcactgggcgatatcgcgcgccacgatgatgcggctggcggaaagcgcgccgcgggcggtttccgcccgggacagcgcggccagctggcgctcaacggcttgcgcgacgcgggtggccatctcgctatccggcgtcagcaggatcacctgcgaatccgggccgtgctcggcctgggaaagcaggtcggacgcgacgaaatccggggtggcgccgctgtcggcgatcaccagcacttccgacggcccggcgggcatatcgatagccgcgccgtcaagacgctggctcacctggcgcttggcttcggtcacgaaggcgttgccagggccaaagattttatcgaccttcgccaccgattcggtgccgaacgccagggcggcaatcgcctgcgcgccgccgacgttaaagatattgcgcacgccgcacagctgggcggcatagaggatttcatcagcaatcggcggcggcgagcacagcaccacctgctggcagccggcgatgcgcgccggcgttgcgagcatcagcaccgttga

SEQ ID NO: 257142 - DNA, 138 bp, Klebsiella pneumoniae; identical to SEQ ID NO: 98345

SEQ ID NO: 257143 - DNA, 1044 bp, Klebsiella pneumoniae
atgaatggagcatatgccctattaaatctactaccaggaatgcacgcaagcatcctttcgatcgttgcagcaattattacttcttggttcttttatgctttcccaaagctagttgaagcccaaaataatcttgaatcacttttgtccaattctcgttacttattaacgccagaaataaccagtgaatccgaacttgatatcagaaattcagatggctccatttcgtttgaaaagatatatcaagaacttaaccaccaaaacttcattccaaaaaactcaaatgttgatgatgaagttcttttagaaaataccattcgttatttattgataatggcatctataacaggaaacaacaccttccaaaaatggtgcacaccaactctacgagaaaaagattataacttattcgataatgtaaatggtaagaaccttggagcccttaaagactgtataaatatggtcattgcaagttatgaatttcggggagaccaaattaaaaatttcttcgaccgagcttatgatatacaattaaaaggaatgatcaatccgtacgaaattggatacaataattttatggatagacatataagacacatagagcagttcaaaaaagatggaaatatggatggccttcaggattatttaaataaagcagaaccttttaagcagagttatatatccgacatggaaaaatatgaacaagaaaaaacaaatcaaccttcgttcagacaaatatatgattcagtagcttcaaggttatacgtaatcagggatacattaattccacaacttgaaacctgtctggataaagtcaggtattcaaaaaatttactcaagcagagaggattaataaaaaacgtggtgcgtataatattttttaacattgttcttggtgtagttgcaccaattttttttatatcaatagaatcaaacatgattgactggaattctacccctataacatggtttgtatttacactggcactgacaaccatcatcccgtatcttgctatttgcgtcaaagcagtaaaagcaataagttag

SEQ ID NO: 257144 - DNA, 387 bp, Klebsiella pneumoniae
atgctcgagatttggattgaagcatactctgatattccatgcttgcttgataatacccaactcagcttttctcaaaagctaagaatgtgtaaaaactgtaaacttcctacagagattgcttccgtcatttctaaaattaacaaatttagaaatactttaagtcataaatttgaaatgtccgctattaatgacttggaaacaaaagagttattggaattaacacaaaaaattgaatttagttcacttttagatgacatttatgaatttagcattaactcaaccaaaggaatgattaaaattaaagatgcatctaataaccagaaagttgtttttgctgctttaattgttatttccgccatgcttcaaaataccgataagcttgggtga

SEQ ID NO: 257145 - DNA, 429 bp, Klebsiella pneumoniae
atgttcgtgaaaatcagcccgctgctcatttgccccctcgctttactcctttccgcctgctcgggtagtgcttctgcgccggacagcaccgaagacgctaaaatatcggcagaagtggataagatacttcgcgattatcaaacgggttcagatacttcaccgcaggccaatgcctcacgctatctgacccagatccagaaggctatcttcgctaagatagaccagccagcgtccaggcaagggcaaacatgctcggtgcgcttaacgctacagcgtgacgggacggtggagaatccaacggtcgagaacggcgatccggcgctatgcgcggaggtgatgtccgcgctgaaacaagccacaatcccgcctgcgccagacgaaaaaacctatcaaacattcagtcatgtcgttctggacttcaggccctga

SEQ ID NO: 257146 - DNA, 1995 bp, Klebsiella pneumoniae
gtgacgataaaaacacgcctggacgtggcgatggcgctcgtcttgaatctacccgcggcagccttcgccgcagaaagcgcttcggtaaacgaagagcagatggtcgtcaccgccagcgggttcagccaggagcgacgcgaggcgccggcgacgatctcggtgctcgatgagaaggcgctgaatacccgctcaaaccagaacatatccgaagcgttgcgcgagatgccgggcgtgctggtgggcaacggtcacggcagcctggcgaccggcgatgttcagatgcgcggcatggattcgacctatacctcgtatatggtgaacggcatcaagcaatctacccgcgaatctcgtccctacgggcatcatattgggacggaagcggcgtttatgccgccgctggccgctattgaacggattgaggtcattcgcgggccgatgtcctcgttgtacggctctgacgctattggcggcgtggtcaacgtcatcaccaaaaaggcgtataacctcgacgcatggacgggggtgctggaggataattacttcctgcaggagaaaagcgaatacggcaacaccaaccagactaacgcgttctttatggggccggtagtgccgggtaaactcggggtcagcgtgggcgcggattatcttgatcgtcgcgatgatgacagccccacgaaagaacgttttgttaaacatcagtccggaaatctggatgccacgatttctctgtcgccaaccgatacccagctctgggatctgaacgccaccaaaggcaatcaggagaaaacccataacgataaagagtggtactggggttttgaccgcgatgcggcctcgctgtcacagcatgcgtggtacggtgatgacctgctggaggtgaagaactttatcagctacgaaaaggcccgcacggaatatcgcgtgcccggcatggacccgcagtttattaagcagaataattttgaggccaatagcgcgaacacctttacgctggccgatcacaagctgacgttaggcgtcaactttacgcgcaacgaactgaatgacaccttcggtatcgcggacaaacaggcgcccggcgtcaccccggtcagtaaaattacccgccacggctgggcggtattcgcggaagacgcgtggatgatcgtcccggactttaccctgacgacctcggcgcgcctcgatcatgatagctatttcggttatcacgttacgcctaagctgtacggtaactgggccattgacgaaacctgggcgctgaaagggggcgtgtccgccggctataaaaaaccggatttacgccagaataatgccggttttaccagcgtctacggggcttatccttattctgaaatcggtattggcaacgacgatctcaagccggaacaaagcatcaataccgagctgggcgtgtactggcagcgggatgccctggcgctcgacgccacccttttttacaccaaatttaaagataaaatcagcgaccataccatctgtacctcatcggctacccagaagtgccaatacaacggctataccgccgatagcgtgtcgcaatatattaacgtcggtgatgcgcagatctacggtgtggagctgaacggcgactggcaggtgaccgcagcgctgaaggcgaacgccaactatacctacacccacagcgaacagaaaagcggcgagtataaaggctatgcgctaaacgatttccccagcagtatggccaacgtttcgctgacgtggaacaccacttccgatctggaactatggaccagggccagctggcgcagcagatcgccggatatcggcaagtccagcgcaacggacgcctacgcgctggtggatttaggcgcgcgttaccacctgactaagcgcgtcaccctgatgagcgggatctacaatctgtttgatgtaaatccggtttacaccaccgcctaccggcagacggcgatgctggaagggcggcgctataatttcggcgggcgcattgagttctga

SEQ ID NO: 257147 - DNA, 1059 bp, Klebsiella pneumoniae
atgtctatcgcatccctgaagaaagccgtgcgcggcgcgctggtcatttcgttttctctgcatgcgctttctgcgtcggcaaaagatttcagcgagcgggaattccgctctcagcctcttggccatggcgtttatgaactggcctatgatcgcggtcagaaggcgctgtatgccgcctccgcgccctcatttgataaagataaaacggcgggcgtcgtgtttcgacttgcggccgactctctgcggattgatgagaaaatcgccaccgaacgccgcgcctttgcgctctctctggatgaagaaaaccatatcctgtatttgggcaatgcgctggatggttcgctgacgctgctggatacgcagaccaatagggtgattaaaacgcttcagctcagcgatgattcagatcctgagaaacaggcccacgtccgcgaagtggtgctggataagctaaaccagcgtctgtatgtgtcagggatcgggcgcaagggccagggcctgctttgggtggtcgatagccgcaagcagcagctaattgatacgttgaagaacatcgacccggtggggtttgccgttgctaccgcgggtgagaaggtttatgcggtgaccggcaacggggagttggttatcctcgatggcaaaacgtcgaaactgctttcccgggtgaaggtcgacccggctgaatcggagcactatttcctcaatatcgccctgaacagcgccgccggagtcggatatatcgccgataccaatacccgcgatgtgctggtggtgcggctggactccggcaagctggtcgatcgtatcgcttcgccaaactccatcgccgtgctctatcacgccgggcgcgatgaaatctatgtgacccatcgtaacgatcgctcaataagcgtcatcgacgcgaaaaccaaccatctcaaacacaccatcaaaacggcggccatgcccaacagcctggtgctttcagcggatggcggaacgctctatgccagcgtcaaacaggacgaaaaaagcgaccaggctgactacgttctcaagattgatctaactaaattctaa

SEQ ID NO: 257148 - DNA, 588 bp, Klebsiella pneumoniae
atggcgataattcatctcttagatgacgatccggcagtgacccgggcatgcgcttttttactggagagcctgggctatgaggcggtgtgctgggaagagggggaacggttccttgcgcaggccgatctgtatcaggtcggtgttgtgctgctggacatgcggatgccggtgctggacggccaggcggttcacgaggcgctgcgtcagcgcggtagtaccctggcggtggtgtttctgaccgggcatggcgacgtgccgatggcggtagaggagatgaaacgcggtgcggtggattttctgcaaaagccggtttcgctaaaaccgctgcaggcggcgctggaacatgggctcacggtctccggcgagcgctttgcacagaaaaaagtcgtcgattgctatcagcaacttacccctaaagagagagaacttgcgctgctggtgatgaaagggctcatgaatcgggagattgcgcaggcgatgagtattgccgtacgcacggtggaggttcatcgggcgagggtgatggagaaaatgcaggcggggagcctggcggagttagtcagcaaattacagcgagttacccggtga

SEQ ID NO: 257149 - DNA, 1758 bp, Klebsiella pneumoniae
atggggcgtttggcgctgctgatctctacattactgctgatctgtccggcacgggcggactcatggtatatcggtctgctgtcgattcgcggcgatgccattgctcgcagcagctggcagccgctggaatcatttctgaatcagcagatgccggatcagcagttccatattcgtccgctggatctgcatgagatgcaggaagcggtcaagaacggtagcgtgcagtttgtcgtgacccaccccgggcagtttgttcaactaaatactcatttccccttacgctggctggcctcattgcgcgcttctcatggcgtgaagaacataataggaagcgtcatcctggcccgtcgcgacggcgaaattaagacgcctatggatttgatcgggaaaacggttggcgccatcgatcccctggcttttggcggctacctgttgggatacaaagcgctgagcgatgccggattgcggccagacagcgatctctatctgcgcttcaccggatttccagccgatgcgcttatttatctgctgcgcgaaaatgccgtgcaggcagccattgttccggcgtgtctgctggaaatgatggatgaagaggggctgattgataaagttgattttgtcgcgctgataacacgcccggaatccgcaccttgcgtaaccagtacccggctttacagagactggtcttttgccgcgctgcccaccgtaagcgacgaggtggccgatcgcgtgacccgcgtgttgcttaatgcgcctgataatgcggtttttcgttggggcgcgcctgcctcaaccagccaggccgaagcgctcatgcgcgaactgaaacagcatcctcagcagcgactgttatggatggatgtcaggaactggtttgttcagaatcgcctgctggtggcgggagccgggctgatattgatactactgatactcaattatatctgggtgatgctgctggtgcgacggcgcggcaggcagcttgaacgcagcgccatccggctgcgcgagcaggagcaggcccttgaaacggcccgtcaaataagcgtactcggcgaaatgacttcgggtttcgcacatgagttaaatcagccgctgtcggctatccggcactatgctcagggttgttcgatccgcttgcagaagcaggatccgcagcatcctttactgtcggcgctggagaacattgatcttcaggcgcagcgcggggcggagacgctgcgtaatctgcggctttgggtgagccaggcgcaaggagaatccgttacggccgaaaagtgggagagcgttcgcattgttcaggcgattgataatgtctggcagtggctgcacgtgccgcgacagtttcccggacttcggatgataagcagcatagaccacgccctgaccatcgtcttaccgcctgttctgcttgagcaggtgctggcgaatctgatcctcaatgcggcgcaggccggagcgaagatgctgtggattgatgccgttcgcgatgccggaagcgtgaggatcgtcctgcaggataacggcggcggtatcgatgacgcgcagctagcgcaggcattccagccgtttaagagcagccggcaagagggaatggggctggggctggttatctgtcagcggctggtgcgttatggccggggagagatcggcataaggaatcaaacggcgcccgatggacggcccggcgcggtagtggtactggcattcacgcatcaagaagagcggagcgacaatggcgataattcatctcttagatga

SEQ ID NO: 257150 - DNA, 504 bp, Klebsiella pneumoniae; identical to SEQ ID NO: 188369

SEQ ID NO: 257151 - DNA, 975 bp, Klebsiella pneumoniae
atggtacctactgctaaaccactacacttgccagtgcatatagcaactgagaataattatttttccatggggcttatattcctgttgaaagagttgtttgaagaggagtatcagggcggagtgattatctctaagactagcgagcctatggccgcggatctgatcgtgaaattccacacgccgggtgaaaaagtgtttgattgggtggggtgtcatgagttccgtacacacaatgaatataagttcaaaatgttaggtaaaaaatggttaagcgtatatccgcgtagcgagcattacgatcggaatattaactgtccggtcatcaatgccgttattaccatgagaaactccgtggccactattcgcagaaaattgttttctttatttttcgctgactcgatgagcggccctccggatctgcgtaagccaaactgttctaaatgccctgggccttaccaactggtatggcgagaacagttgatgttagggtatttaagtcaaggcttggggcatcatgaaatttcgcaaaaaatgggttgttctataaaagcattgagcagctatcgccgttctattatgcgtaaactcaatataaaaaggtatagcgacttcgtactgtggttaggctctcaggctgtttcaaaaaaatacgctgaaattgtccagcatcatgttccggaatatgctgacgatcggcttatctggaaaacaaaactttctcctgaaggcggtgatgaatcagatgataagtaccgtacgttgcaaagcatgaaacgcctgacgaccagtcgtttacatttaaaacaatccgaaagtgaaatctggctgacgacacgagagatcgccaacgaaatggatattagtatttacagcatgcgctatttattatgccagatggaaaactccggagccgtaataagcattaaaaccgggagcgggagaagtaatacgctacgctggaaattagcaagttaa

SEQ ID NO: 257152 - DNA, 1287 bp, Klebsiella pneumoniae
atgagtcatcgagcagggaatgcaatcgtcttcattctcggtgtcacgatgattccatgcgttcaggccgatgttttaaactatgccagggattggacccagcgcgaagaagtcaataaaagcagcgtgcaatcgcaggaagagagacgtcctgcgccgcgggaaaaatcaaagacgccgccaaaagcgtctgctaaagaaaagattaacgccaggccgtccgtcgcggtgaaagccacaacggcgccggcaaaaataaaagagagagatgaaaaatctgcgaaaactcctgatattccgccttctggcgttatcaaatatccggaggtgaggagggagcaaaaaataataaacaagaacgaaacagacgtttatctacctgattctcgtatcttaggccgctggctgaaatcggttattcaacatatttccgcctcgccttcagagcgaatgatacaagagctatatctgaaacagaaagacgaaataaaaatcatgcgcgataagttagcccagcgtgagggtgaaaatgttattttaaaaaataacgacaaagaacgtcatttaattatgacaaaactcggcaagctggaggcggagaatgggcagtggaagcgtttgacgcaggaaatgcaaaaaaatctgaagctggcaaagtatccaccactccctacaagtgaacaagatttagcggattttgccgccggtatggcgatgggtgttgatattgttgaactgcttgaacagcgaaatgaacaaggtgttcagattgatcgtaaattatttctggcggggataacggaaacgctacgcggagaacgccgcctgtctcaggaggcgtttgaacaacatcttgccagggctaatcagcgcgtcagcgatgctataaagaaaaccatgaaaaacaaggaggtacgcgaccaggaatggttgcataactttattaaacaggaaaatacattagctgccggtaacgaagcctggttccgggtcatccataccggtaacgaggtattacccgacaatgagtcggcaaccgaattaacgctttcgtttatacgtcgtctgactgacggaaccttgattgcagactccgatctttctggtctggtactgcaagaaaaaattagcgagctgccgacctggctgcgggtggttgcaaaaaaaatacgcttgaatggtgaagccgaattagcggtgaaagtaaatgaatacggcgacccggcagaacggggaaactatgtcgagcattggaaagttcgagtggttaaacaacgtacaatgtaa

SEQ ID NO: 257153 - DNA, 534 bp, Klebsiella pneumoniae
atggtaaaaattacgcgttgcctgacgttgagtcttttattggcaatatcttctggcgctgtggcatccgatcagggcagagggcttgtcacaatgaatggtcaaattcaggaatcagcttgctctattcatactgatgatatctggcaggaaataccctttggggtgatttcttataatgacctcgacgaggaaggcaaagcgattattaaacccttcgctgttcgtctggtgaactgttcactggaaagaagtcatggcgatttatggcaaagcgtgaacatcacttttagtggggaaacggaggtatttcgtcgcgatatatttaaagtttatggcaatgctcaggggcttgggctacgtattcacagccagatcggcgatgtggcgcaagacggcattccgatgccagccgtcatgttacaaaatgacaataatgaattgcgttatttattatcgctggtgcgcggcggaaaatcgttgtcggaaggtgactggtacggaattattcgctttatggtaacttatcagtaa

SEQ ID NO: 257154 - DNA, 546 bp, Klebsiella pneumoniae
atgaaaattagcaaaattgcatctgctgttgttctcactatgggtgttgcctctttcgcagctcaggccgatcagggaagcggcaaggtcaccttctggggttcgattattgatgctccatgctcaattaaaaatggctacggcgatcagcgtatcgaactgggtcagatttccaatacgcatttggataacggcggtatctctactcctcgtccgttcgacattgagctggaaaactgctccttcgcgaaggattcaaacggcgacccgatgtttaacaccgtcactgtcaccttcaatggcggcaacgttcctaatgacatgaccatgctggctattaccggtcaggctgcgggcgctggcgttcgtatccaggattactcaggcacgatggtgactttagataagcctactgccgggcgcgttcttggcattggcgacaacactctgagctttagcgcttacctggaaaaaatcgcgtcagtgactaacgtcactccgggtgattttgaggcggtgactaactttaccctggcttatcaataa

SEQ ID NO: 257155 - DNA, 669 bp, Klebsiella pneumoniae
atgaatccctatgaaaaaatgtaccgccagctgctggaaaatggtgccatcgcctgggctggcgagggttacttaagggcaaagaaacaacaggagcgggtgtttagctggcttgatttacagcagtactttccccaacccggagcgccagtccttgagctggggtgcgggaatggcgccatggcagcgcagtactttgctgaacgaggctattccgtgtgggggatggatttgtccgcaaccgcgatccgctgggcagaaaatcgttttcagcaagcggggctggcggctcaattttttgtcggggatgtctgccatattcatcagtgccaggatgcgacgtttgagctcattatcgatggcagctgtacgcattgcctgattgacgaagctcgccacctttgctttaccgaagtcagaagattgctcaggccgggaggacggtttgtcgtcggttcgatgtgcggaacccctcgccacccggaagacgtggccgcttacgatcccattcgccatcatttatttaaagagggtcaaccctggcgtacgctgcgaccgctccaggctctcctggacgagatccgcgatgaacattttgatgtgcttgaggtgaacgtcaatgagaacccatggtgggatcatgcgaccgtggtatgttgcgtaaaataa

SEQ ID NO: 257156 - DNA, 888 bp, Klebsiella pneumoniae
atgaataataagctcaacgccattgccaccttcctgcgcgtcgtcgaagcgggatctttttcggcggcggcccgccagtgcgggatgaaacaatccgcagtcagccagcagatcgcggcgctggaggaggagctcggggtggtcttgctgcatcgaacgacgcgggcgatggcgttgaccgagcagggggaaagctaccggcgcgatatgcagcttttgctggaagcgatgcgcgacgctgaaaggcgcttaaaccccagcgagagtcagcggcaaggcagggtacatgtgcagctaccgagcggcctgggacagatctttttgccgcacctgctggcgctgcagaaaatgacccccggactgcatctgacgctttcacttgatgaccgcattgccgatctggttactgaaggggtggatgtcgcgctgcggttaagcagtgaaccgcctcaagggcatgcggcgcgcgtgctggcgcgtattgaaaccgcgctattcgccgccccgggttttaaagaactgcattgcgtgagcgaattggctgcccatccgcacgtacgtttcagcggcatcgcgcaggacgcgccgctgcggctggtctcgggtgataaaacggtcgatgtgaaagtcaataccgtgtttcgggctaccaccagcgaagcgctgctgcaggcgctggagtccggtattggtatcggtggcatgcagttgcccctcgcggccaacgctttacaatccgccaggctggtgccggtcttacccgcctggcgattacccgatcgcttcctctatgcggtttaccctgacgcccgctttattccgcagcgggtcagaagcattatcagtgtgattgagcaattactgcccaagataacggggagtcgctaa

SEQ ID NO: 257157 - DNA, 1056 bp, Klebsiella pneumoniae
gtgaataagaaaccgcaacccaggatcgcgctggtcgccggcgccagcggcattgtaggcagacagctagtgaaaacgctgttgcgccatcggtgggaggtcattggcctcagccgccatgcctcgcctcacccggatgacattcccgttattaacgtcgatttacgcgatgcgcgggacagcgcgcagaaactgcaatcgctcaacggcatcacccacattttttacagcgcatggttgaacgcggcgaactggacggaaatggttgaaccgaacgtcgccatgctgcgcaatctggtcagcaacatcgagaaaacctcaccgctgcgcacggtaagcctgatgcagggatataaagtttatggcgcgcatcttggtccgttcaaaaccccggcgcgagaaagcgatcccggcgtacccggggccgaatttaatgccgctcagctcacgtggctcagccagttccagcgcggaaaaacgtggcgctggagtgcgctcaggccgggcgtggtcggcagcacggtgcccggcaacgccatgaatctcgcgctgagcatcgcgctctacgcctcgctgtgtcgggcgcagaatttaccgctgcgcttccccggctcggaacaaacctggcgcagtatcgtcgatcatactgacggcggattgctggcggaggccacgctgtgggccgccacctcgccgcaggcggaaaatcaggcgttcaacgtcaataacggcgacctctggcgctggtgcgagctgtggccgcgcatcgcggactggtttgaactgccttccgcgccgccggtcaggctctcctttcaccagctgtttgtcgattaccgcgcgcagtggcgcgaactggccgggcaggatctggtggaggcggatattttacggctgaacgacggtacgtttgccgatttcgtctttagctggaattacgacatgtttggcgatggcagcaaactgcgccgggcgggcttcacggacatgcaggccaccgacgacatgtttttccgcctgttcgcgcagctgagagccgcacgcgttatcccctga

SEQ ID NO: 257158 - DNA, 435 bp, Klebsiella pneumoniae
atgttcaactctcttagcgccacgctaatcatttttatggcaacaacgggcgcggcattctctgccgggcaggagaacggagtgaagattcagtttgcgtttaacgcaacgacggtagtcggtttgctggatgagagcgcagcggctaatgagttcctggcacagctgccgatgacggtgaagcttgaggattatggttccacggaaaaaatcgcctggctgccggctaagttgcgccaggcggatcctggcgcatcgctaaccccacggcgcggcgacatcgcctattacgcgccgtggggcaatctggccatttttcgcgaggattttcgccaatcgtccgggctgataaagcttggccgtgtggtcgaggggcttaaatcgcttgaccagccgggcacagcgacggtgaccatcagccggtatgttgagtag

SEQ ID NO: 257159 - DNA, 801 bp, Klebsiella pneumoniae
gtgaaagcttttattgccgctgccgccatgtcgttgatgctgggcgctcccgtcctggctgaagaaaaaagaggtgaaaaaatggctctatttagcccaacccagttgtccgttgaagatgttcaatccgtcgcgcccgcgcttgcccgtttcggcagcgaggtgttgacagaggacctctgggcgcgaaatgaactctcgcgccgcgatcgcagcatcgtgaccgtagcgatccttatcgcccgtcaccagcccgcggagctaaaacattacgttgacgttgccctggataatggggtcacagcggctgaaatctccgagatcgttactcatctggctttttattccggctggcctaacgcgatgtccgccgttgcggtgacgaaagatatttttatcgcgcgcggtattggccgcgagcagctggcttcggcgtccccggagctgcttcctcttaatcaggcgatggaaaagcagcgctcaacaacggtagagcagaacgtcggcgcgatttcccccgggctggtgaagttcacaacgcaaccgctgtttcttgacctgtggcagcgcccggggctgaagccgcgcgaccgcagcctggtgacggtcagcgcgctgattgccgccgggcaaagcgcgcaaattggctaccaccttaaccgggcgatggataacggcctcaccgcggaagaggcgggagaggtcgttgcgcatgccgctttctatgccggctggccaaacgccttttcggcggtagcggtggtcagtgaagtcctgcgcgctcgcggcctggcagggtga

SEQ ID NO: 257160 - DNA, 597 bp, Klebsiella pneumoniae
atgaactattcgcaccgctgtattcccggtctgttctggcttttggccgtcaccgcgtttctgtttagctttacccctaccagccgtgccgccgaggctaacacgctggttattgtctcccatccttatcctgaacaatcggtcatgaccaaaggtctggaggagactgcgcgaagcgtgcccggcgtgaccgtacgcaatctcgaggcgctttacggctttgacagccgaaacatcaatgccgatgaagagcgacggcttatgcgggaacacgcgcgcgtcgtttttattttcccgacccactggttcaacatcacgccgatgatgaaggcctggctgaacaatacctggggtagcgtggggccggggatatggcagggcaaagagatgatgatcgtgacgacggccgcgggaggtgaatccacctacggcgagtccgggcggatcggcgtcagcctggccgacgtctttacgccgatgaaggccagcgcgctgcatgcgggcatgacctggcttcccccgctggcttttgagaatgccagccgccgccggcttcctgagtaccagcgccagctggtggaaaggttgacgaattaa

SEQ ID NO: 257161 - DNA, 600 bp, Klebsiella pneumoniae
atgttacctgattgcgataaagccatcgtcctgctgcatgaaatctatggcctcaacgcgcatattcagcgaaccgccgcgacctggagaagccgcggttacgctgtctttacgcccgcgctttttccccactctgcgccttttgcttatgaccagcaggacgaggcctggcgccacttttccgataacgtcggatttgataccgccgccattgtgtcgctgctggccgagcttagagcgaaatacggcacgctaattcttatcggctacagcgtgggcgccaccttagcctggctggccgccaggagcgggctctgcgacgccgcggtgtgccattatggatcgcggatccgcctgtacagcgacgttgcgccccccagcccgacgcttgtcatcatcgcccgtaatgaaccggcgttcgatccccgcgtcatgcaaaacgagctggagaaaattccctccgtgacctgccggatgttcaatgcgcagcacggtttttgtgatgccgacagcccggcatgggacgcgcgcctcgctcagcaggcagacgaggacacgctgcgctttttaacgcttattcagcaaacacaggaggcctaa

SEQ ID NO: 257162 - DNA, 573 bp, Klebsiella pneumoniae
atgcatcaggtatttcactggattaacgaacccgcgacatggtcggaagaggacggcgtactccgcgtagtcaccgatgcgcaaaccgacttctggcgcgaaacctggtacggatttgagcgcttctccggccatatctacgcgacggaggccgcagcggatttcacctttcaggtgcgggtccgcgccgacttcagcaccctgtatgaccaggcggggatcctgcttatgcaggacgcgcaacgctggctcaaggccggtattgagtacaatgacggcgcgcccgctatcggcagcgtattgacgcaggggaaatcagactgggcgaccggtgttttcccgggcgaccccggcgaattctggctgcgtctgacccgtcggggggaagcgctgcgcctgcagtactctacggatggccgtcagtggccgctgctgcggctgtgcccttttcccagcggagcggtgaagatcggcgtcatgtgctgcacgccgcagcgtagcggactacgggttaatttccacgatatagcgctgctgccgccaaacgagaaagatctgcacgacctgagctga

SEQ ID NO: 257163 - DNA, 144 bp, Klebsiella pneumoniae; identical to SEQ ID NO: 188359

SEQ ID NO: 257164 - DNA, 603 bp, Klebsiella pneumoniae
atggatacgcgtaaagaagtgttgtttgtgctcatcgaggagtatgccgactgggagtttgccctgctggcgccagggctgcgccgggggtttggcatatgggagccgcagtatgatgtcaggaccgttgccgcggatgcggggccggtgatgtccattggcggggtccgttgcctgccggattataccttcgagacgatacccgatgattacgccgcgctggtgttggtgggcggtatgaactggtggggagaagaggcccggcgggtggtgccgctggtagagcaagcgcaggcccggcagatcgtggttggcgcgatatgcgatgcttcggcattcctcggcgcgcacggctttctcaatgatgtcgaccacacctcgaacgggctggcctacctgcagaacagagcgggctccgcctacagcggcgctgcgcgctaccgaagcgtgccttcggttcgcgacggcaatctggtgaccgccaatggggttggctttgtggattttacctgcaatatgctggcggcattaaacgcgacgcaggcgggcgaaatcgaagcgatgcgggcggcgtttacgtcgggaatgtttactgaaggctga

SEQ ID NO: 257165 - DNA, 627 bp, Klebsiella pneumoniae
atgaaagtcacatggaacgtcagccccgtgggctaccagctgattagcaaacgctgccccgcctgtcatgggcagcaggatttcaccccatccggcgccttccgggtcaattcacaaaaaaagatgctcgatgtctggagtatctatcagtgcgtccgctgcgcgtatacctggaacatcagcctgttctctcgtttaccgatcagcaaaatcaatccgcagctctacgagcggcttatcgctaacgataaatctgccgtcgaggcttattctcacgatctgctggtgctgcggcgtaatcgcgcgtcgccgtcaggatcgcctgaattcatggtcaaggagcgctggcgaatcagccttgttcgcgcttctcaggtgagagtggaggttaccgtcgcgcgagcctttcagaccagcctgctatcggtgctgcgaagtcagctgtgccttagcggtagcgctgtccgtaagcgccttgcgtcgggagatatcggcggcatcaccctgaaggcgttgcgatcgccccggctgaggccggagggatatacgctttatatcaccagggaggttctcctcgcccgcaggcgcattccgttgtctgcaggcccggatcgcagaagacgatag

SEQ ID NO: 257166 - DNA, 129 bp, Klebsiella pneumoniae
atgctgtttatgaatgaattctctgtatttattgatttaatgcatgcctttacccttagccgctttgttacgcttaggcccattcattggcggtcagacagggtagtcgtgttggaaatctttttttaa

SEQ ID NO: 257167 - DNA, 1368 bp, Klebsiella pneumoniae
atgacataccacattaccctgacggacccgatgaatggcccccgggatcgcgaaccgattacgtttaccctcccggagaggctggcggaacctctgtggtgggccattaccgacgaggacgagcggatcctttgccagcgcctcgagcatgaatcgtcggtaagcagtaccgcttttatcgcgacggtcagcttcagcggtacccttaagatgcggcttgaccggccgctcacggcggctgaagtcgatgacatatccggtatccagacgctgcccggccgggagagcgactgttttgcgcgcctcaataccggctgtttcgatctggaaatgtgtcggggaaccgcccagggcgtcggttcatcaaaatgggggctgcgccatttccgcgctctgcaggacggcgtcgaactgcttccttcggggaataacgccatcggcggtttttacggtccgttctttaccccggagaacggactgattaacccgccggagcataccgtcgttgatattgaggtcgttgaacagggtccggtctatcatcactaccgcatgcgcggcgcgatccccgacgggttattaccggagctgcgcggtaagcgcttcgccatcgactggaaatttagctggaacacgccgtggtttcagcggcgctactgggtggatgacttttcgacggtgatcaacggccgttcggtgaccaacaagatcaccgtcggcgacgaatttgagagcggtccgggaaacctgctgttcgaccgcttcgcggcctacggcggcacccgctaccgcgcgggcgacccctacgccgaagaactggtggcgatggtggccaataccgtcgccacatcggaaaatcaaagcccgaaatttgccgaattccgcgaacagctcgccgatatggcttctgcccactgggatctctactggcggatgttctgtcgctgggagcacgtgctggatgaagcggagattcgcgaacggctgagtcaggtgcgcgcccgcgcgcatcttcgggccgatctgaccgagcgggaatggctgttgaccgattcgccggttaacgtttccgccgtcgcggatgaaaccatcttccccgggccggccagtaaaaccgtcgagtatgattcggctagcggccgggcgatgatctggtggacctcccgcccctccggcgcgtttcagatagtccagcgccgccagtccggatgggttaactggggcagcaacggcgaaaatgagtgtccggagctccccgtcggcgtcgagatcaagaccgcctgcgggatcttcgccgaaaactggatgcagatcgccgatcggctggaaaccccgccggtggtcacggtacgtaaaggagataactga

SEQ ID NO: 257168 - DNA, 141 bp, Klebsiella pneumoniae; identical to SEQ ID NO: 188356

SEQ ID NO: 257169 - DNA, 507 bp, Klebsiella pneumoniae; identical to SEQ ID NO: 188355

SEQ ID NO: 257170 - DNA, 810 bp, Klebsiella pneumoniae
atggaggagagtttgacaaagggtggtacgaccaatgtcccggtgcttagcgtcagtatcgcatcgttgccgcgtcccggcggcggggacattctcgccgacattcattttagtgccggtaaaggggagtgcctggcggtcattggcccgaacggcagcggaaaaacctctttattgcgcgcgatagatcatgaactgacggtgcgggagggcgacgttcgcttatatggccgctccgtctccgcattaacccggcagcagcgggcccggcagatagcggtactggcgcagaacgacgcccccgatatgcgtctggcgcttgaggattatgtcgctcttggacgtattccccacgcccgggatatgtcacggcgcgaacatgaaagcatcgtaacccgggcgattaacgatacgggattgcagaagctgcgcacgcgctcgctctccgcgttatccggcggcgagcgacagcgggcggcgctggcgcgggtgctggcccagtcgccaaaactggtgctgctggatgaaccgaccaaccacctcgatccgcaggccagggtggaactgctggcattagtgaaaagcctggggatcacggtcgttgcggtactgcacgatctttccctgattgagtcctttgccgaccgggttttgcttttatcgcaagggcgcgccctggcctgggacgtgccggagcgcgtactggtttcagaacggctttacccggtctttggcttgaccagctttaccgtaccgcatcccgaaacggggaaggcgctgcggattttcgaggttccgggctatgcgtaa

SEQ ID NO: 257171 - DNA, 330 bp, Klebsiella pneumoniae
atgaaaacggtagagtttttgctttatacccttaaaccgggttccgggaacgattttcaccggctaatgaaagaacaaagcgcgccctgccaccgtgcagccggcatggatatcgtcgccttcggcaactcagtcgaggacaacgacgcttattatctgatacgggcctatgacgacctgacgcatttaaatacctcgcaggagcgattctatcgtagcccggcgtggcgcgaaggcccgcgacaggccatcatcgataaaatcagcgtcagcgtaaaaacggtgatggagctgagcgacagcgcgattgatggcctgcgaaacggctga

SEQ ID NO: 257172 - DNA, 1458 bp, Klebsiella pneumoniae
atgctggattaccgctttatcaaccgactggatagcgcctgccatggcgcgcatctggtgacctggcccggcagcacgctgttaacccaggcccccctcaactcaagtcccctgctcgcggaaatggtggcacaggccgcccgcggcgaggtggcggatacccgcttcggctgctcccccttcgcgcgcatcacccttattccgcggccgctgtggcaggatgcgctgaacgacggcctggccgaggcgctgcggccgctatgcaaaaagccgctgagcgaagcgcttatcctcgactgttcgctagaacagagcaacggcacgctaaccaaagcgctgcgcgaactgtttaacctcgactggcagcttgatgacttaggcctgcatcaggtgaaagccgtcaggccacgcctgcgccagctcgccctctacgccctgcctgaacagcggccgacgctggaaacccttgtgcgtcaacagcaggcgatcgcgcacggcatgattgccgcacgacggctggcggatctgccttcggagcagtgtaccccgcagtacgtggtggacgaggcccggcgtctgtgcatcgatatccctgttctgcgctgcgaagtactcgatgaaaacgcgattgttgaacaggggctcggcctgctgcatgcggtggggaaagggtccgcgcgtccgccgcgcctgctggcgatacattatgatggcggcggcgatggcccggttcgctgctacgtcggtaaaggcgtcacctttgataccggcgggctgtggctgaaggaaggcgccgggatgtacaccatgaagtacgatatgtgcggcgcggccaacgtcctcggcctgatgctgagcatcgccgagctggcgctacctgtgcgagcgatgggcgttctggcgctggcggaaaacgcgattggtcccgacgcgatgcaaccgggcagcgtcgcccgggcctgtaacggtctgacggtagagatcaataacaccgacgccgaaggtcggctggtgctttccgacgccattgcctgggccagccagcggcatccgcaggcgcgctatattatcgatatggcaaccctgaccggcgcggtggttaaagcgctgggttacgatttaagcggtttgatgacgcaaaacgaaacgctgcgggcggcgttgacccaggcagggatgaagagcggagacgaagtctggtcgctgccgctggatagcaggctgaagaaacagaccgaaagcgccattgccgacctgtgcaacacgccgggcaataatgcggcgatcagcgcttccgcggcctggcttttacagcatttctgcccaccggagatcccctgggcccatctcgacgtcagcggcacggcgctgtggcgcgaaggcggcaaaagcgttgcttccggccggccgattccgctgctgattcagcatctgctcgacgatatcggcgagatttaa

SEQ ID NO: 257173 - DNA, 756 bp, Klebsiella pneumoniae
atgacaaccttaacgtgggaccacgcggtccagtttgttaatcagcctgaagcggcgatagaggcgctgagcgggcaaaagctcaacgcggtggccggggggcgccatccgggctgggggacccggaatgcgctgagctatttcggcctgacctatatcgaatttctggcgattgccgatggcgcagagctgctctgcgccgcagagacgtttttactctcccgggatgcctcacggctgctgccggaaaatgaagcgctgtatcgggtggcgctgcgtagcgacgatattgcgcgcacgcatgcggagctacatcaacagggcctgcgggtttcgccgatcgtcaacggccagcgcaacgatccgcagggcaacgttatcagctggcggatcttcaccattgacggcgactttgatggcctggtctatccgttcgttctgcaatggggcgaagaggatgacgcccggttgatccgcctgcaggcccagggtctcgctgcgccgcatccgctgggggagatagagctgcagcgcgcggtttttgcggttcacaatccccgggcggtacgcgaccgctggcagcggctgtttggttttactccgcaaggcgaactcgggctggaggtgggcggccgtgagtttatcttccgccacggtgcggcgaaccagttgactgaactggtgtttcgcgttgccgacccggcgcttaaaggccggcgctttcgcgttggcaacggcgaatatctctttgaataa

SEQ ID NO: 257174 - DNA, 1029 bp, Klebsiella pneumoniae
atgaacgcgacaactttaccgatactggatctggcccgctacgcggatcccgctgaaaaagcggcgtttctcgccgacctgcgccacgccgcccgcgatatcggcttcttttatctgatcaaccacggcgttgatgagtcgctgcagcaggccgtacaggagcaatcccgcgccttttttgcccttcccgacgctcaaaagcagagcgtggcgatgattcactccccacattttcgcggctacaaccgcgccgcgtcggaattaacccgcggtcagcccgactggcgcgagcagttcgatatcggcgccgaacgtccggcgctcaggcttgacgaacgcgctccgcgctggcagcgcctgcaggggccgaatctctggccagaggcgttgccctcgctcagaccaacgttgttaacctggcaacgggaaatgacccaggttgggatcaccctgctgcgcgccttcgccgaagcgctgcacctgccgttggatgcctttgatggcctgtacggcgaaaaacccaacgaacatatcaagctaatccgctatcccggccagcaggaaacccagagcgcccagggcgttggcgcgcataaggactccggtttcctcagcttcttgttgcaggatgagcagaaaggattgcaggtcgaagtctcccccgaccgctggattgacgccaccccgctggcgggcagctttgtggtgaatatcggcgaactgctggagctggcgaccaatggctatctgcgcgcaacggtgcaccgggtcgtttcgccgcccgccgaccagcagcggctgtcgatagcctttttcctcggcgcccagctggatgccgtggtccccgtctacaccctacctgacgagctggcccgcgaagccctcggaccggatagcgacccgcaaaacccgctgctacgcgaagtgggctggaattacctgaaagggcgtctgcgttcgcatcctgatgtcgccgaacgctactaccaggatgtttttcgcgaacgcgccgagcaattgatcgtttaa

SEQ ID NO: 257175 - DNA, 1047 bp, Klebsiella pneumoniae
atgagcaaccggcttacgcagcagcttgatattgattatcccattattcaggcgccgatggccggcgtgtcgacgccggaactggcggccgcggttagcgacgccggcgcgctcggctcgctggggctgggatcctccacggtagagcaggccgaggcgcttatcaaccacacccggcgcttaaccacccgtccgtttaacgtcaacgtattttgccacgccccggcaataagggacccgcagcgtgaagcgcagtggctggcgcgactgcgccctgagtttgcgcgctttggcggcctgccaccggagacgctggcggaaatctacctgagttttcagcagcagccgcggatggccgagcttttgctcgatcttactccggcggtggtcagcttccattttggtgttccggagcgaggggtcgttgaccggctgcgtgaaaaaggcatcgttaccctggcgagcgccaccagcgtggaggaggcgctgctggccgtagagcagggcatcgatatggtggtggcgcagggctatgaggccggcggtcatcgcggcatcttcgatccccaggcgcccgacgggcagatgagtacctttaccctgattcaggcgcttaagcggcgcattgatattccgcttatcgccgcaggtggcatcatggacggcgcgggagtgaacagcgtaatgcatctcggcgccgaaggcgcgcagctgggaacggcttttctgctgtgcccggaatcggcagcggacgccggctaccgcgaggcgattaaaggcgcgactgacggacacaccgtgttaacgtcggcgatttccgggcgcccggcaagatgtttggttaacagctggcgcgcaataaacgatcgccacctcgtaccggattatcccgtggcctatgacgtcgggaaagcgctggcatcggcggcgaaagcgcagggggaccgccagtacggcgcgcactgggccgggcagggcgtcagcctgattcgcgagctgccggcggcggagctgattcggaccctggtaaacgaatgcgggttttaa

SEQ ID NO: 257176 - DNA, 837 bp, Klebsiella pneumoniae
atgaaccacaccacattacagattttcaaaacggtggcggaagaacagagcgtcacccgcgcggcaaagctgctggggcgggcgcagtccaacatcacgacccgcattcaccagttggaagaagagctgggcgttgagctgtttgcccgcggtaacaagaagatgccgctgtcgcccgccggggagcgttttttggcctatgcgctgaaaatcctcagccttgccgatgaggcccggcaggctctgcaccccgccaccccgggcggtaatttacgcatgggggcgatggacgccaccgccgccagccgcctgccgccgctgcttacccggtttcatgcccagtgcccggaggtgatactgacgctcaaaacccaacccagccgccagttgaccctgcaggtgctggacgccgcgctcgattgcgcgctggtatgcctgccgcagggcgcttcccccgccgaagacctggaatatctgccgctctttcaagaacagctggtactggtgcttcccgcggatcgccaacgctttcgctttgccgccttcgcggagggctgtacctaccgggcgatgggtgaagcgtatctggcgcaatccgaggcggcggagagcgagatccaggacgtcggctcctatcacgcgatgctcgcctgtatcgcctccggcggctacgccggcatactgccgcagagcgtgctcgatacgctgacgctgcctgaagccagccaggtgcgcccggtcggtcaggcggtcacgcagcttatctggcgtaaaggctacgcgtcccccgccctcgataaaatgcgccagcttctcacatcagcctccgacctttga

SEQ ID NO: 257177 - DNA, 1188 bp, Klebsiella pneumoniae
gtgaacgtttttgaactcaggccggggttaaaggcctttctgctagcgctggccggttcggcggtgctgatgattggcatgggctacgggcgtttcgcctataccgggatcctgccactgatgctgaacgagcaggtgctctcgctgcgtgaaggcaaccttgccgcttcggccaactacgcgggttacctggccggcgcgctgctgctggcgaaagccaggcccgcggacgccagagtgttaaatctgctttccgtattgctcacgctgctgtgcctggcgttactcggctggctggtttcgccgctggccattatcgcggtacgcggaatagccggactgttaagcgcggttacgctgattgccgcctccctgtggctgctgcagcatatgaagcaccataacggcgcgccggtgctgtattccggcgtcggcatggggatatttttgtcggcggaatgtatctcgctgggcaagaccctggcgctctccagccagcaaatatggctgctgtgcgcaataagcgccggcgcgcttttcatcctggcgctgcgcctgttgctgagcccggcagactatcttattgcctatcaatcgcctgctggcgtacaggaccagcaggcgcaaggccgcgtgcgtgaagcgtggaagctgctgctggtttacggcctggccggctttggctacatcatcaccgccacctacctgccgctgtttctcagcggctcgctgaacgctatcgatccggtgcagatctgggccattttcggtcttgccgctgtgccctcgtgctttatctggcaccggctggtcatcaggtttggctaccgtcgcgcgttcacccttaatttgctgattcaggccgtcggcgtcattctcccggcgtggagccacgcattgccgttttgtctgctgagcgcgctactggtcggttttacctttatgggaacggtgactattgcgctgccgcagggaaggcggctgaaccatctggtctcgttcaatatgattgccgccatgaccgcgacctatggcgtcgggcagattgtcggcccgctggttgccggcgcgctgtatgagcgcagcgggtcgtttaatccttcgctcagcgcggcggcaggggcgctggtggtggccgccgcgctggtttccgccggagggcggcgagcgtcaaaggtcggaggctga

SEQ ID NO: 257178 - DNA, 621 bp, Klebsiella pneumoniae
atgtccgtcgcagattcccttcttgcttattcctttgccgcgctgctgctcacgctgaccccgggtcttgataccgcgctcattttgcgcacctccaccgttgaaggcggaaaaaaggcctttcaggcggcattgggtattgatactgggtgttttatctggggcgcggtggtggccttcggcctcggggcgctgctggcggcatcggccctggcgtatgacctgcttaaatggtgtggggccgtctatttatgctggctgggcattcagttaattctcaaaccgcgcagccactttaacagtcaggaaatagccgctccgtcggccagcaactggtttttaaaagggatgctgggcaatgtgctgaatccgaaaatggggatattttatgtctctttcctgccgcagtttataccggcgggccactcgccaaccatctggacatttctgctggtcgctattcatgttgcgattggtacgctctggtcgttaacgctgattctggccagccggtacgccgccggtcttctgaaaacaccgaccttcatccgctggatggatcgcgcaaccggcggcgtctttatgctgtttgccgccaaactggcgctcagccaccgctaa

SEQ ID NO: 257179 - DNA, 219 bp, Klebsiella pneumoniae
atgctgatttataacgtattcgggcgtcatattggcgtccagcgtcagggcgaacgctggcagcttttccgcgtcgatcttaacgaggggaaattttcgccgctggccggggttatcatcccggacgatcttacggaggcggaaattcccggctggctgggggatatttttcacgaagcggcaagcccgcgccatcctgacgtccgtcttgtggtttag

SEQ ID NO: 257180 - DNA, 579 bp, Klebsiella pneumoniae
atgatggcggcggaattgatgactgaaagactcctgctgatccccttaaccgcagacgatgcgccgcaaattcaggttctctttccacagtgggaaatcgtgcgttatcttgccgccggttttccatggccgttcccggaggatggcgcgtcgcgctatgtcaataatgtggctttaccggccgcagctaacggcaccgcctggttttggaccattcgccttaaaacggcgccggagagggtaattggcctgattacgctctctgatgaagtggataacaaccgcgggttttggctggatccgcgctggcaccgccagggattgatgaccgaagcctgccgccgggtgaccgatttttggtttaacacgcttaaccgggaggtgctgcgcgcgccgaaagcctgcgacaatagcgggtcgaaaaagatttcgcaccgtagcggtatgcggctgattcgtgttgagaaaaagcagttcatctgcggtctgctggacgccgaattgtgggaaataaccaaagcggaatggaatgcattggctgcccaagctcccgcgtcacatagggtgacaggatgctga

SEQ ID NO: 257181 - DNA, 1470 bp, Klebsiella pneumoniae
atgaagtcaaaatctgctattacccttgtggcgctggccatcgccctggccgccgcgggcggatactggctcggttcgcgaaacgcgccgacgctttccgcggacggggctcagaccgaaacgggccgcaaagtgttgtactggtacgatccgatgacccccggcacccgcttcgataaaccgggaaagtcaccgtttatggatatggatctggtgccgcgctacgccgacgaaggggcgggagaggaggccgggagcgtgcagattagcgcccgccagcagcaaaacctcggcgtacgcacggcagatgttgcccggcggacactggcgcagaagctcagcgctttcggtaccgtcgcgattgacgagcgcagcgttgaaacggttccggcgctggccagcggcctgatcgagaaactttacgtcaacgcctcccagcagtttgtgaaaaagaacgaggcgctggccgagctgtggatcccgcagtgggcggcggcgcagcaggagtatctggcggtgaggctgctgggcgatagcggtttaaccgccgccgcgcgcggccgtttgcagctgcagtttatgccggaagcgattatccgcagcgttgagcgcagcggtaaaccgcaaacccgcataacggtacgcgcgccgcacgatggctacgtcagcaagcttgacgtgcgcaccggcgcgcaggtcacggcaacccagccgctgttcgagctggccagcctcgacccggtctggatcgtgattgattatccgcaaagccaggccagcctgctgcgcgtaggtagtcaggtaacggccgccaccagcagctggcccggcacaacgtttcagggaaccgtcagcgagctgcttcccgacctcgaagcgaccacccgtactctgaaagcccgcgtagtgctcaataatccgcagcatcagctcaaaccgggcatgtatttgaacgttgagctggctgaggcgcagcaggggcgcgaggtgctgactatcccggaagaggcattaattgcaacaggcaccagcaaccgggtgctgatcgccgacggcgaggggtatttccgtccggtcgaggtgaccgcgggacgaacgcaggatggtctggttgaggtaacttccggccttgaagaggggcaaaaggtggtcacctctggacagttcctgattgactccgaagccagcctgcgcagcgcgctgccgcaaatggccgggcagaatgaagagatacaaagctactcggcgcagggcgtcatcaaggcggtgagcgatgaggcggtaacgatcgcgcaccagccggtcccggcgctgaagtggccggcgatgatcatggactttgccattacgccgccgctgcgggagcaggtgcgtcccggcgagtcggtgatgtttcatttcgtgctgaccgatgaaggggcgcgggtgacctcagtgatgccgatgagcggcgctaaggagcagccatga

SEQ ID NO: 257182 - DNA, 369 bp, Klebsiella pneumoniae
atgcgttcgacctctatttttctgcttattaccagcgttctgaccttttccctcacttcattttccgccagtgcggaagacggcgcgatgcatcaccataatatgtccgcgatggcggagatgccggggatgaataagccggatgattccgcccccctttattcaacgaacggggtcattaaagcctggcgcgacaatgccgtggtgattgcccacgctccggttgccgagctgaattggccagcgatgaccatgagctttgcgctcggcgataaccacgataaaaagctggcggtgggacaaaaggttgatttcaccttccgtcagacggactccggctacgcgctcgtttcgatgaccgcgcactaa

SEQ ID NO: 257183 - DNA, 420 bp, Klebsiella pneumoniae
atgattgcgtcactgcaggcattattaaaacaagcaacccggcgtcggcttcgtatccgcgcggggcttgttattgcctgttggctactgctcaaccttcagctgaccgtcgcggcgcaccacggcggccaacagcagccggtggcgccgcaggtgcagattcaccatattgtcgatggcgtgatgagcatgcccggcatggaaagcgtcggtcagaaagccatctgcgagaagcactgcgaccccgataccgcgcagccaaactcattaacctctttacagctgaacgcgcttccctccgaaaccgcgctattagtggtttccccgcagcaggagacctgcgctgaacgtatggactggcggacgccgccggtcaccggtccgccggctgaaatacgcttctgccgtttcagggaataa

SEQ ID NO: 257184 - DNA, 801 bp, Klebsiella pneumoniae
atggcgttaatcattaaggtgttacttgaaaaccggctcggcgaggggcaggacagcctgctgcaggcgaaacccggattaagcctgcttgtggaagatgaaaccagccgggtgctgtttgataccgggccagacggcagttttcttcataatgcgcagcggatgggcgtctctttatctgacttgaccgccacggtgctctcccacggtcattacgaccactgcggcggcgtgccgtggctgccggataacagccgtatcatttgccatccgctgatcgcgcaacagcgctactcggcgttatcccttgctggacgtcgctggaaagtcaaaaaactgtcgcgagaaattgactactcccgccaccgcatggagtacagccgcgaaccgctggcgatcggcgaacgactgttgtggtccggcgagattgcggtcgcgcgtccgcgagcctatggcgtcctcgcgggtcaatcgccgggggaagattaccttgccgacgaaggcgtgctgatctaccgctcgacgcgggggttagtcattatttgcggctgcgggcatcgcggattgatcgatacgattcgccactgtcagaagatcaccggcgtccagcagatacgcgccatcatcggcggccttcacctgcgcagcgcgccgccgtgggtgatacgtcggctaaagcagttcttgcgccagcagaaggtcgaggaggtgatggcctgccactgcaccggttcatgggggcgctggtggcttgccgcggatagcgccccggccaccggcgatacgttggtgctggaataa

SEQ ID NO: 257185 - DNA, 753 bp, Klebsiella pneumoniae
atggctgactggaatccttcattgtatttgcaattcggcgcggagcgcacgcggcccgccgccgagcttctcgcccgcatcgcccaccatcccgtagcgctggccgttgatttgggctgcgggccaggcaacagtaccgctctgctacggcatgcctggccagaagcaacaattattggcgtcgataattcaccggccatgctggaagaagccgctcagcggctcccggactgccgctttgtcgaaggagatatcgccgggtttcgccccgagcgcccggcggacgttatttacgccaatgcttcgctgcaatggctaacggatcatcagcggctttttccccatctggtcagcaatcttgcggaaaacggcgtactggcggtgcaaatgccggttaactggcaggaaccctcgcacgcgctgatgcgtgaggtcgcggaagagctgggatatccagccagcgggcggccgccgctgccggatgtgccggagtattacgatatgctgaccgcctgcggctgcgaggtggatatctggcgcaccacctactttcacccgctggcatcgcaccaggccattattgaatggctgcagtcaacgggcctacgcccgtttttacagcctcttgatgaaccgcagcgccaggcttttctcgaacgctatctggcacgtctgaaacagcactatccgttacagtgtaacggaaaggtgctactgctatttccgcgcctgtttatcgtcgcgcgccgctag

SEQ ID NO: 257186 - DNA, 441 bp, Klebsiella pneumoniae
atggtcatcgaaattcgtgaagtgggccagcaggataaagcgcagtggctacggctatgggaaggctatacccgtttctacggtagcccgcagccgccggacgtcacggaatacacctggcagcgcatgctggatcccgcttctcccatgttggggcgcgtggccctggcggatggcaacgtcgctggatttgcgatttgtgtccttcacgaaggcacctgggtaaagatgcctgtttgctatctggaagatctgttcgttgccccgccgatgcgcggaaaaggcatcgccagggcattgatgcaggcgctgcaagcggaagggaaagagaaagggtggtcgcgtctgtactggcacactcgtactgataatccggcccggcgtctgtatgatgaatttacgccagccgatgactatgttcgttaccgcgtgacgctctga

SEQ ID NO: 257187 - DNA, 684 bp, Klebsiella pneumoniae
gtgagtaacagaggcagagaagacagcgttaccgatgtgtttaaatctcaggtgcggaatgcatgccgtgaatacggaatgagtgatctcattgcctcactgaacggccgcgaccgggatattaatgccgataccctgttcggtgtctgcgaccgattcttcctggtcgagatgaaatcgtacaaccgaaatgttcgtgatgaagccaaaaagcctgcagtctgccttctctgcaatggattacagagaagctctcgggttcgcagctggcacagagcatgtcacttcatcatgtgggggcgtgttgttaaggattcgcttgaaacccgtttcaccatctaccaggacagtgtatgtcgggattcggtccttccgaactgcagtggtctcggggagcctccgaaaccaaccatctatcggggggaggacctggcaaggggagcagctttaggtactgcgggcttatcaaaaccagattttttcaattacctgtggtggttgttaaatggccgggctgtagatgtagacgaatttaaaatcgcgcccggtagcaggttaggtttcagtttgtttggtacatcagatgcaaccggtaaggtaataagtaaaacgttcagaacttacgatgaccttgaagtgtgggctgaagatgcattaaaacaattagtcaccttcaggggataa

SEQ ID NO: 257188 - DNA, 1242 bp, Klebsiella pneumoniae
atgcaattacaatcaggtcagaatattccactgcatactacggacctgacgctcagacttgactatctgtcgtcgttcagttttcgtagtgaaccagaaacctgcctgtttatgctgaatgctgacgggaaagtcaccggtgatgccgactttatcttctacaacaatcggagcgctgccggtggaggtgtaaaactggttcccggccaccagcatgcgaaccttcagcttgcgctggaccggatccccgaaaccattcagaaaatcgctataacgctggtgatagatggcaatgacacgattagcggactctcgcaactcaggctgacggcaaccggcatcgctgaattcaatgtcgacctgaagggccgtactgagaaagcggtgattatgggcgagatatatcgtcatcaggggcaatggaaactccgggcgcaagggcaggggtttaacggtggactggagccactggccgtcagctatggtgtcgatgtcgcacaaccagaaaataccccaccgcaaccggcccggatcagtctggagaaaaagctggaagggaaagcacccgcgcttatcagtctggcaaaaaaagccagtatttctcttgccaaacacaagctggagacggttgaagcccgagtcgcttttgttctcgatgcctcaggctctatgaccggtcagtttaaaaagggtcatgtgcagtccgttctcgaccgtatagccgtcctgtccgtccagttcgatgatgacggcacgatggatgtgtggggctttgcggagcgtcacaagaaataccctgacgtcaccctggacaatcttgacggatatgttgcggctatccagaacacgggtaaacgctctgcctgggaaattcttccgggcctgggcgggacgaacaacgagccgccggtcatgaatgaggtgatcgacttcttcaaggacagcacactgccggtctatgttgtctgcattacggatggcggaattagtaaaacccgtgaaatcaaagaagccatacgtcgttcggccaactaccccattttttggaaatttgtgggcctcggcggttcgaattacggtattctcgaaaaactggataccttcagcgatcggcgaatcgataacagcaacttctttgccatcgataacttcgcaacggtgaaggatgaggtgctgtacgagcaactgctggaagagtttaaagactggctggagcaggcaaaaatagcgggtattctgtga

SEQ ID NO: 257189 - DNA, 651 bp, Klebsiella pneumoniae
atgaacgtcatacaaccccgtatgctctctgtatttgattttgacggcacgctcacgcgacatgacagctttatcccttttctgcgatttgccttcggcaaccgcgctttttcacgtcgtatcgtcaccatggctcttcccacgttgcgctgcatgggtaggaagatgacacgggatgaactgaaagaaacactcatcacaacttttctcaccaacgttgacgagaagtgggtatccagtaaagctgagcaattttgtcaactttactggagccgcctgatgcgccctgctggcctgatggccgttgcgaatgaagtgacctctggcgcggaagtgaccttatgttctgcttcccctgaaattatgctcaggccatttgccgacaggctgggtatcaaactaataggtacgcagctggaggtcaaagaaggaaagctgacggggcgtatcagtgggaataactgccggtgtatccagaaaattatccggctggaaaaagagtacggtccactgaaaaattatcatctgcgggcatggggagatacacgaggggattacgaactactgtcagctgcagccgatccacactggcggcacttccattcgacctggcgtcgggggaaagtacctttagaactgactatccggtaa

SEQ ID NO: 257190 - DNA, 186 bp, Klebsiella pneumoniae; identical to SEQ ID NO: 190036

SEQ ID NO: 257191 - DNA, 780 bp, Klebsiella pneumoniae; identical to SEQ ID NO: 190035

SEQ ID NO: 257192 - DNA, 753 bp, Klebsiella pneumoniae; identical to SEQ ID NO: 190034

SEQ ID NO: 257193 - DNA, 759 bp, Klebsiella pneumoniae; identical to SEQ ID NO: 190033

SEQ ID NO: 257194 - DNA, 735 bp, Klebsiella pneumoniae
atggcaggtacagaacttgttcctcttggcttttatcaacactgtgcaatggcttctattgcttacgtggagcgccgtcgatccatgggcaggaatctgggggagctggcctatgcaaaagcttttttcagagcattaactggtaaggctcaaatttcatcgagtgatgtacgtcaggtcgatgcttcttatgacccgtcagttcgtggtgtggctacaaaaatggattacatccgtgctatcgatctcctgattgatacccgtggagaaaccttcaccctgccgctctcatggtctgtggccgtagcgatttttccaggcttacagaaccgggtaacacagcgccgcgatcaccgtgaaaggattatggaactgcgggaccagcgcaagaccaccagccattcgcaatcaaaagaaatctcatttcataccgctaaggccatatcaagccagcgtctcaatttctgccgtcctggggagcacaaacaatggctcagggactggcacgatgagatccatggtcagtgtctacgtgatagtgatattttcatgatgctcagaacatggtggtcaagattctggattactaaatatcgaagtgactatatctggtgcaactcgttacatgagttgcttgatgaaattgattatgttcttagctcaatttctttatgggaatacaatttgtgcgtttcagcattgccattgagtattacatttcaatgtgatcgctaa

SEQ ID NO: 257195 - DNA, 324 bp, Klebsiella pneumoniae; identical to SEQ ID NO: 190032

SEQ ID NO: 257196 - DNA, 720 bp, Klebsiella pneumoniae
atgttcagttttcaggctcataaaaaatttttggttaaatgcacttttccgctctgtgtagaaacacaccgggaactgctgttgctaagatggttgtcacctgaacaaacggatgattttatgaaaattattaaggtcagctacggccccactgagggagtatccattagtggtctatatctgcgagagacgacaactacacaaaaatccggcacacttttaggcggtggactatctcagtccggcgtagttctgggtggtggtggttactctggtagcgaaacaaatcagacggtacgatcggttatttttgcacctcctcagggcaaaacagctgaaccggatttatcgagaatgcatgagctgttaatgtacctggttgtgggattcatcgcattgaacattctcacttatggtgcatatggaattttcatgctcactggatttgagttgtcaaagacagctgtggatttatttgaaagttcgttttacttttatatgacaataggtattgtcgctgcattatgtataatgctaatggctccaagggattattctccggtcctgatggaaaacaggaagaatgaattgcgaaaggaagtttacctacgtctccgttatgttgattcagacaatctcgttttcgatcctgtaacactaatgggttgccatgctgacagagactatatttcttctttaattgaaaacatcatcaggtaa

SEQ ID NO: 257197 - DNA, 1272 bp, Klebsiella pneumoniae
atgtctactgtaagtgatgtgattgtatcttatggagtggacagtaaaaggtattcaagagacttccagaccaaagaggaatttaaaaagagctggtatgccgttttatctcgtgcgcacgcttctgtagacgcgaaggtaagctgttcctgtaagggaaaaggcccaaaatttcttgccgtaaaatatcatacaggcggcgatacgtattttctggcacggtatccgaatacaggtagccagcattctcctgattgtattttcttcactctggataaagataattcagggttaaaatgctacacacaaggcgtggtcaaagaccttaaagatggtggctatggtatcaggctcgacgtggcattagcctcatctgactcgcaatcaacgtcgatcgtgccaccagataacaggaatacccccggtggggtctcgcaaaatagtatgtcactgttaggtttactccagttcctttgggatgacagcggcctgaatcgctggtatccaaaaatggccgggaaacgtaatccagcaaaggtattcaaccttctaaccagttcagcggaaaaaataaaagtggcctcacatccactgtcctctcatttactggttggggcatatccatcgactccccaggtagccaggaatataaaaatgacagaagaggttctgattaacaaagaacgtctcatttgcgtgaatgcactgtcaaaatataatcctgaaaagcattccaatgaatcaaaacgtcttccgcttaagtatttttctggtgttccggtcgtgctcatgaatacagaagactggactcttctggagaagagattccccactgaaatagcaaactggagggatggaggcaacgtcatctgtattgctataggggatttggggcaatttaaagggaaagatgcgtactatctcaaaaccctccagttagccctgatgacggttgatgataactggatcccggctgattcaagctatgaactgaccatgcttaattatctacataaacaggaaagatcgtttatcaaaccccttcgatatgacgcctcaaataatgatgtattccctgatttttgcctgacagatacagggggccatgaattgtttcctattgaggtgtttggtatggaatccgcttcatatctggcgcggaaggcgatcaaagaaagttactataatgagcgatatggtaagaatggctgggcctcctgggttgcaccggctggcccccttccccaactccccaccaaaaccagaagttaa

SEQ ID NO: 257198 - DNA, 495 bp, Klebsiella pneumoniae; identical to SEQ ID NO: 187132

SEQ ID NO: 257199 - DNA, 795 bp, Klebsiella pneumoniae
atgacttcccacgaactgaaagaaacgaatcttgtagaaagcgttgtgtctgagcgggacatggcaatgaatctctttattaatggattaactgccatatccgaagcggaaaaactgatgggcatctcccttattgatcagctcagaattgcatatgttcgctttaacccagcccatttagataaccagatagagagggcgagagttttgattgacagagaatcatggaagaaactcatagaccgaacatcattaaatatttactggaatgcacctcaactgaaatcatttattgacgaattgataacagaaccgcccattatgacgattcaggcagcaagagagaaagtctctcatacggttaataatcgggcagacatactctgcgagggcctggtttcatgcctgggtaatctgagccatgattttaaaaagaacgcccgaagctttgttatcaatgaaaatatggtcataaaaaacgggttcaagaaggatgtgcactaccttgacgaaacggatcgagacctgaacagcctcaatgacctttacaggatttcccggtacatagaagggctatcctacagccagcaggatgttatcgttcctaagctttttgctcttcgagagaagaatgattatcaaaaagttgactatatcgacacggatttaaatattaaatttattgtgtatggaaacggaaacatccatatgcggtttatggatagaaaggtcctggatgggcttaatgatgtgcttgcatcataccagagaaacaacctgcctgacgtgaagtaa

SEQ ID NO: 257200 - DNA, 345 bp, Klebsiella pneumoniae; identical to SEQ ID NO: 187129

SEQ ID NO: 257201 - DNA, 405 bp, Klebsiella pneumoniae; identical to SEQ ID NO: 187128

SEQ ID NO: 257202 - DNA, 606 bp, Klebsiella pneumoniae; identical to SEQ ID NO: 187127

SEQ ID NO: 257203 - DNA, 300 bp, Klebsiella pneumoniae; identical to SEQ ID NO: 187126

SEQ ID NO: 257204 - DNA, 1290 bp, Klebsiella pneumoniae
atgatggcgatgcagaaaatgcgcgcccgccgcaccccgtcccagcaggcccacgtcaccaacgtcaaagataacccggtacaaattgccgccgacgccgccgaaggcgcatggcgcggatttgacgaacaggaaaccaccgttgcggtagcgcgctatgcgccgttcaacgccatcgcgctgctggtgggctcgcaggtaggccgtccgggcgtgctgactcagtgctcgctggaagaagccaccgagctgaagcttggcatgctgggccatacctgctacgccgaaaccatctccgtctacggcaccgagccggtctttaccgatggcgacgacacgccgtggtcgaagggcttcctggcctcgtcctacgcctctcgcggcctgaaaatgcgcttcacctccggctccggctcggaagtgcagatgggctacgccgaaggcaaatccatgctttatctggaagcgcgctgcatctacatcaccaaagccgccggcgttcaggggctgcaaaacggctcggtaagctgcatcggcgtgccgtccgcggtgccgtcaggcattcgcgcggtgctggcggaaaacctgatctgctcgtcgctggatctggaatgcgcctccagtaacgaccagacctttacccactccgatatgcgtcgcaccgcgcgtctgctgatgcagttcctgccgggaaccgacttcatctcttccggttattccgcggtgccgaactacgacaacatgttcgctggctccaacgaagatgccgaagactttgacgactacaacgttatccagcgcgacctgaaggtggacggcggtctgcgtccggtgcgtgaagaggacgtcatcgccatccgtaacaaagccgcccgcgcgctgcaggccgtatttgccggaatggggctgccgccgattaccgatgaagaagttgaagccgcgacctatgcccacggttcgaaagatatgccggagcgcaatatcgtcgaagacatcaagttcgcccaggaaatcatcaatcaaaaccgcaacggtctggaagtggtgaaagcgctggcgcagggcgggtttaccgacgtggcccaggacatgctcaacatccagaaggccaagctgaccggggactatctgcatacctccgcgattatcgtcggcgacggacaggtgctgtcagccgtcaacgacgttaacgattatgccggtccggcaacgggctatcgcctgcagggcgaacgctgggaagagattaaaaacatccctggcgctcttgatcccaacgagattgattaa

SEQ ID NO: 257205 - DNA, 1833 bp, Klebsiella pneumoniae
atgcgatatatagctggcattgatatcggcaactcatcgacggaagtcgccctggcgactctggatgaggctggcgcgctgacgattacgcatagcgcgttggcggaaaccaccgggatcaaaggcacgttgcgtaacgtgttcgggatccaggaagcgcttgccctcgtggcaaagcgcgccgggatcggcgtcggcgatatttcgctcattcgcattaacgaagccacgccggtgattggcgatgtggcgatggaaaccattaccgaaaccatcatcaccgagtcgaccatgatcggccataacccgaaaacgcccggcggcgtggggcttggcgttggcatcactattacgccgcaggagctgttaacccgcccggcggaggccccctatatcctggtggtgtcatcggccttcgattttgccgatatcgcgaacgttatcaacgcctccctgcgcgccgggtatcagattaccggcgtcattttacaacgcgacgatggcgtgctggtcagcaaccggctggaaaaaccgctgccgatcgttgacgaagtgctgtacatcgaccgcattccgctgggaatgctggcggctattgaggtcgccgtcccggggaaggttatcgaaaccctctccaacccttacggtatcgccaccgtattcaacctcaacgccgaggagaccaaaaacatcgtcccgatggcccgggcgctgattggcaatcgttccgccgtggtggtcaaaacgccatccggcgacgttaaagcgcgggcgatccccgccggtaacctggcgctgctggcccaagggcgcagcgtgcgcgtggatgtcgccgccggcgccgaggccatcatgaaagcggtcgacggctgcggcaggctcgataacgtcaccggtgagtccggcaccaatatcggcggcatgctggagcacgtggcccagaccatggccgagctgaccaacaagccgagcagcgagattttcattcaggatctgctggccgtcgatacctcggtaccggtgagcgtcaccggcggactggctggggagttctcgctggagcaggccgtcggcatcgcctcgatggtgaaatcggatcgcctgcagatggcgatgatcgcccgcgagattgagcagaagctcaatatcgacgtgcagatcggcggcgccgaggccgaagccgccatcctgggcgcgctgaccacgccgggcaccacccgaccgctggcgatcctcgacctcggcgcgggctccaccgatgcctccatcatcaaccctaaaggcgaaatcatcgccacccacctcgccggagcaggcgatatggtgacgatgatcattgcccgcgagctggggctggaggaccgctatctggcggaagagatcaagaagttcccgctggctaaggtggaaagcctgttccatttgcgccacgaggacggcagcgtgcagtttttctctacgccgctgcccccggccgtcttcgcccgcgtctgcgtggtaaagccggacgaactggtgccgctgcccggcgacttagcgctggaaaaagtgcgtgccattcgccgtagcgccaaagagcgggtctttgtcaccaacgccctgcgcgcgctgcgtcaggtcagccccaccggcaacattcgcgatattccgttcgtggtgctggtgggcggttcgtcgctggatttcgaagtcccgcagctggtcaccgatgcgctggcgcactaccgcctggttgccgggcgcggaaatattcgcggcagcgaaggcccgagaaacgcggtggccaccgggctgattctctcctggcacaaggagttcgcgcatggacagtaa

SEQ ID NO: 257206 - DNA, 492 bp, Klebsiella pneumoniae
atgaacggcgaacttctgcagcgcattgtggagacgatcgtctcccggctgcagcggcgcgccgaaagcacggcgacgttgagcgtggcgcagctacgtgatgccgactgccggagtctgttctgccagcacgcgtcgctgcgcgttctgctcgtcgacctgccgctgctgaaccagctggcggaggcggacaccgacgatgccgccgttcgtaatattcacgacgcgctggctttcggcatccgcgtgcagctcaccctgcacggccagctgctgccggttatcccggttaaaaaactggctcgcctgccgctgacctttgccgatgaacgcgggctgccgctggttctgcacgcaggttcggtgctcagctatcgcgacgtcgcgccgctgggtcaggggcgtctggttattcagcgcaaatgcctcgtgaccgccctggcgcgcgacgcggcgcgcgcgcggaatattcaattaattaagcaggagtaa

SEQ ID NO: 257207 - DNA, 324 bp, Klebsiella pneumoniae
atgtcagatgccctgaggcggcagagagggtttagcctgccggaaacgctgctggcgctggtgctgctgatcgtgaccgtgaccgcgctggcgggctatcagcgcgggctggccaacggctttatgcagctcaaccagtaccgtcagctgtggcgcgatgcgtggcgattcgctcagcttagcccaccggtgattcccgcgaatcgccagatatcccgtatgcagacatcggtgcaaagatgtgtcagcatcacggtaacgatcaccatgcccgcagccaggcgggcgcagatgacccggctgcattgcccggtcagtcagtag

SEQ ID NO: 257208 - DNA, 408 bp, Klebsiella pneumoniae
gtgaatcgccagcgcgggctctcttcgctactgatggtgctgctgctgttagcgctcggcagtttattactccaggggctgaaccagcagcagcgttcgctgttagcgcagacggccagcgaaacgcaggcgcttcgcgatgccgccggcgcgcattccgcgctgcagtgggggaaggggctctcctggccgctgcgggaagcggtgagctgtcagcaggaggtcgcgctcggctggcgcgcctgcctgcggatcttcagcgacgcctcggtgttgctgatcggcggcagcggcgacatgctgctgtggcaaaccggcgcggttgaacaaaaccgggtccgcttttcgcctcacggctggagcgatttttgtccgttaaaggaggcgagcttatgtcagatgccctga

SEQ ID NO: 257209 - DNA, 564 bp, Klebsiella pneumoniae
atgcctgtaacatgccgcggtttttcgctaccggaaacgctgatcgcgatggctatcagctccgtgctgctgctcggcagcgcgcgttttctcccggcgctgcagtgggctacgcttcgccagacccgccagcagtcgctggaaaacgagctctggcagcgaatctacaccgtagcgaagcatctgcagcgcgccggctattgccgtggcttctgtcgcgggcaggcgctatatattgcaggcggcggtgattgcctgctggtgagttgggacggcaacagcgatggcgtctggaatagcgcgccgccgtcggaagcggataccaccgggttccgcctgcgcgacggcgcgctggaaaccctgcgcggagctagcgcctgtagcggtaagggctgggagaaaatgaccaacccggcggcgattcaggtcaccgcgtttcaggtgacgcgcctggagagggcgggcttctcgccggaattatcgattacgctggcggcgcactcggtcgccgacccgcaaatccgcgcgcgggcggaatacgccgtgacgggatataacctgtga

SEQ ID NO: 257210 - DNA, 225 bp, Klebsiella pneumoniae
atggaaacagtagtggggcttttccccagttatcccatttttctgtggataacagggtgtaagatcctgttcattgtcggtgaccagttctggaaaaccccgtttcaccattttcaccgcggcaaaaaaacgaaaaaaaagtcatacgaatcatcaaattgtcatacttactcaagaaaaggtaaactctatccacaacggatgaaattactgctcactttttag

SEQ ID NO: 257211 - DNA, 2160 bp, Klebsiella pneumoniae
atgcttttgggattttttagactgcttttcaaaggattgtatcgggtaaggcttaccggtgacacgcaggcgttgtaccagcaaaaggtactgatcaccccaaaccatgtctcttttattgacggcgtactgctggcgcttttcctgccggtgcgcccggtcttcgcggtctattcctcaatcagcgatcgctggtttatgcgcgcgctaaagccgattattgattttgtgccgctggacccgaccaaaccgatgtcgataaagcatctggtccgcctgattgagcaggggcgtccggtggtgattttcccggaagggcgaatctcggtgagcggttcactgatgaaaatttacgacggcgccgcctttgtggcggcgaagtcacaggcgactattgtgccgctgagaatcgaaggcgctgaattaactcccttcagccgcctgaaagggctggtcaaacgccgtctgttcccgcgcattcagctgcacctgctgccgccgacgcatctgccaatgcccgatgcgcctcgcgcccgcgagcggcgtaaaattgccggtgaaatgctgcatcagatcatgatggaagcgcggatggcggtgcgcccgcgcgaaacgctgtatgagtcgctgctggcggcccaggaccgcttcggcgcgcgcaaaaactgcgtggaagatatcaattttcagccggacacctaccgtaagctgctgaccaaaaccctcttcgtggcgcgcattctggaaaaatacagcgcccagggcgaaaaaatcggcctgatgttgccgaacgccggaattagcgcggcggtgattttcggcgcgattgcccgcgggcggatcccagcgatgatgaactataccgccggggtcaaaggcctgagcagcgccattaccgccgcggaaatcaaaaccatctttacctcacgcaccttcctcgataaaggcaaactctggcacctgccggagcagctgacccaggtgcgctgggtgttcctcgaagatttaaaaggcgacgtcaccgccggcgataagctgtggatttttgctcacctgatgatgccgaagctggctcaggttaagcagcagccggaagacgcggcgatgatcctctttacctccggctcggaaggcaatccgaaaggggtggtgcatagccataaaagcctgctggccaacgtcgaacaaattaaaaccattgccgactttaccgcgaatgaccgctttatgtcggcgctgccgctgtttcactcctttggcctgacggttggcctactgacgccgctgtttaccggcgcggaagtgttcctctatcccagcccgctgcattatcgcgtggtgccggagctggtgtacgaccgaaactgtaccgtgctgttcggcacctccaccttccttgccaactacgcccgcttcgcaaatccgtatgatttttaccgcctgcgctacgttgtcgccggggcggagaagctgcaggagagcacgaagcagatctggcaggacaagtttggtctgcgcattcttgaaggctacggcgtcaccgaatgcgcgccggtagtctcgatcaacgtgccgatggcggcgaaagtgggcaccgttggccgcattctgccggggatggatgcgcgtctgctggcgatgccgggaattgaagaagggggccgtttgcagcttaaagggccaaacattatgaacggctatctgcgggtggaaaatcctggggtactggaagcgccagcggcggaaaatcagcacggcgaagttgaggccggctggtacgacaccggagatatcgtcagctttgacgagcagggctacgtgcggattcagggccgcgcgaagcgctttgccaaaatcgccggtgagatggtgtcgctggagatggtcgaacaggtggcgctggcggtttcgccggacaaaatgcacgctacggcgattaaacaggatgccagcaaaggcgaggcgctggtgctgtttactaccgataatgaactgaatcgtgaaaaactgctgcgctatgcccgtgaacacggcgtaccggagctggcggtaccgcgcgacattcgctggctcaagcagctcccggttctgggcagcggcaagccggactttgtcacccttaaaggcatggttgaacagacggaagattcggatgagtga

SEQ ID NO: 257212 - DNA, 774 bp, Klebsiella pneumoniae
gtggagaaggctatcattccgccggaaaagaaaccctaccaggaaataggtgatgatttacgcgcacagattgcgcaggggcgctaccccatcgggtcgcgcctgccgccggaacgcaatatcgccgagacctacggcgtgagccggaccatcgtccgcgaagcgctgctgatgctggagctgcaggggacggtcgatattcgccagggctccggggtgtacgtcatgcgcatcccgcacgaggacgatagtgaggaagaacagatgctgagcagcgacgtcgggccgttcgaaatcctgcaggcccgccagctgctggagagcaacatcgccgcctttgctgccaaaatggcgacccgcgccgatatcgataacctgaagcgcattatcgagcaggagcagcgggccattgccgccaacgataccagccaggataacgcccgtctgtttcacctggtgctggccggggcgacgcaaaatcagatgctgctggcgacggtcgagcgtatctggctgcagatggacagcagcccgctgtggcagcagttcaacgtgcatatcgccagccgggcgtaccggctgaagtggctcggcgaccggcaaacgctcctcgccgctctgcgccgacgcgatgtgatgggggcctggcaggcaatgtggcagcatcttgaaaacgtcaaaaacagcctgctggagctctccgatgaagacgcgccggactttgacggctatctgtttgaatcggtcccaatttttcaggggaagctggtgtga

SEQ ID NO: 257213 - DNA, 927 bp, Klebsiella pneumoniae
atgcccgccgtcaacctgcgccatattgaaatcttccatgcggtgatgaccaccggcaatctgaccgaggccgcacgcatgctgcatacctcgcagcccaccgttagccgcgagctggcgcgttttgaaaaggtgctggggttgacgctattctcccgtacccgcgggcgcctgcagcctacggttcagggattacgtctgtttgaagaggtccagcgctcctggtatggcctggacagaatcgtcagcgccgcggaaagcctgcgcgagttccgccagggggagctgtcgatagcctgtctgccggtcttctcccaatcgctattgccgctactgctggcgccgtttttagcccgctaccctgacgtcagcctgcaaatcgtccctcaggagtcaccgctgctggaggagtggctatcggcccagcgccacgatctgggattaacggaaaccctgcatacccccgccggaaccgcgcgtacgccgctgctgaccctcaatgaagtgtgcgtactgccgcagggccattcgctggcggcaaagccagcgctgacgccggtggattttcacggcgaaaactatattagcctgtcgcgcaccgatagctatcgccagctgctcgatgccctgtttgtcgaacatcaggtcaaacggcggatggtggtggagacgcacagcgccgcctccatttgcgcgatggtgcgggccggggtcggcatttcggtggttaacccgctcaccgccctcgattatgccgggaacggcgtggtggtacgccgttttagcgttgtagtgccttttaccgttagcctggtgcgcccgctgcaccgtcccggctccgcgctggtcgatgctttcgctcgccatctgcaagagagcatgccgcgcatcctcaccccgctcgaagcggtacttacgacagcataa

SEQ ID NO: 257214 - DNA, 903 bp, Klebsiella pneumoniae
atggctgatatccaacacatgtctgaagcaagggacatcgccgaacgcgaagtcgcgaggacgctgcgtcgtgagaaaatcaacgccagtatccgctatgtgatcctgctgttcgtcggcctgctgatgctctacccgctggtctggatgttctcggcgtcgttcaaaccgaaccacgagatcttcaccaccctgagcctgtggcctgcccacgcgacctgggatggctttatcaacggctggaaaaccggcaccgagtacaacttcggccactacatgctgaacaccttcaagtatgtgatcccgaaagtgctgctgaccattatctcctctaccatcgtggcctacggctttgcccgcttcgaaattccgtggaagaaattctggttcgccacgctgatcaccaccatgctcctgccgagcaccgtactgctgatcccgcagtacctgatgttccgtgaaatgggcatgctgaatagctatctgccgctgtacctgccgctggccttcgccacccaggggttcttcgtcttcatgctgattcagttcctgcgcggcgttccgcgcgacatggaagaagcggcgcagatcgacggctgtaactccattcaggtgctgtggtacgtggtggtgccgattctgaaaccggcgattatctcggtggcgctgttccagttcatgtggtcgatgaacgactttatcggtccgctgatttacgtctacagcgtggataaatatccgatcgcgctggcgctgaaaatgtccatcgacgtcacggaaggcgctccgtggaacgaaattctggcaatggcgagcatctccattctgccgtccatcatcgtgttcttcctggcacaacgctacttcgtacagggcgttaccagcagcggaattaaaggttaa

SEQ ID NO: 257215 - DNA, 1128 bp, Klebsiella pneumoniae
atggctgaagttattttcaacaaactggaaaaggtctactccaacggcttcaaggcggtacatggtatcgatctgaaaatcgcggacggcgagtttatggttatcgttgggccgtccggctgcgccaaatccaccaccctgcgcatgctggccggtctggaaaccatcagcggcggcgaagtgcggatcggcgagaaaatcgtgaacaacctcgcgccaaaagcgcgcggtatcgcgatggtgttccagaactacgcgctctatccgcatatgacggtgcgcgagaacctcgccttcggcctcaagctgagcaagctgccgaaggatcaaattgaagcccaggttaacgaagcggcgaaaatccttgagctggaagagctgctggaccgcctgccgcgccagctttccggcggccaggcccagcgcgtggcggttggccgcgcaattgtgaagaagccggacgtattcctgttcgatgaaccgctctctaaccttgacgccaagctgcgcgcttcgatgcgtatccgtatttccgacctgcacaagcagctgaagaaatccggtaaaccggcgaccaccgtttacgttacccacgatcagaccgaagcgatgaccatgggcgaccgcatctgcgtgatgaagctgggccatatcatgcaggtggataccccggacaacctctaccacaagccgaaaaacatgtttgtggccgggtttatcggcgcgccggagatgaatattcgtcccagccagctggttgagcaagcgggacgcctgcatttgaccgttggcgatggcctgctgccgctcaacgacaggctgcagagcaaggtcgacacccacaagaaccagcaggtgttcttcggcgtgcgcccggagtttgtctccatctccgatgaaccgttcgccgaaggttcatgcaccggcgaaatggtacgcgtggaaaacatgggccatgaattcttcgtctatctgaaggtcgccgattatgaactgaccgcccgcgtgccgtcagatgaagcgaagcccatgattgagaaagggctgcatcgcaaggtgcatttcaaattcgatctcaacaagtgtcatatctttgacgccaaaactgaacagaacatctctctgtga

SEQ ID NO: 257216 - DNA, 1287 bp, Klebsiella pneumoniae
atgaaaaaagtgcttttaagcgccgcaatctccgcaactttggcccttaccgcgttaccttccatggcgaaggatgtcgacctgcgtatgtcatggtggggcggcaacggccgccaccaggtgaccctgaaggcgctggaagagttccataaactcaatccggatatcaacgtgaaggcggaatataccggctgggacggtcacctttcgcgtctgaccacgcaaatcgccggcggcaccgagccggacgtgatgcaaaccaactggaactggctgccgatcttctcgaaaaacggcgaaggcttctacgatctgaataagatgaaggacgtgatcgacctgagccagtttgacgccaaagagctgcagtccactacggtggacggcaagcttaacggtattccgatctccgtcaccgcgcgcgtgttctacttcaacgacgagacctggaaaaaagcgggcgtcgagtacccgaaaacctgggacgagctgatggcggcgggtaaaaccttcgagagcaagctgggtaaacagtattacccggtcgtgctggagcaccaggataccctggcgctgctgaattcatatatgattcagaagtacaaccagccggctatcgatgaaaaaaccaaaaaattctcctacagcaaagagcagtgggtcgaatttttccagatgtataaaaagcttatcgacagccacgtcatgccggacaccaagtactatgcctcgttcggtaagagcaacatgtatgaaatgaagccgtggattcagggtgagtgggcggggacctatatgtggaactccactattaacaaatactccgacaacctgaagccgccggcgaagctggaactgggcagctatccgatgctgccgggcgccaccgacgcgggtctgttctttaaacctgcgcaaatgctctcgattggtaaatcgactaaaaacccggaagcggcggcgaaggtgatcaacttcctgctgaacagcaaagaaggggttgagacgctgggcctggagcgcggcgtgccgttgagcaaagtcgcggtgcagtacctgaccgaaaacggcgcgatcaaagaggacgatccggcggtatctggcctgcgtctggcgcagtccctgccggccaaactctcggtgtcgccgtactttgacgacccgcagatcgtcgcccagttcggtacctctctgcagtacatcgactacgggcagaaaaccgtggaagagacggcaattgacttccagcgtcagtctgaccgcatcctgcgccgcgcgatgcgctaa

SEQ ID NO: 257217 - DNA, 585 bp, Klebsiella pneumoniae
ttggacagtatattgctttacactgatgataatatcatcggacaatcagttcatgattacttgatcgatcacgccacggacatcacgaccctgaactttcaggatatagtgaaaggagtctgcgctcccccgacagcgaccgttattatcaatatcatccataaagatatctcagcggccacaacggttgccttactgaacactttgcgcaatcgcctcgcgcattgcgccatgctggttctgatagtcaaaagcgagctttccagcctgttccgggaactgcttgatctggaaaacctattgattctcacagaaaaatcctctttgtcagcgtattcagccatcctcaacaggcccttaaccgccgagggctgccagggtctgtgcacccgcagaaagctaaccgccagggagcttcaggtgctggagttaataattgcctgcaacaacaataaaaggattgcagtgcttctcgacatcgatcataaaacggtccacagccataaggtacatattatgaaaaaactaggaatgaatagttcgcggataatgaacaaaagcatagtcaatatgtatcagtgttaa

SEQ ID NO: 257218 - DNA, 723 bp, Klebsiella pneumoniae
atgttaaaacctgttgagctgattgaagacgacgagtcgctggccgaggcgatggcgacagtggcgtcggcgatggccgatgcctcgcggctaaagatcctttgcgccttaatggatggccgggcgtggacggccaccgagctttccgccgtggcggatatttccccctcgaccgccagcgcgcatcttagccgcctggtcaacagcgatttattgatttgcctggcccagggccgccatcgctactaccgtctggccggtagcgacgtcgccggtttgctggagaatatgatgaccatggccggcaagcgcgcggtgacgctctcaaccagcacgccggtgaatttgcgcgttgcgcgcacctgttacgatcatctggccggagaagtggcggtatcgctatatgattttatgctgcgcgaagcgtggatagcgcctgacggtacggccctgacgcccgccggagaaacgcattttgcccgcctgggggtgacggtgaagcgcacctcgcggcgtaaagcgtgctgcggctgtctggactggagcgaacgccgctttcaccttggcggggcggctggggcggcgctgctgcagcacggtctgcagaaaggctggtttaccaccaccgcgggatttcgcgaagtgacgattacgccggcagggtggcgcgcgttgcatctgcattttcagctggcggaaagatcgtcgcggatgattaattaa

SEQ ID NO: 257219 - DNA, 2712 bp, Klebsiella pneumoniae
atggcttttttatcctcggcggatgatgcgctgacagcgcttgttcatcaggaacctttacgcttcacggggacgctgccgcttatctccacgcgctttacgccgccccgtacgccggaaagcctgctgtcgcgggagcgcctgctgctgcgcctcgacgccgccgtctcccgccgtttaaccctggtgcgcgcgcccgccggatttggcaaaaccaccctgctggcgcagtggtaccggcaccgccttcgacaaggggatgcgctggcctggctgagccttgaagaggatgacaacgcgccgctgctgtttatacgctatctgcaggaggcgctgcggccattgtggcaggggtggagcccgtcgtttctgcagctgctgcaaggcgagcttccggccgacctccccctgttctttgctgaactcgttaatcagcttaatcagtgcccgcatccgctgtacctgatcctcgacgactatcaatgtatcagcgacccggcgattcatcagggaatgagctggctgctgcaccatgcgccgccggcgctgcacctgattatcggcagccgcagtcagccgcctttagccctgagccgtctgcatatgcaggatcagctgctggaggtgtacgaccccgagctgcgctttagccccagcgaagcccgcgcctggttcgccggcgcgtcggggctggatccgcaggcgatcccccggcttatcgcgctcacggaagggtggatcgcgggaatgaaaatggccgcgctctctgcggacgcttccgcggcgatgggcctcagcgccggttcacggtcaatctcccgctatctggatgaagtcattttcgcgccgctgccgcccgaggtgttcgacttccttctgcagacctcgatgcttaatcgcctgcatccggacctgtgcgacgtcgtctgcggccgcaataacgccagggcgatgctggcgtggatagagcggcataacctgtttctttccgcgctggatgaaagcggcctttggtttcgctatcacccgctgatgcgcgacgcgctgctgcaccgcctgcggcacagcggtgagattgatattcgccagctgcacgaccgcgccagcggctggttcgcctcacagcagctgtgggccgaggcgatacgccatgcgctggccgccgggaagtcggcggcgaaggatgcggaagccggcgcgcagtcgctggcggaagagggggatatcgataccctggtgcagtggatccgctatctgcctgcgaatcctgacccgtcgcgcattgcgctgcagctgaacctggcctgggcgctagcccaccgcttccggttcagcgaagcccgccagctgctggacgccattgagatgcaatcggcggcgcatggcgaggcgctggcccacagcgcgtgggttaagctgcgggtggttcgcgcgatctgcgaagcctttgccgacaatatcgaccgcagtatcgccattgtcgaaccgctgctgcgcgaggtgccctgcggcgatatctgggtcgatggtctggtgtgcaatatcctcagctactgccatctggcggactcccggccgcaacaggcgctggaggtgcagcagcgggtatccggcgttagcctcgctaaccgcaacctgttcgtgacggtttaccgggcgttcgtcatggcgcagagctatctgcgtcagggaaatctcgccgaagcggaacgccaggcggcacgggcgctgcgctacgcggagcggcacgccggcgagaacgccagcagcggcgcaacccttgcgcccatcctggcggagatcgcctgggagcaggggaagggagagcaagcgcaaagcctactggttccgcgtctggagaccatcgacagcttttgtccgcccgatggccttagccgcagctacatcgttctggcccgccaggcccgggaaacggggcggctggcggaggccgaatcactattactgcatgccgaaggactggcggcccagcgcggctggctgcgggcgcaggcgccgctgctggcggagcggatcgccgtcgcgcttcacgcgggcgacaaacaggccgctgaggcgctgctgcttcgtctgcagagcctcagccagacggaatccgtcggcggatatatcgccatcggccagagccgcctccttatcgccgccggcgaaccgctggccgccgcgcggctgctggatacgctggccggcgtgcgggaaagcagcggcgagcggctgttcgccgtgcgtttgcggctcaggcaggcgctggccctctggcgtgccggcgagcgggagctggcgatggctatctgccgaccggcgcttgcgcgcgcgctgcatcaggggctatggcgcagcctgctggaggggagggaagagatggctgcgttgctggctgaaatacacaagcgcggcgcggcggatgatgcgctgaccgccgatatcgccgttttgctgtcgtgcttcgccgccgccgggatcgtgattgatagcgcccgcccgcagccgctcgccctgcggttgaccgaacgggagcagcagaccctgagtttgattgccgacggctattccaataagggcgtcgcgcgcgagctgggtatttcggcggaaaccgtcaagtggcaccttaagcagctgtatgaaaagctgcaggtgaaggggcgcatccaggcggtaaaccaggcgcgcgaatggcgcctgttaggctag

SEQ ID NO: 257220 - DNA, 780 bp, Klebsiella pneumoniae
atggctatcgaaaataaagttgcgctggtaaccggcgccggtcagggcattggccgcggtattgcgttgcgtctggccaaagacggcgcgtcgctgatgctggtcgacgtgaaccctgaagggattgccgccgtcgccggcgaagtggaagcgctgggacgtaaagcggccaccttcgtcgctaacatcgccgatcgcgcgcaggtgtacgccgccattgatgaagcggaaaaacagctaggcggctttgatattatcgtgaacaacgccgggatcgcccaggttcaggcgctggccgatgtgacgcctgaagaagtagaccgcatcatgcgcatcaacgttcagggtaccctatggggcattcaggcggcggcgaaaaaattcatcgaccgtcagcagaaagggaaaatcatcaacgcctgctctatcgccggtcacgatggtttcgcgctgctgggcgtttattccgccaccaaatttgccgtacgcgccctgacgcaggcggcggcgaaagagtatgccagccgcggcattacggttaacgcctactgtccggggattgtgggaaccgggatgtggaccgaaatcgataagcgcttcgcggaaattaccggtgcgccggtgggtgaaacctataaaaaatacgttgaaggtatcgcccttggccgcgccgaaacgccggacgatgtggcaagcctggtctcttatctggcaggcccggattccgattatgttaccggtcagtcgattctgatcgatggcggtattgtttaccgttaa

SEQ ID NO: 257221 - DNA, 1068 bp, Klebsiella pneumoniae
atgcagatgacaatgcgctggttcgggccgcaggaagataaaatcccgctggagtatattcgacaggtgccgggggtagaaggcgtcgtcggggcgctttacgatgttgcccccggcgaagtctggccggtagaaaaaattaaggcgttgattgagcaggcccacgccgcaggcctgaagatggaagtcatcgaaagcgtaaacattcacgatgacatcaaaattggttcagcggaacgcgatcgctatattgacaactacaagcaaactatccgtaacctggcggggtttggcgtaaaagtcatttgttataatttcatgccggtcttcgactggatgaaaaccgatatgaattatgtgcttccggatggctcattaaccatggcctttgaaaagcgcggtattgataagtctctggaagacgtcgttaaagaggtactggagaacgcgaacggttttgctttgccgggttgggaacctgagcgtctggcgaaggttcaggagctgttcgcgcgctatcgcgatgtcgatgataccaggcttcgggaaaatctgttctatttcttacgtgaagtcattccggtatgtgaagaagtgggcgttaaaatggcgatccacccggacgatccgccgtattctatttttggcctgccgcgtgtggtaaaaaatcatgccgatctggcgttgatttgcgatacggttgattcacccgcgaacggtatcaccctttgtacagggtcgattgccgaagatcctgacaataatgtctatgaaattctggctgaatttacccggcgtaagcgtcttcactttgcgcacgtacgcaatattaaacttattaaagacaaggatttttatgagtcggcgcacccttccgcgtacggctctctggatatgtaccgcataatgcaggctctccatgataatggttttgatggttatattcgtccggaccatggtcgctttatttggggagaaaccgggcgtccgggatacggtctgtatgaccgcgcattgggcgttacctacctgatgggtctgtgggaagcgctggaaaagcaaaagtaa

SEQ ID NO: 257222 - DNA, 1416 bp, Klebsiella pneumoniae
atgccattgataaatgatagttttatgttcagcaatccgacaggaaaaaaactctatcttgagatagcgagagagcaacctattatcgattaccattgccatcttgaggcgaaggctatttgggaaaatgaacctttcgccgacattacgcagttatggctggaaggcgatcattataaatggcgcgcgatgcgggcaaatggtattcccgaggaaaaaatcaccggtaacgctaccgctgaagaaaaatttgcggcatgggcgcaaaccgttgaggcctgcttcggtaaccctctctatcactggacccatctggaacttaaatactattttaacattgatgacacgttaaatagccgtaactggcatgaaataatgacgcggtgtaatgagcaattacgccgcaaagaattcttacctcaggcgttaatacgccgttcaaatgtcgaggccctgtgcacaacggatgggccgctggataatctggaatatcatcagcggctggcggcaaatagtgatttttctccgcttgttctaccgactttccgccctgacgaactctttgataccgatccagaaagctttcagacgtttatttcccgtctggcggagaaaacccaaatttgtatcgcttctttgcaagacttgctggccgctctggaatcacgtatcgattttttccacactgtagggtgccgcatatccgatcacggtcctctggaaatcgtttacaaccctctggatgaagccgctctggccgcgcttttccagcgccgtctgaagaacgaggccctgacaaaagacgaacagcaggcgtgggatagcgcaatttttatcgcactcgccaaaatgtataagcagcgcgagtgggctatgcagattcactttggcgcaattcgcaacaataacaaaccgatgtttaagaaggtgggcatcaactgcggctttgattccgttggcgatcaaacgctcctcgccggaagcctgaatgcgctcctcaacgccatgggcgagaacaatggcctgcccaaaaccatcctttataacctcaatgccggctataacgatgtagtggcctctgcgatcgctaacttccagagcggcgaagatggcgtgaaatccccgctgcagtttggatccggctggtggtttaacgatactcgccgcggcatggtcaatcagctcaatacgctcgccgatcagggtttactggccaatttcgtcggtatgctcaccgattcccgcagcttcgtctcctatacccgacacgattacttccgccggatcctctgcgatctgattggaggatgggtggaaaatggagaagttcctgacgataaaaacattcttacctcaatgattcgggatatttgcgtagaaaacgcacgccgctatttccgtttttcacaagcctga

SEQ ID NO: 257223 - DNA, 1548 bp, Klebsiella pneumoniae
atgacccttaaaaacagaaaagtaaccattcctgtcagtatcggctacggtctgacggatattatgggcggcggcgcctttaccgtcattggcgcgtggcttctctttttttataccacttttgtcggtctgtcgccgattgaagcggcttcaatcgtggcgattgcccgtattgttgatgctatcgttagcctgtttatgggcagcttcaccgatcatttctataaaaattatctgggtaaaaaatttggccgtcgtcgcttcttcctgctgattggcgcgccgctcatgctggtttatatcctgctgtggatgaacggtatgaatttctggttctatctcgcggtctacctggcgtttgaagttatcgcggcaatggtgcttatcccatgggaaacgctgccctctgagatgaccaaagactttaacgatcgtaccaaactctccacttgccgaatgttcctgtcggcctccggcacctttctcgccacctttattccaggcctgttgatcggctggctgggcgagaacaacgccgatgcctatttaatcaacggggtagtctttgccgttatgtttaccctctgcgtattcatttcctggaaagtcacctgggagcgcgagttaacgccggaaatgcaggcagaaatcgagaaagagacgcagcctacgaccttcggagagaaaatcacagccttcggtaacttgtttaaagagtacgcctctaccctgaaggtgcgcgcattccgtaaacacctggctatctatctcttttccttcaccgcgaaggatatctacaacacggtgtttgtctttttctgcgtctactgcctgaatgtgtcatcctctctggcgggaacgctgctgtcgatgagtatcgttggattgccggtcacgctggcggcgggcgtcgcgatcattaaatacggcccctcccggctttatgttttcgcctataccctgatgatgctgtgtctcggcggattcttcctggtctatcagttcccgacggataacaaagtaatgctgctggtgatcctcgcgggcgtttatcaggtcggccgctgcgtactggaatttaccccgtggaacgtattcccgtttattccggatattgatgaaatgataacccgccaacgccgcgaaggtctgtttgctgcggtgatgaccttctcccgtaaaacaacggttgccattgcgacctttgcggtaggcctgctgttacagagcggtggtttcatgaaaggtagccaggttcagcctcaggaagccatcaccacgattgctatgctgctatttgtcggcaccgccgggctgttgatcatcgcgctatggcaagcgctgactttccatctgaacaagcgtacgcacaaaattttagtcgacgagatcgaacgcctgaaagcgcatggtcgcaagcaggatgtgacgcctgaagcccgccatgttgtggaagatcttaccggttacgcttatgacaaactgtggtgtcaggatgcaactgcgccagcgacctccaataacccgggggctgccctgaacggatag

SEQ ID NO: 257224 - DNA, 699 bp, Klebsiella pneumoniae
gtggtgcaaattgggctgatgggtaatgtggtcgggaaaagtctgtttggcgacgccaaatctgaggctgtgggaacgattacgcagattgcggcgttaatctcccggctgggaattaataagtacattcagacgaatttaaaagcaaccagcgatttgacgtttatcgctatcgctaagtgttatctccccgaggcgggaaataacaacctgctgattggtgataacctcaatatcaacagcgccggacaggcgtttaactcaaccggtattcttttgacacccgctggcgtaattggtgttgtcggcgtcaaaaacaaatcaacaggggcaaatacaaactacaacgcatccgggacgttgggtattccgtcaggcaaggcgaatgccgcctggaagtgcctggcactgcgtgtcggtatcgccggtatttcaggtggcactaattctgtcagcctaaaaaatctgacggataacgtcgaggttgtccgcacgaaaatggatacgacgctgtatgagcgccagagcgatatgacaaaaacaatccaggtaggcgcgatggttgacccgtccacccagaataatgattttgaccatttcgggtatgccatttgcgatcgcgctctgacggacggcgagctttatacgctttacgctcagctccaggggattggtgaatcaaactcagtcattttttaa

SEQ ID NO: 257225 - DNA, 1113 bp, Klebsiella pneumoniae
gtgggtaaatcattctatgtaaggctgacagaggcaggcgaggctgcctttgcttccgcagtggtatcgggtaatccggtaatcttctctgagatggctgtcggcgatggtggcgggagcattcctgatttctcagcatctcaggttgacctgattaatgaatgttatcgcgcgccattgaatcgcctggtgatagcggatcagtccgcaaatatcatccgggcggaaatgataattttgcctcaaatcggtgggttctggctgcgcgaagctgcgctctatgatggcgacggcgtatgcatggcgttggctactctgccgccgtcatacaaaccgcagcttgctgaaggctcagggcgacttcatgccgttaatctctggattgccgtcagtagcaccgcagacgtggagctaaaggccgacccgtccgtgatactggcatccgtggacgaagtcacccgcgcaaaaaatgaggcaaaggattacacggacgagctgatcggcgatctggcagaaagcacccaggaagatatgagcgagctggataaaaacaccaaaaaggccatcgccgatgctgtagaaaaagcagtcagtgatgcgtgggaactggataaccctgtcggtaccacgcgattttttaatcagaacctgaacccgaatgagcgctggccgtggtctcaatgggtttacaccggcgaaaataaaactgtccgcatcggtaaagctgacggctcaaacgtcgggcagactggcggcagcgataatatcaagctacagcggactaacctgccagctgttaagattgatgtgagcggcgaaaccagcgagttacctgcacatgagttgacaaccaggagcgccggtaggcacaaacatcaggggggaatggcggcgccgggtgaagcatgggacggggattatattgtcggctccgataatgacagccaccgcacccgcaataacaccagtgaagctgacgatcatacccatatcgttgacgtccaggcccacaaacacaataccaccggcaaaaccgataacctcggcgagggtgcatcgttcagcgtggtggaagctcacaccctgctgatgtgctggtcgcgggtggcgtga

SEQ ID NO: 257226 - DNA, 1734 bp, Klebsiella pneumoniae
ttggacgccgctgcggtcatcagtctgtttatcctgggttctgttttagtaacctgtagtattttattaagttccttttcctcacgcctcggcatcccgatcctggttatcttcctcgccattgggatgctggcggggattgacggtatcggcggcattccgtttgacaattaccctttcgcctacatggtgagcaacctggcgctggcggttatcctgcttgacggcgggatgcgcactcaggccagctcctttcgcgtggcgctgtggcccgcgctgtcgctcgccacggtcggggtgctgatcacctcggccctgaccggactgatggcggcctggctgtttcatctcaacctgattgaagggctgctgatcggcgctatcgtcggctcgactgatgccgcggcggtgttctctctgctcggcggtaaaggactgaatgaacgcgtcggctcgacgctggaaattgaatccggcagcaacgacccgatggcggtgttcctgaccatcacccttatcgagatgattcagcaacatgagaccggcctgagctggatgtttgcggtgcatatcgtgcagcaattcggcctgggtatcgctatcggtctcggcggcggctatctgctgctgcagatgattaatcgcattgtgttgccggccgggctttacccgctgctggcgctgagcggcgggatcatgatttttgccgcgaccacttcgctggacggcagcggcatcctcgcggtctacctgtgcggtttcctgctcggcaaccggccgattcgcaaccgccacggtattctgcaaaacttcgacggcctggcgtggctggcgcagatcgccatgttcctggtgctcggcctgctggtcacgccgtcagacctgtggcctatcgctatcccggcgctcattctgtcgatgtggatgatctttatcgcccgtccgctgtcggtatttgccggtctgctgccgtttcgcggctttaacctgcgcgaacggatatttatcagctgggttggcctgcgcggcgcggtaccgattattctcgccgtatttccgatgatggccggtctggacaatgcgcggttgttctttaacgtggccttcttcgtggtgctggtgtcgctgctgttgcagggaacgtcgctctcctgggcggcgaagaaagccaaagtggtggtgccgccgatcggatcgcccatctcccgcgtcgggctggatattcacccggaaaacccgtgggagcagttcgtttaccagcttagcgccgaaaaatggtgcgtcggcgcggcgctgcgcgacctgcatatgccgccggaaacgcggattgccgcgctgtttcgcgacaacgttctgctgcaccctaccggcagcacccgactgctggagggcgatattctctgcgttatcggccgcgagcgcgatttacccgcgctgggtaaactgttcagccagtcgccgccggtcgcgctcgatcagcgcttctttggtgattttatcctcgacgccaatgccaagttcgccgacgtcgcgcagatttacggcatcgatggcggtgaggagttccgcgatcgccagcagtcgctgggtgatgtcgtgcagcagctgttgggcgccgcgccggtcgtcggcgaccaggtggaatttgccggcatggtgtggacggtggcggaaaaagaagaggatcatgtcctgagggtgggcgtacgaatggcgggagatgaggcggagtga

SEQ ID NO: 257227 - DNA, 222 bp, Klebsiella pneumoniae
atgcttcgactggataacaacgatatctcgtataacggcgcccatgcctgcatcgatttcttgcgaggggcactggcgctaaatagcgataaaatggatggcgccacggccatgctttgtcttacggtaaacggtgtcgattctctcccggaaagctatcgggaatataaagatttgattgctccggtaagctatatctcttcgcttcgcacggaggattag

SEQ ID NO: 257228 - DNA, 852 bp, Klebsiella pneumoniae
gtgaatgcagtcgtcagttttatctccgatttacatccattatcctttatgggctatcacgttttatccaccacggttatatatatcgtggccaatatcattatatcgatgactcgccctactgagaaaggcacgccgataccgcccccctattccatccccccctcatttttagcctggctgcatgataaagcgaccggtattattcagttggctacgtttagactattaaggaaaaattacgtcaccatcatccattcagcccagggtatcgagctgcgcgcgaatcagcagtacgcggagtgtaaaatgacgtgcgtagaaaaaatcctctttaaccacttttcttcaccaaaacccggcaaccagaatttaccccttgaactttacgtcgcccagaaaaatcactggtctacggatacccgctgcgcgggcctgatgctaagccctacgcaacaaacgtggaacatgatattagttgccgttccttcattgtttttaatcaccatattaggctggaaaacgttattcgctaataacgctctgcttaatttcagcgtatttagctggcttgcgatgtttgtcgtttccggtctgtggtggctgttaatgttactcatcaccttaaatgttacccggctggaccgggaaggtatctcgattaatattcttcgtagttatgttgataaattaaagaatactcttgtcgccgataaggaacagataaccgatgaaacggctgattattgcgtcgctatcggcaaaaccagcctgctccccgagcgctatcgcgaataccgggaaatcatcaaatcgataaattatccattttctgtgcaacggcttgattaa

SEQ ID NO: 257229 - DNA, 2781 bp, Klebsiella pneumoniae
atgtttgacagtaaagcggggaccccgctggaagggtttgccgaatttgccgccgccgctgccgccgaaggcgcggtgctgctgagaaacgatcgccaaatgctgccgctcgatcccgggcagccggtttcgttgtttggccgtacgcagattgactactattgcagcggcaccgggtcaggcggggcggttaacgtggtgagccggacaaccttgctgcaggcgatgcgcgcgcgaaacggggagaggctgaatgagcaactggccgggctctatgaacgctggattgcgcagcatccctttgacaacggcggaggagcctgggccgccgagccctggcatcagcacgagatgccgcttagcgaccagcagattcgccaggcgcgcgccgtctccagcctggcggtgattgtgcttggccgtaccgcgggggaggaccaggacaacggcgatgtagaaggcggctatcggctaaccgccgacgagataactctgctgcgccaggtctgccgcgagtttgatgacgtggcggtggtgctgaataccgccgggcttatcgatctctcgtgggctgacgatcctctgctgcgtaaacgcgttcgtgcgctgctgtacgtctggcacgggggcgccgacggcgcccgggcggctgcgtcgctgctgtacggcgatgtaacgccctccggtaagctggtaggcagcatcgtcgcctctctggatgaccatccggcatcgccctgctggggagcacaagcgcaaaacctttatcaggaagatatttacgtcggctatcgctacttcgaaaccttttgtccccagcgcctgcagtttcctttcgggtttggtctctcatacacccgcttcaccctgtcatcggcgcgggcgcaggccttcggcgatcggatcaaggcgaccgttaccgtgactaaccgcggcgaccgctttgccggcaaagaagtggtgcaaatctacctccaggcaccgcagggatcgctcggcaaaccggcccgggcgctgatggccttcgctaaaacccacctgctgcggccgggtgaaagcgaaaccttaacgctatcgatcccgctggagcgttttgcgtctttggacgatagcggggcgacaggtcacccgcattgctacgtgatggaacccggtctttaccgcgtgctgatcggcaacagcgtacgcgatctgcagccgttaccggttgacggagaggcggggtattcgcagaagacgctgcgggtcctgtcccgtcaccagcaggtactggccccgacggtgccttttgtccgtattaaaccggttgccgacggcgacgatggccgctatcagatcgaatgggaagacgtgccgcgccgggagattaatctgcgctcgaggattgaggcgcgcctgccggagacgattaccctcaccggcaaccaggggcttactctcagcgacgttgctgaagggcgcgccacgatgaacgcctttattgcccagttgtcggtggaggagctggcctgcctggcgcgcggagaaggcatgtgcagccataaagtcacccccggcgtcgcgtcggcctttggcggagtggccgatagcctgctggaaaaagggatcccgctggcatccaccgccgatgggccttccggcatccgtatggataacggcgcgaaggccacactgctccccagcgggacgctgctggcctccagttgggatccgatcctcgttgagcgcttatacgtgatggagggaaaagagctgctgcgcaacggtattgacctgctgctggggccggggatgaacatccagcgccatccgctcaacgggcgtaatttcgaatacttttccgaagacccgctgcttagcggaatgatggcggcggcggtggttcgcggcattcgcagcggcggcgggatagcgaccctcaagcacttcgcctgtaataatcaggaattcgccagagccagggcggactcggtggtgtcggagcgcgcgctgcgcgaaatctatctgaaaggtttcgaatacgcggtgaaaaccggcggcgccagcgcggtgatgaccgcctataacccgctcaacggctaccatgccgcatccaactacgatctcaccaccaccgtactgcgcgaggagtggggctttcgcgggatcgtcatgaccgactggtgggctacgatgaacgaccccatcgatggcggcgcggcgagcacccacaacaccgcggcgatgatccgcgcgcagaacgatctctatatggtggtcaacaataacggcgcggagattaacgcggccggggataatacccttgcggcgctggcgaaaggtgaactgacgctcggcgaactgcagcgtagcgcggcaaacatcctccattttatgctgcagacccaggtgtttaagcgcggggagaaaccgcgggcggatatcgtccgtctggcggcggaaccgggctgcgccgcggactgcgagggagcgataaaaatcgccgagcaatcgcgtctgcgctgcgacgaggagctggtgctgagcgttgagcaggccgcgcgctacgatgttctggtcaatgtacacgccaacggcgcgccgctggcgcaaaccgcctgcaatctgctgctcaatgaccagttcgtggcgaccatccagaccaacggcactcttggccgggagagcgtgcagaagctgtgccggatcgagctgcagccggggaaatatcgggtgggctttgattttatcaaaccgggtctggtggtggactggctggagctaaggcacgttaacgactga

SEQ ID NO: 257230 - DNA, 1140 bp, Klebsiella pneumoniae
atgttgggacgtgccgcgcgggtgctggtgaccgcgctactgatgtttccgcaaatagcggaaacgatttatagcccggcgctgaccgatatcagcgcccaattttccgtgagcgcgccgcaggcggcgcaaaccctctccgtctactttatcggttttgccgtcggcgtactgctgtggggcggattcagcgatcgctacggtcggcgtccggctctgctggccgggctgggcgtttatgcgatgggatgtctgatggcgctgtgggccgcggatttttcgctgctgttggcggcgcgtatagtgacggcaattggcgcggcaaccggctccgtagtgacgcagacggtcctgcgggactgctatagcgggcggcagctggcggggattttttcgtttatcggcctggcgctggcggtgagtccggccgtcggggtctatatcggcggcggactgaccgccatctgggggatgcgcggcgtcttcagcgcgctggcgcttctggccgccgcgctcctgctgggctgcctgcggctgatgccggaaacgcgtccgcaaaatcgcgcaggggagccgtttcttcgcgtgctgcggcggatggcgggggataaatatattgcgctggcggcaatactggtggcggcatttaacgtcagcctgttcagctactacagcctggccccctttctgttcgcccgattcgatcttgataccctgacctttggctacagcggcatggcgcttgccgccggttcgctgctcggcgcgctgcttaaccgcgtgctgctgcgtcagcatgtcccgctggggcggatactcgccatcgcctgcattctgcacttcgtcggcggcgtcgcggtgtacgtgctgcgggaatcgatctggtttgtggcgccggtggcgctggtcacccttgcctgggccatggcgatcccgctggtgctggggtcggcgctgagcgcctacggcgactgtcggggcaccgccggcgcctttttcggcctgttttattatgtgctgattggcgccggtctgctggcggccgggtgggggcaatcgctgggagcgtcgctgctggtttgcgcaggcgtgagcatttttgccgggtggcgctatatcaccgtgttcgacagagggtaa

SEQ ID NO: 257231 - DNA, 1353 bp, Klebsiella pneumoniae
atgccaaataatcctatgatcctgaaccttttcttcttcaatccccagggtgactaccgcttttcctggcgtcacccgcaggcgccggagaaggaaattttcagcctcaagtactatgtcgatctggcccgtaaagcggaggccgcgacgctcgacgccatttttgtcgccgaccatatcgctatctgggacacggtgcccagcggcttaacccattacgccaacgcccggctggagcccatcactcttctctcggcgctggcggcggtaacggaacatatcggcctgatgggcacggcgtccacctcttataacgagccctataatctcgcccgctatttcgcctccctcgattttctcagcaacgggcgggccagctggaatatcgtgacctcatggctggaggaggaagcggcgaacttcggccttgaccacctgccgcagcacggcaggcgctaccagcgcgccggtgagtttattgatgtggtcactcagctgtgggactcgtgggaagacggcgcggtgcgctatgacaaagccagcgggctgtttgccgattccagcaaggtgcatcatcttgatttcgcgggcgagttcttccgcgtgcgcgggccgctgaacgtccctcgcccgccgcaggggcatccggtcctggtgcaggccggctcgtctgaggcgggtaaaaatctcgccgccgcctggtcagatatgcattttgtgtttatcaaatctatcgctgaggggctgacctaccgcgaagagatgaaccagcgtttgcgcagccacggccgcgatccggcgcatttcaaaatcatcgccggcgtgttaccggtggtggtgcactcaaacgcggaaaaggaggaacgccagcggcttaacgagcagctaatgagcgaccagatggccatcgacctgctctcttcctatctgcgcatggatttatccgcttatcccgtcgaccaaccgctgccgccgctgccggaggaagagacctttgatggcatccgcaccgccctcaggctgattcgtgattacgatccgcgattgacgatcctggcgttgggcaagctgctgttgcaaagctccgatagctggctgctaatcggcagcgccgaggagatcgccagcgcgctgacggaaacctggcgcgccggcgccgccgacggttataacctgatgttcccgctgctgccgggggacttcgaccgcttcgttgagcaggtggtgccgattctgcagcgcagcggcgcgatgcgggatcgctatccgaccggcacgctgcgcgagaagctgggcctgccggtcgtcgaaaaccgcttcgcccgccgggatggcaaaccgcaggcgtcatag

SEQ ID NO: 257232 - DNA, 900 bp, Klebsiella pneumoniae
atgaagcagctatttggcatttccgcgcatcgtcgccgcttgcgtctttcggtattcaccgcgggattattaagcttaagttttaacgccctggcgcaggacgtcaccattggcggagcgaatttcaccgaaagttcaatccttgccaatatttacgccagcgcactaaagaaaaacgatattgcggtgaaaacccgccttaatctcggcaatcgcgagattattattccggcgctgcagagcggcgaaattgatattgttccggaatatctcggtgccctgctgaactattatgacggcaaaacgctggccaccagccagagcgacgttagcgctgagttagccaaagcgctgccggcggactttacgctgctcaccccctccccggcctcgtccattaccgcctgggccgtgcgcgcggaaacggcaaaaaaatatcacctcagcaagctttccgacctgcagcccgtggcccatcagctgactatcggcggcccgccggaattcccggtacgcgccctgggcctgccgggccttaagcgcgtctacgggcttgaatttaaggcggtgaaatctctggatatgggcggtccgctgacccgtctggcgcttaactccggcaaaatcgacgtcgccacggttgtctccactcagggcaacctcgcaaaagaggattgggtagtcctggaggatgataagcatgaacagccaagccagaacgtggtgccgctggtgcgcaaagccagcctgacgccgaaaatcagcgaagtgctcaatgaggtctccggcaagctgaacaacgccgcgctgatcgaacttaaccagcaggtcgatctgcagcataaagatccggcagcggtggccgaacagtgggtcaaaacgcacctcaacggcaactga

SEQ ID NO: 257233 - DNA, 669 bp, Klebsiella pneumoniae
atggatatcctgcaagcaacgtttcactggttattacaaccgcagcactggacaggcgatgcgggaatattacttcgcctgcgcgaacatctttattatgtgctgatcagcatagtcgttgcctcggcgattgcgctgccgctggggattattctcggctactggcgcaagggcgcgtttgtgattattaatctgtttaatattggtcgcgccattccctctttaggtttaatcctgttatgcattattgtgtttggctttaatgatattccggtatttacagcgctggtggcgatgtcgattccgccgatcctcaccaacgcctgggttggcatttatcatgccgaccgtcagctgtgcgatgcggcaaaagcgctgggcatgacgccgctccagagcctgtggcagctgcggataccgctcgccgcgccgctgatactcgccggcctgcggaccgcgctggtacagctgatcgcgaccgccgtcgtcgccgcctacgccggccttggcggcctcgggcgctttctgatcgacggacttggccagcgcgatattccccaggttattgccggttcgctagtggtatcgctgctggccatcggctgcgaactgcttttttcattactctcccggcgcatcgtcccggcgccggtcgcgcaaataaattaa

SEQ ID NO: 257234 - DNA, 630 bp, Klebsiella pneumoniae
atgattgactggctgtggatcctcgacaacaaaatcatgatcggtgaactgctctggcagcatgtacagctggtgatcgtttcgctgtttttcggcaccctcttcaccggcgtattgattagcctgacgctgcgctggcccgcgaccgcccagccgctgatctacctgtgcgggatcctgttcactatcccgtctctggcgctgtttattctcttactgccgtttaccggactgtcgctgatgacctcaattattggcctgacgctctactcgctgctgatcctgctgcgcaacgttatcgccggaattgagaaactcccggcgacggtgctggagtcggcgcgcgcgctgggctatacccgctggtttcgttttgtcgatatagagctgcatctgctgctgccctcgctgttcgccgggttacgcatcgcttcggtgacgctggtcggactggtgacggtcaccgccttaattggccagggcggtctcgggcagcttctgttagccgggtttaaccagaactttgtcacgcctatcgcggtcagcctggcgctcagcgttgtgctatctctgctgttggattcgctgattgcccgcatcggctattggctaacgccgtgggcccgctaa

SEQ ID NO: 257235 - DNA, 1128 bp, Klebsiella pneumoniae
atgcttttcatgaaagaacattcagggcgcaacggctttatgattaaactcgataatattcgcaagacctaccccggcagcgcgcatgcggctattcgcggccttagtctggtgattaatagcggcgaactgtgcactttcgttggccccagcggatgcggaaaaacaaccatactgcggatgattaatcagctggatgttcctgatgccggcgacgtatacgttcagggcgttaagcttgccgctgccgatattattcaggtgcgccgccaaattggctttgtcatgcaaagcgccgccctctttccacatcgtacggtcgcgcaaaatatagccacggttccgcgccttctcggctggagcaaaaagcatatccaggcgcgcatcgacgaattagtggatttgatgtctctcgaccgcaacgtcctgccccgctatccgcaccagctttccggcggccagcaggggcgcgtggcgatcgccagagcgctggccgccgatccgcctgttctcctgatggacgaaccttttgccgctatcgacccggtcgttcgcgagcgcctgcaggacgagctgctgttgctgcaacagcgcctgcgcaaaacgatcgtcctggtgacccatgatatcaatgaagctatccgccttggcgatagaatcgctatcttccaggagggcggcgagctggcgcagttcgctacgcctgaccatattttgtcgcatccggccagcgactttgtgcgccgctttatcggccccgaaccgaatctgcaacggctggggagaattcaggtcggacagctcccgcgccatgacgtgccgcttattgatgagagcctctcccccatcgccagcccgcatccgccggtcgccagtccgctgcgcctggtgctggacaaaaaacggcgtccgctaaactggtacgatccggttaagcgccggacgctgccggtcgacgcgccgctggcggccatcaacacgctgcgctttgcctacagcgcgctgctggatgcccccggctgcgtagtggttcatgtcgatgccgacggtgaatatcagggcagcatctcccacgctctgctgcagaacgtgctggaaggccacgtggatcttcgccgctatgattga

SEQ ID NO: 257236 - DNA, 606 bp, Klebsiella pneumoniae
atgagcaaaaaagtcgataaacagtgcattatgctggccgccgggctctcaagccggatgggcaagtggaaaatgatgctgccgtggggcaaaggaacgattctggatagcgccctggccagcgccctggcgttctgcgatcgggtggtgctggtgacggggtttcgcggtgatgaattggccgcgtgctatcaggatcatccgggcgttgaggtagtctttaacccgcaatatcaggacggcatgttctcttctgtgcagtgcggggtcagccatattcgcgactcccggttctttctggcgctgggtgatatgccggaggtgacgccgggcgtctaccgccggctgtgggacaaccccgacgccgagagctgtcttattcccgcctacgagcgcggtaaaggccacccggttcttctgccgcagcgggcaatctcgctgattcatcgcgccccgcaaggggccaccctacgagacgttatcggtcagatggcggtgcgcgttattcccgtggcgagtcaggggattcactgggacgttgatactccgcagcagtatcttgaggtcgcgcgtcgctgccgtaaggatcaggccgctgtcggttag

SEQ ID NO: 257237 - DNA, 420 bp, Klebsiella pneumoniae
atgaagagaataacgaccgtctgcccctactgcgcctccggctgcaaaatgcagctcacggtagaggagggaaatattacccgcgccgacgccgcgatgggaaaaaacaatcagggtacgctgtgcctgaagggctactacggctgggattttattaacgatacccagatcctcacgccgcgcctgaaaaccccgatgatccgccgccaacgcggcggcaggctagaatccgtctcctggcatgaggcgctcgattacgtcgccacccgtctgagcgccattaaagagaagtatgggccggacgcgattcagaccaccggatcttcgcgcgccaccggcaatgaaaccaactacatcatgcaaaaattcgcgcgcgccgttattggtaccaataacgtcgactgctgcgctcgcgtctga

SEQ ID NO: 257238 - DNA, 834 bp, Klebsiella pneumoniae
atgaatattttcgcagaagcagcacggcttgaagaacagaaccgcccctttgccctcgcgcagattgttgaaagccggggctccaccccccgacacgccgctcagatgctgatccgagaggacggttcgattgtggggaccattggcggcgggatggtagagcgtaaagttatcgatgcggcgcaggcggcgctgcgcgagcgggaatcgcgaatgtttcacggccgtatggcgcgcaccggcagcgacgccgtgggctccgactgcggcggcgcgatgtcggtatacatcagcgttcacggcctgcgcccgcgcctgctgctggtcggcgccgggcacgttaaccgcgcggttgcccacgccgcggcgctgctggattttgatatctgcgtcggcgatacctatgccgcaagcctctgtcccgacgctttccccgcttcggcgcggctggcgcacgccgccagcttcacggacgtggtggaggcgatggcggtacggccgcaggatttcgtgctgattgccaccaacaaccaggattgggaggcgctggacaggctgataacccagccggtcgcctggctggggctgctggccagtcggcggaaagtgcaggcctttgtacgccagctgcgggagaacggcgtgccggaggcggatatcagccgcctgcgggcgccgattggctacgacatcggcgccgagacgccaaacgagatcgccatcagcgtgctggcggagatcctgcaggtgaaaaacggcgcgccgggggggctgatgaaccaggtgaaacaggcgggccagcaagaatatgccgtggaggcggtggaaatctga

SEQ ID NO: 257239 - DNA, 948 bp, Klebsiella pneumoniae
gtgcctgatatgaagctttttgctggtaacgccaccccggaactagcacaacgtattgccaaccgcctgtacacttctcttggcgacgccgccgtaggtcgttttagcgacggtgaagtcagcgtacaaatcaatgaaaacgtacgcggtggtgatattttcatcatccagtccacttgtgctcccaccaacgacaacctgatggaactggttgttatggttgatgctctgcgtcgtgcttcggcaggtcgtatcaccgctgttatcccttacttcggttatgctcgccaggaccgtcgtgttcgttctgctcgtgtgcctatcaccgcgaaagtggttgctgacttcctgtccagcgtcggcgtcgaccgcgttctgaccgttgacctgcacgcagaacaaattcagggcttctttgacgttccggttgataacgtattcggcagcccgatcctgctggaagacatgctgcagctgaacctggacaaccctatcgtggtttctccggacatcggcggcgtggttcgcgctcgcgctatcgccaagctgctgaacgataccgatatggctatcatcgacaaacgccgtccgcgcgctaacgtttcccaggtgatgcacatcatcggcgacgtcgccggccgcgactgcgtgatggttgacgatatgatcgataccggcggcaccctgtgtaaagcggctgaagcgctgaaagagcgcggcgctaaacgcgtcttcgcctacgcgacgcacccgatcttctccggcaatgctatccagaacatcaagaactcagtgattgacgaattcgtcgtctgcgataccattccgctgacgccggaaatcaaagcgctggaaaaagtccgtaccctgacgctgtctggtatgctggccgaagcgattcgtcgtatcagcaacgaagaatctatctctgctatgttcgaacattaa

SEQ ID NO: 257240 - DNA, 852 bp, Klebsiella pneumoniae
atgatgacccgctggccctctcccgcaaagctgaacctgtttttgtacattaccgggcggcgcgccgacggttaccacacgctgcaaacgctgtttcagtttctggattatggcgacacgctgacgattgagccgcgcgacgacggccagctgcgtctgctgacgccggttgacggcgtgccggatgaagagaacctgatcatccgcgcggccaggctattaatgcaggccgcagcgcaggccgggacgcttcctgcgggcagcggcgccgatatcagcatcaacaaagtgctgccgatgggcggcggcctcggcggcggctcgtccaacgccgcgaccgttctggtggcgctgaaccatttatggggctgtaatctctcggaagatgagctggcggctttgggtctgcagctgggcgccgacgtgccggtgttcgttcgcggccatgcggcctttgccgaaggcatcggggaaattctgaccccggtcgaaccggaggaaaaatggtatctggtggcgcatccgggggtcagcattccaacgccgatcatttttcgcgatccgcaactgccgcgcgataccccggccaggtcaattaatacgttattaaaatgtaaattcggcaatgattgcgaggttatcgcaagaaaacgttttcgtgaggttgatgcggcgctttcctggctgttagaatatgcgccgtcgcgcctgactggcaccggtgcatgtgtatttgctgaatttgacactgaatccgccgctcgtcaggtgcttgaaaaagccccggcatggctgcatggcttcgtggcgcgaggtgttaacatctctccgctcaagcaggcgctgcgctaa

SEQ ID NO: 257241 - DNA, 840 bp, Klebsiella pneumoniae
atgacttttcagcagtggctggcccaggccatcgcccgcctgagccaaagtgaaagcccgcgccgggatgccgaaatcctgctgggccacgtgaccggcagggcgcggacctatatcctcgcctttggcgaaacggcgctgaccgcggcgcaggccgccgagctggaaacgctgctgagccgtcgcgcccggggcgaaccggtggctcacctggtgggccagcgcgaattctggtcgctgccgctgttcgtctctcccgcgacgctgatcccgcgtccggataccgagtgcctggttgaacaggcgctggcgcgcttatccgatgagccgtgtcgcattctcgatctcggcaccggcaccggcgcgatcgccctggcgctggccagcgaacgcccggactgccgcgtcaccgccgtcgatgtgatgcccgatgcggtcgcgctggccgcgcgtaacgttgagcatctcgcgatccctaacgtcagcgtactgcaaagcgactggtttagcgcgctcgccggacagcagttcgacatcatcgtcagcaatccgccctatatcgacgaaaccgacccgcatctggcgcagggcgatgtccgctttgagccgaaaacggcgctggtcgccgccgatggcggtctggccgatctggcgcatatcatccgcgaaggccgccgctatctggctgccggcggcgtgatgttgctggaacacggctggacgcagggccaggcggtgcgggaactctttcgcgaggcgggttatggcaatattgccacctgccgcgattatggagacaacgagcgcctgacgctcgggcattatcagggagaggtatga

SEQ ID NO: 257242 - DNA, 855 bp, Klebsiella pneumoniae
atgaaacaaaaagtggttagcattggtgatatcaacgtagcaaacgacctgccattcgtgctgtttggtggcatgaacgtgctggaatcccgcgatctggcgatgcgtatttgcgagcactacgtgaccgtcacgcagaagctgggcattccttatgtgtttaaagcctcttttgataaagctaaccgttcttccatccactcctatcgcgggccgggtctggaagaagggatgaagattttccaggagctgaagcagacgttcggcgtgaaaatcatcaccgacgttcacgaagccagccaggctcagccggtggctgacgtggttgacgttattcaactgccagcgttcctcgcccgccagaccgacctggttgaagcgatggcgaaaaccggcgcggtgatcaacgtgaaaaaaccgcagttcgtgagcccgggccagatgggcaatatcgtcgataaattcatcgaaggcggcaatgacaaagtcattctttgcgatcgcggcgcgaacttcggctacgacaacctggtggtcgacatgctgggcttcggggtgatgaaaaaagcctccaataactcaccggttatcttcgacgttacccacgcactgcagtgccgcgacccgtttggcgccgcgtccggcggacgccgcgcgcaggttgccgaactggcgcgcgccgggatggcggtaggcatcgcgggcctgtttattgaagcgcacccggatccggaacacgcgaaatgcgacggtccgtccgcgctgccgctggataaactggagccgttcctcaagcagatgaaagccatcgacgatctggtcaaaggcttcgatgagctggataccagcaagtaa

SEQ ID NO: 257243 - DNA, 195 bp, Klebsiella pneumoniae
gtggtgcgttgttccgaacgctgccatattcacctgatgagcgccaaagtgcctggcgatagtcatgcggatattctgagcgtacaggacagagatagcgcgtatctgaccgtgccttacagcggcacctggaacgttcttatcgacagccatagccagtcgctggagcattcaataagctacgttcccgcctga

SEQ ID NO: 257244 - DNA, 1191 bp, Klebsiella pneumoniae
atgaataatatggcgggcaatacgcctgaggtggtcgactggtttgcgcgcgcgcgtcgcttacagaagcagcagctgcaccagctggcgcagcaggggacgctggcaggccagataagcgcgttggtacatatgctgcagtgcgagcgcggcgcgtcaaatatctggctgtgctcgggcggcagactgtatgcggcggagtgccgggcgggcgcggcgctggtcgatgagcagctcacgcggttttatgcggcgctggagcccgcgcgcgacgccgccagtagcgcgctatgctggcgcattgcctgcgcggtgtggtatctgccccagcttgcggcgctgcgtaaacgcgtgcgcgaccgggagattgccgccgaagaggccaccgggcagtttagccgcattatccgccacttgttgaatatcgtaccgcagctcaacgacagcatcgacgatccgcaaatcgccggccgcatggttgcgctttacagctttatgcagggaaaagagctggccggacaggagcgcgcgctgggcgcgctgggctttgcccgcgggcagttcagcgatgagctgcgtcagcagctggtggaccgcatcgacggccagcagccctgtttcgacagttttcaggccttggcccaaccgccgcaaaccgccctgttcgctgaacagtgccaggccagcctggagattgaacagctacgacgggttgcctgcacccgtccgccaccggcggacgagggagaaacggcgctgcgctggttttgcgctcagactcagcgcctcgaacagctgcgcggcgtagaagaactgctgatcgttgatctgcttaacgctgcggacgcgctgctcgagggcgaagagccggaggctcagctgccgcccgctgactggcaggaggacagtatagccctgcggctggataagcagctgttgccgctggtgcgccagcaggcccatgagctacagcagctctccggccagcttgcgtcattaaaagatgcgcttgaagagcgcaagctgattgaaaaggccaaaagcgtgctgatgacctaccagggaatgcaggaggagcaggcctggcaggcgctgcgtaaaatggcgatggacaagaatcagcgcatggttgagatagcccgcgcgctgctgacggtaaaggcgctatggcgcgtaaccccaaaggagtag

SEQ ID NO: 257245 - DNA, 1257 bp, Klebsiella pneumoniae
atgggcgataagttttcgatttcacggcgacgtttattacagacgggggcggcgctgggcggcgcgatgctgctccccggcataatgcaggcggcgtgggcggctgggtcggataaaccggaacagaccaccgtgcgggtggggtttattccgctaaccgactgcgctcccttagccattgcctccctgaaggggttcgataaaaagtatggtatcaccctcgtgccgagcaaagaggccagctgggccgcggtgcgcgacaagctggttgccggagagctcgacgccgcgcacattttgtacggcatgctctacggcctggagctggggatcgccagtaaaccacaggcgatggccaacctgatgacccttaaccgcaacggccaggcgattacgctctccagcgagctgcaggaacagggcgtcaccgacctgagcgggctgaaaaaacggatcggccagcacgcgccgggcagctacaccttcgcccacacctttcccaccggtacccacgcgatgtggctttactactggctggcgagcggcggaattaacccattcgccgatattcgcaccgtcgtcgtgccgccgccgcagatggtgatgaacatgcgcatcggcaacatgagcggcttttgcgtcggcgagccgtggaacgcgcgcgccattaacgatcgtatcggcttcaccgccgccacttctcaggatatctggccggaacacccggaaaaaattctcggcacccgcagcgaatgggttacgcgtcatcccaacaccgcgcgcgcgctggtagcggcgctgatggaggcccagcgctggattgaagcctccgccgacaacacccgcgaaacggcgcgcctccttgccagacgcgcgtggctgaacaccaaagagcagtacctcaccgggcgcatgctcggcgaatacgacaacggtatcggccgccgctggcaggacgcgcatccgatgcgcttctacgaacagggggaagtgagttttccgtggctctcggacggcatgtggtttttgacccagttccgccgttggggattgctgaagtcggcgccggattatctggcggtggcccagcgcattaaccggattgacgtctggaaagaggccgcccaggcggtcggcgacatcagcgcgccgacgcaggcgatgcgcagcagtacgctgatcgatggcaaggtctggaatggggtcgatccggaaggctacgcccgcagtttcgcgattcaacgtaagggggcatga

SEQ ID NO: 257246 - DNA, 3744 bp, Klebsiella pneumoniae
atgagtaaattcctggaccggtttcgctacttcaaacagaagggtgaaacctttgccgatgggcacggccagcttctaaaaaccaaccgggactgggaggatggataccgtcaacgttggcagcacgataaagttgtgcgctccacccacggcgtcaactgcaccggctcgtgcagctggaagatttatgtcaaaaatggtctcgttacctgggaaacccagcagactgactatccgcgcacccgtccggatatgccaaaccacgagccgcgcggctgcccgcgcggcgccagctactcctggtacctctacagcgccaaccgcctgaagtatccgctgatgcgcaaacgcctgatgaagatgtggcgtgaagcgaaggcgcagcacagcgatccggttgacgcatgggcctcgattattgaagacgctgataaagcgaaaagcttcaagcaagcgcgtggtcgcggcggtttcgtgcgttcatcctggcaagaggtgaacgagttgattgccgcctctaacgtctataccgtcaaaacctacggcccggaccgcgtggcgggcttctcgcccatcccggcgatgtcgatggtctcctatgcctccggcgcgcgctatctgtcgctgatcggcggcacctgcctgagcttctacgactggtactgcgacctgccgcctgcctctccgcagacctggggcgagcaaaccgacgtgccggaatcggccgactggtataactccagctacatcatcgcctggggttccaacgttccgcagacccgtaccccggatgcccacttctttaccgaagtgcgctataagggcaccaaaaccgttgctatcacccctgactacgccgaaatcgccaagctttgcgatctgtggctggcgccgaagcagggtacggatgcggcgatggcgctggcgatgggccacgtgatgctgcgcgagttccatctcgataaaccgagccagtatttcaccgattacgtgcgtcgctacaccgacatgccgatgctggtgatgctcgaagagcgcgatggctattacgcggcgggccgtatgctgcgcgcggcggatctggtcgatgcgctaggtcaggaaaagaatccggaatggaaaaccgtcgcttttgatgagaagggcgaaatcaccgtaccgaacggttctatcggcttccgctggggcgataaaggcaaatggaaccttgaacagcgcgacggtaaaaccggcgaagatgtcgaactgcgcctgagcctgctgggtagccatgacgatatcgccaacgtcggcttcccctattttggcggcgaaggtaccgagcactttaataaagtcgaactggaaaacgtgctgctgcacaaactgccggtcaaacgcctgcagaaagccgacggctctagcgtgctggtcgccaccgtgtacgatctgaccatggccaactacggtctggatcgcggtctgggcgatgaaaactgcgccagcggctatgatgacgtgaaagcgtataccccggcatgggcggagaaaatcaccggcgtttcccgggcgcatattatccgtaccgcgcgcgagttcgccgataacgccgataagacccacggccgttcgatgatcatcgtcggcgccggtctgaaccactggttccacctcgatatgaactatcgcggccttatcaatatgctgatcttctgcggctgcgtcgggcagagcggcggcggctgggcgcactacgtgggccaggaaaaactgcgtccgcagaccggctggcagccgctggcgtttgccctcgactggcagcgtccggcgcgtcatatgaacagcacgtcgtacttttataaccactccagccagtggcgctatgaaaccgtcaccgcgcaggagctgctgtcgccgttagcggataaatcccgctacagcggccacctgattgacttcaacgtgcgcgctgaacgtatgggctggctgccgtcggcgccgcagctgggcaccaacccgctgcgcattgcgcaagaggcgaaaaaagcgggcatgacgccggtcgactacaccgtcaaatccctgaaagagggctccattcgctttgccgctgagcagccggaaaacggtaagaaccatccgcgcaacctgttcatctggcgttccaacctgctgggctcttccggtaagggccacgagtacatgctgaagtatctgctgggtacggaaaacggtattcagggcaaagatcttggcaagcagggcggcgtgaagccggaagaggtggagtggaaagacaacggtctcgacggcaagctggatctggtggtgacgctggacttccgtttgtcgagcacctgcctctactctgacatcgtgctgccgaccgccacctggtatgaaaaagacgacatgaatacctcggatatgcatccgtttattcatccgctgtctgccgccgtcgatccggcctgggaatcgaagagcgactgggatatctacaaggacatcgcgaagaaattctctgaagtttgcgtaggacacctgggcaaagagaccgacgtagtgacgttgcccatccagcacgactccgccgccgaactggcgcagccgctggacgttaaggactggaaaaagggcgaatgcgagctgattccggggaaaaccgcgccgcatattctgaccgtcgaacgcgattatccggcgacatacgaacgcttcacctctatcggcccgctgatggagaaaatcggcaacggcggtaaagggatcgcctggaatacccagagcgagatggatctgctgcgtaagctcaactacaccaaagcggacggtccggccaaaggtcagccgatgcttaataccgcaattgacgcggcggagatggtgctgaccctggcgccggaaaccaacggtcacgtggcggtgaaagcctgggcggcgctcagcgagtttaccggtcgcgaccatacgcatctggcgaagaataaagaggaagagaaaattcgcttccgcgatattcaggcccagccgcgcaaaattatctccagcccgacctggtcagggcttgaagacgagcacgtttcctataacgccggctacaccaacgttcatgagctgatcccgtggcgcacgctttccggccgccagcagctgtatcaggatcaccagtggatgcgcgacttcggcgaaagcctgctggtctatcgtccgcctatcgacacccgttcggtgaaagcggtgatgggtaagaaatccaacggcaacccggaaaaagcgctgaacttcctgacgccgcaccagaagtgggggatccactccacctacagcgacaacctgctgatgctgacgctgtcccgcggcggcccgattgtgtggatgagcgaggcggatgccacagatctggggattgaggataacgactggattgaagtgttcaacagcaacggcgcgctgaccgcccgcgcggtggtcagccagcgcgtgccggccgggatgaccatgatgtatcacgcccaggaacgtatcgtaaacctgccgggttcagaggtaaccgagcagcgcggcgggattcataactccgtgacccgtattacgccgaagccgacccatatgatcggcggctatgcccagttggcctacggctttaactactacggcacggtagggtctaaccgcgatgagttcgtggtggtacgtaagatgaagaatattaactggttagatggcgaaggtaacgaccaggtacaggagagcgtaaaatga

SEQ ID NO: 257247 - DNA, 1536 bp, Klebsiella pneumoniae
atgaaaattcgttcacaagtcggcatggtgctgaatctcgataagtgcatcggctgtcatacctgctcggtcacctgtaaaaacgtctggaccagccgcgaggggatggagtacgcgtggtttaacaacgttgaaagtaaaccgggcgtcggtttcccgaacgactgggagaatcaggaaaagtggaagggcggctggatccgtaagatcaacggcaagctgcagccgcgcatgggcaaccgcgcgatgctgctaggtaaaatctttgctaacccgcatctgccgggcatcgacgattactacgagccgtttgactacgactaccagaacctgcacaacgcgccggagggcaaacatcagccgatcgcccgtccgcgctcgctgatcaccggccagcggatggataaaatcaccagcggcccgaactgggaagagattctgggcggcgagttcgagaaacgcgccaaagaccagaacttcgagaacatgcagaaggcgatgtacggccagttcgaaaacacctttatgatgtatctgccgcgcctgtgcgagcactgcctgaacccggcgtgcgtcgcgacctgcccgagcggcgccatctataaacgtgaagaagacggcatcgtgctgatcgaccaggacaagtgccgcggctggcgtatgtgcatcaccggctgtccgtacaagaaaatctacttcaactggaagagcggcaaatccgagaagtgcatcttctgctacccgcgtatcgaatccgggatgccgaccgtctgctcggaaacctgcgtggggcgtattcgctacctcggcgtgctgctgtatgacgcggacgccattgaaaatgccgccagcgcggagaatgagaaagacctgtatcagcgtcagctggacgtgttcctcaacccgaacgacccgaaagtgattgagcaggcgctgaaagacggcgtgccgcagggcgttatcgaggccgcccagcagtctccggtctacaaaatggcgatggactggaagctggcgctgccgctgcatccggaatatcgcacgctgccgatggtctggtacgtgccgcctctgtcgccgattcagtcagccgccgatgcgggtgaactgggcagcaacggcattctgccagacgtagaaagtctgcgtattccggtgcagtatctggccaacctgctgaccgcgggcgatacccagccggtgctgctggcgctgaagcgcatgctggcgatgcgtcacttcaagcgcgcggaaacggtggacggcgtcgtggatacccgggcgctggaagaggttggactgactgaagcccaggcgcaggagatgtatcgctatctggcgatcgccaactacgaagaccgtttcgtggtgccgagcagccaccgcgagcaggcccgcgacgccttcccggagaaaagcggttgcggttttaccttcggcgacggctgccacggttctgacagccagttcaatctgttcaacagccgccgtatcgatgctatcgacgtcaccagcaaaacggagccgcacccatga

SEQ ID NO: 257248 - DNA, 897 bp, Klebsiella pneumoniae
atgcgtgatttacataaaggcgtctggcaaatgagcctggcgatgttaatttccggatcgattggcgcgtttgttttactttccggcctaccggtgaccgaagtcgtattctggcgctgtcttatcggggctattgcactgtttatttttattcggatgagtcgaaaaccgtttagcccactcacccgcattacgctgctgctggctattctcggcggcgtggccttagtggtgaactggctcctgctcttcgccgcctatgaacggatctctattggtctttctaccgtggtgtataacacccagccgtttatgctggtattgatggggatgcttttcggtgagcgcgtcagcctggtgaaatgggggtggctgttcctcgcctttggcggcgtggtcattttgctctccacggagttaaccggcgctcgtggcgccgactggctcgccggtatcggcctcgcgctgggcgcggccttcttctacgcgctcacggcaataattacccgcaagctcaaatccctcgcgccgcagcatatcgcctttattcaggtgctcaccggcgtggtaatgcttttaccgctggcgcatatgccgtcgctcacgcctcctttcccatgggtgatgctattaacgctggggatcgtgcataccggcgtaatgtatcaactgctgtacagcgcgatacagaagcttcccacccctattatcggctcgctgtcatttatctatcccgtcgtggcgatcgttgtcgataaccgggtatttggccattcgctaaacctgatccagttgttcggcggcgcgctgatcctgttggctgcggcaggcaacaatcttggctggggcgaaaaaaaaccccgccaaggcggggttggtatcaaaacagcgaattag

SEQ ID NO: 257249 - DNA, 444 bp, Klebsiella pneumoniae
atggataaccttattgatgatatcgaccgacaaattttagcctgtctggtggaggatgcgcgcgtctcgctgaaggtgctgagcggtcatattggcctgacctcgcccagcacggcggagcgtctgaaaaggcttgaggagcgcggggtgattcagggttacggcgcgcgggtgaatcttgcggcgttaggctatacgctgcaggcgctggtgcgggttcgcccattgcctgggttgttacataaagtggataagtacattcaggcgatgccggagtgcattgaaagcgacaaagtgaccggcgaggattgctttgtcatcaggctggtggtgcggtcgatagagcagttggatacgctgctcgatggcctggcggagcatgcccagtgcaatacctctatcgtgaagagttcgccggtcaagcgccggctgccgccgatgtag

SEQ ID NO: 257250 - DNA, 1014 bp, Klebsiella pneumoniae
gtgtttgttgggccatcaggctgcggcaaatccaccctgctgcgtatgattgccgggctggaaacggtgaccagcggcgatctgctgattggcgatacccgaatgaatgatgtcccgcccgccgagcgcggtatcgggatggtgtttcagtcttatgcgctttacccccatctttccgtcgcggaaaacatgtcttttggcctgaagctggccggcgccaaaaaagagctgattaaccagcgcgtgacccaggtggcggaagtgctgcagctggctcacctgctggagcgtaaaccgaaagcgctttccggtggtcagcgtcagcgcgtggcgattggtcgtaccctggtggctgaaccgcgcgttttcctgctggatgaaccgctctctaaccttgatgccgcgctgcgcgtacagatgcgcattgagatttcccgtctgcataagcgtcttggccgcacgatgatttacgtgacccacgaccaggtcgaagcgatgaccctcgccgacaaaattgtggtgctcgacgccggtcgcgtcgcgcaggtcggcaagcctctcgaactctatcactacccggcggatcgcttcgtcgcgggctttatcggctcgccgaagatgaacttcctgccggttaaggtcaccgctaccgccattgagcaggtgcaggtggagctgccgaaccgtcagcaggtctggctgccggtggacagcgcccgcgttcaggtcggcgccaacatgtccttaggtattcgcccggaacatctgctgcccagcgatatcgccgacgtcacccttgaaggtgaagttcaggtggtcgaacagctcggccacgaaacgcaaattcatatccagatcccatccatccgtcaaaacctggtttaccgccagaatgacgtggtgctggtagaagagggagccacattcgccatcggtttgccgccggagcgctgccatttattccgtgaggatggcaccgcttgtcgtcggctgcataaagagccgggcgtgtaa

SEQ ID NO: 257251 - DNA, 228 bp, Klebsiella pneumoniae
atgccgcacgttgatattaaatgttttccccgcgagctgaatgatgaacaaaaaacggcgctggccgccgatattaccgaggtgttgattcgccatctgaacagcaaagagagttcggtgagtgtggccctgcagcaggtagaaccgagcgactggcagcaggtctgggatagcgaaatcgcgccgcagatggagcagttgattaagaagccgggttacagcatgtaa

SEQ ID NO: 257252 - DNA, 510 bp, Klebsiella pneumoniae
atgagcgatattttccgcgatgtctctccggaaaccccggagctgcagccgattattgagggcctgttcggtgagtacgccgcgcgctacggcgactacttctcccgcgatgccgaaatcgagctgactgaatggtatctggcgccgcaggggctgtttatcgtgctggagcgcgagggcgaaattatcgccaccggcgcgtacaaaccgaaagacgcccatacggcggaaatcaaacgtatctggacccatcgccgtctgcgtcagcaggggctggcggcgaaagtggtgcaggagctggagcgtcgggcgctgcttgccggctacagccatatctatctgaccaccggttttcggcagccggaagcggtgcggctctacctgagccagggctacgaggcgcagtttgacctcagccgcgatccggaagagtacagtttgccgccgtttgatggccgactgcgcttcaccaaagcgctggcggtcagcgcgctaagccagagcgcttaa

SEQ ID NO: 257253 - DNA, 942 bp, Klebsiella pneumoniae
atgcagaaaacgcagaaaaaatcgctactcctggcgcttgcgctggccgttagcgcctcatcctgggcgcagaacgtcacgatcaacggcaccggcgtgagcctcgaagctaacaaaacgccgattcatacggcgaaaaacccgcaggctatcgcgcagttgccaaaagatcttcacctggcggtgccgggcaaactgaccgtcgcggtcgccgcgctgaactcgccgccgctgaccgtgttttctgacgataacaaaaccctactcggcagcgaagtggatatcgcccgcctggtggccgacagccttgggcttgagctgaacgtggtaccgacatcatgggaagactggccgctcggcgtcgcctccggcaaatatgatgcggcggtcagcaatatcaccgtaaccaaagagcgcaaagagaagtttgacttcgccacctaccgcaaagattcgctgggtttttacgtcaagagcaccagtccgttgagcaaaattgaaaaagccgaagatattgccgggctgcggattatcgtcggctccggtaccaatcaggaagcgatcctgctggcgtggaacgccgagaaccttaagaaggggctgaagccgtttaccccggtttataccaaagatgacgccgcccaaaccctggcgctgcagtccgggcgcgccgacgccttcttcggccccaacgtgatcggcgcgtggaaagcggcgctgaccggcaaaaccaagctggtgggcagcgttgacggcggctggccgaaggcggcgcatatcgccgtgacggtgaaaaaaggcagcggtctggttgaaccggtacagacggcgctgaacggcgctatccgcagcggcgattacgcgaaggtactgaaccgctggggcgaaggcgtggagagcatcccgcaatcggaaatcaacccggccggactcggcgactaa

SEQ ID NO: 257254 - DNA, 1599 bp, Klebsiella pneumoniae
atgtctacagggaaaacgctgcttgcgctggcgttgagcgcactctttccggcggccagcgcctgggcggcgggaaacgatacgctggtctactgctccgaagcttcgccggaatctttcaacccgcagattgccagttcgggcccatcgttcgtcgccagttctcaggtgctttataaccgcctgataaacttcgatccggtgaaaaacacgccaattccttcgctggcgaccgaatggagcgtctcgccggacggcaaaacctggactttcaccctgcgtaagggcgtgcagttcaacagcaacaaattctttaagccgacccgcgatttcaacgccgatgacgtgctgttctcggtgctgaggcagaaagatgccaaccatccgtaccataatgtttctcaggggcattacgaatactttcatgacgttgggctggataagctgatcaaagaggttaaaaagctcgatgattaccacgtccagtttgtactgagcgaacccaacgcggcgttcctcgccgactggggcatggattttgcgtcgatactctccgctgaatatgctgatgcgatgctgaaaaaaggaacgccggagtatgtcgatacctggcctgtcggcaccggaccttacgcgctgcagcaatataaagcggattcgcagatccgctatatcgccaatccgcactactgggacggtgaagtgccgaccaaacacctgatcttctcgatcacgccgaacgttgagacgcggctggcgaagctgcaaaccaatgagtgccagattattcccgcgccgtcgccggtacagttcccggtgattaagggcaataaagatctggcgttgcattcggtagaagcgctcaacgttggttatctggcgtttaataccgagaaaaagccgtttgataatgtcctggtgcgtcaggcgctgaactacgcgaccgacaagcaggcgatcgtgaaagcggtgttcctcgactccggcagcgtcgcgaaatcaccgatccccgccaatatgctcggctataagaaagatctaccggactacgactacgatccgcaaaaagcgaaagacctgcttaagcaggccggactggagaagggggccgaagtgaccctgtggtcgatgccggtgcagcgtccctataaccccaattcgcgccgtattgccgagatgatccagaatgactggagcaaggtcgggattaaagccaaaatcgtcacctatgagtggggggaatatctcgctggaatgcgtaaaggcgagcacgacagcgcgctgtttggctggatgtccgataacggcgatccggataacttcgccggcaccctgctaagctgcgataacatcaaaaccggctctaacgttgcccgctggtgcgataagtcctacgatgcgctggtgaaaaaggctatcctggtcagcgatccgcaggcgcgggctaagctatacggcgaggcgcagacgatttttcagcagcaggccccctggatcaccctggcgaccgggaagaccttctacgcgacgcgcagcaacgtcagcggctacagcgtgagcctgatgggcagcgatttttccaaagttaaactcaactaa

SEQ ID NO: 257255 - DNA, 735 bp, Klebsiella pneumoniae
gtggggcggataatcgcccgcacctgcggtgaacatctgaaacccgcgatactggaactgggcggcaaagcgccgctgctggtgctggatgacgctgacctcgaacaggccgcggcaggggcaatttttggcgccttcgccaacgccgggcaaatctgcatgtcaaccgagcgcatcatcgtcgatgccgccgtcgcggaaccgttcgtggcgctgctggccaaacgagccgccgccctgcccgccagccttctcggtccggtggtggagatgagaaccgtcgcccgctgcaacgcgctaatagaggacgcgctggcgaaaggcgcgcgcctgctcgcaggcggcatgtccgactcaacgcagatgcgcgccaccctgctcgatggcgtcacccgcgagatgcgcatctggcatgaggagtcctttggcccggtgaaatcgattattcgcgttcaggatgaagccgaagcgctggccgtcgccaatgaaagcgaatatggcctctcgtcggcgatctacagccgggacagcgcccgggcgtggaacctggcgcaaaatctgcaaaccggcatttgccacattaacggccccaccgtgcatgatgaggcgcaaatgccgtttggcggctgcaaatcgtcgggctacggccgctttggcggacgcacgggggtggcggagtttaccgagctacgctggataacgctgcaaacggtcccgcgcgagctaccgttttaa

SEQ ID NO: 257256 - DNA, 1257 bp, Klebsiella pneumoniae
atgcgaaaaatcactatcctgggtatctcggctttactctgtacaccgctgcttctgcaagggtgcgtgtcgcaaaatccgcgcgggacagcttcccgcccgcagcttacggcggcggaagcggcaaccttcaccatggaacgctattttgcaaaaggcggcgcgttgagtgcccccgatggcccctggtcgccatcgcctgcgcgtctcccgcgggccgaaagcgcgttgcgcgtagcgccgtcgggtgcgccgttcacccgcattcagcaggcggtcaacgcggcaatcaaccagcacgcggccggtgatgagcgtatctatatccgcattgaaccgggtatctatcgggagacggtctatatccctgaaggggcgccgccgataaccctctacggcgccggggataatcctcaagcggtgagaatagagctggcgatagactcgcagttcccggtatcgcgctatcgccagcaggtgaatagccagcaacagtatcgtgaaggcgatccggcctggtatcagtatgcgctgtgcgccggacgtactgccaggacgataggcaccaactgcgcggcggtgatgtggtcgcaaagcgcggattttcagctgctgaacctcagcgtagtcaatagcctgctcgacaccgtcgacggtgcgacccatcagggcgtggcgctgcggacggatggcgatcgggtgcagctggagaacgtccgtctgctgggacgccaggatacgctctatgtcaataccagcaatcggcgcaatgaggcggtgaccgaccgtatcagccgggtatatgtcaaagacagctacgtagaaggcgatgtggactatgtttttggccgggcaaacgtggtttttgataatgtccattttcacaccgtctcaacgcgccgctcgcccgaagcttacgtgcttgcgccgaatacgttgccggataacccgtgtggatttttggtgatcaacagccgttttaccggcgatagcggctatcggggcggcttcaaggcgaagctgggccgcgcctgggatcagggggcgggcaagaccggctatttacccggaaaaaccgctaacggtcaggtgcttatcgccaacagtactatcgatcaaagctacgatcggctttccccctggggcgctgcggccaccacctcccggccgttccgcggcaatcccgccgcagagcgtcagcttgatgatgttgccttcaatcgcctgtgggaattcaataaccactggcagccctga

SEQ ID NO: 257257 - DNA, 771 bp, Klebsiella pneumoniae
atgaacggtttttattctcctcatgctggcgccaccgtgcgctggctcgatctacccggttacggcgaacccattgtgtttatccacggtctgggctgtgcctcaagctatgattatccgcgcgttgccgccgacccggcgctggccgggcggcgaatgatccttgtcgatttacccggtttcggctatagcgataaacctgaatccttcagctaccgtatcgccgatcaggccgcggtagtggtcgagctggtggatcgcttagcccttgaacgctgctatttatttggtcacagcatgggcggcagcgtcgcgattgaagcggccgggcgccttgccggacgggtgcgggcgttgctggtagccgagcccaatctctatcccgggggtggaatgtacagcaggtgcatcgccgggcaaacggaagaacgctttattgcccgcggctacgccgaaatgctgtccgccgaaacctcgccctgggccggctgcctgcaaaacagcgccccctgggcggtgtggcgcggcgcggccagcctggtgaagggcgctaatccctcctggttcgcgcgctttgtcaatttatcctgccccagagcgctgatatacggagcgttttcgctgcctgcccgggaggcgacggagagtgaagccgccgggatcccgctgctgatgataccgcaggccgggcattccatggcgtgggaaaacccctcagcgctggcgcgtacgctggccgatttttacgccggtattgaggcagaagcctga

SEQ ID NO: 257258 - DNA, 174 bp, Klebsiella pneumoniae
atgactttataccagaaaatgctggttttttatgcagttatgggctgtatctgtgcggtaataagctggttcttaaccaaagagagccgctggatccgcctgctggcggcgctgctgattggcgcgacctggccgttcagttttccaatggcgctgctggtctccctgttttga

SEQ ID NO: 257259 - DNA, 123 bp, Klebsiella pneumoniae
atgtccggaatcgccgttcttattgtggcgttaattttattaattgctgcaatttataatcttttttcctacgttcgcgagcgtcgccaggcgagtttaccgagcaaaaaaacaaaacgttag

SEQ ID NO: 257260 - DNA, 234 bp, Klebsiella pneumoniae
atgttcaggagaagcgtttcgacgttactgctggtgtgcgccctgttttccgggcacgtgctggcccgcaaacaagggcacgatttcttcccggtacagagtctcgaacagcagttacagcacgaagccgatagcgatgaactgcgcagccaggcggaagaagccgcctccgacctgcgcgaacatcaccgctggcagaatgcgcgaaaaccgaaaatgcatcactaccagtag

SEQ ID NO: 257261 - DNA, 426 bp, Klebsiella pneumoniae
atggttacgaccagaacagcgaaggaggtcgatgcgcccggcctgctcgtgctttttcaacagctcggctattcggtagatttagacaacctgcaatcctcattacgggaatataatccctgccgctacgcgttgattgccgaggtaaaagaacgcttatccggggtgattgtggtgaacctgattgaaccgatgcatgaaaaaggacgctgggggctaatttcggcgctggtgattgatgagtcgtgccggggcatgggagtggggcgaatattactggctgaagccgaacggatcgctgccgccagcggttgtagccaaattgaactctccagcagcgaacgacgagaacaggcgcataagttttatcagaacaacggctataaagaagtcagaaaacgctttttaaaatcgcttatctcatga

SEQ ID NO: 257262 - DNA, 981 bp, Klebsiella pneumoniae
atgcgcaaatattccctcagcgaacaggttcgcccgtttcactaccagacagacggcattaaacatagcgtaaatctgcggcaaattgtcgccttgcgagatttcgccgatgtgaaaaccggcgacgaaggcggctggatcgatgatgaggccgccctgagccacgacggcgagtgctggatttatgacgccaatagcgccgtttttgccggtgcgaaaatcgagggcaacgcgcgcttaaccggcgagtgcattatcagcatgggggcgatcgttagcgataatgcccgactggatagcgtacacgttagccactgtgcgcgattaagtgacaacgtcaccgcttcgcattcgcagattcgcggttattgtcacctggccgacaatgcgcgcatcctcccccactgtcatattatcgccgcccgaggcctgaccgccgacaatgataaaatcctgcgcatttatcagcgggcgacggtcagcgcatcgcgaatcgttcaccaagcgcaaatttacggcgacgcctttgtcgaacacgcgtttgttgagcatcgggcggaaatcttcgaccaggcgcggctggaaggcaacgatgagaacgacgtctgggtctgcgataacgccagggtatacgggaacgcgaagattatcgccggtcgtgaagaggacgccatccccaccctgcgctacagttcacaggtggctgagcacgcggtggtcgaaggaaattgcctgctgaagcatcgggtgatggtcggcgggcatgcgcacctgcgcggcgggccgatcctgcttgacgatagcgtgttaattgaaggccatgcggtcatttgcggcgatgtggtgattgaacatcaggtgacgatcggcgatcgggcgcgaattgaggccagcgcgggcgacgccatttatatccgcggggagaaagtgataaacggcgacgagcattttacccgcacgcccatcgtcggctttctttaa

SEQ ID NO: 257263 - DNA, 585 bp, Klebsiella pneumoniae
atgtctgccgaaaataccgcttcgatcgaacgcattcccgtcaccgcatcgctctctctgcgcgcggtggatgagcgctacgtgacggaactgcaccaattggtgatgaaaaaccagcgctggctccagcaatcgctgagctggcccgctgacgtgagtcacgaagacgaaacccgccgccacgtgcagggcaacgtgatgctgcaccagcgcggctacgccaaaatgtttttgctctttctgcaggaagagatcgtcggcgtgctgtcgtttaaccagattgagccgatcaataagaccgcctacatcggctactggattgatgagagccatcaggggcaggggctgctctctcaggcgctacaggcgctgatggactcttttgcccgcagcgggacggtccgacgcttcgtcattaaatgtcgggtagcaaaccagagaagcaatcaggtcgccctgcgtaacggtttcaccctcgaagggtgtctgaagcaggccgagtatctgaacggttcgtatgatgaccagaatatctacgggcgcattattgattgtcgctctgagcagttcccgggtcgcggctga

SEQ ID NO: 257264 - DNA, 279 bp, Klebsiella pneumoniae; identical to SEQ ID NO: 188386

SEQ ID NO: 257265 - DNA, 165 bp, Klebsiella pneumoniae; identical to SEQ ID NO: 188387

SEQ ID NO: 257266 - DNA, 792 bp, Klebsiella pneumoniae
atgtcagaacattttccatcgctacccgaggcggtactggccgcggcgaaccagctgggcgcctggctggcgcaggatgatttgccccgtgacccgcaaatagaggtggtggtgctggctggcaacgcggtgatcccgaccatcgatttcgcctgccggctggcggcgcggcacgcggttccgctgctgatcagcggcggtatcggtcactccacttcgtttttataccagtcggtgttgaacgacccgcgctaccgcgccattgcggtaagggatcgcgccgaagcgcatatcctggccgacatcgcccatcagttctgggctattccgcgcgaacacatcgtggtggaggatcgctccaccaactgcggagagaacgcgcactttacccggcaaatgcttgaggagaggggcattgcccatcgtacgggcgtggtgattcaggatccgaccatgcagcgcagaacgatggcgacgtttgcccgcgtctggcaagacgccccgcgagcgccgacgtggtacagcacgccggggtgcgcgccagtattgtgcaacgggcgtgacggtgtcacgttttgcggggaagatagtgggctgtggccggtggggcgctatctggcgctgatcctcggcgagccgccgcggctggcggataacccgcagggttacggcccgttgggcaagggttttatcgcccatgtggatattccgccgcacattgctcaggcgtggcagacgctgcgcgacgaccgcctgctctccgatgcgctaagcgcgcggcagctggcttag

SEQ ID NO: 257267 - DNA, 597 bp, Klebsiella pneumoniae
atgcccatttatcaaattgacggtatgacgccggtggtaccggatgagagctacgttcatcccaccgcggtgctgattggcgacgtgatcctcggcaaaggggtctacgttggccctaacgccagcctgcgcggcgattttggccgcatcgtggtgaaagatggcgccaacatccaggataactgcgtgatgcacggctttcccggccaggatacggtcgtggaagaagaggggcatatcggccacggcgcgattctgcacggctgcaccatcgggcgcaacgcgctggtaggcatgagcgcggtgatcatcgacggggccagcattggtgaaaacagcatcgtcggcgcttcggcctttgtcaaagccagcgccgaaatgcccgccaaccatctgattgtcggcagtccggcgaaagccattcgtacattaagcgaacaggagctggcctggaagaagcaggggacgcgggagtatcaggtgctggtggagcgctgcaaacagacgctgcatcaggtggaaccgctcaaagaagcagagccggacagaaagcggctggcgtttgatgagaatttacggccgaaatcttcatcctga

SEQ ID NO: 257268 - DNA, 912 bp, Klebsiella pneumoniae
atgcaattacgtaaactggccgcagcaatgctggtcatgggactgaccgccggtgcggcgcatgcagaagatgcggcatccaccgctggccagagcactctggataaaattgccaaaaacggcgttatcgtcgtcggtcaccgtgaatcatccgttccgttctcttactatgacaacaaacagcaggtcgtcggctactctcaggactactcgaacgcgatcgttgatgccattaagaagaagctgaacaaaccggatctgcagatcaaactgatcccggtcacctcacaaaaccgtattccgctgctgcaaaacggcacttatgatttcgaatgcggttccaccaccaacaaccttgaacgtcaaaaacaggcagcgttctccgacaccattttcgttgtcggtacccgtctgctggtgaaaaaaggcggcgcgattaaagatttcccggatctgaaggataaagccgtcgtcgtcacctccggcaccacctcggaaattctgctgcacaagctgaacgacgagaaaaaaatgaatatgcgcattatcagcgcaaaagatcacggtgactccttccgtactctggaaagcggtcgcgcggtggcctttatgatggatgacgctctgctggcgggtgaacgtgcgaaagcgaagaaaccggataactgggagattgtcggtaccgctcagtctcaggaagcctatggctgcatgctgcgcaaagacgatccgcagttcaaaacgctggtggacgacacggttgcccatgttcagacttccggtgaagccgaaaaatggttcgataagtggtttaaaaatcctattccgccaaagaatctgaatatgaactttgaactctctgacgaaatgaaagcgctgttcaaatcacctaacgacaaagctcttaactaa

SEQ ID NO: 257269 - DNA, 1671 bp, Klebsiella pneumoniae
atgaaatacaacaataacaaactgttaaacgcgctttttctttactttatttttactgcctccacgtttgcggatgttgccaacaacactcatcaaactgaacaggataaagctcgccagagcgcattaaagcccgagcagcaagattatcaatcatcgcgcactggctcgcataaatataaacttatttttccggtggaggagacctgccggtatatcagccacgtcaatatcatctcctcaaatgaaaaactcacgcaacgtctcctgcgcaatatcgccgtccaggcagaaaagaaatgtctgggtattaaaggcattcgccaactcgctacggcattacaaaatgaaatcatagtccaggggtatattacttcacttattgatataccttcacagtcactggaagatggcgttttagacattaccctcacctacggtaagataggcaatatgatatggtctgccgacagcggcgccacgtccagcctgtggaatgccatacctaccgccacgggtgagatcctcaaactaaccgaccttgagcaagggatggccaatctgcaacggctacccggttcgtcggcgcaaatgaaaatccagcccgggaaaaacaacgcggaaagcgatattcagataacgcgtaatctggctaaaaaatggcaggtaagcgcgtggatggatgatgccggcagccgggaaagcggtcgctatcagtccgggggcgcactctatctctatgatatggctacgcttaacgatattttctatgtctccgccggaggcgacgtcgaatttaatcagcataatgacggcaaccacaatagcagcctctattattcggttcctttcgggtactggtcgctaagcctttacggctcgcagagcgaatatcgtcagcaatttaaagccaactattcaaccaccgaatacaaaagcgaaaaccgttacgccagcgcgacgctctcgaggctgctttcccatacgcggcagcaaaaaaccaccctggacgcccgggttgcaaaaagcacgtctcgttactattttggcggcagcgaactcaaggttatgcgcaagcagaacccggtttgggaattgacccttcgccagcagcgctacttcaataaaaaaatcatcgatgccagcctgggcattcagcgcagcttgccctggcttagctccatgccaacccttgaggaaaaagcgggtctctacagcccactttcgcgggtgatacatgctgatattcaggcatttatgaaatttaatattaccggcgatcgtttcagctacgcgccgcatattaatgctcagtttagtcccgatattttatccacggataataaatttaatatcggcagccgctggacggtacggggttttgatggagaaaattcgctgtccggcaaccaaggctggtactggcgtaatgattttatctgggatatgccaaccccggatcggcaattatattttggtctggatattggccgcatcaccggcagtgaacaatatagacagggtaaagttatttccggcgccgtaagcgggctgcgcggccagctattttccacgcagtatgatttttttatcggtacgccgttcattaaacccgatcgttttcatagcgatccgctcaaccttggtttctcgctcaactggaggtattaa

SEQ ID NO: 257270 - DNA, 1794 bp, Klebsiella pneumoniae
atgttcaaatttaaatttacttatgtcgccctggcggcagcactcagttcgtcttacgtctatgccgatccgacggtctggacccactcatccggagctaccgtcgttgatattgaaacgcctaacgcagcgggcgtttctcacaatatgtaccgtgactttaatgtcagtaacaagggcatgattctcaacaatagttccagcgatcttactcacgacaccttaggcaatatcgctaaaaacaataatctggctaatggcggcgcttcggtgatcctcaatgaagtgacctcaaataaatccagctcgctcaatggatttatcgaagtcgccggccaaaaagccgatgttatcatcgctaacccaaacggaatctcctgctcaggctgtagctttattaacaccgatcgcgcggttttaaccaccggccaggtaaagctcaacaacagtggcgcgattgacagctataccatctccaaaggtcagatcactattgggcaaaacgggatgaatgcaacaaatagctatgccaccctgctggcaaatgctattgccattaacggtaccgtcagcactcccaacgcgacggtagccgcaggaaatttcacgcttgacaacaatacagggcaaatgacctctgcgggtaaaacgcctacggtactacagatgctgattccggaatacagcattgatattagcaatcttggcggaattaaagctaacagcatcagcatgattggcaacgacttaggtctcggcgtacgcaataaaggcgcgattgtcgccaatagcacactgacaatgtccagtaacggttcactgaccaacgaaggatcgatcaccagcaacggtatgcttacgcagatcgccgccgccgggaatatcaaaaacacgggtaacatctcgacgacaaacattaccattatcaatggattacaaacacttaccaacaacggaaccatatccagcagcaaacagttgatggtcagcgcctctggaaatatcgaaaacaacggcaccatcaaaagcagcacggcattaagcgtagcgactaacggcaacctgaaaacggcttacggctctaatcttctttctgataatcaactgctagtatcggctcttggcaatatcgataacggcggttcaacccgggcgaaaaataccagcattgcttttagcggtagctcgctcaaggtaaccggtaacattcacggaacggacaatcttgtgattcaatcggttaaagatagagcgctctcatccggtgaaatcagcaactcaggaaccttaaaagggggtaacgtcaccatccagacgaacggtacgctggcgttaaaccgtgatagcaaaatactcgccagcaatatgctgacaaccaacagcaactggctgaataacgacgggggaaccgttcgcggcgattctgcggtcttaaactttaataacaacgcgatgcaaaacagcggagaaattattggcgggaccatcaacatttccacccattcagatctggtaaataaatggcttatggaatcctttggcgatttcaccattgatacccacaataaaggcaacattatcaaccgcgacaaaatcgtagctggcggaacgatgaccttaaatgcaaaacaagtggttaacggcggctataaatgcgggttcctgaaactgttcacctgcgatgccggcttactgagcggcaataaactggtcctgaatacttctcagcgatatgcttctgaagtgggtggcgaacagtatttcaagttaacggaagttaacaccaccaaataa

SEQ ID NO: 257271 - DNA, 630 bp, Klebsiella pneumoniae
atgaagttatggttagttcgtcatggcgagaccgaggccaacgtcgcgggcctctatagcggacatgctcccacagccttaaccgaacgcggaatcagacaagcgcaaacgctgggaaagcggctgcaggccgttccttttcagcgcgtgttttgcagtgaacttgagcgcacccagcgtacggccagcctgctgcttggcgaccgtgacgtccctcgccagtcctttgccgagctcaatgaaatgttcttcggcgactgggaaatgcgccaccatcgcgatttacagcatgaagatgcggaaaactacgccgcgtggtgcgccgactggcagcatgcggcgcccactaacggtgaaggctttcaggcgttcgccgaacgcgtctccggcttcaccgccgccctccctcagcaccgggaacttagtcatctgctgatcgtcggccaccagggcgtgcttagcctgttaatcgctcaacttctgaatatgccggattcggcgatgtggcacttccccatcgagcacggcgcgtggagccttgtcgatctccagcccgatttcactaccctgcgcgtgctgaatagccgggcagtttggctggcggaagaagaattgcgcgcagaccattga

SEQ ID NO: 257272 - DNA, 564 bp, Klebsiella pneumoniae
atgtccttaattaataccaaaatcaaacctttcaaaaaccaggcgttcaaaaacggtgaattcatcgaagtaaccgagaaagataccgaaggccgctggagcgtcttcttcttctacccggctgacttcactttcgtttgcccgaccgaactgggcgacgtcgcagaccattacgaagaactgcagaagctgggcgtagacgtgtactccgtctctaccgacacccacttcacccacaaagcgtggcacagcagctctgaaaccatcgccaaaatcaaatacgcgatgatcggcgacccgactggcgccctgacccgtaacttcgacaacatgcgtgaagatgaaggtctggcagatcgcgccaccttcgttgttgacccgcagggtgttatccaggctatcgaagttaccgctgaaggtatcggccgcgacgcgtctgacctgctgcgcaaaatcaaagcagctcagtacgtagcttctcacccaggcgaagtttgcccggctaagtggaaagaaggcgaagcgactctggctccatccctggacctggtcggcaaaatctaa

SEQ ID NO: 257273 - DNA, 912 bp, Klebsiella pneumoniae
atggctaatctttacgatctcaagaaattcgatctgaacctactcgttatttttgaatgtatttaccagcacttaagcatcagtaaagcggcggaaacgctatttattaccccctctgccgtcagtcaatcactccagcgtctacgtaaccagctcaatgacccgctattcgttcgttcaggtaaagggataacgccgactacgttaggcgttaatctgcatcatcatctggaaaaaaatctaaatcaattagaacaaactatttatctgaccaatcgttctgaattaaagaaacgtcttgtggtttatgccccgcagctttttattacccctaaaacaaccaatttgcttcatatgttattaaatgattcaaacctgtacgttgagcatcacgatctgctggcatcaggagagtcggtagaaagcttgttatcctaccgtaaagccgacctggtattcagcactctgccgctgtcatcgcgagccaccgtctgtaaacgcatccaggaaatggacatttcgctggtgtgtaatgaaaaccatcccaggctggcatcactgaccacgacgaaggccatactgcaggaacgatttacttattacctgtctaacgatcagggaactaaatcctttcagaaccaggctgccggcattcttgctgatagaaaaatcgctttcagtagcgattcatacactgccatacttaatgttattcaacaaactgatttaatcggttttgtgccgacctgtattttagaatacattagctttcaaaataagtttaaaattatagaggcgccgtttaagatccccgccatcaacatttacatgatttacaaccgggtaaatatagacgatccaaagtttgcaaaatttatcgatgacttcgaaagaaataacgccatcgaataa

SEQ ID NO: 257274 - DNA, 630 bp, Klebsiella pneumoniae
atgcaacgacaattaatccaggctattgaacgctatctgcaatcgctggaagatgaagaggaaaagattactgcgcttaacgccttccgccagactctgcataaatatagccccttcaaatcacaaccggttgattgcgtactgtgggtcaaacaggaacacgttttgcctaatgattacaacccaaataaccttgcgccgccagaaaagcgcctgttgttcacctcgctggaaacggacggcttcacgcaacccgtggtggtgttgaaacaggagcatgagcgctacgccattatcgatggttttcatcgccatgagctggccagcggcaaagcggcgctgaaaaaacggctgaaaggctatctgcccatcgcctgcctggacaataacggcgctaagcgtgattctctgatggccgcgaccattcgccacaaccgggcgcgggggcggcatcagattcatgcgatgtcggaaattgtccaggaactgacgcatctcggctggtccgacgctaaaatcggcaaagagttaggtatggattcagacgaagtattgcgcctgaagcaaatcaacggtctggtggagatgttcggcgaccgtcaattttctcaggcgtggaccgttaaataa

SEQ ID NO: 257275 - DNA, 1161 bp, Klebsiella pneumoniae
atgagcaataagccactgattcctgagagtaaactcccctcactgggcacgaccatttttagccaaatgagcgccctggcccagcagcatcaggcgattaacctgtcgcaggggtttccggatttcgacggcccacgctatctgcaggagcgactggcatatcatgtggcgcagggggccaatcagtatgcgccgatgaccggcgtggccgcgctgcgcgaagccatcgtcgataaaaccgaagagctgtacggctaccgtcccgatgccaacagcgacgtgaccgtgaccgccggagcgacggaagcgctgtatgcggcgattaccgccctggtgcgcgccggcgacgaggttatctgctttgacccaagctacgatagctatgccccggcgattgagctgtcgggcggcgtgctgaagcgtattgccctccagccgccacattttcgcgttgactggcagcagttcgccgcgagcctcagcgacaaaacccgactggttatcctcaatacgccgcacaacccgtcagcaacggtgtggctgcgtgaagatttttccgcgctatggcaggcgattgccgatcgtgaaatctacgtgcttagcgatgaagtttatgaacatatctgctttgccgccgaaggccattccagcgtgctggcgcatccgcagctgcgcgaacgggcggtagcggtttcttcatttggcaaaacctttcatatgaccggctggaaggtcggctactgcgtggcgcctgccgccattagcgccgagctgcggaaagtgcatcagtatctgacttttgccgtcaatacgcccgcgcagctggcgattgccgatatgctgcgtcgcgaaccggagcattaccggcagcttccggcgttttaccgcgagcggcgggatctgtttattgatgcgctgcgttccagccgcctggaaattttgccctgcgaagggacctacttcctgctggcggactatagcgccgtctcggatctggatgatgtcagcttctgccgctggttaaccactgaaatcggcgtcgcggcgatcccgctgtcggtgttttgcgccgatccgttcccgcataagctgatacgcctgtgctttgccaaacagccagcaacgctgctggctgcggcggaacgtttgtgtcgtctgtag

SEQ ID NO: 257276 - DNA, 690 bp, Klebsiella pneumoniae
atgatccgcgctatcgtgaccgatattgaaggcaccaccagcgacattcgcttcgtccacaacgttctgttcccgtacgcccgcgaacgcctggccggtttcgttaccgctcagcagtttgtcgagccggtgaagaccattctcgataacctgcgcgaagagatcgcccagccggcggctggcgccgaagaacttattgctaccctcttcgcctttatggatgaagaccgcaaatcgaccgccctcaaggcgctgcagggcattatctggcgcgatggctacgttcatggcgactttaccggccacctgtatccggatgttctgccggcgctggaaaaatggaagtcacagggtattgatttatatgtatattcctcaggctccgttgctgcgcagaaattgttatttggctacagcgatgaaggtgatattactcatctgttcaacggctatttcgataccctggtaggcgccaagcgtgaagcgcagtcctaccgcaacattgctgagcagctgggacagcctcctgccgccatcctgttcctgtccgatattcatcaggagctggatgccgcggaagaggccggtttccgcaccctacagctggtgcgcggcgaccgcgacccggccagccaccatccgcaggttcagcgttttgacgatattcatccggagcagatcccagcatga

SEQ ID NO: 257277 - DNA, 543 bp, Klebsiella pneumoniae
atgagcgcattaaccattttttccgtgaaagacccgcaaaactcgctctggcacagcactgacgccgaagagatccagcagcagctcaacgccaaaggcgtccgttttgagcgctggcaggccgaccgtgatttaggcgcggcgccaaccgcagaaacggttattgccgcctatcagcatgcgattgataagctggtggcagagaaaggctatcagagctgggacgtgatcagcctgcgcgcggataatccgcaaaaagaggcgctgcgggaaaagtttctcaacgagcatacccacggggaagacgaagtgcgcttcttcgtcgagggagccggtctgttttgcctgcatattggcgatgaggtgttccaggtcctgtgtgagaagaacgacctgatttcggttcccgcgcatacgccgcactggtttgatatgggttctgagcccaacttcaccgccatccgcatcttcgacaacccggaaggctggattgcccagtttaccggggacgatatcgccagcgcatacccgcggctggcgtaa

SEQ ID NO: 257278 - DNA, 303 bp, Klebsiella pneumoniae
atgatcgttttttggtcgaaaagcgcagaaaaacagctcgccgcaatagattcccgctatcaggagagaatcaaagaaaagctacgcaccatggatgataaaaatgcgccggctccggacattaaaaaactcaagcagtcgggatccgaagatcattatcgattgcgtgtcggtgattatcgcatcatcttcacacagtttgaggggctatctgaaagctgctatgtcgtagcgataaaacgaagaacctcaacaacctatcttcacgaggaggcaacgccttatggcagtgcaactcattaa

SEQ ID NO: 257279 - DNA, 405 bp, Klebsiella pneumoniae
atggcagtgcaactcattaaggacgacgagggcaacccgcagtatgtggtgatcccctataacgaatacttccagatgcgtctgaaaatggcggaatacgatgatgaaaaagaggaagagtgggaagacgtcccctacgaatcggatgaatacgacgatattcccttacctgacagcgtctgcgacatcatggataaagagaaagtcagcctgcaggcggcctggcgcattttacgcggcctgtcgcagcaggaggtggccgataagctcggaattagccagtctgcggtttcccagctagaagctatcgactcccgcccgcaaaagcgcacccgcgaaaagctggcggcgatatacggctgtacgcaggagcagatcagcctgtatttgccgaaagagggttag

SEQ ID NO: 257280 - DNA, 2109 bp, Klebsiella pneumoniae
atgatgaataattcagggaaatacctcatctggacactgctctccgttatcggagcctttgccctgggctatatcgcgctaaaccggggtgaacagatcaacgcgctgtggattgtcgtcgcggcagtctgcgtctatctgatcgcctatcgcttctacggcctctatatcgccaaaaatgtactggcggtcgacccgacgcgcatgaccccggcggtgcgtcacaacgacggcctcgactatgttccaaccgacaagaaggtgctgttcggccaccattttgccgctattgccggcgcggggccgctggttggcccggtgctggcggcgcagatgggctacctgccgggaatgatctggatccttgcgggcgtggtgctggccggggcggtacaggacttcatggtgctgttcgtctccacccgtcgcgacggacgttcgctcggcgagctggtgaaagaggagatgggcccgaccgccggcgtgctggcgctggtggcctgctttatgatcatggtgattatcctcgcggtactggcgatgattgtggtgaaagcgctgacccacagcccgtgggggacttacaccgtcgccttcaccatcccgctggcgattttcatggggatctatattcgctatctgcgccccgggcgcattggcgaagtgtcggtgattggcctggtgatgctggtgtttgccattatttccggcggctgggtggcggaaagcccgacctgggcgccgtggtttgattataccggcgtgcagctcacctggattctggtgggctacggctttatcgccgccgtgctgccggtctggctgctgctggcgccgcgcgactacctctccaccttcctgaaaatcggcaccatcgtcggcctggcgatcggtatcctgatcatgcgtccaacgctgacgatgccggcgctgaccaaatttatcgatggcaccggcccggtgtggagcggcagcctgttcccgttcctgtttatcaccatcgcctgcggcgcggtttccggcttccatgccctgatcgcctccggcacgacgccgaagatgctggccaatgaaggccaggcctgctttatcggctacggcggcatgctgatggagtccttcgtggcgattatggcgctggtggcggcctgtattatcgacccgggcgtctatttcgcgatgaacagcccgatggcggtgctggctccggcgggcgtgaccgatgtggtggcgtcggcggcgcaggtggtgagcagctggggctttaccgtgacgccggatacccttaaccagatcgctcacgaagtgggagagcagtcgattatctcccgcgcgggcggcgcgccgacgctggcggtaggcatggcctacattctgcacggttcgctgggcggcctgatggatgtctccttctggtatcacttcgccattctgttcgaggcgctatttatcctgaccgcggtggatgccggtacgcgcgcggcgcgctttatgctgcaggatttgctgggggtgataagccccgggctgaagcaaaccagctcgctgccggcgaaccttctcgccacggcgctgtgcgtgctggcgtggggctacttcctgcatcagggcgtagttgacccgctcggcggcatcaacacgctgtggccgctgtttggtattgccaaccagatgctggcggggatggcgctgatgctgtgcgcggtggtactgtttaagatgaagcgccagcgctatgcatgggtcgcgctgctgccgacctcatggctgctgatttgtaccctgaccgcgggctggcagaagtcgttcagcaccgacaccaaagtcggcttcctggcgattgccaacaagttccaggcgatgatcgacagcggtaatattccgccgcagtacaccgagtcgcagctggcgcagctggtgtttaacaaccgtctggatgccgggctgaccatcttctttatggtggtggtcgtggtgctggcgctgttctcgattaagaccgcgctggcggcgctgaaagaggacaaaccgacggcgaaagagaccccgtaccaggcgatgcctgctgatgccgatagcctggtgacccaggcgaaacgcgctcactaa

SEQ ID NO: 257281 - DNA, 852 bp, Klebsiella pneumoniae
atggcaatcccaaaattacaggcttacgcgctgccggaagccagcgatatcccggcgaacaaagtgaactgggcatttgagccgtcccgcgccgcgctgttgattcacgatatgcaggagtatttcctcaacttctggggcgaaaacagcccgatgatggagagagtggtggccaacatcgccgccctgcgcgagttctgcaaacagaaccatattccggtcttttacaccgctcagccgaaagagcagagcgatgaagaccgcgcgctgctgaacgatatgtggggaccgggcctgacccgttcgccggaacagcagcaggtgattgccgcgctcgcgccggacgacagcgacaccgtactggtgaagtggcgctacagcgcgtttcatcgctcgccgctggaggagatgctgaaagaggcggggcgcgatcagctgatcatcaccggcgtttacgcccatatcggctgtatgaccactgcgactgacgcgtttatgcgcgatattaagccgttctttgtcgccgatgcgctggccgatttcagccgtgaagagcatctgatggcgctcaactacgtggcgggccgctccggtcgcgtggtgatgaccgaagagctgctgccgctgccggcgtcaaaagcggcgctgcgcgcgctggtgttgccgctgctggatgaaagcgacgagccgatggacgatgaaaacctgatcgattacggcctcgactcggtgcgtatgatggcgctcgccgcgcgctggcgtaaagtgtacggcgatatcgacttcgtggtgctggcgaaaaacccgactatcgacgcctggtgggcgctgctgtcccgcgaggtgaaataa

SEQ ID NO: 257282 - DNA, 1608 bp, Klebsiella pneumoniae
atgatcgaatttacccgctggccggaagcgttcgcggcccgctatcggcaaaaaggctactggcaggatctgccgttaactcaactgattacccgtcatgcggaaaacgacgccccggcgattatcgacggcgacaaaagctacagctaccgtgaattcaaccgcctggtggataacctcgcctcctcgctgcagcatcagggcctgaagcgcggcgaaacggcgctggtgcagctgggcaacgttgcggaattttatatcaccttcttcgcgctgctgcgtatcggcgttgcgccggtcaacgcgctgttcagccaccagcgtagcgagctgaacgcctacgccgcgcaaattgaacccgccttactgattgccgaccgcgcacatgcgctgtttgccgatgatgattttcttaacgcttttgttgcgcagcatccgtcggtacgcgtggcgctgctgctgaacgacgacggcgagcagagcctgacggcggccatcgagcgcgctgacgatagtttcgttgcgcatccgacacctgccgacgaagtggcttttttccagctttccggcggcagtaccgggacgccgaagctcatcccacgtacgcataacgactacgactacagcattcgccgcagcaacgagctgtgcggcgtaagcgccgaaacgcgctacctgaacgcgcttcccgccgcccacaactacgcgatgagctcgccgggttcattaggcgtgttcctcgccggcggcgtggtggtgttagcgcacgacccgagcgcgaccctctgcttcccgctgatagaaaagcaccagatcaacctgacctcgctggttccccccgcggtcagcctgtggctacaggagatccatgacgccggcagcaatgctcaactgcaatcgctgcggctgctgcaggtgggcggagcgcgcctctcagcgaccctcgccgcgcgcattccggcggaaattggctgccagctgcagcaggtcttcggcatggcggaggggctggtgaactatacccgcctcaacgacagccccgagcgcatcatcaacacccagggctgcccgatgtgcccggatgacgaagtgtgggtggccgatgccgatggtaatccgctgccgcgcggcgaagtcgggcgcctgatgacccgcgggccgtacaccttccgcgggtactacaagagcccgcagcataatgccgaagcctttgatgccgacggcttctactgttcgggcgatctgatttcgatcgatgaagagggctacatcaccgtgcaggggcgggaaaaagatcagatcaaccgcggcggcgagaagatcgcggcggaagagatcgaaaacctgctgctgcgtcatcctgcggcgatccacgcggcgctggtcagcatggaagacagcctgctgggtgagaagagctgtgcgtatctggtggtgaaggagcctctgcgcgcggtagcggtgcgccgcttcctgcgtgaacaaggggtcgcagaatttaaacttccggaccgcgtggagtgcgttgatgcgctgccgctgacgccggtgggcaaagtcgataaaaaacaattacgtcagtggctggctgaacgcaagctgggctga

SEQ ID NO: 257283 - DNA, 960 bp, Klebsiella pneumoniae
gtgaatttctccaccttttgccgccgtaccctcctcgccagcggcctggcgattttaggaatgagcccagcgctggcggcagactggccgcgccagataaccgacagccgcggaacccatacgctggaaagccagccgctgcgcattgtctccaccagcgtgacgctgaccggttcgctactggcgattgacgcgccggtggtggccagcggggccaccacgcccaacaaccgcgtcgccgatggccagggttttttgcggcaatggagcgaggtggcgaaagcgcgcaagctggcgcgcctctatatcggcgaaccgagcgctgaggccgtcgccgcgcaaatgccggatttgattctgattagcgccaccggcggcgattcggcgatgacgctctacgaccagctttccaccatcgccccgacgcttatcattaactacgatgataaaagctggcaggccctgctgacccaattggggaatatcaccggccatgaacagcaggccgctgaaagaatcgcggagtttgataaaaagctggcggcgctgaaagagcagatgaagctgccgccgcagccggtcaccgcgctggtctacaccgccgcggcccatagcgccaatatctggaccaaagaatccgctcagggacagctgctcgaacagctgggctttaccctcgccgacctgccaggcgggctgcatgccagccagagccagggaaaacggcatgatatcgtgcagctgggcggggaaaacttagccgccgggcttaacggtcagagcctgttcctgttcgccggcgaccaaaaagacgccgacgcgattaacgccaacccgctgctatcgcatctgcccgccgttgaagggaaacgcgtttatccgctggggacggaaaccttccgcctggattactacagcgccgtgctggtgctgcagcgtttagcagcgctctttgcctaa

SEQ ID NO: 257284 - DNA, 993 bp, Klebsiella pneumoniae
gtgattgcgccttctcgtcgcctgatattgagctgtttgctactgctggtcgccagcgtgctggtctccctgtgggggctgggtagcggcctggtgccgttaagcgttgagcaggttatctccgcgctgctcggcgatgcgccgcgtaacgtcaccctggtggtgaccgagtggcgtctgccgcgcgtgctgatggcgctgctgatcggcgccgcccttggcgtcagcggcgcgattttccagtcgttgacccgcaacccgctgggcagtccggacgtgatggggttcaacaccggggcctggagcggcgtgctggtggcgatggtgatgttcggccagaacctggcggccatcgccatggcggcaatggttggcggtattctcaccgctctggtggtctggctgctggcgtggcgcaacggcattgagacctttcgcctgattattatcggcatcggcgtgcgggccatgctggtggcgttcaatacctggctgctgctgcgcgcttcgctggaaaccgccctctccgccgggctgtggtatgccggttcgcttaacggtctgacctgggggaaaacctggccctccgcgccgctgattctcttgatgctggcgtgcggggcgctgctggcgcggcgtatgcggctgctggagatgggcgacgataccgcctgcgcgctgggcgtgcgggttgaacgctcgcggctgctgctgatgctggtcggggtggtgctgaccgccgccgctaccgccctcgccgggccgatttcctttatcgccctcgtggccccgcatatcgcgcggcgccttagcggtaccgcccgctgggggctggcccaggcggcgctgtgcggcgccctgctgctggcgctgtctgactactgcgcgcagcgtctgtttatgccctatcagttaccggtgggcgtggtgaccgtcagcattggcggcctctaccttatcgggttattaattcaggagtcccgcaaaaaatga

SEQ ID NO: 257285 - DNA, 795 bp, Klebsiella pneumoniae
atgaccgctgtcacctcccgtttgcgcggcgaccagttgaccctggcgtacggcaaaaaaaccatcgccgaatcgctgaacgtcaccattcccgacggccactttaccgccattattggccccaacggctgcggtaaatcgacgctgctgcgcaccctgagccgcctgatgacgcccgccagcggtcatgtttatctcgacggcgagcagatccagcgttacgccagtaaagaggtggcaaagcgcatcggcctgctggcgcagaacgccaccacgccgggggatataacggttcaggagctggtggcccgcgggcgctatccgcaccagccgctgtttacccgctggcgcaaagaggatgaagaggcggtcaccagggcgatgaaggccaccggcattaccgacctcgcgcggcaaagcgtcgataccctctccggcggccagcgccagcgggcgtggatcgccatggtgctggcccaggagacggcgattatgctgctcgatgagcctaccacctggctggatatcagccatcagatcgatctgcttgagctgctaagcgagctgaatcagcagaagggctatacgctggcggcggtgctgcacgatctgaaccaggcctgccgctacgcgacccatttgattgccctgcgcgagggtaaaatcgtcgccgaaggcgcgccgaaggagatcgtcagcgcggagctcattgaaaagatttacggtctgcgctgtacgatcatagaggatccggtggcgcatacgccgctggtggtgccgctgggtcgccgatag

SEQ ID NO: 257286 - DNA, 744 bp, Klebsiella pneumoniae
  misc_feature (625)..(634): n is a, c, g, or t
atgaccagtaaccaacgaattttacacccttttactttaccgaacggcaccgagctaaaaaaccgcctgttgatggcgccgatgaccacctgcaccggttattttgacggtaccgtgaccagtgaactggtggagtactaccgcgctcgcgccggcagcatcggcgccattatcgttgaatgctgctttatcgatgattacggtctggcgttccccggcgctatcggtatcgataatgatgagaaagtggccggtctggcgaaaatcgccgcggcgatcaaggccgaaggctcaaaagcgattctgcagatctaccacggcggccggatggtcgacccgcagcttatcggcggacgccagccggtcgccccgagcgcaattgccgcgccgcgcgatggcgcagccacgccgcgtgctctgagcggggaagaagttgaaggtatgatcgcgaagtttggcgaaggcgtacgccgcgccattcaggccggttttgacggcgtcgaaattcacggcgcgaacacctatctgatccagcagttttattcaccaaactctaaccagcgcgacgacgagtggggcggcagccgcgataatcgcgccaggttcccgctggcggtgctcgacnnnnnnnnnngtgctcgacatcacccacaaaatggcccgccagtacgccgacgacgcctttattatcggctaccgtttctccccggaagagatggaagtccccggcatccgttttgctga

SEQ ID NO: 257287 - DNA, 2082 bp, Klebsiella pneumoniae
atggaagtccccggcatccgttttgctgacaccatgtacctgctggaaaaactggccgcccgcggcgtggactatctccacttctcggttggcgccacgctgcgcccctctatcgtggataccagcgatcccacgccgctgattgaaaaatactgcgccatgcgctctgaaaccctggcgcaagtgccggtgatgggcgtgggcggcgtggttaacgcggccgatgccgggcaggggctggatcacggctacgacctgatggcggtgggccgcgcctgtatcgcgtatcctgactggaccgcgcgcattgccgccggcgaagagctggaactatttattgacagcacccagcgcgaagcgctgaacattccggaaccgctgtggcgcttctcgctggtggaggcgatgatccgcgacatgagcatgggcgacgccaaattcaaaccggggatgtttgtcgaaaccgttcaggacgacgccaacgaactggtgatcaacgtcagcctggaaaacgaccgcatcgccgatatcgccctggcggcgagcccggtacagaccatcgagttcaccaccagctttgaagagatccgcgagcggatcctcagcgccaacaccccgcatgtggatgcgatttccggcgcgaccagccagagcgaagcggtgaaaaaggcggtttccaaagcgatgctgaagtccagtaaagcgctggccgccgaagagggcgcgggcgatgcggcgccgaaaagctacgatgtggtggtggtcggcagcggcggagccggtttggcggcggcgatccaggcgcacgatgaaggcgcgagcgttctgatcgttgaaaaaatgccgaccatcggcggcaacaccatcaaagcctctgccgggatgaatgccgcagaaacccgcttccagcgcgtaaaaggcatcgaggacagcaaagagctgttctaccaggaaacgctgaaaggcggcaaaaacaaaaacgatccgcagctgctgcgccgcttcgtggagaatgcgccggaagccattgagtggctggcgcgtcgcggcattatgcttaacgatatcaccaccaccggcgggatgagcatcgaccgtacccaccgtccgcgcgacgggtcggcggtcggcggctacctgatcagcggcctggtgcgtaatatcaccaaacgcggtatcgatgtcctgctggatacgtcggtggaagagatcctgatgagcggcgatgaggtcagcggcgtgcgcctgctcaccgatgaaaacgaatcggttgtggtacagacgaagagcattgtggtggccaccggcggcttcagcgccaacagcgcgatggtggtgaaataccgcccggatctggcgggttttgtgaccaccaaccataaaggggccaccggcggcggtatcgcgctgcttgaacgcatcggcgcgggcaccgtggatatgggcgaaatccagatccacccgaccgtcgagcagcaaacctcgtatctgatttccgaatcgattcgcggcggcggggcgattctggtgaacccgcagggcaaccgcttcttcaacgaaatggagacccgcgataaggtctccgccgcgattatcgcgctgcctgaacacttcgcgtatatcgtctttgacgagcacgtgcgggcgaaaaacaaagccgccgacgagtacatcgccaaaggtttcgtcaccagcgccagctcgccgcgccagctggcggagaaactggggatggattaccatgctttcctcaatacgctggagcgctacaacggcttcgttgaaaaacagcatgacgatgactttggccgtaccaccgcgctgcgcgcgccgatcaatgaaggcccttaccacgcgattcgtatcgccccgggggttcaccacacgatgggcggcgtgaccgttaacaccgataccgcggtgctaaacgccggtcatcaggtgattgcgggcgcttttgccgcgggcgaagtggtgggcggcattcacggcggtaaccgcatcggcggcaacgcggtggccgatatcattatcttcgggaccctcgcgggccatcaggcggcgaaacgcgccagaagttaa

SEQ ID NO: 257288 - DNA, 897 bp, Klebsiella pneumoniae
atgcggggaagtgattttgcggaattaaaagccttcgcgatggtcgttgagcaaggcagctttacccgggcggcggcgcacctcggcgttacgacctccaccttaagcgcaaccatccgccgacttgaggagcgcatcggcgtacgtttattacaccgaaccacgcgcagcgtcgcgccgagcgaggccggtaaacgcatgatgcagcggctggcccctgcgctggcggcgctggaagacgcggtgaccgatgccctgacggccagcgcgcctgcgggccgcctgcgcctcaatgtttcgcgcatcgccgcgattcattatctggcgccggtactgggcggctttatgcagcgctaccccaaaattgagctggatatcgtcactgatgacgctttggtcgatatcgtttcggcaggtttcgatgccggaattcgtctcggtgaaaagctccatcaggatatggttgccgtcaggctgagcggtgacctcgaaatgaaagtcgtcgcctcgccgcgctacctggcgcaggcgccgcagcttcataaaccgcaggatttgctgcagcatccctgcctgacctatcgaaggccaagcgacgccagcgtgtatcgctgggagtttcagcgcgacggcgaaagctgcgagattgcggtcaaaggccccatcgtggtcgatgagccggccatgctgacgccattggcgctcgcaggcgcaggcgttgcgtatcagtttgcccatcaggttgatccctggctggcgacgggccagctggttcagcgattaaaagagtggaccccggctttccccggtttttacgtttactaccccagccgtaggcaaatggcatcgccgctgcgggcgtttatcgactatctgctggccgtcggcggcagatag

SEQ ID NO: 257289 - DNA, 741 bp, Klebsiella pneumoniae
atggcgagatttagcgcaaaaagagttcttatcaccggcgcgaccagcgggatcgggcttgccggagcacagcgtatcgatcgcgaaggcggttgggtgattgctaccgggcgcgatccccggcggctggcgctgctacgccgacagctctcggatcgggccagggtcatcgacaacgatgccagcgatcccctgaccggcgcggcgctggccaaggaaattcacgcctccggcgggcttgatggtctgtggctcaatgctggatatgccgccgttggggagctatcgcagattgatgccgcggcctttgatcacatgatggcgaccaacgtgcgcgggccggttcttcagatggcggcgctcgccgggaagcttaatccgggggcctcggtggtggtgacggcatccacttccgcttatgagggggccgcggcggcgagcctctattcggcgacaaaaggggcgctgatttcattaacccgctgctgggcatcggcgttaggggaaaaaaatatccgcgtcaacgccctggttcccggtccgattgataccgattttcgtcattttatgcgcgatgaggtgcgccgcgagtttgaagcctcggtggtcagccgcctggcgcttcaccgtcaggggacggcggctgaagcggctgaagtggcgctgtttctgctttccgacgcggcgtcattcgtcagcggaggccagtacgccgttgatggcgggctgaccctgcgctaa

SEQ ID NO: 257290 - DNA, 621 bp, Klebsiella pneumoniae
atgtcattaacgccgcgtcctcacgatttaatctggttgaataatgccgccgcgctggaggcgattgaggagccctgggtcgcacagcactggcgtattagcctgccggtggtggtacgacgcgacgttgacgccgacgcccgcgttccggtgggcgtacggggtatgaaacgcgagcagcgggccgcaggctgggtacagagggaaaatatcgtccgtaccgtcagcccggaagccctcgccgaccgccagctgctcctgcgctcgccgtttgtctctcagccgccggttcaggcggcgatatcactgaccttacatccctggccgtggcgctggggcattaccggcggtaccggctacgcgctgaccaccgaaattcccgtgctgcacgccgccagcgatctcgatctgctgatccgcgcgccgctgccgcttccccgcgaggcgctgctcgcctggcagtcccgcgtcgcgcagctgccgtgccgggcggatacccaggtcgaaacgcccgtcggggcgtttgcgctaaatgagtggctgcgcgatgaccgcgtcctgctgaaaacgtcccgcggcgcgcgcctgaccgcgtcgccgtggaacagggaggaagcatga

SEQ ID NO: 257291 - DNA, 219 bp, Klebsiella pneumoniae
ttgggattgcctaatctgcccgcgatccgcgcgggactgctggccttgcccttctctaccacgatagccaccggcgaaggctactattttgtctggccgaaaaatacgctcagcccgcagccgatcgccctattgcagcgttttttaaaccagcatattcccggtccgctctccgctgacgttatccgccagggcgcggccccggattacagtacgtga

SEQ ID NO: 257292 - DNA, 345 bp, Klebsiella pneumoniae; identical to SEQ ID NO: 191024

SEQ ID NO: 257293 - DNA, 609 bp, Klebsiella pneumoniae
atgatgcaagcgcaagaccgtgacgccgtcgcactcagcgcccgtacgctgggcgcgctgttttcttttgctccggatagcgagcaggtggctccgctaatcgcggccctgcgcgacggcagctggcagtgccagtggccctggccggtcgcggacggcctggcggcacagttcgctatcgcaagcgatgaaccgctggcggaagcctggcagcggctgtttatcggcccgtgggcgctgcccgcgccgccgtggggctccgtctggctggacaaagaaagcgtgctgttcggcgactcgacgctggcgctgcgcgagtggatgcgggcaaccggcatcagcctgtctgagcgccgagccgagccggaagaccacttcgggacgctgctgctgctggcggcctggctttgtgaatccgctcaggatgaggcatttaaccagctgctggcctggcatcttctcccgtggtcggggcgctttctgagcgtgtttatcgccggggcggaaaatcctttttatcaggctctgggccagctggcgcaagagacgctggcgcgctggcaggcgcagctcccctgcgcggtcgccgataaaccgctctaccgttaa

SEQ ID NO: 257294 - DNA, 168 bp, Klebsiella pneumoniae
atgtctaaccaggaacataccggcggccttagccgtcgaacgctaattaaatcatccgccctcggctcgctggctctcgcggccggcggtttatccctgcctttcagcctgcgccgcgccgccgccgctgtacaagaagcgacccacggcgaggaacggatcgtctga

SEQ ID NO: 257295 - DNA, 1464 bp, Klebsiella pneumoniae
atggaaaatatgcttttaacagctaacgccacgctgccggcatacgatcgcaaccgccttattccgcgtatcgttcatttgggctttggcgcatttcaccgcgctcaccaggccgtatacgccgatattctggcgacagaacacggcagcgactggggctataccgaagtgaacctgatcggcggcgagcagcagatcgccgatctccagaagcaggatttactttataccgtcgctgaaatgtcagcggatgcctggaccgcccgcgtggttggcgtggtcaagcaggcgatgcacgcccaggtcgatggtctggagagcgtgctggcaaaaatgtgcgagccgcaggtcgcgattgtgtcattgaccattaccgaaaaaggctactgccactctccggccagcggtgagctgcagttggatcacccgctgattgcggccgatttacaaaatccccggcaaccgaaatccgcgcccggcgtcgtagtcgaagccctggctcgacgcaaagcggcagggctgccggccttcagcgtgatgtcctgcgacaatatgccggaaaatggccacgtcatgcgtaatgtcatctgcgcctatgctcgcgccgttgatgctgatttggccgaatggattacgcgcaacgtcacgttcccctcgactatggttgaccgtatcgttccggcagtgactgccgatacgctggataaaattgcacagctcaccggcgtgcgtgacccggcagcagtcgcctgcgagccgtttcgccagtgggtcatcgaagacaactttgtcgccgggcgtccgcagtgggaaaaagccggcgccgagctggtgtcggacgtgctgccgtttgaagagatgaagctgcgcatgcttaacggcagccactcttttctggcttatctggggtatctggctggctatcagcatattaatgattgcatgcaggacgcaaactatcgccgcgccgcgcatacgctgatgctggctgaacaggcgccgacgctgagcgtgaagggtgtggatttggcacgctatgccgggcttctgatcgagcgctatagcaatccggcgctcaaacatcgtacctggcagatcgccatggacggcagtcagaaactgccgcagcggatgctggattcgattcgctggcacctggcggatggcggcgactttcctctgctggcgatgggcgtcgcgggctggatgcgctatgtgagcggggtggatgaccaggggcaggcgattgaaatctccgatcctatgctgccggtgattacgcaaaccgttcagaacagcgaagacggcgaagaacgcgtacgggcgctgctgggtattgaggctatttttggtttgagcctgcccaaggagagccgtttcgtcaacgcggtggttcgcgcttatttatcgctgcaagcgcacggcgcaaaagctaccgtagcggcctgggctcaggcaaattaa

SEQ ID NO: 257296 - DNA, 612 bp, Klebsiella pneumoniae
atgactatatttaaaagcttactctcttttcttggtgcggcttgcgccagcgcatttgtggtacttagcctgtgggtcgatatatacttttgggattataatatttcggaactatcactgaccgaaattgtgcaggagtccgttttaacagccatcgtatttattcatttcctgcttgccaggcggtataaagccatgcgctactgtaatattctggttggcggttttttccttgccatgctaattcgcgaactggacgccctttttgatctcattgctcacggtagctgggtatggtttgcgctgattgcagctcttttagccttaattcatccagttattcattatcgtcagaccctgcaccagctagcacaatatactcgtaccccctcgtacggcctattaatcagcggcctgttggctattctggtcttctcccgactcttcggcatgcaagccttatggctggccattctcgatggcggttacgttcgggtggtaaaaaacgtcgtagaggaaggctgcgaatcattcggttatatgctttgtctcaccgcctcgattggctatttttgcacttttcgcgaaacgttagcgcagaaatcatattga

SEQ ID NO: 257297 - DNA, 312 bp, Klebsiella pneumoniae
atgattgtcagaacctggcacggctgtgttcccgtggcgtttggcgatgcgtttgcgcttcatctgcaggcgacaggcgtgcaacattctcgggacatcaccggcaacgcgggggcgtttgtcaggcgggaaacgcagggggagtgggaacatttttttctggccacgtactggaataatctggatgccgtcatcgcctttgccggtgaagactatcacgtggcggtaacctatgcggatgatgagcggtatcagctgctctccgacccgtacgtttttcagtttgaggttgctgacgttgtggcgatttga

SEQ ID NO: 257298 - DNA, 255 bp, Klebsiella pneumoniae
atgaactataagaatgtactgaagaacgcgatatggcttgctcccctggcgatcctgagtctgcaaacgcctgcgtgggccgcagatgccagcaaaacggcgacctgtcggacggcgccgccagcggtggacaaagacggtgtgccgttaccgcccgttgtgggcaaagagggcgctcagccggtctctgctaaagacaagtccggccacagcggctcaacggccaactgccagcccaaggccatcgacaattaa

SEQ ID NO: 257299 - DNA, 435 bp, Klebsiella pneumoniae
atgatgatattaaaaggaaaagagcacgttgactcggttgactggctgacggtggcggagaccatcgccgccgcagggcttaatcagcgggacgttgcgctggttgaacgcgcgtttcgtcatagtaccttttgctggttcggctatgaaaacggtcagctcattgccgttgcccgggcaattagcgacctgacctggtgcagctatctggcggatgtcgcggtgcacccgcgctgccagggtaagggatacggccagcaactgatgcgggcggtcagcgatgagctgcggccgtacggcaaaacctttatctactcggtggtggataaaatagatttctatcgccgtttcggttttgaaatgctggcgacgggcatggtttgcgccagcgaagagacgatagcgcgtatgcgggaacagggatttgttggctag

SEQ ID NO: 257300 - DNA, 1218 bp, Klebsiella pneumoniae
atgctgaccactctgatttacagaagtcagatgcatttaacacaagaaaccgatctcatactgctggttgaaaaagcgaatgctgagaacgcagcacgcgggattacgggcatacttcttttaaaagataatgtttaccttcagatacttgagggcgatgagtgcgtgcttgagcagctattcagcaagatcaagcaagacgaacgccactctcaggttgttgagctgatgcgtgattacgcgccgcgccggcgctttgaaaacgtagggatgatgttttttgacctgaataaactgcaaaccgctgacgtcctgagaaaggtgcgtcagcttagccagctgaaaggttatctttccaccgaagagcgcgtttataaatttatccatacttttatcagtcaaaaaagcgttgccgcgccgtcaccctttttacggcctgacaaatggtcgcttcattcgcgtaaacatacatttcatgtgccgcaagaatcgttttttgccggtcaatgctgtcagtttgctttccagcccattatcgagccgttggccgggaatatcacttcgcttgaagcgcttattcgtgataaagagggcggcagtcctgctaatttctttgcctcgattccgcaagagcaacgttatgaagttgatctcaaagcgaaatcagttgcctttgccctggcgaaagaaatcaatattggcgaccataaaatatccattaatatccttccgatgtcgctggttgttattcctgacgccattgaatacctgttgcaggaaataaaaaaacaggggctggtacccgaacaggtgatcgtggaggtgacggaagatgaaatgatctccggttttagccagttcagcagcgcgataaaaaaactgcgcgtctctggtatggggctggcaattgatgattttggcgccggttatgctggactctcgttgttgacaaaaattcagcctgataaagttaaaatcgatcgcgagattattaccgacatccatcagagcggccctaaacaggcggtggtaagatcgatcatcaactgctgccgtgaacttgagattgccgtggttgctgaaggcatagagcggatagaggagtggtgctggctcgaatctgcgggtatcaaacgtttccagggctttttatttgccatgccgaaagtcaacggcgtcggtgacatacgctggcctgtgaaaaaaagtgaagtctga

SEQ ID NO: 257301 - DNA, 312 bp, Klebsiella pneumoniae
atgaataatgtcattctcagcataattgctaaaatttctgccatggatgccgaaagtaagcagcttgctgcccaggtcgaggcgcagtctttgctcattagcgctctgatgcttgctattggcaaggaaggcggcgtcgcggaattagttagcagcgtaacgaaagcgataaattcagtactggaatcatctgaagacgttctgaagacggacgcagaactgcttctgaccaagtttcaggaacaaatagcgctcacgcagttgataaacacccacgaagatgaaatcagtcatgacgtgctcgatgattaa

SEQ ID NO: 257302 - DNA, 978 bp, Klebsiella pneumoniae
atgaatcaacaatttacctatactattaaacgcactttgtttgatgaaaactataacccctctgaaaatacgcgtattacaaccaactttgctaatttagccagaggggaaaatcgccgggagaatctgcgcaacacgttagccatgataaacaaccgtttcaacaacctggcgcattgggataatcccaaaggcgatcgctacgcggttgagctggaaattatttcagccgaaatgaagatcaacgccaccggcgatacttttccggtgattgaaatattgcaaaccggcattattgacaaaaagacggataaacgcattgacggtattgtcggcaataatttctcctcgtacgttcgcgattacgactttagcgtagtgttgttagaacataataaagggcgagcaggttttagcattcccgaggggtttggcgatttacacggcaatatatttaaagatttcgtcaattcagcgcagtacaagaccaatttcaaaaaaacaccggtcatctgccttagcgtctccagcaaagacacctatcaccagaccggaaatcaacacccggtgttgggcctcgaataccggcctaccgcctcatcgttgactgagcaatattttggcaaaatgggcctgcaggttcgttattttatgccgaaaaacagcgtcgcgcctctggcattttatttttcgggggatttgctgagcgattatacgagtcttgagctgattagcaccatcagcacgatggagactttccagaagatataccgcccggagatttacaatgcgaactctgctgcaggactctgctaccagcccgatctgcatcatcaggaccattcgttaacaaaaattgtttacgaccgtgaagagcgcagccagctggcggtagagcaggggaagtataccgaagagcattttattaaaccgtataaaaatattctgcagcaatggtctgctcattacgctctttaa

SEQ ID NO: 257303 - DNA, 279 bp, Klebsiella pneumoniae
atgcacatcaataccaaaatgaggattgcggcccttttataccttctggccgcgtacgccgttgccctgccggcgcttgcgctgtttacagatctggtgataaacggtggcattattgatatgtggaaaagcgcgtattcatttgtcgacctgcttgtccggcgtaaaacgctttatctgcagtttgccgggctgggcgctattctgggctttatctactggctgtttttctttagaaaataccgccattacgatccactggataaatattttaagtaa

SEQ ID NO: 257304 - DNA, 489 bp, Klebsiella pneumoniae
atgggtgcggatcaggtagttacgttatttaagtataagcaatggatagacgcagaaacgttacaagcaataaaacgtgttgatacctcggtttatgcccataaacaccatcttatgctcaggctcatgaatcatatttatgtggtggatatgattttcagggctaatattagcgggcaaaaacacggttacacagcgcttaatacgccagagacaccgtctgctgatgaacttttgtcaaagatgaccgaatgtacagactggaatattcaatatgtgagcaccatgagcgccgttgatttttcgcatagtatagaattccgctttgtcgatggcgggaagggtgaaatgaaagcactggatatgctcaatcatgtactttttcatggtacgtatcatcgcggcgctgtcggttggttgctttctgaatgtggcgtgaccccgcctaaggatgtattaaccgtgtttctcagagatcataatcactag

SEQ ID NO: 257305 - DNA, 1677 bp, Klebsiella pneumoniae
atgtcgtgtgtgtcatttcccaggtatgggattctgctgggcagcctcactgcaacagccctcccggcagcgcccctgagtcctgcggaccagaatgccattgagcaacaacaaaaggcattgctggaacagacgcaacagcagcgcgatatgctccgccattccacatccgcgccctctctcccggaagcacccccttcagaacccgacggtcagtgttttcagctccggtatatccggctggagaacgtcacagtgctcccgcgctctgccgtgcgaaaactgacgaccatcccggtacagagctgtatgacgctcccggatatccgggagcgggtgcgggatgtcacccaggactacctttcccggggattcatcacttcacgcgcctggctaccggaacaggatatttccggaggaacgctggtcattgccgtcacagaagggaaggtggaagccgtcacgctggaggggcatgaggaaaatgccatcaggatggcttttccccgggcggagggccgggtactcaatctccgtgacgctgaacagggtctggagcagcttaaccgtctgaactcacgtccactgaccgtagatattctgccggggagccgggaagggttttcccggatagtgctggtaccggtcagccagcgttttcccgtcagtcttgatgtgggcgcagataacagcgggcagaaaagtaccggtagcggacagctgaatgcccgcctgacggcagacaatgtgatgagactggctgaccagtggacgctcgccgcaggcagggacagtgagtttcaccatgacagacgcagccgtaatattcaggccggtgtttcggttccttacgggtactggttgttcagcgcgcaatatgcgtggtctgatttttatcagacgctttctgttggtggagccccgcagcactggcgctatgaaggcaccgtgcagtcacagcggctggccgccagccggacgctactgcgtgacggtaagcaacgtctggtgctggatgtcgccttatcccgccgggaaaccgaaaaccggctgggcggcgtacgtcttgacgtcagcagcccgacgctcagcagcgtgactgccggactgagctacagccggagtatcggtggaggctatctcacgctgggtccgtccctttctcacggcttcccgttcgccggcgcgacacgggatgacccggcgcatcccggcctgccccgcagcgaattccggcgcttcagcgcaagcgcaagctggttttaccccatgacatcctctgtgtactggctgacctcagcctgggggcagaccacgcctgacagactttatgccagtgagcaactgtccgtcggagggcagtattcggtcagggggtttaaagagcagtatctcagcggtaaccgcggcagctactggcgcaatgaactgacatggcaatggatgacggtgccgggcgtgggggcattctcagcaacgggtgcactggataccgggcatgtcatgcgccaggaagggataaccgacggcggaacgctgacaggggcttccgtcggactggagctggctggccgctggttcagccagtccctgacgctgggggtgccgctgtcgtaccccgacagactcactccggataaacacgtggtttactggcaggccaccgtttcactttaa

SEQ ID NO: 257306 - DNA, 5118 bp, Klebsiella pneumoniae
atggataaactcgcacatccgctggcccgtggggccagctggctgctgatatacctcaccgccgttcagcctctgcatcccgctattgccgcgggtatcactgccgcgaatggcaacactcaggtcgcgatgaaacccggtaatgtcccggtggtgaatatcgccacgcccaacgcggccggtatatcgcacaacacctaccaggattttaacgtgggaacgccgggcgcggtgctgaataacgccacgcagggcgggaaaacacagctcggcgtcaccatcgacaacggcaatgccagactcaaaggtaaaccggccgaactgattattaacgaggtgaccagcggcaaccgttctgaactgaaaggcaggctggaagtcttcggcaataaaaccggcgtgatgattgccaacccgaatggcatcacctgtgacggatgtggtttcatcaataccccgtcagtcactctgacgacgggcaaaccgcagtttgataaacaaggggcgctcgatgcccttgaagtcaaaaaaggtgcggtgattatcggcggtaacggcctggatggggccggtgctgaatatgttgatgtcatcagccgggccactgaactgaacggcaaaattaacgcgaaaaccctcaccttgactcagggcgcgaaccgggtcagctttaaggacggcacggtaaaacccattgctggtgagggtgcaaagcctcagcttgctgtcgatacaaaggcgcttggcggcatgtatgccggtaaaatccgcctggtcgccaccgaagccggggtcggcgtcaacctgagcaatgtgacatccactcagcgggacatttccctgacgacggccggaaaaatcaccctcagtaacgttaaggcgcagactgacctgaacgtcagcgggcgggatatcgtcacgccagccgggttcagcgtgcgcgctgaacgtgatatgacgctggcggcgaccacagtggataaccggagcagcaccactgcccacggggatatgcgggtatttgcgtcaacggtgcgcaacacgggaaacggtgcgtcattacacagccacaaaaatctgtgggtacagaaggatgcccagggtaacaaagccacacttgtggagaatcggtcggctcgcattcagaccaatacgggcgacctgataatacgttcagaaacgctaaataacattcgtgatgtactgacttacgaatggaaagatatcagtcccaattcaacagcatttgttaatcttccacaataccgtactatcagtgctatcaggcatgcttcaggaaacattaccctggctgatgtgatttactgggatgcgacattaggcggcaaatggtttggtactgctaattttaaccagtcggacctggtcaataccgccagaaaagaatatcggcgaaccgctacatcgtccgcagcctccattcaggctggcagaaatgcttatctcaataccactcatctgactaataacgaaagtcttataaaagcaaatcaagatctgattctcactggaaaaacgtttaatcatatcagtggaatcaccggtaccagggatacctggtcctcctataatacggcgtatcgtccatctaatactgcgtcacctgcggttcctgaaagtcagttaactattgccgggaaacaaaataaaacttatacgttccagaaaacaggcgagatcaatagctggaaaaatccgacgatctcgcccgcaatactctctgctggtgggaacctggtggcggatttttctgtacgtattgagagtaaagagccctacgtcacgaatgttcaatattcggatgtgatggcccggccggacacgatgacggcaaaaaatatcctgctgcgcgccggaagcattgttaccaccgatgtgatgaaggcctcaggggatattaccttacagtcagaccgtggcacaaaaatggcgctggcgctgatgacggccggaaaagatatctcggttctggcgggcgtaagtgttgaatcctggcagagtgagctcaaaggacagaacattaccctggtcagtcgcggcggtgacgtcacctctcataccagcgagtggcccaacttttttcattctgacgggctacgctggctgggaagcctggaggcttcacgtgatttatcactcaccgcaggtggcaatattctgctcaggaacacgcgttttcctgttctgagccagaatatttctctggttgcgaacggggatatcacgtttgataaaaatgacgccatgctgtggcacgggcgacctggcacagtcctgacctacgcccgcaagcaggaactgtttaaccggatgttgcccggagagccgctgcgtgcttcgggtgatatcaccctgagcggccggcgtctgtctctgtatggtgcagggctcgaagccggcgggaatatcagcctctcatcggctgccaatactgacctgaacatgcggagcctgagtgacctctacagtgagttttttccggacagccggatacctgaattacgcagcaacctgaaagcaggaagtaatctgctcatcagctcagcggcagatatcggcgtgcagggcgctcatattgtcgccgggaaaaccgcgacgctgcaggcagggaaacttctctggctgggcgcatacggatatggcgtaacggacagcagtaatgacaataacagggatgaactcaacgtactgacccgcctgcacggtgcgaaaagcctgactctggcggcaaacgggggtatccaggctgacggcagtacgctgacctctgacggtaacatcacgctgacatccggcgggaatatgcagtttcagtccgcccgggggacggtataccgtgagtccgggaacagctggacggaaagcgttagccagacaggcgtcacgctgaattcaggtggagcactgacggttatctcgggtggcagcattctttttcaggcatcgcgtttactggcaaaaggggcgatggatgttgcagcaaaaggtggctggctctatgcccaggcgatggaagagtccagtcattacgaacgtcaaaccacgaagagaaagtggtggggtaagaaaaccaccgtcaaacaaacgaaacacaccaccaccaaccgggtgacggagtttattgcgggaggcaatctcagcctgctgagtcgcgatgacagtacctatgaagccagtaaaatcgaggcaaaaaagaacgccacgctgaccagtaccaacggcaaagttaatttcctggccgtgaaaaacaccactttcgagcatactgtcagcacctcgaaaggcttctatatcaaacaggcaaataaaggctacagcgaaggtaaatgggtgcttccgtctgtttatgctggcagaaaattgacggtcaacgcggccagcggcatcagtgccgatatcaaagcgaaaaatggtcaggctttgcagggcgcgattactgctctggcggcgttacccggtacagagtggctgaagggactgaattcacgcagcgatgttcagtggaatacggttaaagatgcttacgacagctggaattataaaagtcagagcctgaatccggcagtggcggcagtaatcgctatcgcagcagctgcggccaccgcaggcagttcactggcggcgacagttgcatcttcagtaacttccaccgtgggtggtggcgcagtaacgaccggcgcggttacagccgggatgtcttcgctggctgcacaggccgccgtggcactggtggaaaatcagggaaatctgtcaaaaacgctgtcggcgctgggaagcagcagttcggtcaaatcgctggccacctctatggttatcgggggcgcgctggcgggctttgataaggtcatgaatattgatgttccgcccgacaaggcccggttaccggcgctggtcaaaaacgagggatggggaaaaatcgtccagcgcgtggccggccagtcggttatcagctcaggcctgaacaccgccatcaatggcggcagttttaaggataacctgactaatgccctgctggcgaatattggcaaccagattaatgccgaaggggccgggctgattggcgataacggcgaggttctgggtataccgggcaagtcgctgagtcatgcggtggttgccggtatcagcgctgaaattggtcgtggtgacgggaaaggggccgctgccggagcgttagcggcggagctggcagcaattaccctcggtgaaatattcgttgaacccgctacgcggaataatcagattcagtctgccggtaggattattggagcaatcacaggggctgctgtaacaaactcatccggcggcgccaatagtggggctaatgccgcagaaagcgtcctgcgatataattttttgatgcacgatgagcctgcaaggatggcgaaaaaactggctgactgtaggggaaataatggttgtgaaatcgatgtgcgcaaggaaatggcacaattatcagcccaaaatgagaataaatttgacggctgtagggaagccggtaatgcgatttgtattgatgatatgcttaacggaatatcaagtgcttcaggttatgacatgctggggcgtcaaatagggtttgatatatcccgtgagtatgagcttatggggcagaatgcttataagaaatttgatacatgcggttgggagtctggtgcgggatgcgggctgaaattatgggctaatgaatctctccctgatgctttgattttgggattaggatatggtgctggtaagttacttaaaccagttgttagtaattatatatatgaagttactgctttgtcccgcaaggggggaacacaaaaacttatagatgcagcaaataagccaataaacggacagggtttatcagcggcagccagagcatgggaaaagcacgcaggtcggcctggggggacttttgagccattaaagggtaacgtacagcaaaaaaatattgctgcagagggctttatcagagatgttcttaatgataaaagtgttgtacgaaaaagcctatccggcggcgcagtggagtatcggttaccaaatggaaaaggtattagatttaattctgacgggtcatttaacactgtgttagatccaaaggtgtaa

SEQ ID NO: 257307 - DNA, 237 bp, Klebsiella pneumoniae; identical to SEQ ID NO: 195822

SEQ ID NO: 257308 - DNA, 1104 bp, Klebsiella pneumoniae
atgcaacgtcatcaggccccgttccgcgcagatatcgtcggcagctttttacgtccggacgccatcaaacaggcccgccagcagctggccgcaggcgctattgacgcgcagcagctgcggcagatagaaaatgaggcgattcgccatctggtgcagcagcagtgcgagtgcgggctgcacgtggtgaccgacggtgagtttcgccgcgcgtggtggcactttgatttctttgacggtttacagggcgttgagcgctacgattcagaaaaaggtatccagttcaacggggtacagaccaaagcgcacggggttcgcgtcaccggtaaactggccttcggcgatcacccgatgctggaagattttcgctatctgaagagcgtcagcggcagcgcgcagccgaaaatgaccattcccagcccgagcgtgcttcacttccgcggcgggcgcaaagatatcgacgcgacggtatatccggacctcgccgactatttcgatgacctggcgaccacctggcgcgacgccattcgcgccttctacgatgcgggctgccgctatttacagctcgatgacaccgtctgggcctacctgtgctctgatgaacagcgtcagcaggttcgcgatcgcggcgaagatccggatgaactggcgcgcatttatgcccgcgtcctgaataaggcactggaagggaagccggaggatctgaccgttggcctgcacgtgtgtcgcggtaacttccgctcgacctggatctccgagggcggctacgagccggtagccgaagtgctgttcggcggcgttaacatcgacgcgtttttcctcgaatatgataacgaccgctccggcgacttcgcgccgctgcgctatattcgtcccggccatcagcaggtggtgctggggctgatcaccactaaaaacggcgagctggaaaacccggaaggcgtgaaggctcgcctgcgggaagcggcgcagtacgtcccgctggcgcagatctgcctcagcccgcagtgcggctttgcctccaccgaagaggggaattccctgacggaagcccagcagtgggacaaagtccgcctggttaccggcatcgccgcacaggtctggtaa

SEQ ID NO: 257309 - DNA, 1272 bp, Klebsiella pneumoniae
atgcagcgtcgtacattattaaaagcttttgctctctccgcctctgttatcagcatgggcttctccctgcaggtttatgccgccgacaccattaaagtcggcattatgcactcgctttccgggacgatggcgatttctgaaaccccgctgaaagatgttgccctgatggctatcgacgacatcaacgccaaaggcggcgtgctgggtaaaaaactggaacctgtcgtggtggacccggcgtcaaactggccgctgttcgccgaaaaagcgcggcagctgctgacccaggataaggtggcggcggtgttcggctgctggacctccgtatcgcgtaaatcggttctgccggtgtttgaagagctgaacggtctgctcttctacccggtacagtacgaaggcgaagagatgtcgccgaacgtgttctacaccggcgcggcgccaaaccagcaggcaattccggcggtggaatacctgctgagcgaagacggcggcggggcgaaacgcttcttcctgctgggtaccgactacgtctatccgcgcaccaccaacaaaattctccgcgctttcctgcatgccaaagggattcaggataaagatatcgaagaagtctataccccgttcggctacagcgactatcagactatcgtcgccaacatcaagaaattttccgccggcggcaaaacggcggtggtttctaccatcaacggcgattccaacgtcccgttctataaagagctggccaaccagggcctgaaagcgacagacgtgccggtggtggctttttccgtgggggaggaggagctacgcggcattgataccaaaccgctggtgggcaacctcgcggcgtggaactactttgaatccgttgataacccaaccaacaaacagtttgtcgccgattatcgcgcgtacgccaaagcccacaagctgccgaacgccgataccgtcgtaaccaatgatccgatggaagcgacgtgggttggcctgcacatgtgggcgcaggcggtgaccaaagcgggcaccaccgatgtggacaaagtgcgcgaagcgatggccgggcaaacctttaaggcgccgtcaggctttaccctgaccatggatgccaccaaccaccatctgcataaaccggtgatgatcggcgaaatcgaaagcaacggccagtttaacgtggtctggcagaccgaagaaccggtacgcgcccagccgtggagcccgtggattgccggtaatgacaaaaagccggatcacccggtgaaaaccgccagcaactaa

SEQ ID NO: 257310 - DNA, 1575 bp, Klebsiella pneumoniae
atgaacgcattgcgcctcatgtgttacttcgcgctgctcatggtattgctaccgtggcgggcgcaggcagcggacgccgacgattttgtggcggccaatcgcagccagcaggctcagctgcttgaacggtgggccgccgcgcccgaagcctcgcgtttaccgctgctgcgggcgctgaagagcgaaacattacaatcggacagcggcggtcatgcgttcagcaagcagggggaaacgctgctggcgctgggcgcggttgcggcgcccgagggggcgacaaaaccggtacgcctgaccaaccgcctgcgtaacctggcggcaggcgcgctggcgacgcatttactggtaagtgacaacgtcactgaaagggcggcggcggtgaaaacccttcagcgcgaagcgacgcccgagatggcgggtcttcttcagcagcgtctgacggcggaaagcgacggcgcggtgaaatcgcagctggaaattgcgctggcccgtttacagcttgccagcccgcagcccgcgcagaggctggcggccatcgcgctgctcggccactccggcgacccggaaacccaggcgctgttgacgccgtataccgatgcgcaacatgagccagacccggcgattcgcgcggcggcccaggagagcctgagcaaaatccagcatcgcctgctgttgggcgatcttctcggccaggcttttatgggcctgtccctcggctcggtcctgctgctcgctgcgctcggcctggccatcacctacggtctgctgggggtgatcaatatggcccacggtgagatgctgatgattggcgcctacagctgctggctggtgcagcaggcgctggcgcagctggctccgcagtggctggccttctatccgctgattgcgctgccggtggcattcctgatcaccggcggtattggtatggcgctggaacgcaccgtgatccgccatctctacgggcgcccgctggagacgctactcgccacgtggggcatcagcctgatgctcatccaactggtgcgaatgctgttcggcgcgcagaacgttgaagtcgccaatccggcgtggctctccggcggcgtgcaggttctgccgaatctcatcctgccgtggaaccgtctggcggtgctggcctttgtgctactggtgctgctcttcacctggctgacgctgaacaagacccggctggggatgaacgtgcgggcggtgacgcaaaaccgcgcgatggcggcctgctgcggcgtgccgaccgggcgcgtcgatatgctggcgtttggcctcggctcggggattgccgggctgggcggcgtcgcgctgtcgcagctcggcaacgtcgggccggagctgggccagggctatattatcgactccttcctcgtggtggtgctcggcggcgttgggcagctggccggcagcgtggcggcggcgttcggtcttggcatctttaacaaaatccttgaaccgcagatgggggcagtgctgggcaaaatcctgatcctggtcttgattatcctgtttatccagaaacgtccccagggactgttcgccctcaaagggagggttattgactga

SEQ ID NO: 257311 - DNA, 1203 bp, Klebsiella pneumoniae
atggaccgcgtcctgcactttattctcgcgatcgtagtggtggccattctggccctgttggtcagccacaaccgtaagcagattcgtattcgttatgtcattcagctgctggtcattgaagtgctgctggcctggttcttcctgaactctgacattggcctgggttttgtgaagggcttctccgagatgtttgaaaaactcctcggtttcgctaatgaagggacaaatttcgtcttcggcaacatgaacgacaaaggtctggcgttcttcttcctgaaagttttgtgcccgatcgtctttatttccgcgctgatcggtattttgcagcatattcgcattctgcctatcgtcattcgcgctatcggtaccgtactgtccaaaatcaacggcatgggcaagctggaatcctttaacgctgtcagctccctgattctgggccagtccgaaaacttcatcgcttataaagatattcttggcaagatgtcccgcaaccgcatgtacaccatggcggcgaccgcgatgtctaccgtctccatgtctatcgtgggcgcgtacatgaccatgctgcagccgaaatatgtggtcgcggcgctggtactgaacatgttcagcacctttatcgttctgtcgctgattaacccgtaccgcgtcgacgaaagcgaagaaaacctgcagatgtccaacctgcatgaaggccaaagcttcttcgagatgctgggtgaatacatcctggcgggctttaaagtggcgattatcgttgccgccatgctgattggcttcatcgcgctgatttccgcgctgaacgccctgttcgccaccgtcaccggctggttcggctatagcatctccttccaggggatcctcggctatatcttctatccggtagcctgggttatgggcgtaccggcgggtgaagcgctgcaggtagggagtattatggccaccaaactggtttctaatgaattcgtcgccatgatggatctgcagaaagttgccgccacgctctctccgcgtgcggaaggcatcatctctatcttcctggtctccttcgctaacttctcctctatcggtattatcgccggggcaattaaaggattgaatgaagagcaaggtaacgtggtttcccgcttcggcctgaagctggtgtacggttctacgctggtgagcgtgctctctgcgtctatcgccgcgctggtactgtaa

SEQ ID NO: 257312 - DNA, 1236 bp, Klebsiella pneumoniae
atgctgcacccgcgcgccagaacgatgctgttattatcgatacccgcaatcgtgatcggtattgctgccagcctggtattgattgtggcgatgaaaacggcagccatgttgcagaagattctctggagtaacctgccaggagctctgggcatgaacgccagcggccctttctggacgatcgctattctcacctgcaccggcattgccgtaggtctggtcgtacgttttagcccagggcacgccggacccgatccggccaccgagtcgctcattggcgccccggtgagccccagcgcgctgcccggcctgctcgcggcgctgataattggcctggcaggcggcgttagcctggggccggaacatcctattatggtaattaatatcgctctgacggtggcccttggttcacgcattttcccccgcgtcagcgcgctcgactggaccatcctcgcctcttccggcaccatcggagcgctattcggtacgcctgttgctgcggcgctgatcttttcgcaaacgctgaacagcagtaacgatgtcccgctctgggaccggctcttcgcaccattgcttgccgcggcggcgggctctttgaccaccgggctatttttccaccccaatttttcgttacctatcgcgcagtacaatcagtggcagcttgtcgatatctttagcggggctatcgttacgcttattgctattgccgtcggcatggttggcgtttggtgcttaccgcgtttacacgcgctgatgcaacggctgaaaaatccgatcttaaccctcggtattggcggatttttattggggatcctgggcgtcatcggtggacatattaccctgttcaaaggcctcgaagaaatgcagcaattagcctttagccagacattgaccgccagcgatttcatgcttattgctttggtgaagatggcggcgctggtgctggctgccgcctgcggctttcgcggcgggcggattttcccggcggtgttcgtcggcgtcgcgctcggactgatgcttcacgcgcacgtggatgccgtcccggccgctatcaccgtttcctgcgcgatcctcggactgacgctggtggtgacgcgcgatggctggttgagcctgtttatggcagcggtcgtggtgccagactccacgttacttccgctgctgtgcatcgttatgcttcccgcctggctattacttgccgggaaaccgctgatgatcgccaaacgccccaacgattaa

SEQ ID NO: 257313 - DNA, 744 bp, Klebsiella pneumoniae
atgaaagtcatcattgtggaagatgagttcctcgcgcagcaagagctcacctggttgattaatacccatagcgaaatggagattgtcggtacctttgacgacggactcgatgtgctgaagtttttacagcacaacaaagtcgacgctatttttctcgatatcaacatcccgtcgctggatggcgtactgctggcgcaaaacatcagccagttcgcgcataagccctttatcgtttttattaccgcgtggaaagagcatgcggtggaagcctttgagctggaggcgttcgattacatccttaaaccctaccaggaatcgcgcattatcaacatgctgcaaaagctgaccggcgcctggctgcaacagcagcaggctagcacagctaccggagcagcgcccaatccgacccgggaaaacgacacgattaatctgattaaagatgagcggattatcgtcaccagcatccacgatatttactacgcggaagcacatgaaaagatgacgtttgtttatacccggaaggaatcgttcgtgatgccgatgaatatcacggaattctgcaacaagctgccgcccgcacacttttttcgctgtcaccgctcgtactgcgtcaatctgaacaaaattcgcgaaatcgaaccctggttcaacaacacctatattctgcggcttcgtgaccttgagtttcaggttccggtgagccgcagcaaggtgaaagagtttcgccagctcatgcatctgtag

SEQ ID NO: 257314 - DNA, 774 bp, Klebsiella pneumoniae
atgattagtaaaaccgaaagaaacatatggaaacaaaacaatattccgccgttagaatattgttccatttcccgcgcgcaaaagctgctagattgtgagattgaagatttactccactggcatgatatcggtgcaataaacctgtgcgtaaaattaactagcatcacaggaacgttaaatattgctctgactcagaataaagaaagcataaacaaacgctctctttatagtgtgaatcaaagcgatactttaaaaaaaaacgaagcgacatggtcgtattattccagggtagatcgagttttagagctgaaagatagcgtttcggctatagagacgcagcaaggtaaccatgcaatacaaatccagcttaaagcgattgtttctgggctttggtatgttacctcaaaaaatcttggagaactgctagaatgccccgaacacaaccatttagcaaaagaggttagtgcaataaatcctgctaacaacactcttttttgccttttttctccagataatagtagtaatctgccaatatcgatcaataaaatttacattatcagcaaggatgtagagaagatttatgagcataccataagcagtcgcccccttgagctcgccagggagcccacgattattttaaataaaaagatcattaatgaacctcaattcactttacaaaataaaacccttactgacttcattgatgaattcatgaaattaaaccctgagctcgataagaaatccctctacgttaatgagaatcttgatgtgtaa

SEQ ID NO: 257315 - DNA, 255 bp, Klebsiella pneumoniae; identical to SEQ ID NO: 188569

SEQ ID NO: 257316 - DNA, 444 bp, Klebsiella pneumoniae
atgctcaaaacatggctctcggatgccaccatcatgctgcggcagagcgtggaaacctggccacaggcgctggacatctgtgcccaaccgctgctcaaggccggtgtgatagaacctgcgtacgtaaaggccatcgtggagcagcatcaaaggttggggccctactatgtactggctgcgggtctggcgatgccgcacgcgcgaccggaggagggagcgaaaggcttaggtctgtcgctgctgaagctggggcagggcgtgtcctttggctcggaagagttcgacccggttgatattgtcattatgcttgcggccccggataagcatagccatatcgaaacaatctctgcgctggcggaattattttccagcgatgaagatatgaataaattacatcaggcaaccaacctggaggagataaaaactatcatcgcgcgtttctga

SEQ ID NO: 257317 - DNA, 927 bp, Klebsiella pneumoniae
atgataaatgaaaatcgttcgatactaaatttagacctcgacctcttgagaacctttgttgccgtcgccgatctcaatacatttgccgctgccgccgttgcggtatgccggactcagtcagcggtaagtcagcagatgcagcggctggagcaactggtcggcaaagaactttttgctcgccaaggacgcaataaacttctgaccgagcagggcattcagctgttgggctacgcgcggaaaattctgcgttttaatgatgaagcctgcatgtcgctcatgttcggtagcctgcagggaacgctgaccgttggtgcgtcagatgagacagcggatactattttaccgtgtttattaaatcggattggcagtttttatccgcggctgacgcttgaaatcaaagttctcaatcatattgatatcgtcgatcggctgaagaagggagctatcgatcttgcgctgaccacccgacccacgaagggttttgacatgctgacgctacgcgcttcgccaacgttgtggtactgcgcagcggactacgtcctccctcagggcgagtctgtcccgcttgttctgctggatgccccggatccgtttcgggaagagatcgttgcggtactcaacgccgctcgcgtcccctggcatctttcccacgcggcaacctcaatggccggggtgaaggcggcggtgaaggccgggctcggggtgaccgcgcagccggtagagatgatgagccctgaattccgcgttccggggcggtgtgacggcttacccgtgctgccggatacccactatatgctgaactgcgattctcagcaggcaagcgaactgacgcaggctatttttcagtcgctgagcgcggagtaccagccgtggtccacgcaacgtgtttatacccccgaagggggagataattccctaatttcctga

SEQ ID NO: 257318 - DNA, 447 bp, Klebsiella pneumoniae
atgcgtatgtcaacatccactgaagtcatcgctcatcattgggcattcgctatatttctcatcatcgctatcggcctgtgctgcctgatgcttatcggcggttggtaccttggcggacgcgcgcgcgcgcgtagcaagaacacgccgtttgaatccgggatcgactccgtcggttcggctcgcttacgtctttctgcgaagttttatctggttgccatgttcttcgttatcttcgacgtggaagccctgtatctctacgcatggtcgacttctatccgtgaaagcggctgggtcggctttgtggaagccgcaattttcattttagtgctactggctggtctggtttacctcgttcgtattggcgctctggactggacgcctgcgcgctcccgtcgcacgctggttaacccggaaacagacagtcccactaaccgtcatacgcagtaa

SEQ ID NO: 257319 - DNA, 675 bp, Klebsiella pneumoniae
atggattatacgctcacccgcatcgatcctaacggtgagaacgaccgttaccccctgcaaaaacaggagatcgtaaccgaccccctggagcaagaagtcaacaaaagcgtgtatatggggaaactcgaacacgctttgcatgacatggtgaactggggccgtaagaactcaatctggccttacaactttggcctttcttgctgctacgtggaaatggtgacgtcattcactgcggtgcatgacgttgcgcgttttggtgcagaagtattgcgtgcctccccgcgtcaggctgacctgatggtggtcgcgggcacctgctttaccaaaatggcgccggtcattcagcgtctttatgaccagatgctggagccgaagtgggttatctcgatgggcgcatgcgccaactccggcggtatgtacgatatttactctgtcgtgcagggcgtggataagtttattccggttgatgtttacatcccgggctgtccgccgcgtccggaagcgtatatgcaggcgctgatgctgctgcaggaatccattggtaaagaacgtcgtccgctctcttgggtggtaggcgatcagggcgtttatcgcgccaatatgcagtcggaacgcgagcgtaaacgctgcgaacgtattgcagtgaccaatctgcggactccggacgagatttaa

SEQ ID NO: 257320 - DNA, 648 bp, Klebsiella pneumoniae
atggctgttgatacggaacagctcggagagcattacgcggatgacgttgacgcgatccggcacggttattcccgccagtttctccaccgccagcacgtacggcatctcattaacgcagccgccgaggtactcaatacggtcggtatacggaatgtagctgtgccaggactggcgctcgcccatcttctcagcgccgcggtggtggtagccgatatcaggaacgcagtcgatgatctcttcgccatcaagctgcaaaataatacggaacgcaccgtgcgcggaggggtggttagggccgaggttaaggaacataaagtcctcgttttcggtcccgcgcttcatgccccactcttccggtttgaaggtcagcgcttccatttccagatcctgtttggctttggtcagctcaaacgggtcaaattcggttgcgcgcgccgggtagtctttacgcagcgggtggccttcccaggtcggcggcatcatgatgcggcgcagattcgggtgaccatcgaaggtcacgccaaacatctcccaggtttcacgctcataccagttggcgttcgggaacagtttggtgaaggtcggcagatgcagatcgttttcagacaatgcgaccttgagcatgatgtcgcgattgcggtcgattga

SEQ ID NO: 257321 - DNA, 318 bp, Klebsiella pneumoniae
atgagtgaaattgagaaagagcctgttgagcagataaagcaggtcttaaaggaaagaatttctagtcctttatggggttatgttttctttgcgtggctgggatttaactggcagaatttagccaggctttttatgagtagtaagccggtagaggagagaatcattgacataacctctcaaagctatttttacgtgcattttttgtcgttcctctctgatataaaagagaagggtttgttgacttatgatgcaacaacagggcgttataatatgatgcagtcaaaagagttaactcctattaatgctattaaaaactaa

SEQ ID NO: 257322 - DNA, 1743 bp, Klebsiella pneumoniae
atgtcatctgcaacaaccaataacaacgcttttctggctgaactcacccgtctggtcggctcgtcccatctgctcaccgacccggctaaaacccagcgctaccgtaaaggctttcgctccggccagggcgacgcgctggcggtggtctttcccggtacgctgctggagctgtggcgcgtgctgaacgcctgcgtcaacgccgacaaaatcattctgatgcaggcggccaacaccggcctgaccgaaggctcaacgccgaacggcaacgattatgaccgcgatatcgtgattatcagcactctgcgcctggataaactgcatctgctggataaaggcgagcaggtgctggcttatcccggcacgacgctctattcgctggaaaaagcgctgaagccgctgggccgcgagccgcactcggtcattggttcatcctgcatcggggcatcggtggtcggcgggatctgcaacaactccggcggctcgctggtccagcgcggcccggcgtacaccgaaatgtcgctgtatgcgcaaatcgatgaaaacggcaagctcagcctggtgaaccacctcggcatcgacctcggcacgacgccggagcaaattcttagccgcctcgacgacgagcgggttaaagatgaagatgtccgccacgacggtcgccacgcccacgatcatgattacgtcacccgcgtgcgcgacgtgaatgccgataccccggcgcgctacaacgccgacccggaccgcctgtttgaatcctcgggctgcgccggcaagctggcggtgttcgccgtgcgcctcgataccttcccggcggcaaaacgccagcaggtcttctacatcggcaccaaccgcccggaagtgctgaccgaaattcgccgccatattctcgccgaattcaaccatctgccggtggcgggcgagtacatgcatcgcgatatttacgatatcgccgagcagtacgggaaagataccttcctgatgatcgataagctcggcaccgataaaatgccgttcttctttaccatgaagggccgcaccgacgcgatgctggagaaagtgtcgctgtttaagccgcacttcaccgaccgctttatgcaaaagctgggtcacgtcttcccggcgcatctgccggagcgaatgaaaacctggcgcgataaatacgaacaccatctgctgctgaagatggcgggcgacggcattgaagaagcccaggcctggctcggggagtattttaagaacgccgaaggcgatttcttcgtctgcaccgcggaagaaggcagcaaagcctttctgcaccgctttgccgccgcgggcgcggcgatccgctaccaggcggttcacgccgatgaagtggaagatattctggcgctggacatcgccctgcgccgtaacgataccgactggtttgagcatcttcccgccgatatcgatagccagctggtgcataagctctattacggccactttatgtgccacgttttccatcaggattacatcgtgaaaaaaggcgtcgatgcccacggactgaaagagaaaatgctggtgctgctgaaggagcgcggcgctcagtatccggccgagcataacgtcggccatctgtatgaagcgccggaaagcttaaaacgcttctatcgcgaaaacgatcccaccaacagcatgaatccggggatcggtaaaaccagtaagcaaaaatactggggcgaagcgccggataaaacgacaagcgccgccgacccgcaataa

SEQ ID NO: 257323 - DNA, 660 bp, Klebsiella pneumoniae
atgaaaaagttatatgtaatatgcgcgggtttattactgaccctactgttgagcggttgcgcgccgaaaaaatcctatgactacacggcattcaggcagagtaaaccgaagagtattctggtcctgctgccgaaaaacgaatcaccggacgttaaagcgggctatggggtcctttcgcaggtcacgctgccgcttgccgaggcgggatattatgttttccctgttgccgtcgttgataacacctttaaacaaaatggcgtcgtgaatggtgaagaaatgcacggtgtcagccatcaaaagctaagagaaatttttggcgctgacgctgtgctctatcttaaggtcacggaatatgggacatcgtatcaggttatcaacagcgatacccgcgtcgccgtttccggtgagctggtggatattcgtaacggaaaactattatggaaaggcagcgcggtggcttccagcagcgaaagtgacggtagcggcggttcgcttttaggcatgcttatccaggcggccgttgaccagatagtcaacaccatgaccgacagaagctataaggtcgcgggtattgccgatgcgcgcctactcacgcctgccgcgccagcagggatgctgtacggccctcgctctcctaaatacggtaaagatttgcaatag

SEQ ID NO: 257324 - DNA, 357 bp, Klebsiella pneumoniae
atgaatattatccgttctgttttaattctgctcgccgtggcggtgataagcggttgtgcgacaagccccaaacccctctatagctggaatgaatatcagcctgtggtttatgagtattacgcgctggatatggggccacaagagcaaatcgaaacattaaaaaaagatattgaaaaagcgcgggcgcaggcgcttcctgttcctccgggactgcatgcgcatcttgggatgttatatatcgataccggtcatccggagctggcaaaaacagaatttgaacaggagaaacggctgtttcctgaatccagccagtttatggattttctgttgaagaaaatgcagggaggcaaagcatga

SEQ ID NO: 257325 - DNA, 672 bp, Klebsiella pneumoniae
atgttaaagaaaatgatagctgtgataggcttcggaagcctcgtattattaagcggttgtgcaaaagaatcatcccgctcactcgaagtcgctaaggtgacgacctggaatacgccttaccacggcgctcgcagcccaatttcagtgggtaagtttgataaccgctccagctatatgaatggcgtattctctgatggcgttgatcgtttgggtaatcagtcaaaaacaattctcataacacatttgcaacaaaccgggcgattcaatgttctcgatcggagtaatatgggcgagttgcagaatgaagccagtataaaagggaccagccagacgctgaagggcgctgactacgtggtgacgggggacgtgaccgaatttgggcgcaaggaagtcggcgaccatcaattatttggcatcctgggaagagggaagagccaaattgcctatgccaaagtcaatcttaatatcgtgaatgtccagacatccgaagtcgttttttcgtcgcagggtgccggggaatttgagctttctaaccgcgaagtgatcggattcggcggtaccgccagctatgactccacgctaaacggaaaagtgttggatctcgctatccgcgaagccgtaaataatctggttgcaggtatcgaaagcggtgcgtggacaccggctaaataa

SEQ ID NO: 257326 - DNA, 1023 bp, Klebsiella pneumoniae
atgatcaccattcgtgatgtcgcccgccaggcgggtgtttccgtcgcgacggtttcgcgcgtgctgaataacagcgcgctggtgagcccggatacgcgagaagcggtaatgaaggcggtgtcgctgctgggctatcggccgaacgccaacgcgcaggcgctggcgacgcaggtcagcgataccatcggcgtggtggtgatggacgtgtcggacgccttttttggcgcgctggtgaaagcggttgataccgtcgcccagcagcatcataaatatgtgcttatcggcaatagctatcatgaagcggaaaaagagcgcaacgccatcgaggtgctgattcgccagcgctgttcggcgctgatcgtccactctaaagcgctgagcgacgcggagctgggggattttatggagcatatgccaggaatggtgctgattaaccgcatcgtgccggggtacgcccaccgctgcgttgggctggataacgtcagcggcgcgctgatggcgacccgcatgctgctcaatcatggccaccagcgcatcggctatctctcttccaatcacggtatcgaagatgatgatttacggcgggaagggtggttcagagcgttacatgagcacggcattgtcgctcccgaaagctgggtgggttccgggtcgcctgatatgcagggcggcgaggcggcgatggtcgagctgctggggcgcaacctcggtctgaccgcggtcttcgcctataacgacagcatggcggccggcgcgctcacgacgcttaaagataacggcattgccgtaccgcagcatctttcgctgatcggttttgatgatatccccatttcccgttacaccgatccgcagctgacgacggtgcgctacccgattatgtcgatggcgaaactggcgaccgagctggcgctacagggggcggcggggaagctggatcgtgaggccagccactgttttatgccgacgctggtgcgccgacattcggtggcgcagaggcaaattgcggggccgatcactaactaa

SEQ ID NO: 257327 - DNA, 1158 bp, Klebsiella pneumoniae
atggagagaaatgtcacgctggactttgtccgcggcgtcgccatcctcggtatcctgctactgaatatcagcgccttcggtttaccgaaggctgcttacctcaaccccgcgtggtccgggaacatttccgccagcgacgcctggacctgggcgattctcgatctgctggcgcaggtcaaattcctgaccctcttcgccctgctgtttggcgccggacttcagctgctgctgccgcgcggcaagcgctggatccagtcgcgcctgacgctgctggcgctgcttggctttgttcacggtctgtttttctgggacggcgatattctgctggcctatgcgctggtagggctggtgggctggcgaatggtgcgcgacgcccacgatgtcaaatcgctgtttaataccggcgtggtgctatacatcatcggcgtggcggtcctgctattgctgggattgatttccggcaatgcgcccaatcgttcgtggctgccggacgcggcaaatttgcagtacgagcagtactggaagctaaaaggcggccttgaggcggtaagcaatcgcgcagatatgttgtcggataatctgctggcgctgggcgcgcagtacggctggcagctggccggtatgatgctgatgggcgccgcgctgatgcgcagcggctggctcaaagggcagttcagccttcgccactaccgccgtaccggcgggctgctgattgccgccggaatggcggtcaatttgccctctatcgttgcccagtggcatctcggctgggactatcgctggtgcgcatttttgctacaggcgccgcgcgagctgagcgcgccgctgcaaaccatcggctacgcggcgctggcctggggcttctggccgcagctgtgtaagtttcgtctggtaggggcgattgcctgcgtcgggcgtatggcgctgaccaactatctgctgcagactctgatttgcaccaccctgttttaccgcttcggcctgtttatgaagtatgaccgcttacagctgttagccttcgtgccgcccgtatgggcggtcaatctcctcttctcgtggttttggctacgtcatttccgtcagggccccgttgagtggctatggcgtcaattaaccctgcgtgcatcggggacatcattaaaagatacatccagataa

SEQ ID NO: 257328 - DNA, 867 bp, Klebsiella pneumoniae
atgcatatcacgctacggcagctggaagtgtttgctgaagtattaaaaagcggttcgacgacgcaggcatcgcaaatgctggcgctttcccaatcggcggtcagcgcggcgctgaccgatctcgaagggcagctgggcgtgcagctatttgaccgcgtagggaaaaggctggtggtcaacgagcacggcaggctgctttatccgcgggcgctggcgctgctggagcgggcgctggagatagaacagctgtttcgcggcgacaacggcgcgatccgcgtctacgccagcagcaccatcggcaactatattctgccggaaatcattgcgcgctatcgacgcgatctgccggatttaccgctggagctgagcgtaggcaatagccaggacgtgatcaatgcggtggccgatctgcgcgtggatatcgggctgattgaaggcccctgtcacgccgcggatattatcgccgaaccctggctggaagatgaactggttgtctttgccgcgccggattcgccgctcctcgaaggggaggtgacgctgcaacggctggcggaagcgccgtggattttacgcgagcacggctccgggacccgggaaatcgtcgactatttattactctcacatttaccggcgtttcatctggggatggagctgggcaactcggaagccatcaagcacgcggtgcgccatggtttaggcattagctgcctgtcgcgacgcgtggtggcggagcagcttgaagtggggtcgctggtagagctgacgattccgctgccgcgtttaactcgcaccttgtggcgcattcatcaccggcagaagcatatttccaaggcattacagcgatttctgcattattgcgacgtgtaa

SEQ ID NO: 257329 - DNA, 1008 bp, Klebsiella pneumoniae
atgagtctggatatcgaccagattgccctgcatcagttaatcaaacgtgatgaacaaaatctggagctggtgctgcgcgagtcactgttggagccgacggcgacggtggtggagatgatggccgaactgcatcgtgtctacagcgcgaaaaataaagcctacggcctgtttaatgaagagagcgagctggcgcaggcgctgcgcgggcagcgtaagggcgaagaagcgttcctgccgttcagccgcgccgctaccggtcgcctgcgcgacgaactggcaaaatatccctttgctgaaggcggaatcgtgctgttttgccagtatcgctatctggcggtggaatatctgatggtggcggtgctgaacaatttaagcagcatgcgcgtcaacgaagagctggatatcagctccacccattatctggatatcaatcacgcggatatcgtcgcccgtattgatttaaccgaatgggaaaccaacccggagtcaacccgctatctgaccttcctgaaaggccgggtagggcgcaaggtggcggatttctttatggatttcctcggcgccagcgaagggctgaacgcgaaagcgcagaaccgcggcctgctgcaggcgctggatgatttcgccgccgatgcgcagctggataaatctgagcgtcaaaacgtgcgccagcaggtatacagctactgcaatgaacagctgcaggccggtgaggaaatcgagctggagtcgctgtcaaaagagctggcgggcgtcagcgagaagacgtttcaggaatttaccgccgaacagggctacgagctggaagagagcttcccggcggatcgcagcactttgcgtcagttaaccaagtttgccggcagcggcggcgggttaaccattaactttgacgcgatgctgctgggcgagagggtattctgggatccggccacggataccttaaccattaaaggcacgccgcctaacctgcgcgatcagctgcagcgccgcacctcgggcgggaattaa

SEQ ID NO: 257330 - DNA, 354 bp, Klebsiella pneumoniae
gtgccggacggcgcaatctacgctatcgccgatgtgctggggatcccggccagcgacgtagaaggcgtggcgaccttctacagccagattttccgccagccggtgggtcgtcacgtgattcgctactgcgacagcgtggtgtgccatatcaccgggttccagggcattcagtcggcgatcgagaagaagctggatatcaaaccgggtcaaaccacctttgatggccgtttcactctgctgccgacctgctgcctgggcaactgcgacaaggggccgaccatgatgattgatgaggacactcacagttatctgacgccggaagcgattcctgacctcctggagcggtataaatga

SEQ ID NO: 257331 - DNA, 1338 bp, Klebsiella pneumoniae
atgaaaaccattattcgtaccgccgaaacccatccgttaacctggcgtctgcgcgacgacaaacagccggtatggctggatgaataccagagtaaaaacggctacgccggggcgcgtaaagcgctctccggcatggcgccggatgaaatcgtcactgcggtaaaagacgccggcctgaaagggcgcggcggcgcgggcttttccaccggtctgaagtggagcctgatgccgaaagacgagtccatgaacatccgttacctgctgtgtaacgccgatgaaatggagccgggcacctataaagaccgcctgctgatggaacagctgccgcacctgctggtggaaggcatgctgatctccgcgttcgcgctgaaagcctaccgcggctatatcttcctgcgcggcgaatatatcgaagcggcgcagcacctgcgccgggcaatcgccgaagcgaccgaagcgggcctgttggggaaaaatatccttggcaccggttttgacttcgaactgtttgtgcacaccggggcagggcgctatatctgcggcgaagaaaccgcgctgattaactccctcgaaggccgccgcgccaatccacgttcgaagccgccgttcccggccagctccggcgtatgggggaaaccgacctgcgtgaacaacgttgaaaccctgtgcaacgttccggcgattctggccaacggcgtcgagtggtatcagaacatttctaccagtaaagacgccggcaccaagctgatgggcttctctggacgggtgaagaacccgggcgtctgggaactgccgttcggcaccaccgcgcgcgagatcctcgaagattacgcgggcggcatgcgcgatggtctgaagtttaaagcctggcagccgggcggcgcgggcaccgacttcctgaccgaagcgcacctcgatttgccgatggagttcgaaagcattggtaaagcgggtagccgtttgggtaccgcgctggcgatggccgtcgaccacgagatcggcatggttccgctggtgcgcaacctcgaagaattttttgcccgcgaatcctgcggctggtgtacgccctgccgcgacggcctgccgtggagcgtgaagatcctgcgcgccctggagcgcggcgaaggccagccgggggatatcgagacgcttgagcaactgtgtcgattcctcggtccgggtaaaaccttctgcgcgcacgcgccgggcgcggttgaaccgctgcagagcgcgatcaaatatttccgcgaagaattcgaggctggcattaagcagcagttcagcaatacccatgcaattaacggtattcagccgaacctgcttaagacgcgctggtaa

SEQ ID NO: 257332 - DNA, 2727 bp, Klebsiella pneumoniae
atggctacgattcatgtagacggcaaagaatacgaggtcaacggagcggacaacctgctagaagcttgtctctctctgggccttgatattccatacttttgctggcatccggcgctagggagcgtcggtgcttgccgccagtgtgcggtgaagcaatatcagaacgcggaagacacgcgtggccgcctggtgatgtcctgtatgactccggcatccgacggcacttttatttccatcgacgacgcagaagcgaagcagttccgcgaaagcgtagttgagtggctgatgaccaaccacccgcatgactgtccggtgtgcgaagagggcggcaactgtcacttgcaggatatgaccgtgatgaccggtcatagcttccgtcgctaccgctttaccaagcgtacccaccgcaaccaggatctggggccgttcatctcgcacgaaatgaaccgctgcatcgcctgctaccgctgcgtccgctactacaaagattatgccgacggcaccgaccttggcgtttacggcgctcacgacaacgtctactttgggcgcccggaagacggcacgctggaaagcgagttctccggcaacctggtggaagtctgtccgaccggcgtgtttaccgataaaacgcactccgagcgttataaccgtaaatgggacatgcagtttgcgccaagcatctgtcagcagtgttccatcggctgtaacatcagccccggcgaacgctatggcgaactgcgtcgtatcgaaaaccgctataacggtaccgttaaccgctacttcctctgcgaccgcggtcgtttcggctacggctatgtgaatctcaaagaccgtccgcgtcagccggttcaacgccgcggtgacgatctgattacccttaacgccgagcaggcgatgcagggggcggcggatattctgcgccagtcgaagaaagtgatcggtatcggctccccgcgcgccagcctcgaaagcaacttcgcgctgcgcgaactggtcggcgccgggaacttctataccggcatcgcgaagggcgaacaagagcgcctgcagatgatgctgaaagtgctgcgcgaaggcggtatccataccccggcgctgcgcgaaatcgaatcctacgatgcggtgctgatcctcggcgaagacatcacccagaccggcgcgcgtatcgcgctggcggtgcgtcaggcggtgaaaggcaaagcgcgcgaaatggcggcggcgcagaaagtcgccgactggcagatcgccgcgatccttaacatcggccagcgcgcgaagcatccgctgtttgtcaccaatattgatgacacccgcctcgatgacatcgccgcatggacctaccgcgcgccggtggaagatcaggcgcgcctcggctttgccatcgcccatgcgctggatgaaagcgccccggcggtcgaagggctgagcggcgagctgaaaggcaaaatcgacgtgatcgttcaggcgttagccggagcgaaaaaaccgctgattgtctccggaaccaacgccggcagcattgaagtgattcaggcggcggccaacgtggcgaaagccctgaaaggccgcggcgccgatgtcggcgtgacgatggtcgcccgcgcggtcaacagcgttggcctcggcatgatcggcggcggctcgcttgaagaggcgctgagcgaactggaaaccggcgcagccgatgcggttatcgtgctggaaaacgacctgcaccgccacgcttcagccgcccgcgttgatgcggcgctggcgaaagcgccgctggtgatggtggttgaccatcagcgtacggcgattatggaaaaagcgcatctggtgctctccgcggcaagctttgcggaaagcgacggtaccgtggtcaacaacgaaggtcgcgcccagcgcttcttccaggtttacgacccggcctactacgacgcgaaaaccgtaatgctggagagctggcgctggctgcactcattgcacagcaccgtgaacaatcgtcaggttgactggacccagctggaccacgtgattgacgctgccgttgccgcactgccgcagctggctggtatcaaagacgccgcgccggatgcgaccttccgcattcgcggccagaagctggcccgtgaaccgcaccgctacagcggtcgtacggcgatgcgcgccaacatcagcgtgcatgaaccgcgtcagccgcaggataaagacaccatgttcgccttctccatggaagggaacaaccagccgtccgcgccgcgctcgcaaattccatttgcctgggctccgggctggaactccccgcaggcgtggaacaagttccaggatgaagtgggcggtaaactgcgccacggcgatccgggcgtgcgtctgtttgaagcttccgctagcggtcttgagtactttaccgcagtaccggcaagcttccaggcagaggacgggaaatggcgtatcgcgccttactatcacctgttcggcagcgacgagctgtcgcagcgttctccggtattccagagccgcatgccgcagccgtacgttaagctgaacccggcagatgccgcgaagcttggggtgaacgaaggcgcaatggtctctttgcgcgttgatggccaggcgcttagcctgccgctggtgatttcggcggggctgacggcagggcaggttggcttaccgatgggcatgccagggattgcgccggtactgaccggagcgcgtattgatactctgcaggaggcgaaagcatga

SEQ ID NO: 257333 - DNA, 978 bp, Klebsiella pneumoniae
atgagttggttaactcccgatctcatcgacattctgttaagcatccttaaagcggtggtgattctgctggtcgtggtgacctgcggcgcgtttatgagcttcggcgaacgtcgtctgctgggcctgttccagaaccgttatggacctaaccgcgtgggctggggcggttcgctgcagctcgtcgccgacatgatcaaaatgttctttaaagaggactgggttccgcgcttctcggatcgcgtgatctttactctggcgccggttatcgcctttacttcgctgctgctggccttcgccattgtgccggtcagcccgacgtgggtagtggccgatttaaacatcgggattctgttctttctgatgatggcaggcctggcggtctatgcggtgctgttcgccggttggtcgagcaacaacaaatactcgctgcttggcgcgatgcgtgcttctgcccagaccctgagctacgaagtattcctcgggctttccctgatgggcgtagtggcgcaggccggttcgttcaacatgaccgatatcgtcaacaaccaggcgcatctgtggaacgttattcctcagttctttggctttgtgacctttgcgattgcgggcgtagcggtatgtcaccgtcacccgtttgaccaaccggaagcggagcaggagctggccgacggttaccacatcgaatattccggcatgaagttcggtctgttcttcgtcggtgaatatatcggcattgttaccgtatcggcgctgattgtgacgctgttcttcggcggctggaatggcccatggttacctcctttcatctggttcgcgctgaaaaccgcgttctttatgatgatgttcattttgatccgcgcatcattaccgcgtccgcgctatgaccaggtaatgtcctttggctggaaggtatgcctgccgttaacgctgatcaacctgttggtaacggcggctgtcattctctggcaggcgcaataa

SEQ ID NO: 257334 - DNA, 543 bp, Klebsiella pneumoniae
atgaccttaaaagaattattggtagggtttggcacccaggtccgcagtatctgcatgatcgggatgcacgcctttgccaaacgagaaactcggatgtacccggaagagccggtatatctgccgccgcgctaccgtggccgtatcgtgctgacgcgcgatccggacggcgaagagcgctgcgttgcctgtaacctgtgtgcggtagcctgtccggtaggctgtatctctctgcaaaaagcggagaccaaagacggccgctggtacccggagtttttccgcatcaacttttcacgctgtattttctgcggcctgtgcgaagaagcgtgcccgaccacggcgattcagttgaccccggactttgagctgggcgaatacaaacgtcaggatctggtgtacgaaaaagaggatctgctgatttccggtccgggtaaatacccggaatataacttctaccggatggcgggtatggcaatcgacggcaaagataagggcgaagcagagaacgaagccaagcctatcgacgtcaagagcctgttaccgtaa

SEQ ID NO: 257335 - DNA, 528 bp, Klebsiella pneumoniae
atgaaaaaaacattacttgctgctgttgttgccgcctgcgcgacgatctctggtgctgcgctggcagatgacggtcaggtgaagtttattggcgacatcattgatgctggttgcgacgtggtcaacgacctgtctaacccgctggaagtccaaatgggacagatcgccaagacggcgtttaccggtaccggttctactgcggctgagcaaggttttgatatccaactgaaaaactgcccgactacggttactaaagcatcggtactgttctccggcactaacgtcggcggcgacaatagcaaactgcagctgaccgcagaacctaatgtcgctacaggcgtggctctgcagctggttgatggcagcactaacagtaccctgccgctgttcacccgttctaccagcctgaccatcccatctaccggtgatatcgatctgccgttccgcgttcgttatatccagaccgacacaactgttgttgctggtaaagctaacggtagcgctaacttcactatcagctacaactga

SEQ ID NO: 257336 - DNA, 2550 bp, Klebsiella pneumoniae
atgaacaataatcataacaaatggcggcttaaccggatagccggagctctggccgttgccttgataccgtggtgtgatactgcgctggcgcgggatgtgtttaacccggcgttattggaaatggatggcccgcagacgggggtcagggatttatcggcttacgaacacgctggagggcagcagccgggaacctatcgggtcgatatttacctcaacaatatctttatggaaacccgggatgtcacttttcagcaaagccggatcccgggggaaacggccctgcagccgtgtctgaacgttgaagagcttgccgaatggggcgtgcgcgttaagcaattccctgaattaggccgtaaatcggcggactgcgcggacttgggcgttataccacaggcaacggctgactttcgttttagtcagcaacgcctgttattaagtttccctcaggcggcggttaccagcgcggcgcggggctgggtcgacccgaagcagtgggatgacggcatagcggcccttctgctgaactactccgtaagcggggcgaataactggtcgcgcaagaatgacatgccggatagtgacaaccaatacgttaacttgcgtcccggtatcaacatgggtccgtggcgtttgcgcaactacactacctggtcacgtaacagcagcgaaggcgagtccagtaacagctgggatacggtttatacctatgcccagcgtaatattaatgccctgcaaggggtgatgacgttgggcgatagcagcaccgacgccgacattttcgaaggcattccttttcgcggggcgatgctggcttccgatgacgatatgctgccggaaagcctgcgcggctatgcgccggtggtacgcgggattgcgcgtaccaatgcccaggtcattattcgccagaacggctatgagatttaccagacctatgtctcccccggcgcgttcgaaatcaccgatatgtatccgaccggtggctcgggcgatttatcggtcactattaaagaatccgatggcagcgagcaaaacctgatcgtgccttatgcttcactgcctgtcctgcagcgcgagggccgcctcaaatatagcgtgacctccggcgtataccgggcctacgacaatagcattgatgaaacgccccttactcaggggacggctatttacggtctaccgttggggataaccctgtacggcggcggtcagtttagcagcaaatatcagtccctggcgctgggggtggggaaaaaccttggcgatcttggcgccgtatcgaccgatgtcacccaggcctggtcgaaccgacaggatcaagacaaagagagcgggcagtcggtgcgtattcgttatagcaaagatcttccaggcttagggactaacatttccctggccggatatcgctatgctaccagcggctactgggatatgcaggaggtgctggatacctatcgggacgataattataccccttcaatcgaacggcggcgcaatcgcggggaagtgacgctcagccagagccttggcgaagaaatggggtctctctcgctaaactatatccgcgaagattactggaacaccgggcgcacgatggagtccgtcggcgtgggatacaacaatagctggcgcggcgtcagctacagcataaactacagctataaccgtaataccaccgaccagaataccggaacgcgcaatgatgaagaccaccttttcgctctgagcatcagcgtgccgctgggggaatggctgccgaaaccagtttatgccagctactccctgaacagcagtaagaatggctccaccagcaacaacctgggcctttccggcactttgcttgagcgtgataacctgagctggagcgtacaggaaggatacaccagccagggacgaggggagagcggcagcattaatgccgactggcgagcgacctatggcgagcttaccggcggctacagccatgataaatacagccatcgcctgaactacgccctgcgcggtggagtcctggcgcatgaaaatggcctgacgctggggcagccttttggcgaaaccctcgctttagttaaagcgcccggcgcttccggggttgggatcaataaccagaccggcgtcagaaccgactggcggggctacgccgtggtgccttacgcctcgccgtatcgcaagaatatcttgacccttgacaccagcacgatgccggacgatgtcgatctcgagctaaccactcaaacggtggtgccaacccgcggggcggtggttcgcgcaaactactccactagcgtcggtagccgggttctgatgacggttcgtcgggcgaatggtcagccggtacctttcggcgcgatggtcagcgtacccggagccgcggcgtcagagcaggcatttatcgttggcgagggcggacaagtttatctgaccgggctggagtctaatggagcgcttaacgtgaaatggggagcggccgcacaggagcgctgccggattcagtacgcgctgccgtcaggtaaaacgctcaccggcattattgtagccccggggctatgccgctaa

SEQ ID NO: 257337 - DNA, 1044 bp, Klebsiella pneumoniae
atgaaacgatttttatgggcaatattagcaggcctgtcggcgctggcgctatcgccgcaggcgatggcggcaaccgggtggtgtgagacgacttcggctggtcacgctccatttcggaatacattctcatttattgaaacctttactaatccctcgcaaaaccaggctgggatgacgtttcctcgcctgtaccgttggaataccgggggaaattataatgcaaaatgtgattgtggcagctatatcactgggcctacatattttaaagccacggtacctgggatggctgcgacgcaaagtcgaggcggggtaaattattatcagcttaataaatatctggaaattgccagcgagctatatattgccgggggcgtgaatgactatttcccaacacctatcgacaataaaagcaataacaataaccagggctttgcttgcaatgcgggcggttcaacttttcagagtggttcagtgggatacgtttcgctctattttactcgaccatttgttggtcaggtgactatccctccgacggttatccttaatgtctatggaacaagaatctctggaagctacggtgcaaatccattaacgcagatctcaatgagcggctcggttacggtaccgcagtcctgcgaaataaataccggtcagccaattaacattgattttggcgatattgctggcaataacttcaaaacggccaaccagatgccgacgggcttcactccttacgaggtaaatatgaccgtggcctgcaccaatatttcggcaggggttaaaattgctctctcattccagggcacggctgactcccatgacaacactgcgctggtgacgaccaatagcgatattgcggtgcggattgaaagtattaccggaaccaaaattccagtgatttcagggctgctgccggtcgatctgaactattcgacccagaccggggataccactatgaaagtctatccgataaataccaccggtaatttacccgctggcggtgggtttaccgccacggcaaccattcaggctgaaattgaatag

SEQ ID NO: 257338 - DNA, 510 bp, Klebsiella pneumoniae; identical to SEQ ID NO: 188566

SEQ ID NO: 257339 - DNA, 1326 bp, Klebsiella pneumoniae
atgtggggtttttactccgtggaggttcgcgtgctgtctgtttccaccgcgctggaaagcctataccgctgcctggatgaagcgttcccgccatcgcccggcacgcgaatttacgatatcacctttgcgctgaatgacgcttttgatccgctgctgtggtgcaaccatcagcggcagtggccgcagttttactggcagcagcgcagcggcgatgaagagctggcggcgctgggagcggtaaaaacctttgcttccctgacgcaggcgcacgattttttgcgccagcaggggcgtgatgacctgcgaatttgcggccttaacgcctttgatcctcagcagggcctgttgctattgccgaggctggagtggcgtcgcctgggcggcagcgccacgctacgtctggtgctgtccagcgagagctcgctccgcgacgatgcccgcgcggcgcgtgaatttctcgattcgctgacggcgaaacaggcgcaggccaccgcgatgccctctctgcttagcgaacagcatttcccggcttatccgcagtggcgagcgctgattacgcaggcgacgcaggcgatagcggcgggggagatggataaagtagtgctggctcgcgccaccgatttgcatttcgccgcgccgttaaacgccggatcgattatggccgccagccgtcgcagcaatcttaactgcttccacttcctgatggcctttaccccgcgagaggcattcgtgggttcaacgccggaacggctgtggcggcggcgcggcgcgctattgcgtaccgaagcgctggcgggaaccgtcgccagccatgcggacgatcgtcaggcccagcgtttgggcaactggctgatgggcgacgataaaaatcagcgcgaaaatatgctggtggtggaggatatctgccagcggctgcaaggggagacgcgcgcgctggaagtgctgccgccgcagattgttcgtttgcggaaagttcagcatttgcggcgctgtatatgggccgagctggataaacccgatgatgcccgctgtcttcatctgcttcagcccacggcggcggtcgcgggtttgccgcgtcaggtggcgctggattttatcacccgtaatgagctttttacccgcggctggtatgcaggctccgctggctatctgtcgctggcgcaaagcgaattttgcgtctctctgcgttcggcgaaagtcgaaaaccatacgctcagactgtatgccggggcggggatcgtcagcggctctgaccctgagcaggagtggcaggaaattgaaaataaagccgcgggattgcgttcgttactgcttacagaaacatag

SEQ ID NO: 257340 - DNA, 759 bp, Klebsiella pneumoniae
atgatcctccacgcgctggccgaacgcggccagccgggccatccctggctggtctttttgcacggtttttccggcgattgtcgcgaatggctgacggtcggccaggcgtttggcgcgtattcgcgtctctatattgatctgccgggccatggcggttcagcgaatattgcggcaaacagcctggccgaggttggtcatcttgttgagaaaacgcttaatagttacaacatacttaagtactggctggtgggttactcccttggcggacgggtggccatgtactttgcctgccagccgcgcgaagggctctgcgggctggtggtggagggggggcatccggggttaacggatgaaaaccaacgtttgctgcgccgccacggcgatgccgcctgggctgaacgctttcgccgcgagccgctgacccaggtgtttgccgactggtatcagcagccggtctttgcttcccttgatgccgcgcagcgggcggcgctgattgcgctacgcagccgcaataacggcggtgcgctggcggcaatgctgcaggccagctcgctggcggaacagcccgatctccgcgaaccgttacgggctcgcgagttcccttttcattacctttgcggcgaacgcgacggcaagtttcgcgccatcgccgatgagctatcggccaccacgcacgtgattaatcatgccggacacaatgcgcatcgggaaaaccccgatgctgtcgtggcttgtctggcgcagtttttagcgaattaa

SEQ ID NO: 257341 - DNA, 1392 bp, Klebsiella pneumoniae
gtgacctttagcgactggccctggcgtcactggcggcaacggcgggaagaggcccgggcgctgcgcttgaatgagcggcggctaagctggcgagaactgtgcgcgcgcattgatgcgctggcggcgggatttcacgcccagggggtcagcgacggcgatggcgtgctgcttcgcgcttacaaccagcccgatgctttgctggcattgctggccctgctgcagtgcggcgcgcgcgttctgccgctgaatccgcagctgccggctcctctgttggcggaactgctgccgtcccttggcctgcgccacgcgctggcgctgaacggcggcgaccttccggtagcgcttaatgccttagttttgcgcgttggcgacggcgcgtacgcggcggcctggcgagaagatcgtatcgcttccatgacgctcacctcggggtcgacggggctgccgaaagcggcggtgcacgcttttcgcgcccatcttgccagcgcagagggcgtgctggcgatgataccctttgcgccacacgatgactggctgctgtcgctgccgctgtttcacgtttccggtcagggcattctctggcgctggctatttgctggcgcaggcctgacggtacgcgacaagcagccgctggaacaggcgttacgcggctgtacccacgcctccctggtgccgactcagctatggcgcctgcttaacggcgacgccggggtgtcgttaaaagcggttctgctcggcggcgcggcgattccggtggcgctcaccgaacaggcccgcaggcgcggtatccgctgctggtgcggctacgggctaaccgagtttgcctccacggtatgcgccaaggaggcggacggcctggcggatgtcgggcggccgctgccggggcgcgaagtgcggattgtcgatggcgaggtctggctgcgctcggacagcatggcggaaggctactggcgcgatgggcaaacggtccccattgctgatgccgacggctggttcgccacccgcgatcggggacagctggagcacggcaggctgactatcctcggaagagtggataacctcttttttagcggcggagaaggtattcagccggaagaggtggagcgggttatcggcgcacacccattgattgggcaagtttttatcgtgccgcaggatgacgcggagtttggccagcggccggtggcggtggtggaatgcagcgcgcattgcgaaccgtccgagctggcaggctggtgcgccgataagctggcgcggtttcagcagccggtgcgctggctgcggctgcctgaatcgctgaaaaccggcggaattaaaatttcccgccgggcgctacgcgactgggtcaaccagcaggagagctccgcctcagaagcgctggacgtgcagtag

SEQ ID NO: 257342 - DNA, 1029 bp, Klebsiella pneumoniae
atggaacagatagcaagccactcgccgcacgatgcggtctttaaacatcttttgtcccaacgggcaacggcgcgcgattttttgcatattcatttgccgaagcatttgcgggaacagtgcgatctgcggacgctgcagctggagtccggcagttttattgaagaggacttacgcgccagccattcggatatcctttattcgctaaaaacccatggcggagaggggtatatctacattcttattgagcatcaaagctctcccgacaggcatatggcgtttcgcctgatgcgatacgccatcgcggcgatgcagcgtcatcttgataaagggcatcatcagctgccgctggtgattcctctgctcttttatcacggcaggaccagcccctacccgtattcaacgcgctggctggatggctttccacagccagagatggccgagcggctgtatagccggagttttcctctgatagacgtcactgagatccctgacgatcggcttgtacagcaccgccgggtcgctatgcttgagctactgcaaaaacatatccgccagcgggacctgatggacatctctgagcaactggtcagaatattatccttgggatacactacgcgtcggcagtttaaaacgttgctgaattatatgcttcaggcgggtaacgccgccgatccggtggcctttttacgcaagctcgcgcaaaagacgccgctcaagccgcataaggagacgctgatgaatattgctcattttctggaagagcgtggccgtaaagaggggatccttcagggaatgaaggcggggatagaaaagggcttacaaaagggccgacgtgaaggtcgcaatgaaggccgacgtgaaggtcgcaatgaaggccgaaatgaaggccgaaatgaaggccgacatcaaggtctgcaggaggcgacgcaacgcattgccctggcgatgctggatgaggggcttgagccttctcaggtcgcaaagctgaccggtttatcgcagcagcagctcgctaagctccggcactaa

SEQ ID NO: 257343 - DNA, 1197 bp, Klebsiella pneumoniae
atgttaaacgtggaaatgctgtccaccggcgatgaagtactgcatgggcaaatcatcgataccaatgccgcgtggctggcggatttcttttttaatcaaggattacccttaaagcgtcgccataccgttggtgacgatctcgactccctggtggcgattttacgcgagcgcagcgagcatgccgatgtgctgatcgtcaacggcggtctggggccgaccagcgacgacctgagcgcgctggccgccgcgacggccaaaggcgaagggttgattttgcacgaagcgtggctggaaaccatgacccgtttctttgccgagcgcggcaggcccatggccgccagcaatcgtaaacaggcggaaattccgcaaagcgccgagatgatcgataacccggttggaaccgcctgcggttttgccgtgcagctaaaccgctgcctgatgttttttacccccggcgtgccttccgaatttaaggtgatggtcgagcaggaaatcttaccgcgcctgcgcgagcgtttcccgctgcctgctgcgccgctgtgcctgcgtctgaccaccttcggccgttccgaaagcgaactggcgcagagcctcgatcatctgcagctgccgccgggcgtggtgatgggctatcgctcctcgatgccgattatcgaactgaagctgaccgggcccgctgaacagcgcgaggcgatgctggcgctgtggctggaagtgcggaaagtggccggagagagcatgattttcgaaggcacagaaggcctgcccgcgcagatcgcccgtcgtctgcaggagcgtcagctaagcctgacgctgagcgagcagtttaccggcggcctgctggcgctacagctttcacgcgtcaatgcgccgctgttggccagtgaagtcattccgtcgcaggaagagactctggcgcagtccgcgcgctgggcggctgagcggcgcgagaaacattttgccggcctggcgctggcggtcagcggccaggagagcgatcacctgaattttgcgctttctacgccggacggcacccacgcgctgcgggtgaaattcaccaccagccgccacagcgtgcaggtgcgtcaggaggtgtgcgcgatgatggcactgaacatgctgcgccgctggctgaacggccagccggtggccggcgaacacggctggattaacgtcgtcgaatctctcacggtgtaa

SEQ ID NO: 257344 - DNA, 783 bp, Klebsiella pneumoniae
atgttggaatcaagcaaagtcccggcgctgacccgcgccattgatattctcaatttgatcgcccgcatcggtccctgcagcgcggcgaccattattgacgaactgggtattccgaaaagtaccgcctatctgctgctgggagagctgaaaaaacagcgcttcctcagcatggataatcaggataactactgcctgtggaccaagctggttgagctggccgggcaggcgctgagcaaaatggacctgcgcgagctggcgcgtccgcgcctgacgcagctgatggatcagtgtgggctgctctgccacctgggcattatcgacagcggcaacgcctactacattctgaagattgagtccccggccaccatcagcgtgcgctcgcatgaggggaagagcctgtcgctgtatcgctccggtatcggtaaatgcctgctggcctggcagcccgagcgggttcaggagtcgattatcagcgagctgcggtgggaacgggcgacgccaaccactatcaccagcgcccagcagcttcgcgatgagctggggcgtattcgcgcccgcggctggagcttcgataacggcgaagactatcccgacgttcgctgcgtggccgccccggtgtttaacgccaataacgagctgaccgccgccatttccgtggtgggtacccgtctgcaaatcaatgaagacaatcgcgattacctcgccggtagggcgattgcctgcgccaaagatatttcccgtctgctggggtggaagagccccttcgaacaacaagcctcataa

SEQ ID NO: 257345 - DNA, 1290 bp, Klebsiella pneumoniae
atgagcaacaccttgcttgaaagcgtggtgaagaaaaaccgcgcccgtttgatcccttttatgctggcgctgtacgtgctggcgtttcttgaccgttcgaatatcggctttgccaaagagacctatcagctggataccggcctgagcaacgaggcctatgcgctgggggcggggattttctttgtggtgtacgcctttctcggggtgcccgccaacctgctgatgcgcaaattcggcgcaagaaaatggatcggctgcaccaccttgctgtgggggcttctctccgcggcgatggcgtgggcggacaccgaagcgaagtttctgctggtgcgtaccctgctgggcgccgccgaggcgggcttcttcccgggtatgatctacctgacttcccagtggttcccgcagcagaaccgcgccagcattatggggctgttttatatgggcgcgccgctggcgctgaccctcgggtcgccgctctccggcgcgctgctggaaatgcacggctttatgggacatcccggctggttctggatgtttatcattgaggggctgctggcggtcggcgccgggttcttcaccttcttctggcttgacgatacgccgcaaaaggcgcgtttcctgagcgctgccgaaaaacaggcgttaatcagcgagctggccagcgaagagcagaaaaaggtgacttcgcgtttgtccgatgcgctgcgcaacggccgcgtctggcagctggccattatttatctgaccattcaggtagcggtttacggtctgatcttcttcctgccgacccaggttgccgcgctgctcggcaccaaggtggggtttgtggcttcggtggtgaccgctattccttgggtagcggcgctgttcgggacctggctgattccgcgctactccgaccgtaccggcgagcggcgtaatattgccgcattcaccctgctggcggcggcgattggcattgcggtctccgggctggtgtcgccagtgctggcgattatcgcgctgtgcgttgccgccgtgggcgtcattgccgtacagccggtgttctggaccatgccgacgcagctgttgtccggcacggcgctggccgcgggcatcggtttcgtcaacctgtttggcgccatcggcggttttctggcgccgattatccgcgtccaggctgaaacaatgttcgcgagtgattctgccggattagtgacgctcgcctgcgtggcgattgtcggagttgttattatcttttcactgcgcgtcaatcgtacggtgccgcaggctgacagcgtacagcattaa

SEQ ID NO: 257346 - DNA, 804 bp, Klebsiella pneumoniae
atgaacgcaattttatcgaacccatttaaagcgggattgttgcaaggggaagcgcaaattggcctgtggctgagctcgacctcttcgtatatggctgagattgccgccacctcgggttacgactggctgctgattgacggcgaacatgcgcccaataccattcaggacctgtatcatcagctgcaggccatcgcgccctacgccagccagccggtgattcgcccggtggagggcaatcgtagcctgattaaacaggtactggatatcggcgccagaacgctgctgatcccgatggtcgataccgctgaacaggcgcgggagatcgtctcggctacccgctatccgccggtgggcacccgcggcgtcggggccggggtggcccgcgccgcgcgctgggggcgggtagagaactatatggcgcaggccaacgatgaactgtgcctattgattcaggtggagagcaaaaccgccctcgataatctggatgcgatcctcgaagtggaggggattgacggcgtctttatcggcccggctgacctatcggcttcgctgggctacccggacaacgccgggcatccggacgttcagcgcattatcgaacagagcatccgccgcattcgcgcggcgggaaaagccgccggtttcctcgccgttgacccggagatggcgcacaaagcgctggcgtggggggccaattttgtcgccgtgggcgttgataccaacctctatacccgcgcgctggataaacggctggcgatgttcaagccgatagccgaacaggcggagggaaaggggagctattag

SEQ ID NO: 257347 - DNA, 1251 bp, Klebsiella pneumoniae
atgaagtttgattgcgccattatcggcggcggccttgccgggctgctctgcgggctggcgctcaatcagcgcggcctgcgcagcgtgattatcagccgcggccaaagcgccctgcacttctcttccgcctcgctggatctgctctcgacgttgccgaatggcgaaaccgtcaccgatgttgctcacggcatcggccagctggcccgccagcttcccgagcatccttatgccagactcggcgccgaacgggtaatgggttacgccagccaggcgcaggctctgtttgccgactgcggtatcgctatgcagggtgaggccagccagccgcatctgcgcgtgacgccgctgggaaccttacgcgcggcctggctttcgccgcaggagattgccaccgcgccgctgcccgccaacggcgtctgcgtggtcggcatcagcggattcggcgacttccagccgcatcttgccgccgcctcgctgaaccagcatggcgttcacgccgaagcgcaggagatagatttaccgctccttgatgttctgcgcgatagcccatccgaatttcgcgccgccaatatcgcccgccgtctggacgatgaaacacagtggccggcgctgctggcggcgctgcgtccgctggcgcagcggcaccgtttcattatcatgcccgcctgcttcggcctcgccgacgatcgtctgtatcagtggctacagcagcgcctgctgcgcctgctgccgacgctgccgccttcggtgccggggatgcgcctgcacgcccagctccagcggcattttatccgcggcggcggcacctggcttaccggcgacgaagtcatcaatattagccagcagaacggtatcgttaacgctatctggacgcgcaaccacggcgatatcccgctgcgcccgcgcttcgcggtgctggccagcggcagctttttcagcaatgggctggtcgccgaacgcagcggcgtgcgcgagcctattcttggccttgatctgcagcagacgctaccgcgcgagcgctggtatcagcaggacttttttgcttcccagccctggcagcgtttcggcctgaaaaccgatgcggccctgcgtccgcagcttcaggggcagacgctggagaatctgttcgccgtaggttctattcttggcggttttgatgccatcgcgctgggatgcggcggcggcgtctgcgcggtcaccgcgctgcacgccgcaaggttaatcggcgagcttgccggaggtgagtcatga

SEQ ID NO: 257348 - DNA, 849 bp, Klebsiella pneumoniae
atggtgcttgaatgcggcgggtttaccgaggcgggaaaacgcctgtacatgacacaatcagccgtcagtcaggcaattaatgcactggaagaggagctaggggtcgtgattttggtacgcgagcggcgaaaggccatcacgctaacggcagtcggtgaacggattgtctcccatctgcgacggctggcgcatgaggtcaacgcggtgaaagaaatcgccgagcaggaaaaacagtcgccgttacgattactgcgtattggctgcttccccagtatttgcgcctgcattttaccgcaggtagtgcgctattttgaaacatactacccgcagattaaaattattccccacgaagccaacagtacggaaattattgaatccctgcgccaggataaaattgatattggttttgtccactctccggtacccaatatgtattccctcccggtctacaaagataaattcaccgtcgtggttccggaaaaccacccgtttgcacagcgcgactccgtaaagcttgaagagctcttcagcgagccgttaattaccagtacaggccgctatgagctaagtattatgacgttatttaaagagcacaatattacgcccgagattaaatatgaattcaaccacccggcaacggccatcagttttatccgccagggactgggcatcgcgctgctccccgaactgacgctcaaagcgctggagcatccgctgcgttccgtggccctggagccagccttttatcgacatatttctctcattgccaaccaccctccagtgacgggcagccccttgcagatactcaatgagtgcctccatcaactggtcacagaaggtaaaatttaa

SEQ ID NO: 257349 - DNA, 1191 bp, Klebsiella pneumoniae; identical to SEQ ID NO: 188561

SEQ ID NO: 257350 - DNA, 315 bp, Klebsiella pneumoniae
  misc_feature (209)..(218): n is a, c, g, or t
atggcatataccactttttctcagaccaaaaacgatcagctgcttgagccgatgttttttggtcagccggtgaacgtcgcccgctacgatcagcaaaaatatgacatcttcgaaaagctgattgaaaaacagctctccttcttctggcgtccggaagaagttgacgtttcccgcgaccgcatcgactaccaggcgctgccggaacacgnnnnnnnnnnttcttctggcgtccggaagaagttgacgtttcccgcgaccgcatcgactaccaggcgctgccggaacacgaaaaacacatttttatcagcaacctga

SEQ ID NO: 257351 - DNA, 651 bp, Klebsiella pneumoniae
atgaacaatatgaacgtaattattgccgatgaccatccgatcgtactgttcggtattcgtaagtcacttgaacaaattgagtgggtgaacgttgttggcgagtttgaagactccacggccttaatcaacaatctgccaaagctggacgcacacgtcctgattaccgatttatccatgcccggtgataaatacggcgatggcattacgcttatcaaatacatcaagcgtcatttcccggatctgtccatcattgtcctgacaatgaataacaacccggcgatcctgagcgcggtgctggatctggacatcgaagggatcgtcctgaaacagggtgcgccaaccgatctgcctaaagcgctggccgcgctgcaaaaaggcaaaaaattcaccccggaaagcgtttcgcgcctgctggaaaaaatcagcgccggcggttacggcgacaaacgtttgtcgcctaaagagactgaagtactgcgtctgttcgccgaaggcttcctggtcaccgagattgccaaaaagctcaaccgcagtatcaaaaccatcagtagccagaaaaaatcggcaatgatgaagctcggcgtggaaaacgacattgccctgctgaactacctctcttccgtttccctgagctccacggacaaagactaa

SEQ ID NO: 257352 - DNA, 1119 bp, Klebsiella pneumoniae
atgaaagttaaagtactgtccctcctggtaccggcactgctggtagcgggcgcagcgaatgcggctgaagtctataacaaagatggcaacaaattagacctgtacggtaaaatcgacggtctgcactatttctctgacgacaaaggccaagatggcgaccagacctacatgcgtctgggcatcaaaggcgaaacccagatcaatgaccagctgaccggttacggccagtgggaatacaacgtccaggctaacaacaccgagagctccagcgatcaggcgtggactcgtctggcgtttgcgggtctgaaattcggcgacgcgggttctttcgactacggtcgtaactacggcgttgtttacgacgtaacttcctggactgacgttctgccggaattcggcggcgacacctacggttctgacaacttcctgcagtctcgcgctaacggcgtggcaacctaccgtaactctgacttcttcggtctggttgacggcctgaactttgctctgcagtatcagggtaaaaacggcagcgtaagcggtgaaggtacttccccgaccaacaacggtcgtggcgctctgaaacagaacggtgacggctacggcacctctctgacctatgatatctacgacggtatcagcgctggtttcgcgtacgccaactctaaacgtaatggcgatcagaacagccagctggctctgggtcagggcgacaacgctgaaacctacaccggtggtctgaaatatgacgccaacaacatctacctggcgtctcagtacacccagacctacaacgcaactcgcgtaggttccctgggctttgctaacaaagcgcagaactttgaagtagtcgctcagtaccagttcgacttcggtctgcgtccgtccgtagcttacctgcagtctaaaggtaaggacctgtacatcaacggaactaaccgtagctacggcgatcaggatatcctgaaatatgttgatgtaggcgcgacctactacttcaacaaaaacatgtccacctacgttgactacaaaatcaacctgctggacgaaaacaacttcacccgtgctgccggtatctctaccgacgacatcgttgctctgggcctggtttaccagttctaa

SEQ ID NO: 257353 - DNA, 474 bp, Klebsiella pneumoniae
gtgattaccggggttcatcagaccacgctcgccatcgatatgcagatgattcagagcatgggcgggacgccggtatggccgctgattgcgctatccaacatcgcccaggcatcggcggtcgtgggaatcatcatcgccagccgcaagcagaatgaacgcgaaatctccgttccggccgccatttccgcctacctcggcgtcacggagccggccatgtacggtatcaacctgaagtaccgcttcccgatgctgtgcgcgatggtcggctccggtcttgccgggctactgtgcggtctgaacggcgtaatggccaacggtatcggcgtcggcggcctgccgggcatcctctctatccagccaacctactggcaggtttacgcgctggcgatggccatcgccgtggtggtgccgattgtcctgacgacggtcgtctaccagcgcaaattccgccagggcaccttacagattgtctga

SEQ ID NO: 257354 - DNA, 1356 bp, Klebsiella pneumoniae
atgtctcgtacttcatttattgaacgctatgtcatgcccgccgcgctgaaaatcggcggccagaagcatgtcctgtcggtacgcgacggcattattctcaatatgccgtttatgctgattggttcgtttttcttgatattcgcctacctgccgattcccggctacggtgagatgatggccagcgtatttggcgatgcctggcgcgacaaaatgctgtacccggtcaaagcgacctatgacatcatggcgctgctctcggccttcggcattgcctaccggctggcggaaaaatatcgcaccctggacccgcttagcgccggggcgatgtcgctggtggcgtttgtgatgacgatcccgcaggtgacgctctttacgccggcagatggttcagcggcgcaacttgtcaaaggcgtgctgccggtggggatgattggcagccagggactgtttgtggcgattgtgatttcgctgctttccacggagatctaccgcctggtggccagccgtaatctggtgatccgcatgccggacggcgtaccgccggcggtggcgaaatcctttcttgccctgatccccggcttctgcgtgctggccgtggtgctggcgctgcgcctgatcgtcgaagcctcgccgttcggcgatatcaatagcatgatcaccacgctgattggtattccgatgtcgcacgtcggcggttcgctgccggggatgattatctcggtgatcctgattggcattctgtggaccctggggctgcacggcgacaccatcgtgctggtgtttattcgcccggtctggctgtcgaatatgtcggagaacctggaggcgtttcagaacggactgccgatcccgcatatcatcacccagcagttttatgacctatggattgcgcccggcggtaccggggcgctgctggggctggtgatttttatgctgctgcgcagccgtagccagcagatgaaacagctggggaaaattgccgcgccgggggcgctgttcaatatcagcgagccgatggtattcggcattccgctggtgatgaacccgtacttcttcctgccgtttattttgacgccggtcctgttggtgattgtctcgtataccgcgatggccaccgggctggtgatgaagccggcggggattgcgctgccgtttaccacgccgatttttatgagcggctatctggcgacggggggacatatttccggcgcggtgctgcaggtggtgaacctggcgatctcgctggtgatctattatccgtttttccgggtatgggatcgcctgaaggcaaaagaagagcaggcgtcagcgcagccggaagccagcccgacgctgtctgcggcggagcgtatttaa

SEQ ID NO: 257355 - DNA, 1719 bp, Klebsiella pneumoniae
atgcccgaaaccaccatcatcaaactcaccctgaccggccttaccgccgcgaccgcgcgcaccgactcccagcttaacggcctgaccaccgccactgtcgcaggaaccacctccgtgccgctaatccttgataccgtgctggcgacccatctaacaacaacgatcaacaatgccgactatgacgggctgattgccgaggcgcgccagcttccggcgaccagcaacgccgatcgctatcagtttgtgctgcgcccctggctgtggtggctgacgctctccagcaacaaccgcgtttttcagaacctcaacgcgcaagaaattgtcgagaaggtgtttaaggacggcggatttaccgactacaagttccagctgaaaagcaaaccggcgaagcgtgaatactgtctgcaatataaggaaagcgacttcaattttgtctcgcggctgctggagcaggaggggatcttctggttcttcacccataaagaaggcaagcatacgctggtgctggcggatgataacagcgcctgcccgcctattcccggcgagaaaaaagtcaagtatcaggcggctcagaacggcgggcgggaaaccggaatgattcgttcggcgcagctgcgtttacaggctaccgcgcagggggctcaccccggcaatgataaatctgagcagccgaaacagctgatcggcgaaagcgactgcccagcgctgatggcagggcactggtttaccctcgccgatcatgacgacaaagcaaccaatatcgactggctcatcaccaccgtcagccatgaatatgacggcgaacgctaccgtaaccgttttaccgctatcccgaaagccaccccgtatcacccaccgtgcgccacgccgaagccgtttatgcctacgcaaaccgcaacggtggtcggcaaaaatggagaagaaatctggactgacaagctcggacgggtaaaagtgcagtttccgtgggagcgggaaggcaaaaacgatgagatcggctcctgctggctgcgggtcgccaccgcctggagcggtaacggcttcggcgcgcagtttatcccgcgcattggtcaggaagtggtcgtgagctttatcgacggcgacccggataagccgctcattaccggctgtgtgtacaacggcgcgaatgccctgccgtatgcgctaccggcgaatcaaactcagtcgggcattaaaacccacagcgaacaaggctttaacgaactgcgcttcgacgacaaaaaagatgccgagctgctggcgatgcaggcgcagaaggattttcaggtcaccgtgctgaacgacagtacaaccatcgttggccatgatgagatcctgagtgtgaaaaataaacgcagcgtaacggtgaagggcgatcaggaacacgctatcgacggtaatgagacgcataaggtaaaaggcaactacacgctcaatgttgacggtaatctgacgattaaggtcagcggcacgctcaccctcgagagcggcaaaaccctggacataaagagtggggcgggtcttaacgccagcgcgtcaggcagcatgaagctggatgccgccagcatcgccagtgaagccaaatcctcactgtcccagaaagccgtaaccatcagccaggaagcaagagcgacgcttaccagcaaagccagtgccacccagaccgttgacggcggcgggatgctggtgattaaaggtggcctggtgaaaattaactga

SEQ ID NO: 257356 - DNA, 486 bp, Klebsiella pneumoniae
atggatgcgatttttttaaagctcgacgatatcgaaggtgaaagtcaggccaaaggatttgaaaaacagcttgagatcatgagctacagccataacgtggcgatgcagatcgctaatgacgtcagtaacactgaacgtacctcagggcgggcgcatgtcggtgaaatgtcgttgaccaagtttgtcgatctcgcgacgccaaagctcaatgagtactactgtagcgggaaaccgattacagaagccgtgctgacgttgtgccgtaatgataacggaaaaatgctgccatttatcgtatataccatgatgaacgtcgttatctcacatctgagcgttagcggcggttccggcggcaaaccggtcgaaacgatgtcgctgaactttaccaaaattaaatgggaaatcaccgctcagaaatcggatggtcagaaagaaggcaacgtctcttccgtttgggatgtggcgatgaataagaaaggtagctga

SEQ ID NO: 257357 - DNA, 330 bp, Klebsiella pneumoniae
atgctgaacgtactgctcaccagccccaccctcgtcagcaacatgccgatggcgaatattatggataacaaaccgtttgtgaatattttgccgttcgggatgtgcaacagtatcgccaacccgacggtggccgccgctaccgccgcggcgctcggtgtgctgacgccgatgccctgtattccgacaacgcccgcgccgtggatgccaggctcacccacggtgctggtggggaatatacccgccctcaccgcccagtcacagttgatgtgcatatggggcggcgtgattcagattcgttttcctgggcagatgacgacggtcgtggcgtga

SEQ ID NO: 257358 - DNA, 1152 bp, Klebsiella pneumoniae
atgccaaccgctcgtcacctgcttgttgcttcactctctctactcgccgccggcgccgctgcgcaaacccactacgcctgggtcggcacctacaaccccaatggcgaaggactgtaccgctttaccgttgatagccagaccggggcgctgcgcgataaagcgctggttgctaagctgcctaatcttgcccagctcgccgtctcggcggatggcaaaaccctgtacgccgccagcgaagtggacaagggcgtggttcaggcgtggcgcatcggcagcaacggcgaattgagcgagctcaatcaggtcgcttccggcggcgccgggccggtttatctctccctgacccccgatggccgccatctgctggtggcaaactacgtcagtggcagtatcgcggtgctcccggtgaaggaagagggtaacctgggtgaagcggtggatatacatcaggatcaaggccctgcgggtgcggaacgcccggcggcggccgtcgaaggcagttttgccattagcgatcataacggcccccacgcccatatggtcgccgccgatcccagcggtaagttcgtttactccaccgatctggggctggaccggatctatcagtaccggctggataacgccagcggcaagctgacgccgaacgatccgccgtttattgacgcctcatctcccggcgccgggccgcgccactttgtgtttacgccgcagggcgacggactatggctgattaacgaagaggcatcgacgcttaccttctatcatcttgataagcaaagcggcctgctgcgcgaggggaaaacggtctcggcgctgcctgaagagtataagggcaccagctttgccgccggcctggtcctgagccgcgatggcaagcagctgtacgtcgccaaccggctgcataatagtatcgcccactttacggtgctggccgacggcagcctgagtcaccaggaagatatctggacccgcggcgactacccgcgcacgctgaccctggacagtcaggggcagtggctgtacgtcatgaaccagcgtagcgacaatattacccgtttccgcgtcgcgccgaaggatggcaggttgacgttctccccggactacactccggtcggcggcccgtcgcagatggtgatatccgctcaaccctga

SEQ ID NO: 257359 - DNA, 741 bp, Klebsiella pneumoniae
atgaaactgacccctaatttttaccgtgaccgcgtctgcctgaacgtgctggcgggcagtaaagataacgccagcgagatttatgaggcggcggaaggtcatgtactggtgggcgtgctctccaaaaattacccggacgtcgccagcgcggtggccgatatgcgggaatacgcgctgcggattgataacgcgctctccgtggggctgggagccggcgacccgaaccagtcggcgatggtcagcgaaatctcgcgccaggtgcagccgcagcacgttaatcaggtatttaccggcgtagcgaccagccgcgcgctgctggggcagaacgacaccgtggtcaacggcctggtgtcgccaaccggtacgccggggatggtgaagatctccaccggcccgctcagcagcggcgcgccggacggcatcgtaccgctggaaaccgcgattgcgttgctgaaagatatgggcggcagctcgattaaatacttcccgatgggcgggttaaaacatcgcgacgagtttatcgcggttgccgaggcctgcgcccgttatgatttctggctggagccgaccggcgggatcgatctggaaaactacggcgagatcctgcagatcgcgctggacgccggcgtgagtaaaattatcccgcatatctacagttcgattattgataaagccagcggtaacacccgcccggcggacgtgcgtcagctgctttcgatcaccaaacagttagtcaaatag

SEQ ID NO: 257360 - DNA, 1119 bp, Klebsiella pneumoniae
atgccttcgatttttgagaaatatgatttaaaacaggttattaatacctccggtcgtatgaccattctcggcgtctccacgccgcggccggaagtggtggaagccgcgatggcgggcatgaaccagtacttcgagatgaaagatctggtcaataaaaccggcgcgtatattgcgaagctgctggacgtggaaggggcgaccgtcgtctcctgcgcctcggcgggtatcgcccagtcggtggcggcggtgctggtaaaagacagcgactggctgctggaaaacctgcacgtgacgccgatcgaaaacaacgaaatcgtgctgcctaagggccataacgtcaacttcggcgcgccggtgggcaccatggtggcgctgggcggcggcaggctggtggaagcgggttacgccaatgaatgttccgccgggcagctggcggcggcgattaccccgcgcaccgcggccattctgtatatcaaatcccaccactgcgtgcagaaaagcatgctcaacgtggcgcaggcggccgcggtggcgcagcgccataatctgccgctgattgtcgacgcggcggcggaggaagacctccaggcctactatcgcgccggcgcggatctggtgatttatagcggcgcgaaggcgatcgaagggccgaccagcgggctggtgatcggcaaaacccaatacgttgagtgggtcaaacgccagtcgaacggcattggccgggcgatgaaggtgggcaaagaggggattctcggcctgacctgcgccatcgaacactacctgacggcgagcaaagagagcggtgagcagatggtggcgaagatgacgccgtttattcagcagcttaatacgcttaatggcgtgacggcgcgcgtggtctgggacagcgccggtcgcgatatcgcgcgggcggagattaagtttgatgaagcggtgaccggcgtcaataccggtgatttggtcaacgcgctgaagcagggcgaatacgccatctacttccgcggctataaggccaatgaaggcattattgaagccgatgtccgcagcgtgaacgcgcagcagctggagattgtctcccgtcggattgcagaggttctgaacaaggagaaaaacgcatga

SEQ ID NO: 257361 - DNA, 1134 bp, Klebsiella pneumoniae
atgtttgatttactcctgcgccgtgcgcgcctcgtcgacgataccctgaccgatatcgccatccgggacggtaaaatcgcggcgcttggcgagattagcgcccctgcgcgcaaaactattgcgctggacggcaactgttacgtcagcgcgggctggattgactcccacgttcactgctatccgagctcgccgatataccatgatgagccggacagcgtggggattgctaccggcgtgaccaccgtgattgacgcgggcagcaccggcgcggacgacgtggatgatttctaccagctgacccgcgaagccgcgaccgaggtttatgccctgcttaacatctcccgcgtcgggctgattgcccagaatgaactggccaatatggcgaatatcgacgcggaggcggtgaagcaggcggtcaaccgctatccgaactttatcgtcggcctgaaggcgcggatgagcagcagcgtggtgggcgaaaacggcattacgccgctggcgcgcgcgaaggcgatgcagcaggaaaacggcggcctgccgctgatggtgcatatcggcaataatccgcccgacctggatgaaatcgccgatctgctgacctcaggcgacatcattacccactgctacaacggtaaacccaatcgtattctgacgccgtccggcgagctgaaaagcgcgatttcccgtgcgctacagcgcggcgtgcgccttgatatcggccacggtaccgccagcttcagctttgaggtggcgcgtcgggcgattgctatgggcattctgccgcacaccatcagctccgatatctactgccgcaaccgtatcgacggcccggtgcgctcgctggcgctggtgatgtcgaaattcctcgccatcgggatgtcgctgccgcaggtcatcgactgcgtgaccgccaacgccgcagacggcctgcgtctgattcataaagggcggctggaggtgggctacgacgccgatctcacgctgtttaccctcccgcagacgccgacggtgctggtggatgcggaaaaagagagccttcagaccgacacgattctgcagccgcttgccgccgttcgcgcgggcaagggctatctgaccgaacaagggagcgcggaaaatgccttcgatttttga

SEQ ID NO: 257362 - DNA, 645 bp, Klebsiella pneumoniae
atggaacaaaataaaggtttttggtatgccgactggtcgttcccgatctttgttggcctgctctcctccggcgtctttgccgggacgcatatgtactacctctacggcatcggcgcgtttaacgaagtcgctttcgtggcgatgctgaaagcgggaatcgataccggggcctacggcgcggtggcggcgttcggcgccagcttcctgttcgcgcgtattatcgaaggctcgctggtggggattctggatatcggcggagcgattcagaccggcgtcggcctgggcgttccggcgctgctgctcggcgcgggctttgttttcccggtcgccaactttgccgcctctctggccaccggcctggtgcttggcctcgccattggctacatcatcatcctggcgcgtaaattcaccatcaaccagagcgactccacctacggtgcggacgtcatgatgggggccggtaacgcctccggccgcttcctcgggccgttgattattctcagcgccatggccgcttctattcctatcggcatcggttctctggcgggcgcgctgctgttctacatctggcagaagccgatcaccggcggcgcgatccttggcgcgatgctccttgggtcaattttcccggtggcgattagttaa

SEQ ID NO: 257363 - DNA, 777 bp, Klebsiella pneumoniae
atgttcctgataattttaataaaatcgctcatcatcggcggcctggtcggcgtcggcgttggcgccggagcggcacgcatgtttcatgcgcccaccacgcaggggatgggggcgtttcgtacattaggcgagctgaattcatgtgaaggcgatccggcttcccacttttcttttggcctgggcttcttcttcaacgcctgggcctcttccgtcgcggcaggctccttcacgcaggacgttgaccaccgcatcatccccaactggggggcggcggccctgatgatcaaaaaccgcaacgtcggcgagacgctgcacgatccgaaaaagatggccatcgcctgcggcattatcggcatgatcgtggtcgctttccttaacctgaccgcctcttcagtaccggaagcgctgcaggtgacggcggtcaaagtcctggttccggcggcaaacctgctggtgaacacggtgatgccggttatcttctggctggcggcgattgatgccggtaaaaaatcgggcttctgggcgacgattttcggcggcgcggcgcagctgattatgggtaacgccgtaccgggcctggtgctgggcatcctgattggtaaaggcgtagaagagagcggctggcaccgcgtcactaaagtgatgatggtggccatcgtcgcgctgttcgtcctgagcggcttcttccgcggtttcgacatgaagatgattgaatccttccatctgaccgtgccgaactggctggaactgatccacaactcgctcagcggtaaataa

SEQ ID NO: 257364 - DNA, 237 bp, Klebsiella pneumoniae
atgtattcacttaacaaaattcgcgtgatgaatatcacaaaaacgccagcgatgctgaagcggaacccgctgagtagaaaagagaaaaatgtgatgaaggtagttttttacgtcagcttacccacctgcaagggcccgcggaacggtttggggtttgggagtatttttcagtttgccatgccgggcgaggcgtcagccgccgcccggcagaaatacctaaaatctaagaacgattaa

SEQ ID NO: 257365 - DNA, 957 bp, Klebsiella pneumoniae
atgtggaagcgcttacttcttgtcacagcagtttccgcagctatgtcgtctatggtcatggctgcccctcttaccgtaggtttttcgcaggtcggttctgaatccggctggcgtgcggccgaaaccaacgtcgcgaaggaagaggccgcgaagcgcggcatcactctgaagattgccgacgcccaacaaaaacaggaaaaccagattaaagccgtacgctccttcatcgctcagggcgtcgatgccatcttcatcgctccggtagtggcgaccggctgggagccggtactgaaggaagcgaaagaagccaaaatcccggtattcctgctcgaccgctcaattgatgtcaaagacaaagatctctatatgaccaccgttaccgcgaacaacgtgctggaaggccagctgatcggtgagtggctggtgaaaaccgtcgacggcaagccgtgtaacgttgttgaactgcagggcaccgtgggggccagcgtggcgattgaccgcaagaaaggcttcgctgaagccatttctaaagcctccaatatcaagattatccgctcccagtccggcgactttacccgcagtaagggtaaagaagtgatggagagctttatcaaagcggagaacaacggcaagaacatctgcatggtttacgcccataacgacgacatggtgattggcgccattcaggcgattaaagaggccggactgaagccgggcaaagatatcctcaccggctctatcgacggggtgccggatatctataaagcgatgatggccggcgaggctaacgccagcgttgagctgacgccgaatatggccggcccggcgttcgatgcgctggagaaatacaaaaaagacggcaccctgcctgaaaaagtcaccatcaccaaatcgaccctttatctgccggatacggcgaaagaagagttagagaagaagaaaaatatgggctactaa

SEQ ID NO: 257366 - DNA, 528 bp, Klebsiella pneumoniae
atgagcttactcaacgtacctgcgggcaaagatctgccggaagacatctacgtcgtgatcgagatcccggcgaacgcagatcctattaaatacgaagtcgacaaagagagcggtgcactgttcgttgaccgtttcatgtccacggcgatgttctatccgtgcaactacggctacatcaaccacactctctccctggacggcgacccggttgacgttctggtcccgacgccgtacccgctggagccaggttcagtcatccgctgccgtccggtcggcgtactgaaaatgaccgacgaatccggtgaagatgcgaagctggttgcggtaccgcacaccaagctgagcaaagagtacgatcacatcaaagatgtgaacgacctgccggaactgctgaaagcgcagatcacccacttcttcgagcactataaagacctcgaagcgggcaaatgggttaaggttgacggctgggacaacgccgaagcggcgaaagctgaaatcgtggcttccttcgagcgcgctaagaagtaa

SEQ ID NO: 257367 - DNA, 1944 bp, Klebsiella pneumoniae
atgattaagtttagcgcaacgctgctggccacgctgatcgccgccagcgtaaatgcggcgacggtcgatttgcggatcatggaaaccaccgatctgcacagtaatatgatggactttgactattacaaagacagcgccacggaaaaatttggcctggtgcgcaccgcaaccctgattgaaaaagcacgccaggaagccagaaacagcgtgctggtcgataacggcgacgtcattcagggcagcccgctgggcgactatatggcggcgaaggggctgaaagagggcgatgttcacccggtctataaagcgatgaataccctggactatgcggtggggaacctcggtaaccacgagtttaactacgggctcgacttcctgcacaaagcgctggccggcgcgaaattcccctacgtgaacgccaatatcatcgatgccaaaaccggcaaaccgatgtttacgccttatctgattcaggatacccaggttcaggatagcgacggcaaaacgcagacgctgcgtattggctatatcggcttcgtaccgccgcagattatgacatgggataaagccaatctcagcggcaaagtcaccgtcaacgacattaccgcaaccgcgcgcaaatttgtcccggaaatgcgtgaaaaaggcgcggacgtggtcgtggtcattgcccactccggcctctccgccgacccgtatcaggcgatggcggagaactccgtttactatttaagccaggtgcccggcgtcgatgccattatgttcggccacgcgcacgccgtcttcccgagcaaagattttgccggtattaaaggcgcggatatcgctaaaggtacgctgaacggcgtaccggcggtgatgccgggcatgtggggcgatcatcttggggtggtcgatctggttctgaacaacgacagcggcaaatggcaggtcagcgcagcgaaagccgaagcgcgcccgatctacgatgcggcggcgaagaaatcgctggcggcagaagacagcaacatggtggcggtattaaaagccgaccatgacgccacccgcgagtttgtcggcaaaccgatcggtaaatcctcggataatatgtacagctacctggcgctggtgcaggacgacccgaccgtacaggtagtcaacatggcccagaaagcctatgtggagcactatattcagggcgacccggatctggcgaagctgccggtactctccgccgccgcgccgtttaaagtcggcggacggaaaaacgatccggccagctttgtggaagtggaaaaaggtcagctcaccttccgcaatgccgccgatctctacctgtatcccaacaccctggtggtgatgaaagtgagcggtaaagaggtgaaagagtggctggagtgctccgccgggcagttcaatcagattgaccccgccagcagcaagccgcagtcgctgattaactgggacggcttccgcacttacaacttcgacgtcattgatggcgtgaactaccagattgatatcacccagccggcgcgctacgacggcgaatgcaacagcgtcaatccgcaggccgagcgaattaagcatctgacctttaacggcaagccgatcgatgcgaacgccactttcctcgtcgcgaccaacaactaccgcgcctacggcggtaaattccagggcaccggcgaagatcatatcgcgttcgcctcaccggatgaaaaccgctcggtgctggcggcgtggattggcgcggagtcgaagaaaaacggcgagatccatcctgcggcggataacaactggcgcctggcgccgatccacagcagcgtaccgctggatattcgctttgaaacctctccgggcgataaggccgcggcgtttatcaaagagaaagcgcaatacccaatgcgtcaggtcgccaccgacgatatcggttttgccatttatcagctggatttgagtcagtaa

SEQ ID NO: 257368 - DNA, 777 bp, Klebsiella pneumoniae
atgaatgaacaacccgttctgttcagcagagcggcggcctcctgtcgcctgacgctgaatcgcgaagataaatgccacgcgattaacgaagaaatgatcgaattactcgatcgctatttaaacgaaattgaaaatgacgccacgctgcgcctggtggaattaaccgccacgggagataagtttttctgcgcgggtggcgatattaaatcctggtctgcttattcaccgctggatatggggcggaaatggattaagcgcggcaatgaggtcttctcacgcctgcgcaatttaccccagcttaccgtggcgaatattaacggtcacaccatcggcggcggcattgaactggcgctgagctgcgatatccgcatcgcccggccgacagcaaaattctccaccccggaagtcacgcttggcatggtgcccggctggctgggcatcgagcgggttctcaatcaagttggcccggttgttggccgccagatgctgatgctgggccagcgcctgagcgcccaggaagcgcaatccgctggactgattaacaaggtcgtggaaaaagatgacgcggatggctggctgatgaatcagctttgcgctctgcaaaagtgcggcccggtcgccctggcgcatattaaacagctcattctggcgctggaaaataagcatgccgactactcgcatcagctgctggccggcttgatgtcagccacccaggattgccagcaagcgacgcaggcttttgctaacaaaagcccggtaagtttccagaataagtaa

SEQ ID NO: 257369 - DNA, 2070 bp, Klebsiella pneumoniae
atgagccagatcgatgacgccattcttgatgccctgactcacgtctcctttcctaaagggttcgctaaagcggaaccggcttccattctgacgatcgataacgtcaactatccgctttggaaagccgatgcgctagtcgtcggcagcggggccgcggggttacgcgccgccgttgaactcaagcgccgtcagcaaaacgtattattagcgaccgccggattatatatggggacctccgcctgctccggctcggataaacagacactgtttactgccgccacagcaggcaatggcgatagctttcttaaactggctgacgcgctggccagcggcggtgccatggactacgacactgcctatgtggaagcagtaggttcgctgcatactttgggtgggttgcaatttcttgggcttgaactgccggaggaccgctatggggcgatcctccgctatcaaaccgaccatgatgaagccggacgcgcgacctcctgcggcccgcgcacctcgcgtctgatggtaaaggttttgctggaagaggttcagcggctcaatatcccactgttgagcggtgcgacagttatcaaactattacgccagtgcgatgaatcaggaacggaacatatggcgggggcaattctggcgacggggtctcgcgcccataacccgtggggactggcgctggtagtcactcccaatgtcgtcctggcgaccggcggccccggagagctctaccgcgacagcgtctaccctaataaatgctttggctcactcgggctggcgttggaagagggaatcacgctcaccaatctgaccgaaagccagttcggtatcggcacgccgcgcagcgcctttccgtggaatttatccggcacctacgtgcaggtgattccctatatttattctgtcgatagcggcggcaaagagcataattttctcgctgactactaccgcaccactcaggaactagcctcaaacatctttcgtaaggggtatcagtggccgttccatgctacaagggtgatggatttcggctctagcctgctggatatggctgtggcgcatgagcagcagctggggcgcaaagtctatatggacttcaatcgcaatccagaagcggtaccaggcgatcttcccttctcgctgcaacggctagacgacgatgtgcgggcttatctggaaaacaacgatgcgctggcagcgctacccattgaacgcctgcagcgaatgaatccgctatcgatcgccctgtataaaatgcacggccacgatttgacgcaaacaccgctgcagttcgccatgaacaatcagcatatgaatggtggtattgaggtcgatatctggggtcaaacctctctgcccggctgttttgcggtaggtgaaatcgccggaacccacggagttacccgtccaggcggcgcggcgctgaatgccggacaggtctttgccatgcgtctggcgcgctatatcgcacatgcaggcaggcgcaacgcggtcgatgacgtgcctgaactggctgctcagccgctggcggaggtaaatgacgtcattctgcgagcgcagcgcaatgagtcaggccgctccctgcaaagcgtcaaggaagagatccagacacgcatgtctgaccacggcggatttatctgccatgtcgatgccgtcaggcaggccgcacaggaggcccgcctgttggctgccgcggtggcgaaaaatgccctatcgatccgccatctggcagaaatccccgaactgtttatgtggcgtcaaatggcactgatatcggcggcggtgctgacaatgctggacgactatatctccgcaggcggcggcagccggggtgccaggatcatccttgaccccgaaggcgattgtctgccgttaacccgtaacgggcccgcgcagctatggcgttttcgaccggagcaggcgtcagacaaagagaaaaagctgacgattcattatcagcaggccaaatttattgttcggcaaaaagccctgagaagcttagccgatagtaaagatcattattttgaaaagaactggcctgattttctcaacggcaatatttatcgctag

SEQ ID NO: 257370 - DNA, 471 bp, Klebsiella pneumoniae
gtgcgggttgccgaagaacagccagttcttgccttccgcgccttccgccgcgcgctgctgcataaaggcgcggaacggcgcgatgccggtgccggggccaatcatgataaccggcgtctgagggttagcgggcagacggaagttatcgttatgctcgataaagatgcgcacttcgccatcttcttcgacgcggtcagccaggaagctggaggcgccgccggcgcgggcgcggccttcgatgtcataacgcaccacgccaacggtgacgtggacttcgctttccacttccgcctgcgaagaggcgatagagtacaggcgcggcgtcagcggacgcagcaggtcgaccagcgcctgagcatccatctgcgccggggagaaacgcaccatatcgacaatcggcgtggtcgcggcgtaatgctggagctgcgccttatcgcccaccagcggcagcagagactcgctgcgggttaa

SEQ ID NO: 257371 - DNA, 924 bp, Klebsiella pneumoniae
gtgccactccagcgcttcggcgagcggcagcgttttgccgtcaaccgtgaccggttccgcgcccgtcagccacagcagctccaccagctctttcaccagagccggatcgttctggtaccagacgcccagcgcatcgcccggctgatagcgcaggccagagtcgccgaggtcgatttcaatatggcgcacgtctttttcagaatcgcggccagtgattttttgattcaccgccagcgtcgcggtcagcggcgcttctttgctataggggctggtgtggatctcgttcaccgacccgctggcgagcagctgagacggcgcagcggcaggcgcgcgcgctttcagtacctcaaccacccgagcgcgccattcggcggcggcggcctgatactcgacatccgcgtcaacgcggtcgagcaggcgttcgccgcccagttcggccagcttgttgtcaaaatctttgccggactggcagaagaattcataggaggtatcgccgaggccaaacacggcaaatgcggtatcggtcagcttcggcgctttcttcgaaaacaggaacttatgcagcgcaacggcttcttccggcggctcaccttcgccctgcgtcgacgtcaccatgaccagcagcttttcggaggcaatttgtttgaatttatagtcgcctgcgttaaccagcttcacgttcagctgcgcggcctgcagatcgtcgcgcagcgcttcagccacgcggcgggcgttgccggtttgcgatgccgaaatcagggtgatggacggaacttccgccgcctgggctggcgcgacagccgccgcgccgggctgctgattcagcgcgccccagaagtaaccagaaacccaggccagctgggtgggcgtgaagtcggtcgtggccgcctgaaggcgcgccatttgctccggactcagcggtag

SEQ ID NO: 257372 - DNA, 1407 bp, Klebsiella pneumoniae
atgtcatcacaacgtgaaattcgtctgaacgcttttgatatgaactgcgtcggccatcagtcgccggggctgtgggcccatccgcgcgaccgctcctggcagtataaagaccttgagtattgggtcgacctggcgcgtctgctggagcgcggcaagtttgacgggctgtttatcgccgacgtgctgggcgtctatgacgtgctgaacggcaacggcgatgcggcgctccgccaggcggcgcaggtgccggtcaacgatccgctggcgctgattacgccgatggcgctggtgacggagcatctcggattcggcctgaccgcttcgctctcctttgaacatccctatccgttcgctcgccgcctgtcgacgctcgaccatctgacaaaggggcgagtgggctggaatatcgtgacctcctatctggagagcggggcgcgtaatattggccagaaagcgcagaccgaccacgacgcccgctacgactacgccgatgagtatctggaggtggtttataaattgctggaagggagttgggaggatggcgcggtgctgcgcgacagggaacgtaagatcttcagcgatccgcgaaaaattcatccgattaaccatcagggcaacttcttttcggtgccggggatccacctctgcgagccatcgccgcagcgtacgccggtgctctatcaggcgggcgcctccagccgcggcaagcagttcgccgccggccacgccgagtgcgtatttgtcggcgcgccgtcgaaagtactgctgaaaaagacggtggcggatattcgtcgtcgcgccgaggaggccgggcgcgatccgcgtagcatcctgatcttcaatatgcagacggtcatcgtcggcgaaaccgaccgtgaagcccaggcgaagtggcaggagtataaaccgtacgttagctacgaaggggcgctggcgctgctctccggctggaccggcatcgaccttggtcagtatcagccggatcaggtgctggagtatctgcataccaacgcgattcagtcgatggtggaggcgttttccaccgccgatccgaatagccagtggaccgtgcagaagctggcggactgggcgggaatcggcggcttcggcccgctggtggtcggcagcccgcaaacggtcgccgatgagctgcagtcctgggtcgaggagaccgacgtcgatggctttaacctcgcctatgcggtgacccacgaaaccttccgcgacgtggtggatttgctggtcccggagctgcaaaagcgcggcgtgtttaagcaggagtatcgcgaaggaaccctgcgtgagaagctgtttggcgctggcgcgcggctggctgcgccacatccgggcgcaggctatcgtcgcggcgagcaggtcgcggtcgcgagcgaagagaaggtgagttaa

SEQ ID NO: 257373 - DNA, 1398 bp, Klebsiella pneumoniae
atgcaaactgaaccgcacgtggcgatcgtcggcggcggatttagcggcgcggcggtggctattcatctcctgcgcctggcgccggctggcgtgcgggtcacgctgctggagccgcgcgaggtgcccggcgcgggcgtggcctactccacgaccgaaccgagccatcggattaacgttcccgcggcgcggatgcagcttgccggggaagaggagggcgcgttcgaccgctggtaccgcagccagcctgcttttgctgatgatccgcaggctctgctggaagacggcgctgtctatccgcagcgcggccagtttggccgctacgtcgcccagcgtttcgccgaggaggcgagcgccagcggcgggcgtctgacgcatctgcgcgagcaggcgctaaggtttaaagatggcgagattatcaccgatggcggtcatcggctgccggccgatctgctggtgctggccatcagccatccgccgccctcgctgccgtcgctggcgacgccgttcgcgacccatccggcgctcatcgctaacccctggcgaacgggcgtgctggacgctatcgcgccgcaggcgagcgtcgcggtcatgggcaccggcctgacgatggcggataccatcgcgacgctgacgcggctgggacatcgggggccgataacggcattttcacgccgcgggctcctctcccgcagcaacctgagcggcagcgctgacccttgggaaggcgagtatgcccacggatcgctgcgccagcggctgcggcaaatccgccgggatatcgaccgcgccgcggagcgggggcaggcctggcaggtggtgctggacgcggtacgtaatcaggggcaggagatctggcaggcgctgtcggtggccgatcgtcagcgcttcctgcgtcatttacgcagctactgggacgttcaccgctatcgtatcgctccccaggtcgccgggattcttgagcagcgccagcgcgacggcagcctgcgggtgctggcggccaggctgacggcgctggcagacgacgcgcaaaaattgacgctaaccctctcgccccggggcggtgaagcgcagtgggtgagcgttgaccattttattttaactaccggcccggcgcacggggccctcaccgacagccagccgctgctgcgccagctgagccaggaggggctgattcgcgccgacgcgtttggcctcggactggacgtcgatcgccgctcgcgggcgattggccgggaagggcgggccgcgcccaatctgctggtctccggacctgccgcgcgggcccatttcggtgaactgatggggctaccgcaggtggccgaccatgccgccgccgtagccgccgaagcattgctggcgctgggcattaaacaatccgcccgatgtccggcgttctga

SEQ ID NO: 257374 - DNA, 1173 bp, Klebsiella pneumoniae
atgacgcaaaaagccgacgataaaatcaacgtgttctggtttctgcccacccacggcgatggccgctacctgggcaccgcggagggcgggcgaccggttgatttgccttacctgcagcaggtggcgctggcggccgacagcctgggctactacggtgtgctgatcccgacgggaaaaagctgcgaggactcctggctggtggcctcggcgctggcgccgctgacccgtcgcctgcgctatctggtggccgttcgtccgggcctgcagccgccgacgctggcggcgaggatggcgacgacgctcgaccgtctgtcgggcggtcggctgctgattaacgtcgtcaccggcggcgatccggtggaaaacaaaggcgacggtattttcctcagccacggcgaacgctatcaggtcacccgcgaatttctcgacgtctactcgcgcctgctgaaaggcgaaaaggtggactatcacggcgagcatatccacgtggaaggcgcggaagtgctgtttccgccggtacaggaaaacggtccgccgctgttttttggcggctcctctgaggaagccatcgacgttgccgccgatcaaatcgatacctatctgacctggggagagccgccggcgctggtggctgaaaagctggcggtagtgcgcgagcgcgccgccgcccggggccgcacgttgcagtacgggattcgtctgcatgtgattgttcgcgaaaccgaagaggaggcgtgggccgccgccgatcggctgatttctcaccttgatgacgagaccatcgcccaggcgcagaaaatttttgcccgtatggactccaccggccaggcgcgcatgagctcgctgcataaaggatcgcgcgacaatctgcgcattgcgccgaacctgtgggcgggcgtagggctggtgcgcggcggggcgggaacggcgctggtcggcaatccgcagcaggtggcagagcgcattcgtgaatatcaggcgctcggtatcaccaattttatcttctccggctacccgcatctggaagaagcccatcgtttcgctgacctggtcatgccgctattgccgctggcaggccacgatcagccgaaggcgcgtagcgtcaataccggcccgttcggcgaaactatcggcggcgataagcgtccggtgaaacaggtcagcgcaagctga

SEQ ID NO: 257375 - DNA, 615 bp, Klebsiella pneumoniae
gtgggcttcgtgctttgtggccaggtgcgcttaagcaacgacgttgagctggtggatatcctcaacgtcgacgaccgctggcaggctgaccccgagctgcttaaagcgttccgcgacgtgccggagatggactactccagagtgattgcctccgcggatttactgaagctgatcgtcgagaactgcctgaaaaagcagcttaattttgtagtgattaaagacaatccgcagcagcctgaacccgcgcgcgccagccgggcggtgagtcctcacgacagtaaaatgaagaaggcgctgcgctacattgacgcccatttatccgacgagctgcgcctggaagacgtcgccgcccacgtttatctcagcccctactatttcagtaagctgttcaaaaaatatcagggaatcggctttaacgcgtgggtgaaccatcagcggatggtgagcgccaaagagctgctttgccacagcgactggagcatcgccagcatcgcgcgaaatttaggattttcgcaaaccagctatttttgcaaagtttttcgccaggcttatcaggtgactccgcaggcctatcgccagcaaattaacgccagatcacaaactgagtcaatttaa

SEQ ID NO: 257376 - DNA, 2289 bp, Klebsiella pneumoniae
atggaaaaaaataacaatttgccgttcagcagttttaactcgctcacgctcttcactggcttatgcctgagtctttctccgtccggccagctacttgcagcggatagcactgaaaatactagcggcgaaacgctggtggtcgaagcgcagacgccatcgctttacgcgccgacccgctccgccgatccaaaattttcacggccgatcgccgacaccacgcgaacggttaccgtggtttctgagcaggtgatgaaggatcagggggtcactaaccttaccgacgcgctgaaaaacgtccccggcgtcggcgctttctttgctggcgaaaacggcaactcgaccaccggcgacgccatttacatgcgcggtgcggacacctccaacagcatttacgtcgacggtatccgcgatattggcagcgtcagccgcgatacgtttaataccgaacaggtcgaagtcatcaaggggccgtcaggctccgactatgggcgcagcgcgccgaccggctcgatcaatatgatcagcaaacagccgcgcctcgattccggtatcgacgcctccgccagcgctggcagtgcctggttccgacgcggcacgctggatattaaccaggccattggcgaaaccagcgcggtgcgtctgaatctgatgggcgagaaaacccacgacgcgggccgggacaaggtgaaaaacgagcgttacggcgtcgcgccatcggcggcatttggtctcggcaccgagaaccgcctgtaccttaactatctgcacgtgacccagcacaacacccccgacggcggcattcctaccatcgggctgccgggctattccgctcccaacgccgccacctcagcgctgaatcactccggcaaggtcgccaccagcaacttctacggcaccgattccgactacgatgattccacgactgataccgtgacgatgcgtttcgagcacgacctgagcgacacgacgacgatccgcaacactacccgctggtctcgcgtgaagcaggattatctgatgaccgcggtgatgggcggagcgtcaaacattacccagccaaaccctgacgatgtgggcacctggacctggtcgcgcctggcgaataccaaagacatcagcaacaagatcctgaccaaccagactaacctgacgtcgacgttctacaccggcgctatcggtcatgacgtcagcaccggcgtggaattcacccgtgaaacccagaccaactacggggtctatccgctcacgcctccggcggtgaatatttaccatccgaacagcgacatctccatcggcggcctgaaccgcagcggcgccaacgctaacgggcagacggataccttcggcgtctatgctttcgataccctgcaaatttcccaggacttcgaacttaacggcgggatccgtctggacaattaccagaccaaatatgatagcgccagcctgtgcggcggtaccggacgcggcgccattgcctgcccgacgggggtcgcgaaaaataccccgctcaccaccgtcgatacctcaaccagcggtaacctggtgaactggaaggccggcgcgctgtaccacctgaccgataacggcaatctctacgtcaactacgccgtttcccagcagccgccgggaggcagcaactttaccctcgcgcaaagcggcaccggcagcagcgccaaccgaaccgactttaaaccgcagaaggccaaaaccagcgagctcggcaccaagtgggagctgatggataaacgcctgctgctgaccgccgccctcttccgcaccgatattgaaaacgaagtcgagcagaacgacgacggcagctattcgcagtatggtaagaaacgcgttgaaggctatgagatttcgctggccggtaacatcactcctgactggcaggttatcggcggctatacccaacagcatgccagcgttcgtgaaggcgcgaacaccgcccaggatggcaccagcgcgctgccgtatacgccagagcacgcgtttaccctctggagccagtaccaggccaccgatgcgatcgccgtcggcgccggcgcgcgatacgtcggcagcatgcatcgcggcagcgacggcgcggtcggcacgccttcttataccgaaggctactgggtggccgatgctaaagtcggttaccgcattaaccgcaatctcgacctgcagctgaacgtctacaacctgtttgataccgactacgtcgcctcgattaacaagagcggctaccgttatcacccgggcgagccgcggaccttcctgcttaccgccaatatccatttctga

SEQ ID NO: 257377 - DNA, 678 bp, Klebsiella pneumoniae
atgatgtaccatattcccgccgttctcacccctcaggaagtggacgattttaccgctcagcttcagcaggcggaatgggttgacgggcgcgtgacgaccggcgaccagggcgctcaggtcaaacataaccagcaggtggacacccgcagcaacctctacgccgagcttcagggcaacgtgctggcggcgctgaaccgcagttcgcttttttttgccgccgcgctgccgaaggcgatttccagcccgctgttcaaccgctaccagcagagcgaaacttacggtttccacgtcgacggcgcggtgcgcagccaggcgcagggcggctggatgcgcaccgatctttccgccaccctgtttttaagcgctccggaaagttatgcaggcggtgagctggtcgtcaacgacacctacgggcagcacgcggttaagctcccggccggggacctggtgctctacccttcgagcagcctgcactgcgtcaccccggtgacctcaggcgtccgcgtcgcctcgttcttatggattcagtcaatgatccgtgacgataaacgccgcagtatgctgtttgaactggatggcaatattcagaaattaaaaagccgccacggcgaaagcgacgaagtgctgtctctgcttaatctgtaccataacctgctgcgcgaatggtcagagatctga

SEQ ID NO: 257378 - DNA, 723 bp, Klebsiella pneumoniae
gtgattaaacgttttttcgttaccggtaccgacaccgaagtgggtaaaaccgtcgccagctgcgctctgctacaggcggccaaccgcgaaggatttaagagcgcgggctacaaaccggtggcttccggcagcgaatatacgccgcaggggctgcgcaacgaggatgcgctggctttacagcgcaatagccgggtggcgctacgctacgagcaggtcaacccgtttacctttgctgagccgacgtcaccgcatattatcagcgctgaagaagggaggccgatcgacgccgccgcgatctctacaggcctgcgcggtctggaagcgctgtctgactggctgctggtggaaggggcggggggctggtttacgccgctttcgcagacgctgacctttgccgattgggtacgggaagagcggctgccggtgattttagtggttggcgttaagttggggtgcatcaaccatgcgatgcttaccgctcaggcggtgcttcaggccgggctgccgctggcgggttggatagccaatgatatccagccgccgggcaggcgccactctgagtatctggcgacgctgaagcgcgtactgcccgcgccgttgctcggcgagatcccgtggctggcgaatgcggttcagcgtgaggatctggggcagtatctcgacctcagcgcgctggatcgggcgtcatccacttcgccagcagcggagtatccagctggttaa

SEQ ID NO: 257379 - DNA, 756 bp, Klebsiella pneumoniae
atgacggcggtgaataagcgcgccatcgcggcggcgtttggccgcgcggcggggcattacacccagcacgacgaattacagcgtctaagcgcctctctgctgctggaacagctcgatatcaagacctttcctgaagtgctggacgcgggctgcggccccggtagcgtaagccgtttctggcgcgatgcagggagccgggtgacggcgctggatctttccgtcgacatgctggcggaagcccgccgcggaaactgcgcgcaccgctacgtcgagggcgacatcgaagcgctcccgctggcggacggcagcgttgacctggcgtggagcaaccttgcggttcagtggtgcgacaatctcgctaccgccattgatgagctgtcccgggtggtacgccccagcgggcgcgtcgcgtttagtacgctgctgtctggttcattgccggagctcaatcaggcctggcgagccatcgatgcgcggccgcacgccaaccgttttctcagcgagcaggcggtgcgtcaggcgctggccggtcgccgcgccagcggccacgtccacgccatcacgctgccgtttgccgacgcgctcagcgcgatgcgctcgcttaaaggcattggcgcgacccatctacaccacgggcgcggcgcagctacgctcagccgcggcaagctgcggcagcttcagctcgcctggccgcagcagcagggccagtgtccgctgacgtatcatcttttcacaggagttatcgaacgtgattaa

SEQ ID NO: 257380 - DNA, 957 bp, Klebsiella pneumoniae
atgaagctatggcaacctacccccgccgcgctttggcagggacgcgacgacagcgcggaggcggccaacgcgctgcgcctgtttcagactatcgtccgggccgagcgttttgagccggagatgctggctggcgacattgccctgctgggattcgcctgtgatgaaggggttcggcgcaataaagggcgcaccggcgctgaaagggggccggaaaccctgcgccgggcgctggccaatatggccagccatgacggacatgaccgctgcgtggatatggggactatctatgtggcggacgacgcgctggaggcagcgcagcaggcgctgcgcgaagcggtaaccgcctgccaacgcgcgggcaagcgtacgctggtcctcggcggcggtcatgagacggccttcggccacggcgccggggttctggacgcgtttcccggggaggaggtcggcattattaatcttgacgcgcatctggatttacgtatcgccgaccgggccagctccggtacgccattccgtcagctggcgctggcctgcgaagcgcagcggcgcgcttttcattacgcctgcatcggcgtgagccgcgccgccaatacccaggcgctgctggacgaggccgcccgccgcggggtgacgattatcgaagatctcgatgtgcttaacgctttcgaagcgcgagcgatcccggaactcgcgcgtaatatcgcccgctacgatcgcctgtatctgactatcgatctcgacgtgctgcccgcgcgcgaaatgcccgccgtctccgcgcctgccgcgctcggcatcccgttggccacgctgctgcgcatcgtcgagccgctgtgccgcagcggtaagctccaggcggtggatctggtggagtttaacccgcagtacgatattgatagccagggagcccgcgcggcagcgcgtctggcgtggcaaatcgcccattggtggcagtag

SEQ ID NO: 257381 - DNA, 219 bp, Klebsiella pneumoniae
atgcagactaaaaacaccattcccgcagagtttattgcaaactcggctttgctgaaaaatatcgaacatatggtgcaggcccagacgcagagtgaagccgtcagccacgatcgtttaatcgttgaggtgcagcgtcgcctgaatatcgagaaaaatgaaattctcgccgacttatatatccaaacgctgcatatgctacgcgccaaaagtcatcactaa

SEQ ID NO: 257382 - DNA, 2388 bp, Klebsiella pneumoniae
atgaaattcagtgaactgtggttacgcgagtgggttaacccagctatcgatagcgaagcgctgtcggaccagataacgatggccgggcttgaggttgacggcgttgagccggtcgcgggcagcttcaacggcgttgttgttggcgaagtggtcgagtgcgctcagcaccctaatgccgacaaactgcgcgtgacaaaaatcaacgtcggcggcgaacgtctgctggatatcgtctgcggcgcgccgaactgccgtcagggcctgaaggttgccgtggcgaccatcggcgccgtcctgccgggcgattttaaaattaaagcggcaaagctgcgcggtgagccgtcggaaggcatgctgtgctccttctccgaactgggtatttccgacgatcacagcggcattattgaactgcccgccgatgcgccgttgggtaccgatatccgtgaatatctgaagctcgacgataacactatcgaaatcagcgtcacgccgaaccgtgccgactgtctcggtattatcggcgtggcccgtgatgtcgccgtgctcaacaaggcgccgttgaatgtcccggaaatgcccccggtagccgccaccgtcaatgacgttctgccaatccaggtctatgcgccggaagcgtgtccgcgctatctggggcgcgtggtaaaaggcattaatgtcaaagcgccgaccccattatggatgaaagagaagctgcgccgctgcggtattcgctccatcgatgcggtggttgacgtgaccaactacgtcctgctcgagctgggccagccgatgcacgccttcgataaagaccgcattgaaggcggaattgtcgtgcgtatggcgcatgaaggagaaagcctggtcctgctggacggctccgaggctaagctggacaccgatactctggtgattgctgaccatcagaaagctctggccatgggggggattttcggcggcgagcactccggcgtaaacgatgaaacgcaaaacgttctgctggaatgcgcgttcttcagcccgctgtccattaccgggcgcgcccgccgtcatggcctgcataccgatgcttcccaccgctacgagcgcggcgtggactccgcgttgcagtatcaggcgatggagcgtgcgacccgcctgctgatggatatttgcggcggcgaagctggcccgatcattgacgtcaccaacgaagcgaccctgccgaagcctgcgaccatccagcttcgccgcagcaagttggatcgtctgattggtcaccacgttgaggatgcgcaggttagcgatattctgcgtcgtctgggctgtgacgtcaccgaaggccaggacgagtggcaagccgtcgcgccgagctggcgtttcgatattgccatcgaagaggacctggtcgaagaagtcgcccgcgtctatggttataacaatattcctgacgaaccggtgcaagcgggcctgatcatgggcacccaccgcgaagcggatctgtcgcttaagcgcgtgaaaacgctgctcaacgacaaaggctatcaggaagtgattacctacagcttcgttgatccgaaagtacagcagtggatccaccccggcgaagaagcgctgattctgccgagcccgatctccagcgaaatgtcggcgatgcgcctgtcattgtggaccggcctgttagggacggtggtctacaaccagaaccgtcagcagagccgcgtacgcatctttgagagcggtttacgctttgttcctgatactcaggctccgctgggcattcgtcaggatgtgatgctggccggcgtgatttgcggtaaccgttatgaagaacactggaacctggcaaaagaaaccgtcgatttctatgatttaaaaggcgatctggagtcggtcctcgacctcaccggcaagctgtccgacatcgaattccgcatcgaagccaataatgcgcttcatccgggtcagtcggcggcgatttatctgaaaggtgaacgtattggttttattggggttgttcatcctgagctggaacgtaagctggatctgaacggtcgcacgttggtctttgaactggagtggagcaagcttgcagaccgcgtggtgcctcaggcgcgtgaagtttctcgcttcccggcgaaccgtcgcgacatcgccgtcgttgtggcagaaaacgttcccgctgccgatgttttagccgagtgtaagaaagttggcgtaaatcaggtagttggcgtaaacttatttgacgtgtaccgcggcaagggcgtagcagagggtttcaagagcctcgctatcagccttatcctccaggataccagccgtacactcgaagaagaggagattgccgctaccgtcgccaaatgtgtagaggcattgaaagagcgattccaggcatcattgagggattga

SEQ ID NO: 257383 - DNA, 630 bp, Klebsiella pneumoniae
atgtcatcggcaaagcaagcatttcgcggctcaccttacgcacaggagtttatttctcatttacagccatactgcactccgtacagtacagggcgtggtgagcgatttgaccttcaggtgaagggtcaagggatgtgttatctcattcttgaagggacaatagcgttataccgcagaagtgacgatatgatgctttccacttcgcgcagccccgcgattttcggcctcgctaacctgacagacatttacttcaatgattattttaaaaccgtcacgccgtgcctgattggcgttcttaccaccgatcgcgtcgaggaaattattaaagagaaggcgctatggggattactttctaaacagctgatgtttgtctataaccgcctctatcacaacgtcatgccccagggggcgccaacggcctacgagatgattcgccagcagttgctcaggctaatggaggaagaagcggattatcggcacagcgtgacggctgaacgttatatccgggagaaaacccagctttcccgtagcggcgttatgcgcattctggccgatctaaaaaccggcggcttcatcgaaatggaagagggaaaactgataaaaatcaacaagcttcctgctaagtactga

SEQ ID NO: 257384 - DNA, 531 bp, Klebsiella pneumoniae
atgaaaaagacaattgttattgctatgcttgcagcaggttctgcattatctatgactcatgctttcgcagcagcgggtaccgttaattttaatggcaatattttggatgccgcctgcgacgtcgatgtcgcgtctaaaaatcaggtcgtggtgttgggcgattattataaaactgaattcccggcagccggttccagaaccgccgcgacgaaattcgatattattttgaaaaactgtccggcaactgttatcaatgccaaagtgcgcttcgatggaacccccgatttaagcaattccagcctgctggcaattgattcgtcggttcctggcgctgccaccggcgtcgcaattaacctaatgacggcggataaagccgacctgcctctgcacggcagcaacggttattcttatactctcagcagcaccgctgataatacgctgaatttttatgctcagtatcaatcgactaatgcggcggtggtcgccggtccagctaactcggtcgctaacttctccgtagtttataactaa

SEQ ID NO: 257385 - DNA, 678 bp, Klebsiella pneumoniae
atgcgttttatcagaacatttggcctggcgatgacaatattaacgctgatgcaggcgagcgctatcgccggagttattattggcggcacgcggatcattttcgatggtgcgaaaaaagaatcctccatcagcgttaataatcctgacccgacgccttatttaattcaatcatggatagatgagcgagacgggggggctggtaaaacgccttttattattacgcctccgctgtaccgtctggatagcggacaaaaaaatattgaacgaattgtcgcgacaggttcactgcctcaaacgcaagaaagcttgttctgggtgaatattaaagcaattccctcggcatcaaagcagatgaactccctgcaaattgccgtgaaaacgcggatcaaactgatttaccgacccgtcactcttcgtgggtcaacgccggaagaacaggcgaataagctcacctggcaaagaagcggcgatgaacttcaggtgaataacccaacgccttacgtcattaacttcaatgaaattagcgtgggcgggaaagcgctggcgcaggtgtcgtatgttttgcctgcttcgacagcccggttcccattgccggagggggccgccggtaatgccctgacatttaaaatcattaatgactatggtagccccggagcatcacatcaagccaacttgtaa

SEQ ID NO: 257386 - DNA, 2544 bp, Klebsiella pneumoniae
atgacaataaaaaataataaattgcgacctgcgcgtctggcgacgcttatcgccttcgcgtttaccggtatttcacaggagctgtatgccagtgattcgtttaatacggcgctggtagaactggataaccccggggtgggcaaagcggatttatcggctttcgagtctggctcccaggcgccgggaacataccacgtggatattattcttgatgaccagctaatggatacccgggatattccatttgcgatggcaaagaccgctgacggtagtgaagcattacagccctgtttgagcattgaactcttaaaacagtggggcgtgaaaaccgatctttttccccagttggcggtagaagaaagtgattgcgccaatctccaggcgattccgcaggccagcgccgattttcagtttggcgcccagcggctggtcatcagcattccccaggcggcgatcgacctgccggcaaggggctatgtgccgccggaaatgtgggatgaggggattactgcggccatgctcaattacagcctgagcggagcaaacaattgggcgaaaacgggtcaaggcgccagcagcgacagccagtatgcgaacctgcgtccgggtatcaatatcgggccgtggcgttttcgcaactacaccacctggtcacgggaatcctccggccaggataaatgggataccgtgtatacctacgcacagcgcgccattattccgctgaaaggccagcttaccgtcggggacagctccgcgcctgccgatgtgtttgacagtatgccgtttcgcggcggccagctggcgtcagatgacgatatgttaccggattctcttaagggctatgcgcccgtggtgcgcggtattgctcgaaccaatgcgcaggtcgtggtgcgccagaacggctatcagatctaccaaagctacgttgcgccgggggcgtttgagattagggatatgtatcccaccggcggcgcgggcgacctcgacgtgacgattaaagaagccgatggcagcgaacagcacttcacgctgccctacgcctcgctgccggtattgcaacgggaagggcgcttaaaatacgccatcaccggcgggcaatatcgctcctataacagcagcgtggataagacccctttcgggcaagccaccgcaatttatggtctgcagcacggcattaccctctatggcggcctgcaagagtcaagcaaataccagtcgcttgcctttggcgtgggcaaaaatatgggagcgttaggcgctatctccgccgacgttactcagggctggtcaacgccggataaaaaggaaaaatcacagggccaatcctggcgagcgcgttatagcaaaaacttcgccgggaccgggacccacttttccattgcgggctaccgctattcgaccagcggctattacgggatgcaggaagtcctcgattcatatggcgacagcagcgcgctgcaggagcgcaggcgcaaccgcgcggagctgacgatgagccagacgctgagtcgtgagctggggtcgcttaccctcagcgcggcgcgggaagactactggaattccgccaggtcgatggcttcctggagcgtcggatacaacaactactggcgcaatattagctacggcctgacctggacatacagcagaaatggcagcgctgcgtcatacgacggcgggcgcgggcgaaacagcgaccatgaccagcagttggcgtttaacgtcagcgtaccgctggagaaattcctcccgcaaacgtgggccagctatggcatgaacgccagcaagaataacggaacgacgcacaacatcggcatcaacggcgtcgcgctggaaaacaactcgctgaactggaacgtacagcagggttacggtacgaatggcgtgggttacatcggcaatatgaacggtgactataaagccacgtacggcgaagtgacggcgggctatagctacgacagaaatagcgagcggcttaattatggtctgcagggcggcgttatcgcccacgccgacggcatcacgctttctcaaccgctcggtgaaaccaacgtcttaatcaaagctcccggcgcgtacggcctgaatattcgcaatcaacccggcgcgcgcaccgactaccggggatatacggtggtcagcaatatttccgtctatcggaaaaacgacctgacgctcgacccgcaaagtatgcctgatgatgtcgagctggagatcaacaccgatacggtcacgccgacgcgaggcgcggtggtgagggccgattaccttgcaaaagtggggcgccgggtactcatgaccttaacggacaataaccactttgtgccgtttggcgccgtggtgacgcttgctgatggtaatcaaagcagctttatcgtcggcgatcgcggccaggtttttttaagcggaatgcccgaacagggggcgatagtcgcaacatggggccgccagtccagccaacagtgccgtgctgatttcagcctgccgcaacaatcaacctacgctggaataaccgaagttagcgccagttgtcatcaggaacgttaa

SEQ ID NO: 257387 - DNA, 948 bp, Klebsiella pneumoniae
atgagattgatttattctgttattttgctcggcttaatggccggatggaatagcgcgcgtgccggaacctgcacgacaattatcccgcagctctccacgctgtctgtgggaacccttaccgtacagcgtgatgcgccggtcggaacggttattttttctcgtaacgcgacgataaccagctcttatttaaccggatgcaccaacccattaatgcttgggtttagcatgcgctaccttagcgcgacgccgagtagctacggtaatcatgtttacgccaccaatgtcgcggggattggtattcgcttctcttccgggaattactttgaaaacccgagtaataccttttcttatgaagcgcagtcctcctacgtggagtggtggggcggtaaaattgagctggtggtcaccggccaggtgtcgtcgggcgcattaacgccgggaacgatcggcgtggtgacgctacagggcagcgacggcgtctaccgtgacggcctgaccaccaaactcaccgatgggaccattaacgcgctggcctgcaatatcacgacgtctcaactgaccttcccgattggcgatatttcagcggcaacgttcggctcggccgtcggcaccacgcctgcgggcgcgcagaatacgcagaatctgggattaagctgcagcgccggaaccaatattaatgtatcgctgagcggcgtacagcatccggacgttgccgataccagcgtcatggcattaacggggcagggcagcgccgggacggcaaaaggcgtgggagtccagcttttatataacggcgctccgttggctatcaatagcccgctgttattaaaacgctctgcgggcggccaggaaacgctgccgttgacggcccgttattaccagaccttaacgtccgttgagtcaggctcggcaaacgcgaccgccacgctgaatttgacgtaccagtaa

SEQ ID NO: 257388 - DNA, 513 bp, Klebsiella pneumoniae
atgaaaataccccacaaaaaaatgcttcttctggcttttctgtgctggaaagcgttttctgccgacagcgtgagcgtaggcgtaacgggaaatattgttgcctcgccctgtatatttaatggcggaaatagcaacctcaatgtcaatcttggcgatattcaggcaacaaatatggttacgccagggtcatcctccgacccggtggcctttaatttgctgtttaccaactgcccggcgggaacgcgcagcgtaacgacctccttcaccggaaacccggatccggttgccggccctgactattatatgaatagcggtaccgcaacaaacgtggcgatcgcgatgagcgaagcgggcagcggcgcgctaaaggggacgggttccagtattatgcgcaacatcgcggcagacagaaccgccaccctggccatgcaggcctcggttaaatcgatgtcagggggcgcgacgcccggcagcgtgagtgccgttgtggtcatgacgctacagtacaattaa

SEQ ID NO: 257389 - DNA, 378 bp, Klebsiella pneumoniae
atgaattcacatgcaggaactttcaatcccgaagattttagctggcgtgggctggtcatgactccagccgccgccgcccatattcgcgatctggtccgcaaacagcctgatatgcaggggctgcgcctgggggttaaaaccagcggctgcgccggttttggctacgttctcgaattaatcgctgaaccggcgaaagacgacctgctctttgagcgcgacggcgcgaagctatgggcgccgctgcaggccatgccgtttattgatggcaccgaactcgattacgttcgcgaaggcttaaatcaaatcttcaaattccataatccaaaagcccagcacgaatgcggctgcggcgaaagttttggcgttcaggcggagtaa

SEQ ID NO: 257390 - DNA, 807 bp, Klebsiella pneumoniae
atgacaactttatctcttgaacaactggcgcagcggctgcgcgatgccgaaacgcgcggccaggccattgaaccgctgcgcgatacgctcggcgttgacaacgcggaagcggcctacgccatccagcggatgaacgtgcagcaccacgtggcgaacggccgccgggtggtggggcgcaaggtgggactgacccacccgaaagtgcagcaacagctgggcgttgaccagccggacttcggcaccctgtttgccgatatgtgctacggcgataacgccgaggtcccgttctcccgggtgctgcagccgaaggtggaggccgaaatcgccctgctgctgaagcgcgatctgccgcatgccgataccacctttgatgagctgtacgccgccatcgactgggtactgccggcgctggaagtggtcggcagccgtattcgcgactggtcgattggcttcgtcgatacggtcgccgataacgcctcctgcggcgtttacgtgctgggcagcccggcgcggcgcccggacgggctggacctgaaaaactgcgcgatgcgcatgacccgtaacgaggaagaggtctccagcgggcggggcagcgaatgtctcggtcatccgctgaacgcggcggtgtggctggcgcgcaaaatggccagcctcggcgagccgctgcgggcgggcgatatcgtgctcaccggggcattaggcccgatggtggcgattaacgccggcgatcgttttgaagcccatatcgatgggttcggttcagtggcggcaacgtttgtcgcgcaagaggaaggcagtcatgagtaa

SEQ ID NO: 257391 - DNA, 1197 bp, Klebsiella pneumoniae
atgacccaaacaacgactgcaagcaattcgcgcctgatggtaaccgtcgggctctgttttatggtggccctgatggaagggctggatctgcaggcggcggggattgccgccgtgggcatggcgcaggcgttcgcgctggataaaatgcagatgggctggattttcagcgccgggatcctcggcctgctgcccggcgcgctggcgggcggcatgctggcggatcgctacggccgcaagcgtattctgctgggctcagtgctgctcttcggcctgttctcgatcgccaccgcgctggcgtggaactatccgacgctgctgctggcgcgactgctgaccggcgtcggcctgggcgcggcgctgccgaatctgattgcgctcacctccgaggccgctggtccacgctttcgcggcagggcggtcagcctgatgtactgcggcgtgcccattggcgcggcgctggcggcggcgctgggctttttcggcctcgccgccgcctggcaaacggtattctgggtcggcggtatcgttccgctgctgctggtgccgttgctgctgcgctggctgcctgaatcgccggtttttcagcgcagggcgcagggcgtgccgctacgcgcgcttctcgcgccgggcaacgctaccgccacgctgctgctgtggctgtgctacttcttcacgctgctggtggtctatatgctgatcaactggctgccgatgctgttggtcggccagggattcagcgccagcgaggcggcgggggtgatgtttgtcctgcagtttggtgccgcctgcggcacgctgctgctgggggcgctgatggataagctcagcccgctatggatgtcgctgctgatctacagcggtatgctggcgtcgctgctggcgctaggcaccgcgacctccctcgccgcgatgctcttttccggcttcgtcgccgggctgtttgccaccggcgggcagagcgtgctttacgcgctggctccgctgttctatcgcaccgaaattcgcgccaccggcgtggggacggcggtggcgatcggtcgtctcggcgcgatgagcggcccgctgctggcgggcaaaatgctggcgttgggcaccggcacggttggcgtgatggccgcttccgcgcccggcattttgctggcaggcgtggcggtgttctggctgatgaaccgccaaaagcgcgccgcgctggcctga

SEQ ID NO: 257392 - DNA, 942 bp, Klebsiella pneumoniae
atgcgcaaacttcattttacccgtgtagccggggcgctgatgctgctggcgctgagcggctatacggcggcccaggagcgaatcaccctgcgaatcgccgatcaaaagggcggcatgcgctcgcagctggaggccgccaacgccctgcgggatctcccctacgagattaaatgggccgagtttccggccgccgcgccgctggcggaagcgcttaacgccggggcggtggatgcggggattatcggcgatgcgccgctgctgttcgcgctggctaacggcgcgccggtcaaagccatcgccgtcgataaaagcaacccggccggcaccgcggtgctggtctcgcccgacagcgcattgaagagcgccgcggatttaaaaggcaaacgcatcgctaccggtaaaggatcgattggccactttgtggcgctgaaagcgctggagcaggcgggaatttcgccgaaagaggtgcagtgggtgtttctcggcccggtggacgcctgggcgacctgggagccctataccacgcagctggtgaagaccgcggaaggaaagattctggtcagcggtaaagggctactgccgggcaacaccttcctggcggcaaccgatgatgccctgaaagacccgcaaaaacgcgcggcgctgcaggattaccttacccgcctggccggcgccgagcgctgggcctacgccaaccttgatagctacggtaaaacgctgggggagattattcgtttcccggcggatatcgcccgcgcgcagtttgccaatcgccagtcgcagtggcagcctctggacgcgcagacggtcgctcagcagcagtcgacggcgaatttttacctcgccaacggactcatccgcgcaaagctggacgtgacgccgacctttgataacggctttagcgtgcccgccgcccaggcccatgcggaggtggcgccatga

SEQ ID NO: 257393 - DNA, 1752 bp, Klebsiella pneumoniae
atgaccaacggcctgcgcaccgtgctgccgcgcagctttaccgctgccaccgaacgcgttgaagtgctcaaaggcccggcctcaacgctgtacggcattctcgaccccggcggattaatcaacgtcgtcaccaaacgcccggagcgcagcttcggcggctccgtctccgccacctccaccagctttggcggcggtagcgggcagttcgacgtcaccggccccatcgacgggacgccgctggcgtatcgggtgattggcgaatatcagcatgaagattactggcgtaatttcggcaaacagaagaccagctttatcaacccttccctgacctggttcggcgagcgggcaacggtgaacgtctcctattcgcaccgtaactacagtaccccattcgatcgcggcaccatcttcgatctgaacaccggtcatgcggtgaatgtcgatcgcaaaacgcgttttgatgaaccgtttaatattaccgacggttattccgacctcgcgcaactgaatgccgaataccggctcagcgacgcctggaccgcccgcttcgactacagctacagccaggatcattacaacgacgatcaggcccgggtaatggcctacgattcggcgaccggcaacctgacccgccgcgtcgacgccacccacggttcaacccagaaaatgcacgctacgcgggcggatttacagggtaacgtggtcattggcggcttctacaacgagatcctcaccggcctggcttatgagaactacgatctgctgcgtaccgatatgatccgctgtaagaacgtcaagggatttaatatctataacccggtctacggtacgctcgacaaatgctccagcgtttcggcatccgatagcgatcagcgtactcagcaggagagctatgcgggctacgtccaggacgcgctctatcttagcgataagtggatcgccattgccggggtgcgctatcagtattacacccagtacgccgggaaaggccgcccgtttaacgtcaataccgacagcagcgaccagaaatggacgccgaaagcgggcctggtgtataagctgacgccgtccgtctcgctgtttggtaacgtggcgcagtcgtttatgccgcagtcctccatcgccagctatatcggcaatctgccgccggaagagtcaacctcttacgagctgggcgcgaagttcgagctcttcaacggcgttaccgccaatatcgcgctgtttgatattgataagcgcaacgtcctctataccgaatcggtgggcgatgaaaccgtagcgaaaaccgccggtaaggtgcgctcccgcggcgtcgaagtggacgtggccggatcgttgaccgataacctgagcgtcatcgccagctacggctataccgatgcgaaagtcaccgacgatccggattacaagggcaaaccgctgccgaacgtgccgaaacacaccggctctgtgttcctgagctacgacattcataacgtctacgacagcaataccctgacggtgggcggcggcggtcgcgcggtaagcaaacgttccggtaccaacggcgcggattattatctgcagggctatgcggtggcggatgtgtttgcggcctataagatgaagctgcaatatccggtgacgctacaggttaacgtgaagaatctgtttgataagacctattacacctcctccatcggcaccaacaacctcggtaaccagatcggcgacccgcgggaagtgcagtttacgctgaagatggatttttaa

SEQ ID NO: 257394 - DNA, 558 bp, Klebsiella pneumoniae
atgcgcggcctggctatcggtagacgagatatcttcgatgacccgcccgtagcggtctttacgcacgatacgctcgccgggctggccggtgagccacttatcaaagctcttctcaacgccctcaatcccctggctatcgacgttagtgaagccaatgaggtgagcggttacttcgcccgacggatagtagcggcgcgactcttcccgcagatgaatgcccggcagcttgagtttgcggatgtaatcggccatatcagggttaacctgacgcgccagatagataaaacgcatccgcggattggtattgatacgcgatgccagctgatccagcggcatattcagcgcatcggccagcgccttccagcggttgtcgagcgtcacgccgccggcttcatgcagctctttcgggtcagcccagatggcttttaccggtacgctcaccgccagcgggcggccggaacgatcggttatcatgccgcgcgcggtggagacctcctgcacgcgcagagaacgcatgtccccctgacgtaccagcatgtccgggctaattacctgtag

SEQ ID NO: 257395 - DNA, 660 bp, Klebsiella pneumoniae
atggcgatggaaaactacaatccgccgcaggatccctggctggttattctttaccaggatgagcacattatggtggtcaacaagccgagcggcctgttgtccgtgccggggcggcttgctgagcacaaagacagcgtgatgacgcgcattcagcgcgactttccgcaggccgagtcggtacaccgactggatatggcgaccagcggcgtgattgtggtggccctgaccaaagcggcagagcgcgagctaaagcggcagttccgcgaacgcgagccgaaaaagcagtacgtcgcccgcgtctgggggcatccggaaaaagcggaaggtctggtggatttaccgctgatttgcgactggccgaaccggccaaagcagaaggtgtgttacgaaaccggcaaagcggcgcaaaccgagtatgaagtgctggagttcgcggcggacaacaccgcccgcgtacgcctgaagccgattaccgggcgttcgcatcagctgcgcgtgcatatgctggcgctgggccatccgattctcggcgaccgcttttatgcgtcgccggaagcgctggcgatggcgccgcgtctgctactgcacgccgaaacgctgaccatcacccatcccgctttcggtaattcgatgaccttccgcgcgccgatcgacttctga

SEQ ID NO: 257396 - DNA, 1356 bp, Klebsiella pneumoniae
atgagcaccacagacaatgcattccctgcaaccatcgaccctattaatacgccaaaagcgccgcttaagcagcgttggtggcatatcctcgataactggaaagtcggtattatcccgctgccgctcttcctgctggccggcggcctgatcgcgctggactgtctgggcggcaagctgccgagcgatatcgtcgtgatggtggcgacgctggcctttttcggctttgcctgcggcgaattcggtaagcgcctgccgatactcggtaaactcggcgcggcggccatctgcgcgacctttattccttctgcgctggttcactacggcctgctgccggatgtggtggtggagtcgactaccaaattctataagtcgaccaacattctttacctttatatctgctgcattatcgtcggcagcattatgagcatgaaccgtaccacgctgattcagggctttatgcggattttcttcccgatgctgtgcggagaaatcgtcggtatggtggtcggcgtcggcgtgggtaccgccctggggctggagccgtttcaggtgtttttctttatcgtcctgccaatcatggccggcggcgtcggcgagggggcgattccgctgtcgattggctacgccgcgctgatgcatatggatcagggcgttgcgctcggtcgcgtgctgccgatggtgatgttgggcagcctgacggcgattgtgatcgccggcggtttaaaccagctgggcaagcgtttcccgcatttgaccggcgaggggcagctgatgccgaaccgccgcaacgagacgcaccgcgaaacgcccgccgagggcaaaatggacgtgacgacgctggcctccggcgcgctgctggcggtgctgctctatatgctgggtatgcttggccagaagaccatcggcctgcccgcgccggtgggcatgctgtttctcgcggtgctgcttaagctggtaaacggcgtctctccgcgtctgcaggagggctcgcagatggtatataagttcttccgcacggcggtgacctatccgattctgtttgccgtcggcgtggcgatcacgccgtggcaggagctggtcaacgcctttaccgtaaccaatttgctggtgattatcagcaccgtatcggcgctggtggcgaccggcttcctggtcggcaaaaagattggcatgcacccgattgacgtggcgattgtctcctgctgccagagcgggcagggcggcaccggcgatgtggcgattctgacttccggcaaccgcatgaacctgatgccgttcgcccagatcgcaacaagaatcggcggcgcgattaatgtatcgctgggattgctgttcctcagtcactttctggcgtga

SEQ ID NO: 257397 - DNA, 1557 bp, Klebsiella pneumoniae
atgaatggtaacggttttttgtttgttatcttctgcgtttttattattcccgcgctcatcggtgggggattcctgattttccttattttatggagtaaaggtagggttattgggaaaaacatgtcagtagcctatgtttttctgttttttgctgcgataatattgtgtgcggtttataagtatttaggttttttatatacatttacacttgaccactttatttattttagttgggcggctggcgccgcgttgattttagcgttaatactttttagcactttttccgtaaaaaatgcgggatttattcatgcgttgactttgctgacctttgcgcttatcgccaataaatttattggcccatcaatggaacaggtcgacatgtcttttgccgaacgggaccgcgcgaacagcattgctgagttcaggctgggtaagtttacagtgcaaaaattacccgagtttgaccgcttgtttaaaagtaaatctcagcaggaacaatacgaaatctatttatttgccatctatgataaatcattgccgaaagagttatatcaatattttgtacagcagttgggtagcccattaaaaaaccggcaaggctcttttgattacgatgcgaatcagagtgattattataccattccctttttcgaggccatccattctcaaaatttaacggcgctgcaggtttttattgacgctattcaggcttcatctgccgcagagcgcaagcaggctcaggacattgtttatgctgctcctgcacaatggacaggactggagcatacctttgcccagccgatcgatgtttattataaaagacccacccaccccgatagcgttattaagcaagccgaactgctgctttccgcatttcctgaattagctaaaacccaaacgggtgccgctattattgatcgtaccattgaaaacgcggatgttcgcgctatgagattatttgcaaagtattctcaaccagattcagaaatattaactgcggcaagctatgttcttggcggagaaacggataaatttgttgatatattaaaaaaacaaccttcgttattgcgtcaacaaattgatattggcaagtattattccggcagtactaatttattattctatgtcgttatgtttggcaaaaaagatatcattcagcaggtcattccccgcataaactggcaggatcctgaattgtattataataaaggtaatagccttgttttagcctacgcggcacggcgcgttaagaacgctttccataatgcctcgctggaaacaaataaggacgcaattgagatctttacccttttgctgaatacacagttacgtaaccaaccgaacatccctgaccgacaattgtgggagatcgccgctgatgacttttataggagtcactggcccaatacaggcgagacatttaatgatgaggcgatacggtccatttgccattcggatattgggccgcagtttttacgctatattgatacgttagataaaaatgataacgagacggtaaaaagccgggttagcggaattaaaaaagcgtgccattaa

SEQ ID NO: 257398 - DNA, 339 bp, Klebsiella pneumoniae
ttgctactaaagggccgcaagcagggggcgacgaaagggggcgctttcggctatgataagggtttccgtttcccgctgtgtttagtgaatttatttgtgatgaaaccacttcgccaacaaaatcgtcaggtcattagctacgtgcctcgagtggagcctgcgccgccggaacacgccgtcaaaatggatggttttcgcgacgtctgggctctgcggggtaagtacgttgcctttgtgctgatcgatgaacactttcgccgttccccaccgtttaacgtgccggaagcggcgcagcgctgggcgacgcaaatgaggcaggaaggcgaaattgacggctga

SEQ ID NO: 257399 - DNA, 624 bp, Klebsiella pneumoniae; identical to SEQ ID NO: 188706

SEQ ID NO: 257400 - DNA, 879 bp, Klebsiella pneumoniae
ttggtcagggtattcttaaaagcaatgaaacgggcaatttttaatgtggtggtggagtggattgaatcccgcctgacaatcaatccgtccgttgatgatatcgcctgtggggttgggtattcccggcgttttgtttataatctgttccatgagcatgccggccttcccgtcgggaaatatattcgcatgcgcagaatgacgcttgccgccggtaagctaaagctgactcagcaatcaatttcatcgattgcctgtttactgcactttgattctcatcaaaccttttcccgtgagtttaaaaaaacctttggacttagtcccggagcgtaccgggattcgacctgttgggatatgtcgttactttatcagaaagtggcaccgcagggcgacggcgtaccggcaccttacctttgttttcttgaagaacagtcgtttgctggatatggattcaactatacgctatctctgactgatgatatcgctacgcgaaaagaggtcacccggagaaaaattgccggcggcgcgacaggcgcagaccgcgatatctacattctctctgcatgttctcccgctgcgcacaatatatataaaacagcgatcaatggattcatcggcacaccgtttaattcgcgggcggcttcttttcgtgagatacgggtcgctaaacgtgggctataccttggtcttgaatttagtggctcatgggaagactttatttttctttcgaatcatgtatatctgaaataccttcctgaactggggctgtatcgacgtgaaggttatgatatcgaacgttttgtccctcaggaaaatattgctttaggaaacgaccggcccatttacaccctgcattattatgtcccggtcggttatatttag

SEQ ID NO: 257401 - DNA, 705 bp, Klebsiella pneumoniae
atggccgcttccactaaaacagtattgatcgcgggcgcttcacgcgggcttgggcacgccatggctgaacagtttctgctgcatggctggcaggtcatcggcaccgtgcgcgatctctcgcaaaccacgccgctgcatcatctggcccggacgtatcctggacgggttcgtattgaggcgctggatatttgtgataatgacgggatcgcggcgctgcgcgaaacgcttagcgataacatactggatatgctgttcgtcaacgcgggcaccaccaaccgcgatccgacacaaaccatcggcgaaatcgcgacggaagagtttattcatgtcatgttgaccaacgcgctcgcgccgatgcgggtaatagaaagtctgcaagatgtcgtgttgccgcaggggctgattggcgttatgtcttcaggacaaggcagtttgagcaataataccggcggacagcgcgagctgtatcgcgggagtaaagccgcgctgaatatgtttatgcgcagttttgccgcccgccctgcctgcgtatcgcatcccctggtggtcatggcgccgggctggatccgcacggccctcggcggcgagaatgccccactcaccattgccgagaccatcccctcgctggtgaacgtcctgctggaaaaacaaaaccgccccggattagagtatctggattatcgaggatgtcgcgtgccgtggtga

SEQ ID NO: 257402 - DNA, 900 bp, Klebsiella pneumoniae
atgaccgatcccgattttaatttactgactgcgctggatgtactgttgagcgagaagagcgttgccggggcggcaaagcggcttgagcttagcgcgtcggcgatgagccgcacgctggcgcgcttacggcaggtaaccggcgacccgctactggtcagggccgggcgaaaaatggtgctgactccccatgcggaaagtctgcaggcgcgggcaaaaaatgtcgtcactgagatgcgcgcggtgctcaacgcttcgcctgcgccgctgagtttatcgacccttgagaagcgatttacgttacgtaccaatgagggatttatagacgtttttggcccggcgctggtgaacgctgtcgcacgagaagcgccgggcgtgacgctcgagtttgtcgcgaagccggagaaagatgcccgatttttacgcgaggggcgggtggacctggaaattggcgtactggaaaatatggggcctgagatccgcctgcaggcgctgtttcgcgatcgctttgtcgccgcgctggcaaaaaaccacccgttagccgcctttgccgaactgtcgcgagaacaatttgtttccgtagggcacgtcatagcctcccgtcgcggggcgatcagcgggccggttgatgaagcgctggcggcatatggaatgagccgcagaattgccgcggtggtgcctgcgttttccgccgcgctggccgttgcccgggatgctgaacttatcgccgttgtcccggcctcctgcctgcagagcgcggcgggaaaagagatgatcggttttcccctcccggtgagcacgccggagataacggtgtcacaaatgtggcatcctcgccaggagcatgaattagcgcatcgctggctaaggcagctggtgcgcagagagtgtcggcagccataa

SEQ ID NO: 257403 - DNA, 948 bp, Klebsiella pneumoniae
atgaaagcagccgtggtttttgacctgcagcaggggccggtttggtccgattttagcgatccgcgcgccggtgagagtgaggcgttagtcaaggttcgcgccgccgccatcagtcatgtggtgaaaggccgggcctccggcaaacattatagtttcgatggtcgtctgccttttgtcccgggtattgatggcgccggcgtactacccgacgggcggcgcgtctatttcgccttccccgccgcgccctggggtagtatggcgcagtgggctcccgtcgccctaaaccactgtctgccgctgccggatgaactggatgacatcactgccgccgcaatggccaatccgggtatgtcggcctgggcggcgctggtcaagcgcggcgggttgaaagcgggcgaaaccgtattgatcaacggcgccacgggcagcgccggtcagctggcgttgcaagtcgcccgctttctgggcgccagaaaagtgatagcctgcgggcgaaacggggagaaactggccgcgctcgaagccgatgcgatcgtgaacttaagtcaggatgaggcgagcctgcgggcgcagtttgccgaactggcggcgcagcagattgatgtcgtcgtcgattatctgtggggacgtagcgccgaacttttgctgccagcgctggcaaagcacagcccgggaaatacgccggtacgttttattcaggtcggttccctttccgccgccgatatcgcgctcagcggcgcggtactgcgctccgcgccgctgcagctgatgggcagcggtattggcagcctttcagtgtcccagctgctggccgctaccggggaaatgctgcaggctgccgttactggcgggtttaccatcgccaccactccccggccgcttcgcgaggtcgccgcggcatggccgcaggataacagccagaagcgcaccgtttttatcgtcgattaa

SEQ ID NO: 257404 - DNA, 456 bp, Klebsiella pneumoniae
atgcaagatgcacataataattacgacattagcgacttccacggcgcgctgctcgatatcatcagcgtgatgaaccaaccgatgcgcgatgagcagatactgcaggcggccgaggtccagctcgatcggactctctttccgctactggtggccgtcgggcgcaggggacccgtcggggtcgttgaactggcggacagccttgggcgcgactacaccaccgtcagcaggcaggtgaagaagctggaagcccaggaactggcgcgaaagcagcccaatgcgaaagaccggcggattagcgaagtgacgctcagcgaagcgggccaggcgatgattacacgcattgcgcaagcaagaacgcggctgatgaatgaggtgctggcagggtggtcgcaagatgatgtgctggcgctgtttcgtctgacgcgcaaatatgccgacagcttgcagcagagatag

SEQ ID NO: 257405 - DNA, 477 bp, Klebsiella pneumoniae
atgttcgccgactttatcgacgaaaccaccgttggcctgattggcgtggagcccgcgggtcacggtattgagtccggcgagcacggcgcgccgctgaagcacggtcgggtgggtatctacttcggtatgaaatcgccgatgatgcaaacggaagaggggcagattgaggagtcctactccatctccgccgggctggacttcccgtcagtggggccgcagcatgcgtatctgaacagcattggccgcgccgattatgtgtcgattaccgatgacgaagcgctggatgcctttaaagaactctcccgccatgaggggattatcccggcgctggagtcctcccatgccctggcgcacgcgctgaaaatgatgcgtgaaaacccggaaaaagagcagctgctggtggttaacctctccggccgcggcgataaagacatcttcaccgtacacgatattttaaaagcgcgaggggaaatctga

SEQ ID NO: 257406 - DNA, 1899 bp, Klebsiella pneumoniae; identical to SEQ ID NO: 188704

SEQ ID NO: 257407 - DNA, 465 bp, Klebsiella pneumoniae
atgagtagcataatgattttgctggcgctggccggcggcgcgatgttgagtatgcaggcggcgattaacggtcgtttgggcagtcaggtaggcgtatttcgtagcgcgtttctcactttctccgtgggcgcgttgatcaccgcgctgctgattttctactttgcgccccaccagacgacgacgctgctggatgtgccgaaatggcagctgctgggggcattttgcggcgtcccctatatcgtgattatggtggtggcggtgcagcgtattggtaccgcggcggccacggtggcggtgatttttggccaactggccatgagcttgcttatcgataactttggctggctgggtaatgacgccattaccttttcgccggggcggctgggggcgatcgtttgtctggggctggcgctgttctttatttatcgctccggcacggcggcaaaagccgcagagaagcgatag

SEQ ID NO: 257408 - DNA, 633 bp, Klebsiella pneumoniae
atgcctgagatttcgtcgctgctgaccttcgctctggtggcccttggcctggtgctgaccccggggccgaatatgatctatttgatttcgcgctcactttgccagggaagaagggccgggctggtctccctcggcggggtggcgctggggtttgtcttttatatgctgtgcgcggcgtttggtattaccgcgctgatcttcgccgtgccctatgcttatgacgtcttgcgcatcagcggcgttgtctatctgctttatctggcctggcaggcggtgaggcccggcgggcgctcggtttttgcggtgcgggatctgcccgccgatagcggccgtaagctgtttttgatgggctttatcactaatctggcgaaccctaaaatcgctattatgtacctctcattgctgccgcagtttatctctcccggacacggcagcatccttgcgcagtcgctggtactgggatttacccaggcgataattagcgtggcggttaacgcgctgattgtgatgatggccgggcaggtgtcgctgtttctcgcggggcgtccgttttggcagcagtttcagcgctggctgatggcgacggtactggcggggatggcggtgaaaattgccttcgaagcgcggaagtaa

SEQ ID NO: 257409 - DNA, 693 bp, Klebsiella pneumoniae
atgaatagcgtattaccgtcaatcagcccgcaggtctccgcgctggcccccggctttcgcgccctgagcattgatgttgtttccgccgccgtacgcgctccccaggtcgggtccgatgcgctccgctccgcctgcaaagcggttctcgtcggcgagccgcagtgggcggaggcgcacctgcaggcctggagcgaagtattccgcgcctttggcgcaaaacctaaaaggaccccctgctcggctgaagccttgcgcaaacgggtgctgcgcgatggcgagatggccgcgctcgatcctatcgtcgatctctataacgcggtaagcctgcgctacgccgtgccggtcggcggcgaaaacctggcggcgtatgttggcgtgccgcagctcaagatcgcggacggcagcgagccgttcgataccgttaaagaaggacagacggtcgacgaataccccgacgcgggagaagtggtctggggcgacgatcgcggcgtgacctgtcgacgctggaactggaggcagggagtccgtactcgcctgagcgtggagagtccgcggatgtggtttattcttgaaagcctgccggaaatgccgcttagcgcgctgcaggaggcgggagagatgctgtgcaacggtctgctggagatgatgccggaagccacgatccgctcgcggctgattggcccgggggcttaa

SEQ ID NO: 257410 - DNA, 729 bp, Klebsiella pneumoniae
atgaccgcactttttcactcctcccccagcctgcgcgaagagcggctccccggcggggcgcacacctcgttaattttgcgcaaagggcaaattctgcgcctgaccgatatcgacggcggggccaacgtcagcatgatgatgcttaatccccacgagaagagcgagcgtctgaatctgccggacaccctcaagggccagcataccgcgcgcctgaccgccgggcactgtttctactccgatatggggcgcgtcctggccgggatcgttgccgacagctgcggctggcacgacccgttcggcggggtgctcaacgccgatgagacgcgtgaaaaatatggcgcaggacgctaccaggagctgcgcaacggcttctatcgcaacggcgtcgataacctgctggtcgagatgggcaagtgggatctgggcctggaagacctgctgatggtggttaacttcttcagcaaagtgaccgtcgatgaggacggcggtttccgctttatccccggcaacagccgcgccggagattacgttgagctgtttgcgccgatggatgtcctcatggtactgaccgcgctgccgcatccccaggacccggacgcggaatacgccccgcggccgattcagctcagctggtaccaggccgacgatgcgcaggcgaccgcggaagcgctctttactcgcgatgaaaaccagcgcgcgttcctcaacacccaactttttgccctgtaa

SEQ ID NO: 257411 - DNA, 1797 bp, Klebsiella pneumoniae
atgatgcagcagacgtttgatttacgcctggcgaccctggcggcagactatcgcaacggcaaaaccaccccgcgccgcctgctggcggaagtgcgccagcgggcgcaggcgctgaaccccgaattccgcttatttatccatatcctgagcgaagaggagcaggagccgtttctggcggcgctggaaggcctctcgccgaccgagctgccgctatacggcgtgccgttcgccatcaaagacaatatcgatttggcggagattatcactaccgccgcctgcccggcgtttgcttaccgggcggagcagagcgcgacgattgtcgctcagctgattgccatgggcgccgtgccggtcggtaaaaccaatctcgatcagttcgctaccggcctgaacggtacccgatcgccgtacggcgcttgccgcaacggctatcttgcagattacccctccgggggctccagcgccggttccgcgctggcggtggcgctgggcgtcgccagcttctcgctgggaacggacaccgccggcagcggccgcgtcccggcggggctgaataacctggtgggtctgaaggccacgaaagggctgatctccaccgctggggtcgtgcccgcctgccgtacgttagactgtgtgacctttttcagcgccaccgccgacgaggcgagccaactgctggcgctggtcgcgcagtacaatccgctggatgcctggagccgccataatccgcagtggaacagccgtcaggcgttcggcaggccggcagccggttttcgttttggcgttccgcgcgagctgaatttcctcggctgcagcgcaagcgagcgtctgtttacccaggcccggcagcggctgacggcgctgggtgggatggcggttgagatcgaattcgcgccgtttctggcggcagcccgactgctgtatgacggaccgtgggtcgccgaacgttacgcggtagtcggcccgttgatggcgcggcagccggaggcggtgctgccggtcattcgcgaggtgctggcgaaagcgccggataccgacgccacggcgacctttaaggcgatctatcagctacagcagtacaaagcccggtgcgacgcgatcctcgagaccctcgactgcgtgctgacgccaacctatccgcgtccggtgacgctcgacgagctgcaagcggaaccgatcgcgcgcaacgccgatctcgggtattacaccaactttatgaacctgctggactacgccgcggtgagtgtgccgtgcggatttatgccggacggcttgccctccggcgttaccctgtttggccgggcatttaccgaccagtatttgctcagcctggccgacgcgtttcagcgagcggagcggctgccgctggccggcgggacgcggctggaaaccccgccgcccgaacgcgccgccggtcatgaccggatggcgctggttgtttgcggcgcgcatcttgccggcctgccgctaaacgatcagctgctggcgcggggcggccagctgctgcaggaaacccgcagcgcgccgcactatcgtttgtacgccctcgcggacggtaagcgcccggcaatggttcgcgatgagagcggcggggcggcgattgcggttgaagtgtgggagctacccagcgcggaggtcggttcgctgctggcggccattcccgcgccgctgggcttagggaaagttgagcttgccgacggacgccggttaacgggctttatttgcgaagccgaaggattaggcgaagccacggagattaccgcctacggcggctggcgcgcctggctggcacgctag

SEQ ID NO: 257412 - DNA, 549 bp, Klebsiella pneumoniae
atgagagtgagcagaaaacaggttgaagagaataagcagacaatcctgaccgccgccggacgcttgtttcgcgagcggggttttgacgcggtcacggtcaccgatattatgaaatcagccggtctgacccacggcggattttatggctactttaaatcgaaggatgacctgatcgcccaaaccctcgcggaacttaagatcgaaagcgagacgacggaaaacgacttcgcgtcgcgcgttgaacgctatctctcccccgaacaccgggataattttgccaacggctgcccgctggctgcgctggcggcggagaccatccgccagtccgaacccgcgcgcgatgaaatgaccgcccggctgcggcagcacatagaccagctcagtgaagcgatggatgatcaagacgctgaagcccgccgtcgcgcggcgattggcagctggtcggccatggtcggcgcgttaattctggcgcggatgaccgcggattcggcgttttccgacgaaatcctggctgaaacggcggcctggctcgcggaaaaacagcgctaa

SEQ ID NO: 257413 - DNA, 783 bp, Klebsiella pneumoniae
atgagcagcaaatcagcggtactggtaaccggcgcatcgaccggaattggcgcagtctatgccgaacgttttgcccgccgcggccacgacctggtgctggtcgcgcgtaaccgcgagcgtctgacggcgctggccgagcgactgcgcggtgaaaccggtgttcaggtcgacatcctgcaggccgacttaacccaggatagcgacatcatcgccgtggagcagcgcctgcgggaagacgcgcgtattgggattctggtcaataatgccggtacctcgattcccggtgatttcctccaccagagcagcgacgatatcactcgcctgattaccctcaacgtgacctcagtggctcgcctggcgaacgccatcgcgccgcgtctggccgaagccggagagggggcgattgtcaacatcgcgtcggtcgttgggctgggtccggaaatggggttgaccgtctacggcgccacgaaagcctttgtgctgtttctctcgcaggggctcgatgttgagctgagcgcgaaaggcgtatacgtccaggcggtactgccggcggcgacgcgcaccgagatttggcagcacagcggcaaagatgtggataccattcccggcgtcatggaggtggataaactggtcgatgccgccctggtggggttcgaccgccgcgaatcggtgactattccgccgctgcatgatgaaacgcagtggcaggcgcttaacgcgacgcgtcaggccatgctgcccggctttgcgcaatctgaaccggcggcgcgttatctggggtga

SEQ ID NO: 257414 - DNA, 741 bp, Klebsiella pneumoniae
atgagcgcaaaactgtttcgcgccgccgtggtgttctgcggcctgctgctgctctggtggctggcgagccgcagcggcattcccgcctttctgctgccttcaccctcggcggtggcaagcgctctgtgggtcaaccgctcgtacctcggcgaacacacgctgatcacgttgagcgagatcctcagcggcctcgtgcttggcgccctactcggcgtgacgctggcgctgtgcatgattttctcgccgcgccttcagcgctggctgatgccgctggtgctgaccagccaggcgatcccggtctttgccctcgccccgctgctggtgctgtggttcggttttggcatgggcgccaaggtgatgatggcggtgctggtgattttctttcccgtcacctcggcgttttttgacggtctacgccgggttaaccgcgactatctcgatctggcgcgcaccatgggggcctcttttggcgcacagctgcgccacgttcgcatgatggccgcccttccggcccttggttccggcctgcggatggccgccgccgttgcccccatcggggcgattatcggcgaatgggtcggttcagccgaaggcctgggctacgtgatgcttaacgccaacgcccgcctgcaaaccgatatctgcttcgcggccctgtttattttggtggtgctgaccgtcctgctctggctggcggtggatgcttttttacaccggctgatcgactggacgccggaataa

SEQ ID NO: 257415 - DNA, 1035 bp, Klebsiella pneumoniae
atgtcagcgaaaaaagtgaccatgaccgacatagccagagacgccggagtgggtattgcgacggtagacagagtgctcaataaacgggccgccgtcaaagagagcaccgaacgtaaagtactcgagtccgcgcggcgattaggcttcgcgcttgagcaatcccactatcggctggctgccggccagtcggcgatagccctcagaatggggtttatcctgctgcagccgtcacactcgttttatcaacagctggcgcaggcgcttgaacaggcggcactcgcgtggcatagcccgacgcaggcccccgtttttctgcattatgatattaacgccatcgacgatatggccgccgcgatcggccgcctgagcgctgaagtggatgttatcggcattgtggcgctggataatccgcttatccgccatgccctcattcaggcgattgataaaggggtgcacgtcttcaccctgctctccgatatgagcattccccagcgtaccggctatatcgggctggataaccagaaagcgggccgcaccgccggctgggcggtggacaggctctgtcacggcgacggcgaaattgggattatcgtcggcgataatcggtttatttgtcaggaaagctgcgagataagtttccgctcctacctgcgcgaacagggcaaaggcgatcgtgtgcttgaaccggtgcgcagccacgaacgtgccgatgtcgcgcgccaggtgacggaagagatgctgcaacagtacccggatctgaaggccatttacgcgccctgcggcggcgtggaaggtattgtcgacgccctgcgcgcgcgtcaacgccagcaccaggtcaccctgatttgccatggcccggtagacaacggcgagctggcgttaatcgacggcaccgtcgatcttatgcttgcgcaccggcttagcgagttcgctgcggcgacaattaacgcctttatccaggcagtcagccagccgcgggcgacgtttatcaacgctctgcagccgtttgacctcctcaccaaagaaaacctctga

SEQ ID NO: 257416 - DNA, 426 bp, Klebsiella pneumoniae
atgagaaatttcgatatgcacggtcagcatcaccatcagcgctttggtcgtcacagaatggcaaaaccgcttattatcggcgtggcgttaatcgccgtgcttgggctggtggtgatgtcgctgtggaatgcgctgctgccggcaattcttggcgtgaagagcatcggtttctggcaggcgttagggattctggcgctgtcgcggatcctgttcggcggcctcggttttcggccgggcatgtttggcatggggcacgcccggcggcggatgcatgaacgctggatgaacatgagccccgagcagcgcgaggagtttgctcagcgcttcggccgccgcgggcatcacggcccctgcggctggcgtgaccgccgaggcgagcatgggccgcagcaggagagtccagctaaaaacgcggatcccgagtga

SEQ ID NO: 257417 - DNA, 561 bp, Klebsiella pneumoniae
atgaaaaacggcaccgtggcggagtcacggcttgtttccgccctcaacgcctgccggtcgcggctgaaggcttttatccgcggacggaccccgctgcgcgatgaggcggacgatatcctgcaggaagtgacgtatcagctcattcgcgtcgagcagccggtggagaatatcgccgcctggctgtttcgggcggcgcgtaacgaaatgaccgacagggcgaggaaaaaacgcgagctgccgctggcgggtggcttcagcgaggaggaggagggcgattttcctgaggacgagctggccgagacgctgtttggcgtgccgcaaacgccggaggatgagtatctgaaagcgctgctctgggaggagctaaaccaggcgctttcggagctgccgcccgcccagcgtgaggcatttgagaaaaccgaactgcagggctatagctaccgggagctggccgaagagtccggcgtcagcgagcaggcgctgctctcgcgtaagcataaagccgttctctaccttcgcacccgcctgcgtagcctgtacgatgagctcctcgccggttag

SEQ ID NO: 257418 - DNA, 636 bp, Klebsiella pneumoniae
atgggaaatcaacgcgggcggccgatgaaagcccgcccacgcattttacaaaccgcccgggcgctgtttctgcagcacgggcttgatgtgtctctggataccatcgccgccgaagcgggaaccacgcgcccgacgctgtacagccatttccccggcggaaaagacgcgctgctgctggagacgttcgcctttctcaacgacgctatgcagccgcccctgcaacagcttctacaggacagccagcaggatctgccggcgctgctgcggggattcgccagagttgtccagcaccatttttatgcaccggaaaacatccactttcaacgcctgctcatccaggtgctggtgcaaaaaccggagctgtacgtcacgctagagcagcgcccctcgggacgcgtgttgcaggcgctcagcgatatcctcgcgaagaaacgagatcagggccagctgaccctcagcgacccgcagctccaggcaacggcgtttctcggcgcgattatgggctatccgctgccgggagccttaattgcgcaaaatgcgctaacggcagaaatgctggagccgctcgccgaatgcgcgattagcgtgttcctcacggcctggggctataagccatcatcatccggcgccctgtga

SEQ ID NO: 257419 - DNA, 423 bp, Klebsiella pneumoniae
atgttcaacgaaagaaaatggggaaagcttttttatttcattgcattagccatttttcccggcgcggtgaacgccgctttacccagcctacccgcgcagggcgcctcgctctatgacgcctgctcccacctacaagaacccgccgaggcctggcgctgtcgcgccctgctcattagtcagcgcgtggaacagcggcagcgctatctgcactttttacttcagcagaatattttcagcattcaaacctacgactatctgtggagtgaataccagcgtgcgacgtcatgttctgagatcggcgccttcttgatgagcaaagttcacgatgaggcattccatgggctgccctttaccccgcttccgcccgatgatgcgataagagcgccgcctgcggtgtttaccctgcaagacgccattaactga

SEQ ID NO: 257420 - DNA, 1539 bp, Klebsiella pneumoniae
atgaacgactccttatcacgccatcgtctgtggatattcttatttttaattgtggtgctgagctttggtacagggctttgttactggcaaatgcaaaaaaaagtggataacgatattcatgcgcggcttcagcaggcgatagccagccttgatgtgaccgtttctcatgcggagcaggccgctaatatggctgagccgttctatgggaaaagctgtaatgagaatgtcctgacggagctacgcacgctggtggccactattcccgatgtgcgcacggtgaatttaggtaaggataatgaaatatactgcacctcggtttatggcggacggaaatttcagttcgatcgccgccaatatacgcatggcgctttacgtctgctgagcggcagtgaaatcacgccgctccatccattgatggtttacagcgaacaggacgaccggggaaatacgattctggtgggtgtggatggctattatttatacaacattttaaacgttctcgacggcgacgctcatctgtatcttcaggttggcgaccgggtaatgacccataagggggaagtgacgacgaccccgggtattcgcgttcccgtacgcatggaatcagagcagtttcactattcggttattgccgaccgccattacgcgtccggccccggcgcatttatccgttatgaacaacacacccttatcgccattattctggcctccctgctgctgacatttttgttcagaaactacctccgctaccggaatacgattgagtatcagctcaggcaggctatcgaactcaaacagctcaaaccctatattcagccgattatcggcagcgacaccggtcagatcgtcggcggcgaagtgctggtgcgctgggagcatccaaaacaggggtttattgcgccggataaatttatctccgtcgccgaacagaccggtcttatcaaagaagtgacggcgatttgctttgctgaggtgagtcgccagctccggcgacagcagtccgtcattcccgcggggctgtttatctgctttaacaccagctcggtaaactttcaggacgacgaaattgtgaccctgtgccagacgtttacccaacagatgaaagcggcaaaagtacgccttgtcctggagataaccgagcgggagtcgattgcaaataccctgcagacgtcagcggtgacggaccaactcaggcgtattggcgtgcagttttcgctggatgattttggtaccgggtatgcaaactacagctacatccagcagtttaatccggagattattaaaatcgataaagtctttaccttcaacattgtgaccaataacgcttcagcgctggtggtgatgaatatggtcaatctggcgaaaaaatttcattgccagattattgccgagggcgttgaggataaagagcagcttgagatgctcaaaaatatgggcattaccctctaccagggctactacttttcaaaaccggtgccggttgatgaatttattgagatgcttccgcgcacgtttctccagcgcagagagggcgagtaa

SEQ ID NO: 257421 - DNA, 444 bp, Klebsiella pneumoniae
atgcttaaacaattaaccgctatcgttttgctggctgcagcaaccaatgccgtggcgcaagacgatatgacgctggacagtctggtcaaaaaggaaccggcagcctttagtcaaatggtaaaaggtcaccctctgcccgcctgggtaaagacgggcggaaccgcctcgcctgccagaacggtgaagcttggcgcagagacttatcaggtactcagcgtctgtaaaccccacgattgcgcgacggaacgcttcgccgtgctgtggtctgaaaagtccagactgatgaccgggcttttctctaccgttgatgaaaaaaccgcccaggagaaactgacctggcttaacgttagcgacgatctttccatcgatggtaaaacggtgctctttgccgccctgagcggcagcctggaaaatcatcccgacgcatttaactttcagcagtag

SEQ ID NO: 257422 - DNA, 231 bp, Klebsiella pneumoniae
atgggcaacatcatcctgtataaagttatcgtcatcatggtcattgtctggtggggctggagcctactgagaagtaagcagaaaaagcagagcctggagcccgccattgcgcaggcgaatgccagagagcgttatcagtggcgttatttcaggtggggctggagaggtgtgcaaatcgtctgcggtttttatttgctgataaccctcatccagttccttttacgctactag

SEQ ID NO: 257423 - DNA, 1788 bp, Klebsiella pneumoniae
atggaatccatatcgtttcacaagcattggggggcggagtttattgccgctgatactgtccgttttcgcgtctgggccgaaggtcaaaagacaatgacgctgagcctgaagacgcgggatattccgatggaagccgcgggtgggggctggttccagattgacgtccctggcgtaaagcatggcgatgaatatatgctccttttagccgacggcaggcgtattcccgatccggccacgcgcgcgcagcgcgatgatgttaacggtccctcggtagttatcgaccccaggctttttcagccggttaaccgcgtctggaaagggcggccatgggaagaaactgtcatctatgaactccatccgggcacctttacgccagaaggcacctttctggccgccatcgataagctgccttatctggcagagctggggatcacccaggtcgagattatgcccgttgcccagtttggcggttcccgcggctggggttatgacggcgtattactttacgcgccgcacgccgcgtacggctcgccgggggattttcacgcctttattgacgccgcccacgggttagggctttcggtggttctcgatatcgttctcaaccattttggcccggaaggcaactatctctctttgctgtcgccgggcttttttcatcaaaaccgaatgaccccctggggtaacgctatcgcctatgaaaccgaggctgtgcggcagtatattaccgaggcgccgctgttctggcttaccgagtaccatcttgatgggctgcgctttgatgccatcgatcagattgaagatcgctccgccaggcatgtgctgatagagatcgccgaaaatatccgcaaagccatccccgaccgccatatccacctcaccaccgaagacagccggaacgtcattttcctccatccgcgcgatgaggatggacaaaccccgctgtttaccgccgagtggaatgatgattttcataacgccgcccacgttttcgccaccggcgagacgcacgcctattatcaggattttgcgcatcagcctgccagtaagttcgcaagggcgctggccgagggatttgtctaccagggtgagctttctgcgcaaaccgggaagccccgcggcgtggcctgcgccgctcagccgccgcagttttttgtcgactttattcagaatcacgatcagaccggaaaccgtgcgcagggggaaaggttgatctcccttgccggcgccgggaaaacgcgcgttttgctcgccgctttgcttctgtcgccgcatattcctttgctgtttatgggagaggagttcggcgagagcaatccctttttgttctttaccgattttcagggttccctcgcgaaggcggtgcgggaaggacgggcaaaagagtttgccggacacgcggggcacgacgaatccgtcccggacccgaacgatcccctgacctttattcgttctaagctcgactggcagaaggcggcaagcgaggaggggaaatcctggctgcgcttcacgcgcaacctcatcttgctgcgccatcgctatatcgtcccgctgctggcggcagggggcggcgtcgagggcaagatcctgcacacggagcctcaggcgctggcggtgagctggcaatttgccggcgggacgctctctgtggcgctgaatatcggcgaggaaccgcttgcgttgccggaaatacctggcgaggtcatttttagctggccggaacagcaggaagcgttaacgccagacagtattgttgtccgttttgcacatggagaagcctcagtatga

SEQ ID NO: 257424 - DNA, 2541 bp, Klebsiella pneumoniae
atgatcccttccgcgacttatcgcattcagttccgtaacggcatgaccttcgatcgcgcggcggcgctggccccctatcttcaggggctcggtatcagccatctttacgcctcgccgatatttacggcgaccaccggctccacccatggctatgatattaccgatcctaacgagatcgacccggccatcgggggccgcgaagggtttgaccggatggtgaaggcgctgcgaaacgcgcaaattggcctgatcctggatattgtgcctaaccatatgtcgacctcgctggagaatcgttggtggcgggacgttatcgagcagggcaagaacagccgctgggcgaattatttcgatattgactggacgcgtcccgttacgctgccgtttctgggggatacctttgaggcggaactggagagcggggcgctcgaactgaaacgcgaccctgcaaccgggaaaccggcgttcatctattatgaccaggtctggcccctgaatcctcaaaccctggcgacaggtgagcaacgactaacatccccggatcgcgacgccattctggcgctgcacgaggcgcaaagctggcgccttatgtcctggcgggaagcgcccaggcagctctcctggcggcgtttttttgaaattaccggcctgattggcgtcagggttgaagacccggcggtgtttgacgacacccatcgacttatccttgaactggtgcattccggcatcgtcgatggtctgcgtattgaccatatcgatggccttgccgacccgctggggtatctgcagcgcctgcgccaggccaccgggccagagtgctacattacggtggaaaaaatcctcgcgaagggcgaacagctgcccgccgactggccggtgtccggcaccacagggtatgagtttatcgcttcgctggcggaagtgctggtggatgacaataacctcgaccagctgcagcaggtgcatgacgacgcgctcggcggaacggtggatcgccacaaagcgctgcgcgaggcgaaaggcctgatggcggatcgcaattttgagggtgaatttaccactttattgaagctggcccgcgaactggcgcagcgtaacggcatggcggtcgagagtgacgcgctgcgccacgccctgcgcgaactgctgctggccttcccggtctatcgtacctacggcaccgccgaagggctgaccgcaggcgatattacgctgttaaaccgggtggttgaccaggtgaacgccgaagaaaaccgacccgatgccaacgcgcttaacgtcattatcgctatcctgaccggcaatctgcaggcgagcagcctcgacatcgcttcactcttcaggacccgttttcagcagctcaccgggccgttaatggcgaaatcggtcgaggatacgctgttctttcgtcataacctcgacctggcgctgaatgaagttggggccgatcctacgcctcgcgccttctcattgtctcgctttcatcaggagatgcgcatccgtcttgcgcgccagcccgatgcgctgctggggacgtcgacgcacgatacgaaacgcggggaagatgcgcgggcccggctttacaccttaacggaagccccgcagctgtgggcggaaaaccttgcgcgctggcgtcagatgaatcaaacccatgtgcgttttttgaacgacggcacggcgccgaacgcggcggatacgtggatgatctatcaggcgctggcgggcgcgtggcctgcaacgctgctgccggacgatgccgaagggctgaaatcgctcgaaacgcgttttctcgcttttatggaaaaagcgctgcgcgaggccaagcagagaaccgactggatcgacagcaatgaaagctatgagagcgtggtgcttaattatgtgcagcagctattttctgcggataattcgcgctttctcaacgattttcacattgccttgcagccctttatccgtgccggactggtaaacagcctcagccagacggtgataaaactgactgcgcccggcgtgccggacatttatcaggggagcgaggcgctgaacttcagtcttgtcgatccggataaccgacgtgaacccgatttcgctgtccttgcgcaaaaccttcataccgggaaagcggatctgttcacccgcgaacccgcctggcgagacgggcgcctgaaacagtacgttaccgcttcttttctccgattaagacagcggcattcagcgctcttccattatggtgactgggtaccattaaaagtctccggggagagggaagataatcttattgcctacgcgcgcatcagcggagaggaggccctgatcgtggtggtgcctcgcctggcgtttgacgttgcggcgcacggattggcggaatcttccgcaaggctatggggcaatactgtggtaaccataccagacgatctggccgggaaacgttttcgcgatgtgtttagcggcgagagccgtctggtggaaacgtcgctcgaactggcgtcaacatccgggtggttgttgacgcttattagcgctgagctacggggagaataa

SEQ ID NO: 257425 - DNA, 1398 bp, Klebsiella pneumoniae
atgcacgacaaatatgatgtactgataataggtggcgggcctggggggtatgtcgccgccattcgtgccggccagctagggcttcgtaccgcattggtggaaaagcagcatttagggggcatctgcctgaactggggatgcattccaaccaaggcgctgctgcatggcgcagaggtggcgcacactattgcgcatgccgatcggctgggttttagtctcagcgaggtgagtttcgatctgcagaaactggtgcagtttagccgcgccgtgtcgcaacagctgagcggaggtgtcgagtacctgttgaagaaaaatggcgtgacggtcatagccggcaccgcccggctgtgcggtaaggggcaagtcacggtcgccgatccccagggggaagagcgagactatcgcgctgatcatgtgatccttgcgactggcgcccggccgcgagcgttgccaggagtcgagccagatggcgagcgaatctggacctatttcgaggccctgcagcctgagcgcttaccggagtctctattaatcatcggttcaggggccatcggagtggagttcgccagcctttataacgatcttggcagcaacgtaacgctggtcgaacaagccgcgcagattctgcccgttgaagacgccgaagtatccgctaccgtgcgtaaatcgttcgaacgacgcggtatacacgtccatagccaaacgctgctgacgcaggtaaagcgcaccgatacgggcgtgcgctgcgccttgaaaaccaccggcgccgaacagacactggaagtcgaacgtgtgctgttggcagcgggcgtgcagcctaatgtggaaggcctggggctggaagcgctgggcgttgagttggaccgcgggtttatcaagacggatgcagcttgccgaaccaacgtatttggcctctatgctatcggcgatgtggctggcccgccgtgtctggcgcacaaagccagccacgaaggcgtgatctgcgtcgagacgctggctggcgtcgaaggcgtacgccctcttaaccgcgactatgtgcccggttgtacctatgcccggccacaggttgccagcctgggcttgacagaggcgaaggctcgcgagacgggacggccaatcaaggtcggtaagttcgcatatcaggggaatggtaaggcgctggccagcggtgagacggagggttttgtaaagactattttcgacgccgaaaccggcgaattactgggcgcgcatatggttggtgagcaggtcactgaacagatccagggttttggtatcgcgcatcatctggaggctacagatgagagtctcttatcgatgatctttgctcatccaacgctttctgaagccatgcatgaatccatccttgccgccagcggtcagccgctgcatcaataa

SEQ ID NO: 257426 - DNA, 1530 bp, Klebsiella pneumoniae
atgagcgatatcaggacacttgaaatgccgaagtggggtctttcaatggaggaaggcgtgctcgcgcggtgggccatccaggagggtgaccgcttcgccaaagggcaggaaatctgtgaaattgagaccagcaaaatcgtcaatgttctggaggcccccttcgccggtacgctacggcggataatcgcccgagtgggagataccctcccggtcggcgctgttttggcgctggtcgctgactctgcggtaagcgatgctgaactggatgccttcgctgccagtctggccgcggcgcagccagcagctcctgtcacgcagactaccgagcctgctgtagcgaccgcggcgccctcctttgtaccggcccccgccaataagcctgcggcatccattgggcagaccgaggtacccatcagcctgcaaggcaaaaccgatccgactcaggtgaatgccactccccatgcgttacggctgtctgcgcggttgggcgttgacttgaaaaaggtctacggtagcgggcgcggcgagcgtatctccgtggctgacctggagagcgcgatcgttgccgcaggcggccgcgtcgcctctccgccaccgccagtgcgttccggcaaagcgccgcgatcgcataccgatgatagccaggtcccggcaaccccgttggcgcgccgtctggccaacaaactggggatcaacctgcacgactgccgcaaaagcggttcacttggacgggtgagtcgcgatgatgtgctggcggccgctttgctgcttgatgggctaccccaggccggggctccacaagccacgtcagcgacagcctttgagacgttgccgatgtccagtatgcggcgagcgatcgctggccgtttgcaaatgtccaagcaacatgcaccccatttccgtttgaccgtcgatctcgacctggaccgactcttagcattgcgtaaggaaatcaacagcgaagtacccggcgtcaagatttcggttaacgatatgctggttaaggcctgcgccatggcgctgatagccgtgccggacgtcaacatacagtttgatgaggcgacccagagcatccgccgttttgccgatgccgacatttccgtggccgttgcgctgccggacgggttaattacccctatcgtacgttcggccaacagcaggtcgataagcgacatatcaaacgaagttcattctctgataaccaaagcccgggcgggcatgctcaagcccgaagagttccagggcggcacctttagcgtgtcaaacctgggcatgctcggagtacggcagtttgacgccatcataaacccaccccagggcgcgatccttgcgattggcgcaggcgagccccgagcggtagttcgcgacggacagatcgtcgtccgccatcaactgaccgtatcgctgtcctgcgatcaccgggtcatcgatggggcgtcaggcgcggcgtttctccaggcgctcaagcggctggttgaaacaccgacgctgttgtttatcggggagacgagctatgcacgacaaatatga

SEQ ID NO: 257427 - DNA, 1020 bp, Klebsiella pneumoniae
atgcctataaaaacctatcgagaagcggtcaaggaagccctggcccaggaaatggagcacgacgaacgcgtcgttctgattggtgaagacttgcgtggcggtcacggcggaaatgcgcccgaagaagcaaggatagaggcttttggcggtgtgctcggagtcactaaagggctgtggacgcagttcggctccgaccgggtgatcgacacccccattacggagtcggcgatcgtcggcatggctgccggcgccgcagcaacgggtctgcggccggtggcggagctgatgtttatggattttttcggtgttagccatgatgcgctgtacaaccaggcagcaaagttccgctatatgtttggcggcaaggctaaggcgccgctggtgatgcggggcatgatcggcgctggtttttctgccgcagcccagcattcgcagtcaccctataatatttttgctaccacaccggggctcaaggtggtcgtgccatcgacgccttatgatgtcaaagggctgctgatccagtcgatacgcgacgacgatccggtggtgttctgcgagcataaaatgctttatgacctcaagggcgaggtacctgacgagatttataccattcccctgggcgtcgctaactatacccgtgaaggtgaggatgtcaccatcatcgcgttgtcggcaatggtacataaagcaaaccaggtcgccgacaaactggccagggaggggatctcggtggaggtggtcgatccacgtacaatctcgcctctggacgaagaaggtattctggaatccgtggcttctacgggccgcgtggtcattgtcgacgagtcagccgcgcgttttggctttgctcatgatgtcgccgcgctgattgcttcccaggcattccatttcctcaaagcgcctattgttctggtgacaccaccacacaccccggtaccgttctcccctgctctcgaaaaactctggatccctggcgttgaacgtatcgaagctgccgtccgtcaagtgctggaggattaa

SEQ ID NO: 257428 - DNA, 960 bp, Klebsiella pneumoniae
atgcttaacaaacaggctttactccaggcttaccgtaagatgcgcgaagtccggacgtttgaggagcgtttgcatcaggaaaacaccagcggtgatattccgggcttcattcacctttataccggtgaggaagccattgcggtgggggtctgcgaaaatctgactaacgctgatttcattgggtccacgcaccgtggacatggccactgtattgccaaaggctgcgatattcacggcatgatggctgaaatattcggtaaggacagcggattatgccggggcaaggggggctcaatgcatattgccgatctgtcgaaaggtatgctgggtgcgaacgctatcgtgggtggcgcccctccgttagccatcggcgctgcgctgacggccaaaacccttaagaccggtaacgttggggtctcttttaccggtgacggcggttcaaaccagggcctggtatttgaagccatcaacatggcagtcgtgctgcaactccctgccatctttattttcgagaacaacggttatggcgaaggaacgggccatgactacgccgtcggtggtcgtgatatcgccgggcgcgccgcgggcttcggtttaccggcagtgacggttgatggcaccgatttctttgccgtttacgatgccaccgcagaggcagtcaagcgcgcccgagaaggtggaggcccaagcgtgattgaggccaaagctttccgctggcacggtcactttgagggcgatccggcgctttaccgtgctgagggcgaagttcaacgtctgcgcgaacaacatgatccgctgaagattttcaccgccagggtcaaacaacacatctcccttgaggaactggcggcgatcgacgcggaggttgaagcacttgtcgatgatgctgtattcaaagcccgcgccgctgcctacccggcaccggaagacctgcttacagacgtttacgtctcatactga

SEQ ID NO: 257429 - DNA, 2595 bp, Klebsiella pneumoniae
atgcagcaacgccgtctgggcgtggtttgcgcgggcgctggatttggcaaaaccacgctgttggcgcagtggtatcagcacatgattgcccagggcgaacgcgttgcctggcttagcctcgatgaggatgatgatggcgtatggcagttcattccttatctgctgcaagcattgcggccgctctatggcgattgggacgccgacttttggcgcaacatagaagaacagacgacctccagctcgcaacagctgctggccgggttgattaaccaactgcattactgtccgcacgatctgtatttgatcgttgatgacttccatatgattaatgatgccggcgtatatgaagccctgggatatttgctcaagcatgctcctgccgccttgcatctgatcattggcagccgtttccaccccagtttgtccctgagcctgcttcaggcgcaggaccaattggtggagatctacgatcgagacctgcaattcacgctcgaagaaaccagaaactatttcagccagacgattgacgtaccactcagtaatcagcatgtacagcggctgctttccgcgacagaggggtggatcgccggcatgaaaatcgcttcgttgtccccagaattgctcaatgatccagaacatctgctgcgcaatatccgtggtggaacccgcgccatcgcccgttatctgaaagaggtggtacttgacccattgccagcggaagtttttgattttattgtcaaaacatcgtttcttaatcgtttaaatgccgggttatgtaatagggttactgggcgtgatgatagtgaagcgatactggcatggattgagcggcacaatctttttttgtcagccctggacgaacaaggctgctggtttcgctaccatcctcttttgcaggaaaccctgcgaacgatattgcagcagaacaacgatatcaacctcaagcatttacatgaattagccagtcattggtttgttgaacagagattgtggtccgaggcggtacgccacgcacttgcagcgggcaagccgatccataaccccgggcaggatggcgcgggcgcgcagtcactggcggaagaaggggatatagacaccctggtttcctggatgcatcacttacctgcgagtactgacccttcgcgcattgacctgcaaatcaatctggcctgggcgctggcgcactatttccgcttcgatgaatcgaggcagttgctggataatcttgaccaaatggtcgttaatcatcgtgatgatatagcccccaacgcctggctcaaattacgtgtcgtgcgcgcaatttgcgaagcttttgccgagaaaatcccggaaagcctggcgattgtggagccgttgctggctaaagtgccctgcggagacacatgggtcgatggtcttatttgcaatattctgagctactgccacgtggttaatcagcgctataccgacgctcttgaggttcagcggcatatgccttgcccggaaagtccattagacaatctgtttgtctcggtttatcgcgcttttatcattgctcagtgccatcttggtcagggggacctggagaacgcctgggggcatgcagagaatgccttgcgccaggctgagcgttataccggcccccagtcgaccagcggcgcgacgcttgcgccgctgctggcggaaatggcttacgagcgtaagaacctggactccttaaatacgctgttagcagatagactcgaattcatcgatcggtttggtccgcccgacgccctaagtcgctgctatacctatcttgcgcgtcaggccttgaatgacgatatgccgcatgaggcagaacggctgctggaacacgcgcagcgactagcggtgtctcgcggatggcaacggccgcaggctttattgttagcagagcaggcgagggtgcgcctgcagcgcgcgaattatccaggcgcagagcagctgcaacggcaacttgaacaactggcggcccgtgccacaattgatgccgaaaatccttgtcaacgcgcaatagctcagtatgcaatcgtcagccgcagccgccttcttctggcgtcaggccaggccccacaagccagccttttactgggtgaactcgtgactgagcaggagcgtcggggcgaccggctatccgcagcgcgtcttcgtacgctatggtcattatccttgtggaatagtggcgaaaacgcggctgccgtggctgcattgcagcccgcccagcaattagcggcacaacagcatctcaaacgaatttttcttgatgctggcgagacattgcagcctctgcttgtccgtgtacgcgaaacctcggcagccagcgaaggggatgctctttggcccggcaaaggaagccagtctgaaggcaagcggattcagcgtgaaaatcttgatgttaacctggatctcagtgagcgagagcagcagatattgcagctcattgctgacggtcagatgaacaaagaaatcgctcgctccttgactatctctactgagacggtgaaatggcacatcaagaacatctacgccaagctcaaagtcagtagtcgtacgcaagccatgagtcgggctctggaaatgaagttactggattaa

SEQ ID NO: 257430 - DNA, 708 bp, Klebsiella pneumoniae
atgcatccctttacctcattaagcctgtgggcgctcgccgcctgctccacgctcctgctacccgcgggtgcgcccttaagcctttacagcgcgctgactttcatctgtttactgggaatcaaggccacgcgaccacgggcaaaatacgtactctggctgatgatccctttagggttaggcctgtggctggtgcacggcggctggttgagcgaatggatcgctggacaagcgcgtgaacctgaacgttgggccaatgccgtcacgctctggctgcggatcctggccatcgtatcaacatcgcagctgtggatgcactacgtgccggtttcgcggtttatgcgcgccctgtttgcctcccgcttgccgccgggtctcgcctatctgtttgccggcccgttgctggttgtcgagcagctcaaacgccagctggcgattattcatgaggcccagtgcgcacggggcgtcccgctggatgaggcctggtatcatcgtttacgcgcgatgcctgcattgattgtgccgcttacccataatgcgctcaacgatttagccgtacgcggtgcggcgttggatatgcgaggatttcgcctgcatcggacacgcaccacgctgtgggcaccaccggacagcaccttacagcgttgggcacgctacgccatggtggcgctgatagtcaccgagaccggagtctggatatggttacattag

SEQ ID NO: 257431 - DNA, 678 bp, Klebsiella pneumoniae
atggttacattagaacagtttcgctatcttccaacccatgccacgcgcccacctgcctgcttcgattttcactacgccgagcccggtatggtggcgatttttggcgataacggcagcggaaaaagtacgcttgcgcagttgatggcgggctggtatccggatttcctccccggagaaattgaaggtaaaggaacgttactcgggaaccctatcggacagttgtcgctcgtcgaacaggcgagcaccgtccagttggttcaacaatccccctatctccagctttccggctgtacattcagcgtcgaagaagaggtcgcttttggtcctgaaaatctctgcctcagcgaagacgagattatgcgtcgtattgatgaagcgctgacgctgacggtatgccaggcgttacgtcatcgccacccggccacgctctccggcggagaaacccagcgggtagtcattgccagcgcgcttgccatgcagcccaggatattgatactggatgaagcgtttagccgtttgacggcgcaggctagcgccatgcttctggagcgcttgcggcactgggcgcaggcgcagcgttccttgattatcctttttgaacgaactccctcgccttttcttgcctggtgtcagcagggatggcgactgcatgatggagcgctttccccgctatgctga

SEQ ID NO: 257432 - DNA, 657 bp, Klebsiella pneumoniae
atgctgacgttgaatcaggtgacttatcgctggcccggcgcggcggcagactgtttgcaaaacatctcgctaaacctcggtgaaaacgaatggctggcgctcaccggcgataacggcgcggggaaatccaccctgctgcgggtgatggccggactgctacccgccacgtccggtaccgtcaatttgctggataagccgatggcgcattataaaaatcgccatcgcgccggtatgctcggcgtcctgtttcaggaagctgaaaatcaaatctttcacagcaaggtggctgaagaagtcgccttcgggctgcggctacagaaacggtctgccgcagaggttgcgcaacgcaccgcggcagcgctgcagctttgccagttagaggacgtcgccgatgcgcatccgctggatttgcataccgcccagcgccgcatggtggccgtcgcctgtctggaagcgatggcgccagcagttctgctgctcgacgaacccagccgcgattttgaccagcactggctgacgatatttgaggagtggcttgcggtttgccgcaaaagggggaccagcgtagtggctatcagccatgacacggcttttatacagcgccacttttcccgcatggtgcgcctggaaaagggaaggctactgagtatttcctga

SEQ ID NO: 257433 - DNA, 921 bp, Klebsiella pneumoniae
atgagcaccttaggtcatcaatacgataactccctggtatccaacgcatttggttttctgcgtctaccgatgaatttcatgccgtatgacagcgatgcggactgggtcatcaccggcgtaccgtttgatatggcgacctccggacgcgcgggcggccgtcatggcccggcggcgatccgtcaggtgtcgacgaaccttgcgtgggagcataaccgcttcccgtggaattttgacatgcgcgagcgcctgaacgtcgtggactgcggcgatctggtttatgccttcggcgacgcgcgtgaaatgagtgaaaagctgcaggcccacgcggaaaaactgctggcggcaggtaaacgcatgctctccttcggcggcgaccattttgtgacgctaccgctgctgcgcgcgcatgctaaacacttcggcaaaatggcgctggtacatttcgatgcccacaccgatacctacgctaacggctgcgaatttgaccatggcaccatgttctacaccgcgccgaacgaaggcctgatcgatccgcatcattcggtgcagatcggtatccgtaccgagtttgataaggacaacggcttcacggtgctggatgcgggccaggtcaacgatcgcagcgttgacgacgtgatcgctcaggtgaaacagatcgtcggcgatatgccggtgtatctgacctttgatattgactgtctggatccggcgtttgccccaggtaccggtacgccggtgatcggcggtctgacctccgatcgggcgatcaagctggtgcgtggcctcaaggatctgaacatcgtcggcatggacgtggtggaagtcgctccggcctacgaccagtctgaaatcaccgccctggcggcggcgacgctggcgctggaaatgctgtatatccaggcggcgaaaaaaggcgagtaa

SEQ ID NO: 257434 - DNA, 708 bp, Klebsiella pneumoniae
atgtcccgtattcatacttttgctgccgcgtttcttagcgcggcagtatgcgccccgcttgcagcggaaggaatcaacagtttttctcaggccaagaccgctggggtcaaggtcaatgccgacgcccccggcgatttctactgcggctgtaaaatcaactggcagggaaaaaagggggttatcgacctggaatcttgtggctataaagtgcgtaaaaatgaaaatcgcgccagccgggtcgagtgggagcatgtggttcccgcatggcagtttggccatcagcggcagtgctggcaggacggcgggcgcaaaaactgcgccaaagatccggaataccgcaagatggaaagcgacatgcataacctgcagccggcggtcggcgaggtcaacggcgaccgcgccaactttatgtacagccagtggaacggcggcgaaggccagtacggccagtgcgcaatgaaggttgattttaaagataaagttgccgagccgccggcgcgcgcgcgtggcgccatcgcccgtacctacttctatatgcgcgaccgctaccagctcaatctttcccgccagcaaacccagctgtttaccgcctgggataagatgtacccggtcacgacctgggagtgcgaacgcgacgcgcgtattgccaaagttcagggcaaccataatccttatgtcctgcaggcttgccaggcgcaaaagagctaa

SEQ ID NO: 257435 - DNA, 1257 bp, Klebsiella pneumoniae
atgaatcttaagctgcagctcaaagtactgtcgttcctgcagttctgcctctggggaagctggctcaccacgctcggctcgtatatgttcgtcaccctcaagttcgacggcgcggccatcggggcggtgtatagctcgctcggtatcgccgcggtgtttatgccgacgctgctcggtatcgttgccgataaatggatcagcgccaagtgggtttatgccatttgccatctggtcggcgcgctgacgctgtggctcgccgcccaggtcaccacgccgggcgagatgttcctcgtcatcctgctcaactcgctggcctatatgccaacgctggggctgattaacaccatttcgtactaccgcctgcagtctgcggatatggatatcgtgaccgatttcccgccgattcgtatctggggcaccatcggttttatcctcgccatgtgggccgtcagcttctccggctttgagctgagccatatgcagctttatatcggcgcggcgctctccttactgctggtgctcttcaccctgacgctgccgcatattccggtggctaatcagcagaaaaaccagagctggaccgccatgctgggcctcgatgccttcgcgctgtttaaaaacaaacgcatggcgatcttctttattttctcgatgatgctgggcgccgagctgcagatcaccaatatgttcggcaacaccttcctgcacagctttgataaagatccgctgttcgccagcagctttatcgtgcagcacgcctcggtgatgatgtcgatttcgcagatctcggaaaccctgttcatcctgaccattccgttcttcctcagccgctacggcatcaagaacgtgatgctgatcagtatcgtggcgtggatgctgcgcttcggcctgttcgcttacggcgatccgaccccgttcggcaccgtgctgctggtgctgtcgatgatcgtttatggctgcgccttcgactttttcaacatctcgggttcggtgtttgtggaaaaagaggttcgcccggaaatccgcgccagcgcgcaggggatgttcctgatgatgaccaacgggtttggctgcatacttggtgggatggtgagcggcaaagtcgtagagcactttaccgtcgaagggatcaccgactggcaaaccgtgtggctgattttcgccggctattcgctggtgctggcgtttgcctttgtggcgctgtttaagtacaagcacgtccgcgtaccaaccggggcgcagaccgtcgcacattaa

SEQ ID NO: 257436 - DNA, 1269 bp, Klebsiella pneumoniae
atggcattaaccgatgcaaagatccgggctgctaaaccggatgaaaaaccctataaactggcagatactggcaacatgcatctgctggttcaccctaatggctcgcgctactggcggctacgctaccgccatcagggaaaagagaaaacgctggcgcttggcctctatcccgatatctcactgtctgcagctcgctcattgcgcgatgacgccagaaagctcatcgcacagggtatcgatccctgtgaacaaaaacgggctaaaaaatcggactcggaggcatcggatacctttgaaacaatcgcccgtcggtggcacgccagcaataagaaatggtctgaagcacaccgggccaaagtgctgaccagcctggagacacatgtatttccttctatcggcttgcgggatatcaagacgctgaaaacccccgatcttcttgtcccggtaaaagaggctgaggcaaaagagatttatgaaacggcatcacgcctgcaacagcgtatctcagccgttatgcgatacgcggcgcagtcgggaatcattgactataacccggcgattgatatggccggagcactggcaaccgtcgaacgtgagcatcgccctgccctgccgcttcatcgcctgtcagaactgattacccgcattgatgtttataaagggcaacctcttacccggctggctgtagaactcactctgttgatattcattcgttccagtgagttacgcttcgcccgctggtctgagattgattttaagaaatccatgtgggtaataccgcccaagcgtgagctaatccccggcgtgaagttttctgaacgtggttcaaagatgaaaacaccgcacatggttccgctttccagtcaggcgctggagatcctgaagcagataaaacaaatcagcggtgaatatgacctgatattcactggcgaccgcgatccgtataaaccgatgagtgaaaacacggtcaatacggccttacgggtgatgggatataacacgaaagttgaggtctgcggtcacggctttcgcacgatggcctgtagctctttgattgaatcgggattgtggtcgaaagatgccgtagagcgccagatgagccatcaggagcgtaacggtgtgcgtgctgcatatatccataaagcggagtttatcgacgagcgtaaactgatgctgcaatggtgggccgactttcttgatgctaaccgggaggaaacaataagcccgtttgattatgcaaaactcaataacccaatgcagaccagataa

SEQ ID NO: 257437 - DNA, 315 bp, Klebsiella pneumoniae
atgcaatacacagcaataaagtattttattctcgcgttcgcgttgtcactgattattgtattatttaatctattttcagcaacaggaaaaatttatggcttttggcatgggataaaaattttgttctggctgacgattggtcctggaattggaatgctaattggtgcttttattcggcagtggttaatgcctgatgcaatatatacccgtgagggggctgttggaatatttaaagcaaaaatattctgggcagttggtcctcaatctattggttggctacttggggcattggcagtttcagagcaattatattag

SEQ ID NO: 257438 - DNA, 348 bp, Klebsiella pneumoniae
atgctcgttactcatgatgatgagagtatatatatcgcatacagtgaccctaaattttcaccagatgataatgttattattcttggtaaatcctcgaaaaatgttgagcaaatggttatacctgctacgcaatatgctgaattttcgttatctggaataactgatcaaaatacaatggtgtatgtctcctatatccctaaaaatctggatggaatccctgttgctgatttctcattaagcaatgataaagggacgattactcaaacaggtaaatgtattgtagacacaattaagacaagaaatactcttcttgaagaaggtatttctggcgttagagtacgaaaataa

SEQ ID NO: 257439 - DNA, 405 bp, Klebsiella pneumoniae
atgaatacacaagcgataaattcaaccgctgttaaggtcttctttgttaagtacaaaaaaattatcatcggagcttttgttttattctgtatttataattttataaccggttttatgcgtggccctgagcttccttattgtagtgattctaaccttattgataaaaagataccaaacatgattattaataagctaaggcaatataactcaaatgcccttcatctcaaaattacagtgtctgataccaaggagaccttatatgataaaaaagctgggttaaggcagtgtactgccggggtgacaatgcgttacaacgggaatgttcacacagatgattttacttatcagattgcatggactaatgaaaaagaaggtcagtatcaagttaaattacttgaagactga

SEQ ID NO: 257440 - DNA, 414 bp, Klebsiella pneumoniae
ttgcttccgctgtttcccgaatacttagcttctgacctgccggtaatacaaaaccttctgatgatgttcatgatcggcctgcttcccccgttatttagccagtttatgtgcccattctattccttgcttttgccgcgggcggcgattcagctagttcttgtgcgagaccgcgaccatcagatcgataagcatattattgatgacgattatcacagcgcgtatgatcgggtcaacctgagaaggtgctttatcagactgcagctgccacgtggtgggcacatccaggctgacaattcgtatttcatgttgttcaatctgctttttcggcgtaatccagtcgctgttgctgaggcgggtcaggcggtctatctgaccgatcagcaagatgtcattatggtgactgtccgtcagtga

SEQ ID NO: 257441 - DNA, 558 bp, Klebsiella pneumoniae
atggaaacaaaagcatatatatcaagaataattaatgagttagatgatgttaaagagtcgcttcaggaagaggattgcgcaaaactcattgctgccgtgcatagcagcaagaaagtgttctgctatgggctgggccgtgctggattttcaatgaaagcatttaccatgcgccttatgcacatggggaaagaagtgtatttcctgactgaaaccatcacccccaattttggtgccggggatttgtttatcgtttcatcggcctctggcgaaacagcccagttaatcgcccttgctaaaaaggcgcgccagttgggcggtaaggttgccgtactgacaaccaacagacagtcaacgatcactgaattttgtgatgtgaccgtccagattaatgccccttccaaaaatcagaaacaatcatctttctgctcttctcagccgatggcctctctttatgaacaggcgctacttattatttccgatgcactgataatgaaaatggcaaaagaaagtggctctccagaggaagaattattccgacgccatgcaactcttgaataa

SEQ ID NO: 257442 - DNA, 1518 bp, Klebsiella pneumoniae
atgagcagtaaaataacatcactgtttaattttaaaaagcttcagaaattttcttctgctctgatgctgcctattgctatcttacccgcggctggattaattcttgctatcggtacatcattccatattgaactgcttgcaaactgtgggggtattatctttgctaacctccctcttctgttctgtgtgggtatcgttattggcctgaccggcgacggttcatcgtccctgtccgctatcaccagttacatgatcctgaatgccacgatgggcacaaaactggggatcacacctgaatctgtggcagcaagtaatggtgattatgccctgatacttggtgttcctacacttcagaccggggtctttggcgggcttatcgtcgctatttttgtatacatactttataagcgttttcacaacatagaactacctcagttcctgggcttctttggcgggaaacgtttcgtaccgattattacggctgtagcggctattattgtaggttatatcctgccatggctctggatcccggtacagaaagggctggctgagttatcaactctggtgacgagcggtcacaacgcaaacttcgctgcgtttatttacgccgtcggtgagcgttctctcattccattcggtctgcaccatatctggaacgtgccgttctattacaactttggtgaatatatgacgaagtcaggccaactggtcactggcgatattcctgtgttctttgcacagttgcgcgacggtgttccattgactgctgggctcttcatgaccggacgtttccctatcatgatgtttgctttaccggctgccgcactggcgatgtatcacgaagcgaaaccagagcgtaaggcattaattaaaggcttgctgctctctggcgcattaacgacttttgtcaccggtatcacagagccacttgaatactcattcctgtttgcagcgccggttctttatattattcacatcttcttatacgcctcttccttcgtgttgatgcatgtgctgaatgttcatatcggacatccgtttgccggtgggttgattgatttcgtactgaacggtgtcttaccaaaccgtaccccctggtatctggtcattattgccggagcaggctacgcggcgatttattattccgtgttccgggtattaatccgcaagctgaaccttaaaacaccagggcgtgaagatgaagaagtcgctgttgaactcaatctcagccgtgaagacaggccttacgaaattgttgccgcagtcggtgggttcgaaaatattgaggatgtcgatgcctgcgctacccgccttcgcctggcactggtggatgattcaaaagtccaggataagcgcttgaaagaactgggtgccgccgggctggtgaaactgggggatggtggtgttcaggtcatctttggtggcaagtctcaaattctccgtgacgaaatcaaagcggtaatgggaaagccccgtcagaccactgagccagcgcttacgcctgcctgtaccaaataa

SEQ ID NO: 257443 - DNA, 1998 bp, Klebsiella pneumoniae
atgaaaccacaattactggcaaatgccatccgtatgcttagtgttgatgccattcagaaagcgaattcgggtcacccgggggcacctatgggaatggcagatatcgccgaagttatttggcgtcaccatttacgccataacccaaaagatccgcaatggtttaaccgtgaccgttacgttcagtcaaacggtcatggctctatgctgctctactccctgctccatcttaccggctatgacgtcaccatggatgatattcgcgactttcgccagctacactcccgcacaccaggccatccggaatacgggtatacacctggtgttgaaaccaccacgggccctctgggtcagggggtggccaatgcggtgggcatggctattgcggagaaagcgctggcagctgaatttaataaacctggcttcgatattgtcgatcaccatacctggctgttcatgggcgacggttgcctgatggaagggatttcgcatgaagcgtgcggcctcgccggaaccctcaaactggggaatctcattgccgtctgggacgacaatggcatctccatcgatggcaatgttgaaggctggttctcagaagataccgcggcccggttccgcgcctacggctggcacgtcattgaaggaatcgatggtcataatccagaagctgtcgatgcagccgtgcgagaagcgaaatccgttaccgataaacccagcctgctatgctgcaaaaccatcattggctttggttcacctaataaagccaacagccatgactgccatggttctgctctgggcgctgatgaagttgcgctggtccgtgagcgtttggaatggccatatgcgccttttgaaatccctgccgcaatttatgatgcgtgggatgcaaccgcgaaaggttctgctgaccagaagcagtgggaagaattgttcgcagcctacagtaaagaatggccagatttagccagtgagtttattcgccgaatgaaaggtgacttgccgactggctgggaagaggatatgaagaaatatatactcaaccttcaggctcatccggcagctcttgccacccgtcaggtcagtcagaaatgcctgaatcatttcagtggtatgctacctgagctgatggggggttctgctgatctctccccttcaaatctgacgcgcttccagaaatctgtcgatttcacggctgaacatccggaaggtaattatatttcctacggtgtgcgtgagttcggcatgtcagcgatcatgaatggcctggcgctgcatggtggattcatcccttacggcggcacttttctgatgttcatggaatatgcccggaatgcggtgcgtatggctgcgctgatgaaaatccgctcagtcttcgtctatacacacgatacgattggtcttggggaagatgggccaacgcatcaacccgttgaacaactggcttcgttacgcctgacgccaaatatggagacatggcgtggctgtgaccaggtcgaagtttcagttgcctggcagcaagctgttgaacgtaaggacgggccttctgcactggtgctcactcgtcagcctcttgatcagcaaccccgtactgcaacacagcttgaagaaattgcacgtggcggatatatcctcagcgattgtgaaggtaaaccagagttgatcctgatctctgctggttctgagattgagctggtcgtgagtgcagcgaagattctgcgtcaggaaggccgccaggtgcgtatagtgtcaatgccatgtactgagcgctttgataagcaggatgaggcctggcaggaaatggttctacctaaagacgtccgtaagcgtctggcagttgaagccagcattgccggtttctggcagcgttatacgggtctggacggtaaagttatcgggatgaccacgtttggcgagtctgccccggcagggatcctgtttgaccactttggctttacaaaagacaacgtactggaacaggccagagcattgctacagagctaa

SEQ ID NO: 257444 - DNA, 849 bp, Klebsiella pneumoniae
atgaatgacaatatttcagttaaaagtctgatacagagtaactacccgactcttcactccgctgaaaaaaaagtggcggactacattcttaatcactccgacgctattgtgaactacagcgtatcggagctctccgataagagtaaagccagtgaagccacaatcgttcgtacctgcaaaaaaataggttatcagggctactaccatttgaaaattgctctggcaaaagaggtgattaaccccgacgaaggctatccttcagagacggattttgctgacatcgtgtcgctggcgacattcctgctcaagaagcaggcggaagatcttgttcagtcagctcagttctttgatgaaaaaatccttaagcgcgttttggcaatgatcgctgaatgcgacacgctttacttctttggtgcggggaactcaaatccactggcagtctatggtgcttataagtttgggcagtttggtatcaaaactattgttcacattagtcctgaaatgcaactcaatgccgcctatgccatggggaaacgcgatgtggcatttggtatttccaactcgggaagcacgaatctcatgctggatatcttcaatgttgtgaaacaacgtggggcaaagtctgtctgcgtcactaactacattaaatcgcctttatccaaaatatcgacctgccagttaaccacggcagtcagtgataagattttctttgaagcttttgactcaactcgtgtaccggccatggggatgatcgatatgctggtcctgctctttatgcatcaggataagactcgttatgagttgtaccgcagcagagaagagtttctggggtcaaaattcaaaggataa

SEQ ID NO: 257445 - DNA, 1269 bp, Klebsiella pneumoniae
atgaacgataaaataaacccaggttctttgctgaaaagtatgttcctggcggctatagagtctgcacagcctcatcacaatattccgaagtacctcccaaaagacagtaagggaaagctgattgtcattggggcaggaaaagcttcggctgccatggcaaaagcggtggaagataactgggaaggtgaactcggtggactggttatcacccgatacggatattcggttccctgtgagcatattgaaattgcagaagcggctcatccgatcccggatgaagcgggtctaagcgcatcaaaacgccttctttctctggtcagccatctcagtgaacaggatacggtactgtgcctgatttctggtggggggtcgtctttactgactttgccattcgaaggtatcagccttgatgaaaaacaggctattaatcaggagctgttgaaatcaggcgcaacgatcggtgaaatgaactgtgttcgccgtcacctgtctgctataaagggtggccgtttggccgcagcctgtaacccggcaaaactgattacgttaatgatttcggatgtgccaggtgatgatccccgtgatattgcttccgggccaacggttgccgactcctctacgtgcgcggatgcattggacattattaaccgatataacatcaacttgtctgattatgtcacggatcttcttatagctggcgacacggaaagtattaagcccggtgatatgtgtctaaaaaacagcgaggcatacatgatatccacacctcaacttgccctggaaaccgctgccgacatggcaacaaagcagggtctgtcgacttatattctcggagacagtattgaaggcgagtcgcgtgatgtcggaaaagtgatggctggtattgcccgccaggttgtgcttcataaccagccgttcagcagaccatgtgtcatcctttctggaggggaaacaacggttaccgtgagaggtaacgggcgcggtggtcgtaatgtagaatttcttctttcgctggggcttcagctccatggccagccaggagtttacgcgcttgcaggagatacagatggcgtcgatggtcaggaagaaatcgccggtgcctggatttcccctgacacgttaaagcgagccgcccaggcaggcctttacgcccgacaggccctcgacaataatgatgcccacggtttttttgaagcaataggagattctattattacaggaccaacttgcaccaatgttaacgatttcagatgtctgttgattctatga

SEQ ID NO: 257446 - DNA, 792 bp, Klebsiella pneumoniae
atgctacatactttccggcataacgggctgaattttaattactacgacaaccaggctgatgggccagtcattgtatttcagcatggactgacaggggatcatggccagacacgttccactttcattgatgagcattgccgtcttatcacattgaattgtcgtggacatggcggttctgacctggggccggtttctgagctgaatatcagtacatttgcagatgacgttatggcactggtgaatcatctgaagttggaaagcatatcagtggcagggatttcgcttggggctgctatttgtgccgtgctcacggcgcgttatccgaaacggattacatcagccactctggtacgtccagctttcttcacaaaaggcatgccagacagtcaacaagtccacagcgtcgtggctaactacattgagatttatggcgcggataaaggcctgcagaaattcagggatactgagatttttgaagagttgtctatccagtctccagataatgtcagttcactggtcagtatgttcacaatggatccagagcgagttatccctctgcttagaaggatgacgacctgcgatacctgttttgatgccgagcttataagaaagtcaggtattccattccgtgtggttggcacgttctacgatattattcatccgatttctaaagccgagaaaatttgcgatgcattaggaattgagtgcgtagatatagcctaccctaaaatgctaaatagaacgcgctacaacgaagatattaccgaagtcattaaaagtaatattttctaa

SEQ ID NO: 257447 - DNA, 828 bp, Klebsiella pneumoniae
atgaacaagggcatcttttccaaaacattcgacaccagtagtgtggatcaaaatttttccctgataagccagtatggctatcaggcgacgcagttcaactttgccagtgcggggcttaaagctctaccggacaacatttcgttggatgttattgctcaaatccgagaggccataagcaagcacgggatccgtctggaagcgatctcggcaacgttcaatatgacgcatcctgaccctgcggtaatcaagcacggtatgcattgtcttgacgcaatctgcgcggcagcagaaatgctggagtgcccattagtaactctgtgtaccggtacgatggacccggaagatcagtggcgtttccatccggataataacagccctgaagcctgggcatgtctggtcaactctatgcaagaagctttatctatcgccgaaaaatacgctgtggcgctggggattgagcctgagcttgcgaatgtggtcaattcagcagcaaaagctcgccagctgattgatgaaatgggcagcccgttgctgcgcgtgattttcgacccggcgaacctgtttgaagaagccacgctcacagagcagcacaagatcattcgcgatgccctggatttgctgggcaatgacatcgctattgcgcatgccaaagacaggaccccggatggttcattcaccaccgccggtcgaggggtactggattacgatttttatctgacccatctgcgtaatacaggttttgatggttgtgttgtcacgcatggtctggcagcagacgaagccggggaagtttcccgtatgcttgatacttatttgcaacgctcataa

SEQ ID NO: 257448 - DNA, 1077 bp, Klebsiella pneumoniae
atgacagttgaacagaaaaaattacgcgtaggtgttctgggctgcggccccatttctcaggccgggcattttgaagcctgttcaaaagccagtaacgcagagctttatgctatctgcgacagcgcagatgacttgcgtagccgtatgcaggcaatctggcagccgacggtcgcttattctgactatcagcaaatgctggatgacgagaacgttgatgccgtcattattgcaaccgcagacgcttttcacattcaactggccatgatggcgattaaagccggcaagcatgtgctgtgtgaaaaaccgctcggtattactatcgacgagtgtgaagaactggtagcggtcgtcaacaaaaccgaccgactttttcagcttgggcacatgaagcgttttgacggtggtattcaggctgcgcgcgattttatccagacggaaatggggcaactggttgcttataaaggctggtattgcgataacagccagcgatatctgaccatcaatgctgttcagcctcaggtgattatgagcgagtctaaacgtaagccgaaaatagcgcctaaagccgatctacagcaatacaatttgttatctcatggcagccacttactggatactgccatgcatctggctggcgacattaccgaagtcgaatctcattacctcaaacgtgcaggtcatcagtgctggttaatgagtgtcgcttttgccgatggcacgcttgggcagctcgatttgacactgggtgttcacatggactggcatgaaggtttccagatttatggtgaaaacgggagcgtggtcggcaaaacctataacccgtggttttataaatccagcgatgtggaaatcttcagcaaaacgaccgggaacttcacgcgtccgctggcggctgacggtcagttctatcgccgtcagcttgaagctttttcagacgctgtgctgaatcagactccgattatccgtgcgaccacgctggaagaaggactgcgtacggtgaaaattatggtggctatccaggagtcaacccgtaccggtaaatctgtacgtgttgctgatgcaagagggtctgtctga

SEQ ID NO: 257449 - DNA, 1689 bp, Klebsiella pneumoniae
atgtcaattaaatcatccagattgaacgatctctacattcgcctacaacggaggtttcatcctgaaaaagatgtctttgtgaaggtgtctggtatcgctgaggttcttggctgtacatcccgcaatgtgagaatggtattgacggaaatggcaaatcatggctggatacagtggttaccggcctctggacgtggcaagcagtcccggcttgtttttctgcgttcatctgagcaaatctcacaaggcgagatcagggaaatgcttgaaagcggcagattggctgaaatgctgacccttgtcgaaggggataccgccgagctggaaaaccagatttatcaacatttgggaacggtgattgagggggagtgtaaaattgtccgtgttccctggtaccggagtctggacagacttgaaccctggaagcctcaacgacgaactgagcggcatttgatgagacaatgcttctcagggcttactcgttatgatgatgagttaaacagagttgttcctgatctggcgcaccactgggtcaagaatgacactgcaacacaatgggacttttatttgaggtcaggactaaaattctctgatggttcacctctacaggcatcagacattgagaaatgcctcaatgctatgtgccgatcacccgtgttttcatgtatttattccgggatagtaaaaatacagacgattgataaacaaagggttagatttacgctgaaaagcccggatgtccattttgctgatttgcttacacatacttcagctttgatttacggaatgactaaagggaaggttatattttcaggacactggatagttaaaaatcatgatgattttaatctggtcatgaaggtcaatccttggtatcacggcctcaggcccgtaatcgatgaagtcaacattatgcggatcgagtctgacattctcgatatggggcgaattcaggtcttctatcaaggaatgagcagcggggaaagtgaagtttcacaagcaaggattgaacggggctcatgttttctggtggtcgacgggaatgggcgatttgctgaagaagaagacaggatctttcttaatcatgttcttcagccagtagatattctcaaaaactcatctcaccgtaaaaaaatgaacctcgccctttcagttgctcaggggttgctgcctggttggtatcaccgtattctcgatattgtccctcctatacgccacaaaatgtaccgtgaattgaccctcgccacattcgagcaaccggaactggcgaaacatgcagaagggatagtcagcattcttgagcgctacggaattaaatgccggatcgtcactcgttcgtttcaggagttctttagctcgccgccagcgaatattgatttatggttaaccaattttgttctggatgatgccaacgattgttcactgaacaactggcttcagtctgatcctattctggcgcgatgcggaaacggctggaataaagagaaaaaacaggtggcaaaggaaatacgcaacggtgatataccttgcgagaaagcgctggaacagttggtgcgtcagttcaccttttcacgctggtttattccgttggtttatcatcgtgttgaccatgaacaaattcgccataactctgctttcagtaacgaattaggctgggtcaattttagcgatgcgtggtttgatatacgatga

SEQ ID NO: 257450 - DNA, 558 bp, Klebsiella pneumoniae
atgaaaaatgaaccgctttttcacgctccctgccccatcgcccgtagtcttggccgcatcggtgacagttggagcataatgatcctgcgcgacgcctttgcgggctttacccgctttgacgagttccagaaaagcagtaacgtcgcgcccaatattctttcgcgccgcctgaagtcactggtagacgatggactactggagaagatttgctacagcagcacaccgcctcgttacgaataccacctcacgcaaagcggccgcgattttcgcatggtgctgctggcgttggcggaatggggtaaccgcaacttcgcacccgaaggccgtcagatgcaattggtggaaagtgaaaccctgcggcacgtggagccgatcctggtcgataaagcgaccggtgaagagattatcccggataaatacaccatggtgccgggacccgcagcctcgccgatgatgaaataccgtcacgaatatttgcagcgcaaacgcgaaggttatagtgggcaaaaattccaacccgagtcttatagagatgccagcgatgaatccggccagtaa

SEQ ID NO: 257451 - DNA, 1272 bp, Klebsiella pneumoniae
atgggcgtttcagttaaacgcattgtcataaccgggatggggattgtcagccctctggggtgcggcgtacagcatgtctggcaatctctgctggcagggaagtcaggtattacaaagcttagcgagcagttggtcgcggatattccctgcaaagtggctggactggttccgtccatcgaacacgatgcgttgcacggcttcgatccactagcgatcatcccggccaaagagcgcaaaaaaatggatcgctttatcgagtttgcgctggttgccgcgcatgaggcgctaacgcaggccaggtggtcgcctgaatcagcgacagaacaagaacgcaccgcaacggtcattgccaccgggatcggcgggttcggcgagatcgccaatgcggtacatacgacggatgagcgcgggccgcgtcgcctgtctccgttcaccatcccctcttttcttgccaacctggccgccgggcatgtgtctatcgcccacggtttccgtggccccataggcgcgccggtaaccgcctgcgcggcaggcgcgcaggccattggcgatgctgcacggatgatccacagcggcgaggcagatatcgccctctgcggtggtgcagaagcggcaattcatcgtgttagtcttgccgggtttgctgcagcaaaggcgctttccagctcctccaacgaccatccggaagccgcttcccgcccctttgaccgcgaccgcgatggttttgtaatgggagaaggtgccgggcttatcgtgattgagtcgctggagcacgcgctagcgcgaggcgccacgccgctggccgagcttgtcggctacggcaccagcgctgatgcttatcacttgaccgctggcccggaagatggtgatggcgcacgccgggccatggaaatggccattcgtcaggcggggatctcagcagaagagattgaccatatcaacgctcacgccacttcgactcaggttggagacaaaggtgaacttgcggcgattaaaaaactgtttggcgcacatcccgtcgccattacctcgacgaaatcagcaaccggccatctattaggcgcagctggcgggattgaggctattttcaccattcaggcgttgcgcgaccagatggtgccgccgacgctgaacctgcatcaccccgatgaaaacgcggaaggtctgaacctggtggcgctggtggcccgcccacagaagatgcgttatgcgctttcgaacggttttggttttggcggtgtcaacgccagcctgctgctgaaacgctggtaa

SEQ ID NO: 257452 - DNA, 696 bp, Klebsiella pneumoniae
atgagtcattccacaaatatatcaatcggtctgctcctgttccctgctcttactcagcttgatttgactggtccatatgaagtctttacacgggctccagatacaaaggttcatctcatctggaaaaacctggaccttgtggtttcagatcgcggtatggcgattcaaccaaccaccacattcaatgcgtgtcccgcactggatgtaatttgtgtccccggagggcctggccagataaacctgatggaggatgaagaagtcctttcgtttatccgggctcaaagtaaacaagcaaagctgataacctctgtttgcaccggagcgcttgtgctgggcgccgcagggcttctggatggatataaagcgacgacgcactgggcttcactggggcagttggagttgttgggcgcagagccggtaaatgagcgcgtagtacgtgaccgcaaccgtatcacgggcgcaggagtgacttcaggtatcgattttgccctcaatgtcgtatcagaaatattcggatctgatattgcacaaaatattcagttgcatatggaatatgacccagcccctccctttaactgtggctcgccccgctccgcatctgaagaacaactaaaaaaagcccagcaacaagttgcgccatttattgaaaagagactgcaagctacgttgaaagcagcagccaaacttcataaataa

SEQ ID NO: 257453 - DNA, 369 bp, Klebsiella pneumoniae
atggaaagagactggcgttgtgatatacctgaacaacggctcgtatgggcgcaggttaccagcgaagccctgaagattattgaaggtaaatggaaaacaatcattttatgccagcttttcgccgctaaagttccactgcgcttttctgagcttgaacgtaggatcgagggggtaaatcaaaagatgcttatacagcagcttaagcagctggaaaaagatgggattatattgcggacgctttatcctgaagttccgcctcgtgttgaatactccctcacggaattgggaacagcactgggcccatctatggcggcattgattgaatgggccctgctgcgtcgggaaacgcttggccttgagcctggttga

SEQ ID NO: 257454 - DNA, 747 bp, Klebsiella pneumoniae
atgagaatcggcgtaattggtacaggcaatattggcggtacgcttgcacgtaaattaagcgaagctgggcatgaggtaaaagtggcaaactcacgcggtttagacgcggtaagggaatttgccagtgaaattaacgcagtgccggcggacatatatggtgcagtgactgacgtagatgccgttattctgtccattccattcccggcggtgagtagcctgcctgatgggtttttctcgggtttacctccacatgtccctgtcattgatacgagcaactattatccaggtctgcgcgatccgcagattgctgcgctggatgaagatcggacggaaagcgaatgggttcaggagcagattgggcatcccgttatcaaagccttcaacaatatactcgccgactctctggcagaactggggctgcctgaggggagccgcggtcgcctggcggtcgcagtagcaggagatcatccagccgcagtacagatcacgatgtccctggttaacgataccggctttgaccccgtattttccgggtcgatcgctgaatcatggcgtcagcagccgtgcacgccatcctattgttgcgactgggaggctgccaccatgcttcgcgctttccccctggcgaaaaagggagaaggacgggcccgtctgccttcgctttatgccagcttcggtaagctgggtgaggcgctaacacacgaagatatcattgataataatcgagccatcaactggccagtataa

SEQ ID NO: 257455 - DNA, 1044 bp, Klebsiella pneumoniae
atggaccgtttcattgagtttgcgctcatggcggccgaggaagcgctgacgcaggcaggctggcgcccggtggatgatgactcgcagcaacgcacagcaaccattatcgcatccggtgtgggagggtttggcgcgattgctgatgcggtaaggactaccgatacgcgcggcccacggcgactatcgccgttcactgcgccctcttttctcgccaatatggctgcaggccatatctcgatccgacatggtttcagggggccgcttggcgcgccgatcaccgcatgtgcggctggcgtgcaggcgattggcgatgcggcccggcttatcagaagcggcgaagctgatatcgctatttgtggggggacggaggccgcaatcgatcgcgttaccctggggtgctttgccgcggcgcgtgcgctctccaccgggttttcggaaaacccggctgaagcgtcaagacccttcgatcgcgatcgggacgggtttgttatggcggaaggtgccgggttattagtgattgaatctcttgagcacgcgcttgcgcgcggcgcgacccctctggctgaactggtgggatatggcaccagcgccgatgcatggcatcttaccgccgggccggaagacggtagcggcgcacgtcgggcaattgaactggctttggctcaggcggaggtgaaggccgatgagatccagcacatcaacgcccatgccacctcaacgcaggtaggagacaaaggcgaactggcggccatcaggtctgtgttcggtgggggatcggctgtcgctatcagttcgacaaaatctgccaccggccatctgctgggggccgcagggggtgttgaggccatatttaccgtgcttgccttacgcgatcaggttataccgccgacgttgaatctgcatcatccggatgaggcggggcagggcctggatcttgtcgcgttaaaggcccgtcctgctgctataacctatgcattatcaaacggttttggtttcggtggcgtcaatgcgagtcttctgtttcgtcgctgggaaacgacgtga

SEQ ID NO: 257456 - DNA, 1110 bp, Klebsiella pneumoniae
atgctcaggctcaaatcagcccctcttgccgtttgcctgctgccgtttgccctcgcggcctgcggtgacgtttccggcacagacgatccccgcactcagcctcctctggtcaggtctgcgaccgtagtgagtgcgatggatgcctcccgcgcgtttaccggcgttgttgtcgcccgcgttcaaagcgatctcggtttcagagtgcagggcaaaattcttgaacgtctggtcgataccggtcagaacgtcaagcgcggccagccgttgatgcgtctggatcccgtggacctcggcctgcaggcgcaggctcagcaacaggctgtcgcggccgcacgggcccgcgcaaaacaagctgcggcggatgaggcgcgttaccgcggtctggtcgcggcaggggcggtgtcggcatcggcctacgaccagattaaggcggccgccgatacggccaaagctgaactcaatgcggctcaggcccaggcgaatgtggcgcaaaacgccacgggctacacagtgctgctggccgacgccgacggcgtggttatggagactctggctgaacccggtcaggtggttagcgccggtcagccggtggttcgtctggccagagcgggccagcgcgaggccagcgtgcagttacccgaaacgttacgtccggctcccgcaagcgaggccgaggccatgttgtacggcaccggtaaacagacggtcccggcgaaactgcgtctcctttccgatgcggccgatccggtcacccgcaccttcgaggcgagatatgtgcttgaaggggcgctggcgaatgcgccgctgggatccaccgtgacgctgcacattgcagacggtaaattaccgaaccaggtgatgcaggtgccattagcctccctctacgatccgggcaaagggccgggcgtctggcagatttcaggtcagccagccaaagtgtcgtggcggtccgttcaggtgctgggattgagtgatgatgcggcgcaggtatccggtaatctccagcctggcgagaaggtggtcgcgctcggggcgcatctgctgcatgacggtgaggccgtacgcatggctgtacagaacgatgccagcgtcgccgggagtcggccatga

SEQ ID NO: 257457 - DNA, 621 bp, Klebsiella pneumoniae
atgacaaaatacacaaatgcacactcctcacggggaccgtcggaccattgcgtccgcgatcggattgtggaagccgctacggagcacttcgggtatttcggctacgagaagaccaccgtgtcagatctggcgaaaacgattggtttttcaaaagcctatatatacaaatttttcgattcaaaacaggcgattggagaagtcatttgtgctaacaggctggcgaaaatctctgaggtcgtcaatgacgcgattgccgatgcgcctaccgcctccgaaaagctgaggcgtttattaaacgcgctgatcgaagccggtaacgagctgttctttcacgatcgcaagctttatgacattgctgccgttgcctcccgggagcgctggccttccgccgccgtctatcagcagcagctgcgtcaactgatacagcacatcattcaggaaggtcggcaggcaggggagtttgaacgaaaaaccccgctggatgagaccgctgatgccatcagtctggtcatgcagccttatatttgcccgttacagctgcaatttaacctcgataccgcacccactgcggccgtattgctatcctcattaatactcagaagtttagcaattcgaaagtga

SEQ ID NO: 257458 - DNA, 486 bp, Klebsiella pneumoniae
atgaaaagaataggcgttctgggcgtggatgcgttaagcgaaaaactgatcgcaggattctttcaggcggaaacgggcgcccaggtgtttctgtccccggcaaacagcgaacgggctcaaaggctggcaaggagatttccctgctggaccctggacaatcaccaggcggtcattgatgaagcggatgtcattattattagcgttaaccctgatactttaaatgaactcgcgcgcggtgtgcggttacgcgattcacacaccctgatttcgcttgtaccaggtattcagtcccgaaccctacgtgagatattccagcctgcaaactgcgtcagattacgcctggcatatagtgatggaataaatcaatccgcagtcatcctcaccgcagcggatgaagaaatacagcgcctgtttgcctcgttagggccgctcttagtagcggccgacgaatcggattttgattcaacaaccggaggccctgtctga

SEQ ID NO: 257459 - DNA, 1629 bp, Klebsiella pneumoniae
atgactattggcacgattattacaggttccaggcatatcgtgttgtcatcccgggagcgcaaaatcccctgggatgacccggcgtttagccagcgtatgctagaaaaccatctgtcgcaggagcacgactgggccagccgcaggcaggcggttatcgaacaacaggtggcgtggattgccggacagctacccgccggcgcccgcattctcgacctcggctgcgggccgggcttttacacccgcctgctggccgagcgcggcttctgctgtacgggcgtggatttttcaccggcgtcgatcgcctgggcccgccagcaggctcaggcggccgggcttgatattgcctatcaccagcaggacgttcgcgactacgcgccggaaacaccgtttgatttcatcatgatgaccttcggtgaactgaatgtgttcagcgcggctgaggcccgttcgctggtcaaccgctgcgcgcagtggctggttccgtggggaaagctgctcatcgaggttcatacctatgccgaagttaaacgtcagggaatggccgagcccggctggcagcgctgtccgcaggggctgtttctggatgttccgcacctgcttttgaccgagcacgcctgggatccggcggcgcaaaccagctccacgctgttcatggcgattgaagagagcggcaaggtgacgcgcttcggcagccagatgaccgcatggcgcgatgacgcttatctcgacctgctgcgtacggcgggtttgaccaccattacccgcccggatgaggcggaatggccggtcagcgaaacctttgccggcaagctgtacgcgctgctggccgaaaaaaacgttcccgattctctttgcgtaacacccataaaaggaattcaaccattggatatcccacgtattttcaccattagtgaaagcgctcaccgcatccataacccgtttacgccggaaaaatatgccgcccttggccgcgtgctgcggatgaaggccggaacccgcctactcgacctcggcagcggttccggggagatgctctgtacctgggcgcgcgaccacggcattcgcggtatcggcgttgatatgagcgcgctgttcagccagcaggctcagaagcgggcagaagagctcggcgttgccgacagcgtaacctttattcatcaggatgcagccgggtacgtcgccgaggaaaaatgcgacatcgccgcctgcgttggtgcgacctggatcggtggcggcgtcgccggaactatcgcgctgctgagcaaaagcctcaaacccggcggtatgctgctgattggcgaaccgtactggcgcaagattccggcaacggaagagatagcacaggcctgtggcgcctcttcgctcgccgactttctgacgcttcccgacctggtctcctcttacgatgcgcttggctatgacctcgtcgaaatggtgctggcggaccaggaaggttgggaccgctacgaagcggcgaaatggctcaccctgcgccgttggttagaggaaaaccccgatgatgactttgcgtcagaagtcagggcggagctgacgatggcgccaaaacgccatgtcacctggacgcgtgagtattttggctggggtgtgtttgcgttaatcaagcggtag

SEQ ID NO: 257460 - DNA, 552 bp, Klebsiella pneumoniae
atgacaaaccacagcttcacttttcatgtcgcctctgaaggcgataccaatgacattctccatgtcgaaacccgggctttcggctacagcaaagaggccaggctggtggccgatttgctcaacgatgagagcgcctgcccgacgttatcgctgctggccaggcataacggaaaggcggttgggcatattttattcacccgggcgacgttcaaaggggagccggactcgccgatgatgcacatccttgctccccttgcggtggtgccggaataccagggcgcgggcgttggcggagggcttatccggcacggcattgagcagttgaaagccatgggaagccagacggtatttgttctgggccacgccacttactaccccaggcatgggtttgagccatgcgcgggagataaaggctatccggcgccttatcccattcccgaggcgctcaaagcctgctggatgctgcagccgctttcatctcagccgctgggacgaacgggtcaaatacagtgcgcccgggcgttaatgaaacccgagcactggcgcgagtaa

SEQ ID NO: 257461 - DNA, 801 bp, Klebsiella pneumoniae
  misc_feature (703)..(712): n is a, c, g, or t
atgaacaagacaacgacgcacaacgaacccgcccgccaggcgccgagaaaaactttctccgtcagcgagtttatggcgtttggtgaacgatacggtatcgactaccgcttcccgctgctgcggcaaacgccagccccctcgcacgccagcccggtgctgcggggagaagtggaagagatgacgctgccctgcggtatgtgcgtcacccattctgatgttcaggtgttgcagccctatgagaccacctcccgccacagcagcccgctctatatgctggtggtgctggaaggctgtgtcgccctgaccctcaacggggagcagcacctcgtccgttccgggatggcgttcacttcgcgtcttagcgaacaacagacgatgcgcgcccgccacgatgccgacagccggctacgtacgctctccctcggactctacccggacggcgcgtggcgcgacggcctgctcgattcattgatgcgcgaatgggaaagatgccagacgccaacgcttatctggcagataccggggtttctgctgagcgggctgcagtacgcacagcagagttcgcctggccgcgtttcccgccagctgatgctggaggggctgattcttcagctgttcggtcacgggctgagcgtatgccaggacgaaagcgcgaagcacgtcgccccggcgggcggcgtgcttcgcgctttcgtcctggcannnnnnnnnngcagcggctggagagggttcgccgcctgctggagcagtcgccggaaaatgactatagtctcaatgagctggcccagcgggcggcgatga

SEQ ID NO: 257462 - DNA, 774 bp, Klebsiella pneumoniae
gtgcgcaaactctcctttaccggctcgacggaaattggccgccagctgatggagcagtgcgcgaaagatatcaagaaagtctcgctggagctgggcggcaatgcgccgtttatcgtttttgacgacgccgatctcgataaagccgtcgaaggcgcgttggcctccaagtttcgcaacgccggacagacctgcgtctgcgccaatcgcctgtacgtccaggatagcgtttacgatcgcttcgccgaaaagcttcagcaggcggtcagtaagctgcaaattggcgatggcctgcagccgaacgtcactatcgggccgctgattgacgagaaagcgatcgctaaagtgcaggagcatatcgccgatgcgctgggcaaaggcgcgcgggtagtaaccggcgggaaagtccatgagctgggcggtaatttctttcagccaacgattctggtggacgtccccggcgatgcgaaagtggcgaaagaagagacctttggccccctcgccccgctattccgctttaaagatgaggcagatgttatcgctcaggccaacgacaccgagttcggcctcgcggcctatttctacgcccgcgatctgggccgcgtttttcgcgtcggcgaggcgctggagtacggcattatcgggattaacaccggccttatctccaccgaggtcgcccccttcggcggggttaaatcttccggcctgggtcgggaagggtcgaagtatgggatagaggattacctggaaatcaaatacatgtgtattgggatttag

SEQ ID NO: 257463 - DNA, 717 bp, Klebsiella pneumoniae
atgatggccaagcaggctccgattcgggcggcgaaagttgcccccatgcagaccttctcgctgggtaaacgtcgcaaaaagcgcgacggttggctgatgagctttacctggctggtgctgttcgtggtgatcggcctcagcggcgcctggtggtggcaggaccacaaagcgcagcaggatgagatctccacgatggccgatcaatcctccgccgaactgaattctggcgataacaacagccaaagcatcccgctggataatcaatcggcgaattccgcaccggacaccgctgccaacagcgcgcctgtcgagacctctccggcgccgactccagcaccggccccggctccggtcgagaataacgccgtggtcgcgccttcgcaggcaaacgttgatacggcggcaacttcgccgttaccgaccgatcaggcaaacgtgaccgctgcggcggcctccgcgcaggatctggtgctgaacttcaccgccgactgctggctggaagtgagcgatgcgaccggtaaaaagctgttcagcggtttgcagcgtaaaggcggtaacctcaacctgagcggccaggcaccttataaactgaaaatcggcgccccggcagcggtacagattcagtatttgggtaaacctgtcgatttaagtcgttttatcagaactaaccaggttgcacgtctgacccttaatgccgaacaatcaccggcgcagtaa

SEQ ID NO: 257464 - DNA, 861 bp, Klebsiella pneumoniae; identical to SEQ ID NO: 183862

SEQ ID NO: 257465 - DNA, 1086 bp, Klebsiella pneumoniae
atggcacaacatcctgatttcaacaaagtaatcaggcatgagatgattgagcttcgtagaagaatgctgggtattagccaaaaggctctttctgatagagtcggcatgtctcaagggactctttctaaaatagagcagggtctcaaaactgttactgacgaacaagccgataagttgtcagttgctttatcatgcccggttagttttttttgcatgcctgagcgcatttacggcggcccaataagtgccgcgccgatgtatagaaaaaaagcatctgtgggcataaaagttttggaccgcttaatagcggaaataaatgtcagaattgctcacatcagaaagctattacagtttgttgaatttgaaccagagtttgaaatgccaagctacgatcccgatgattacaatggggatgctggcgaaatagccaggaacgttagaaaagcttggtacatgcctgctggaccagtaaaaaacctgattgaagtgcttgagagggctggatgcctaattattgattgcgatatggatgatacggggctgtctggggtgagctacaatttaccagggctacctcctgtaatctttatcaataaaaatcaacctcttgataggtatcgttttacgctagcgcatgagcttgggcacctggtgatgcataagtcacccaaccagaatatggaaagcgaagcggatacattcgctgcggaatttttgatgcctgcgcgcgatgtgtctccataccttcgagacatgagtgtagaaaaggctgcaacattgaagccctattggagggtatcaatggcatcaattattttcagagctaagacgctgggatttttaaatcaaggtcagaacgagtacatatggcgccaaatgtcctcacgaggatataggcttaatgaaccggtccaactatcagccaacgacgagaaaccaacattactcgctgaaattttcaaccatgtcaaacaggaacttgattatgatgaagatgagttggcccaggtcttttctttgaattacgaagaaatagagcgcctttacccaatgaacaagaaaagcggcctgagattggtgaaataa

SEQ ID NO: 257466 - DNA, 615 bp, Klebsiella pneumoniae; identical to SEQ ID NO: 201512

SEQ ID NO: 257467 - DNA, 294 bp, Klebsiella pneumoniae; identical to SEQ ID NO: 183848

SEQ ID NO: 257468 - DNA, 378 bp, Klebsiella pneumoniae
atgaaaagccttttaactctcctgatgctgtgtcttattcccatagcctgtgctgctgaatcacaagcgattgaaccgcgcgttaagcctgcttatcccgcgaaagctgaaaaaaaagggataccaggtcaggttaaagcgcaatttgacgttgatgagaacgggcgggtgattaacgttcagttattaagctccgatccttcaggaatgtttgataatgaagtcagggccgcaatggaaaaatggcgatacgtcaaagggaagccttccagcaataacatcattaccattcatttcacgcccgggccgtcttgcgtagaggtgccagcgccaaaccagcccggcagtattcaaagcaggggcgtcccttttcgctaa

SEQ ID NO: 257469 - DNA, 1197 bp, Klebsiella pneumoniae
atggatacacctacaaaatcactctccgcgccgggctttgtcacgcttgccgccgggtgcaaccaactgattaattggggcatatcgttttatatgcccggcactttcgccagggctatcgcccatgaaaccggctgggccgcaacggaaatctactttggcctgactatcgccatgctgatgatggcgatgctctccccgtttgtcgcccggctactggcccactttggcggccaacggatagtggtcacaggtacgctgatgatttcagcaggctgcctgatcatggcttacgttcatagcctgtcggcctggtttgccgcctgggccttgaccggagtcggcatgcgcctggcgctctatgacgcgctgttcgccgcgctggtgaatagttatgggcaaagcgccagactcaccatttcgcgcgtgacgctggccggaggattagcctcggccctgttctggccgcttggcgcctggctgctgacgcggatggactggaggcacgcgctgctgatctacgccctgtttggcctgcttagcgctctgctgttgtggaaaatgccgaataccaaattaccgttgccggcaagggtgaaaaaaaaccagcagcagtcaaagcatgatagacgtccggccctgctgtacgcgtcgttgattgcgctggttacctttatatccaacggcacgtcaacgcatctcccggagtttatcgccagcgtcgggctgcctgtcgcagtgggaatgctgtgggggattgggcaaaccggcgcgcgctttctcgaagtagcgtccggttccgcccttacgccgttaaggttaacgctattgaccaccctggtgatgccgctctgctttgcgctcggtctgagcgggtcttatctctcctgggcggccggcggatttgtactgggttacggcgcgatcaacggcctgacgaccgtatttaaagccaccctgccgctgcagcttttcgccgcggaggattatgcccggcgaaccggcattctgttgattcccgcgcagctgctggccgccgcctcgccgtttgtctacgcgtggctaaatcatcatcttgggatgaggggcagtttagcggtttccgccgcgctggcgctggtggttttcggcctggcgatgtcaattgcatgggatcaccgtgagaagacgcccgcggagattgaagaacggggctaa

SEQ ID NO: 257470 - DNA, 1674 bp, Klebsiella pneumoniae
atgtgggagacgcgggcgttagaactgaataatcaggatatatggaactggtcatcggtatgcaatctggtcaggtatgcctctcagcacggctttaatactatcgtggtggggcaggcagatctcttcggtaagctggtgtccccgaagggatatacgccttttcactataacgatagcgtttccagtcagcagcgagcgcgctgtgtctaccttaatcgtctcgccatgtattgccgcgagcaggggctgcgattttatttacaggcgaaagagctggggttcccaacggaattgctgttgtcgcataagtatctgctggataaccagcaagggatcctttttgatgtcgatttctggagccgctggctgacagacaaaattcgcggcgtttgtcagggaattccagcgttaacggggttaattattgcgctttccagcaccgatggtttattgccgattacgcgtcctaaatgggatataaacgccagggatgagcctgaaaatgcccggcaaccgtcgcaaagctttgtgctctatcgccgttgttttcaggcgctgagccaggtggttagcgcgcaaaataaacatctggttttacgggttttccctgcaagtaatgatgatcttggcaccgttctcgatgctatcgagccgcttccgccaaccgtttcggtatcgatcaagttaacgccagaacgtttctggccagcatttccaaataatcccgcgctgcttcaggtcactctgcgcgacgtctgggttgatattgatttagccggcgaagaggtgggttggggagttatgcctttcttgcgcatcgatgagttaaaaggccgactgctgtggtgccaaagcgcgaatcccagaatcaccggtgcgatatgcaaaaccagttgggagagcgttgataaccactggataccggaaacgttaagcgaatgcaatttgtttgcctgtagccagctgttaggtcatggcgcgggaaagacccaggagcagctgttggatctctggctggctgagcgttacggctggtgccccgatgtttcagtcgcccgccgttttcagcagctactggagcaggcaacggagctgctttaccaggcgatttacgtccgcgatcacgtttttcaccgccatagtcagctaccggaaagctatggtcaggccgtatggagtttgtacagccagctggcgcgcgatcactggctgccggggtcggcccaggacatccacttcacgcgtgacgatccgcaaaaatcgatggaaaacctcacgcgaattgcgcaagagaaggatgaggtcgcggcagaggccctgaaactatgcgcgcaggcgctggagtttgccgagaatgccgcgtttcccgcggcgctctatcggctctggcagaatgaatggcgagggctggcgctctactgtcagctgttcacgcatgcgcagaaggctttttttacgctgcattttgctcgtgaggtggagaatagctggagtatgagagaaatctgccatatcaacgtgcaggcgttgtatcagggggcatccgaaatggagatgctttgccagcagatgcgcgaagcatcgcctgggtttcatattatgttcgatgcgggtcgggttcgtagcctggctgatagcctgagcagcgaactgtcggcgctcaggcattag

SEQ ID NO: 257471 - DNA, 1098 bp, Klebsiella pneumoniae
atgtcgcagaaaataagccatcctgaactcatccttcttatcgaaaaactgatcgatagcctcaccgctattcaggatgacagcggtcaattcctgcagcgcctgcctgacgggcgcgtgattgacacaaaaggctgggcgggatgggaatggacacatggcatcggcttgtttggtctctaccgctaccatgaacttaccggatcgtctcgcgccaggcagattattgacgactggttcagcgcccgcttcgccgaaggaacgccggagaaaaatattaacaccgcgatcccttttttgacgcttgccggtcgctaccagcaggacgctcgtcacgaatggcgcgcgtatctggaagtctggggagatgcgctttatcgtcagattccacgtactgatgaaggctgcatgcagcatgtcacctacgaaaacgcgcattatcagcaaatctgggatgacaccttgatgatggcggttctgcctctggccaggcttgggcttttattacaaaaaccttactgggtagaagaagcaaaatttcaatttctacagcaccttcactaccttacggacagaaaaagcggtttatggtttcacggctggaacttcaacggcaggcaccattttgccggggcgctatgggctcgcggtaatagctggataacattggcgattcctgaactgctggaaatgctcaatcttgatgagcatgacgccttctatcgccagctctgtaacatcctgcagggccaggtatccgccctcgcccgctatcaatgtgaaaacgggctatggccgacgctattagatgatgccacaagctacgctgaagcctcagcaacggggggattcgcagccggtatcctgaaagcgatacgtctcggctacctcgacgaccgctatctgcccgttgccgaacgagcaattgcaggcattattgagcatatctcgccggagggggaattaacccaggtctcatttggcacggcaatgggacacgatcttgaccattaccggcggatccccctgaccgcgatgccatatggccaggcgctggcgatactcagcctggtcgaggctttataccgcacgcggtaa

SEQ ID NO: 257472 - DNA, 1515 bp, Klebsiella pneumoniae
atgacgaggacagtaacggcaccacgggaagtaaaaacacgcaatattctctgctgggggatgggcgatatcttcggcagcggcgcaatgacgatcaccgggctttggctgctttatttttatattgaagtggcgggtctttctcccgccgccgccgcatccatctttgcgatcgccaaaatttgggatggcatcaccgacccgatcatgggttatatcaccgacaatattcgcacgcgctgggggcgacgccgactattctttattatcggcgcgccgctctctttttgctttgccctgatgtgggtaagcggttttggctatgcctggtatcttggcacttatttgttattcagcaccgtttttactctcttgatggtgccctacgatacgctgcccgcggagatgacatcgcgttacgatctgcgttcaaaaatgtctggcgcgcggatgctatttgcccaggcgacagcgtttttatctgcacttatcccaggacaaattttggcgcacgtcgccgataaatcgcaggcatttttatatatcggcctggtcttttccgtactcttcgccctaccgtggatcttcgtttggcggggaacctgggagcgggagaatctgccgccgccttcggctcagcgcgggatgggaaaaacacttatctcgctgtatcgagagatggcttcaactttccgtttacgtacttttcgcattcacatcatgatgtacgtgggcggagccgtcgccctggatattttcggctcgctgtttatgcactatctcacctacgtacttcaggtcggcgcatccttagcttcccaggcaatgagcctgatgacgctatttcaattttttgccatccctttctttacctggctttgtattcgcatcggcaacggcaacgcctacaaattggcgattggattgattatgtgcgccttattgtggttcagccagctttccgcctccataagtcatttgtcatggctcttattgggtggagccatcgtgatgggtatcgcacgcggcggaacctatcttatcccatggaacgtctacaactttttacctgatgtggatgaagcttataccggcgtcagacgtgaaggcatttacgcgggcgtcatgatgctaacgcgcaaattttcccaggcgctagccctgtttattgtcggactggcgctggaggcgtttggctttaccaaaggcgctgaatcgcaagatgccgccgcgctaaacggcatctggtgggtattccttatcggaccgggtttactcactctgctggcgatgtacggcgcgtttcgctttcgtctaagccaggagtgtcatcagacgctgacctgcgagctagagcgtctgcggtctggcggtaaaccagaagatgcatcaacgcaggtacgacaaaccgtagagctgcttaccggacatccgcatatgaatacccactggcagcacattgctgaaacgacaacacaagggaatcactatgtcgcagaaaataagccatcctga

SEQ ID NO: 257473 - DNA, 1359 bp, Klebsiella pneumoniae
atgaacatttttctttcaaactggcacccgcacgcagatggtatgactcgcgacactgagatttttcaaaaagcgctggataccttatcgcaagcgggcggcggtacgctggtggtggaaagtggaaaatattaccttggcgggttacgcatggggtcaaatacctgtctgtggttgtcacccggtgcggaactcatcgtcagcgataattatgctgacttcacccaggcggtggccttaagccgcgcagagtgctccgaccgggcttttctctatgcccgggatgccgaaaatatctcgatttgtgggggcggtactatttacggtaatgccgatggttggttctcctcatcggttgacgatatgggctatcgcacgcccgccgaacagcgaccgcgcatcattcttctggaaaattgccagcgggtcaggctggaaaatatccgtgtacaccatgcgccgatgtggaccattcatcttgtttcgtgttcacaggtggtgattgatggcattagcgttgataacgatctgaccatggcgaatactgatgcgctggatatcgatagctgtcagcaggtacatattgctaatagtttttttagtgcggcggacgatgcaatttgtctgaaaaccaccgataaaccggcggctatccaacgacctttacgtcaagtgacaatcgtcaattgtaccctgcgctcaaaaagctgcgcttttaaaatcggcacggaaacctggcaagatattgaagatattgtggtcagcaattgcactatctttgattcgaatcgcggtattggcctgatttcacgcgatggtggccggctacgaagaatgctctttaccagcatgacttttgcgtgtgtggcggcgccagcctgtcactggggggaggcggacccgattttcctctccgcgcgtcgcaggcatccgcagatcgagcccggtgagattacgcaaatccagtttcgcgggcttagcggagaatgtgaaggcgccatcaatatgcacagtgaaaccccagccacgatcaatcgaatacgacttgagaatattcagcttacccagcggctgcatcgccacggctggcaggggaattatgatattcgtccgccttgtaatcctctttcgccaacaggaatgggtatcgataacgcctggtgcctcaatccagagacgggaaaggcctggggagtcgaaccctatcctggagggctacccgtcctgtttgcgcaaggggtttccgatttggtcgtcagaggacttgattggcagcgtccagtccccctaccggcaggctggaacacgcaagcgctgtgtctggaaaagtgcgagcggtcatcggtgcgggaagcctga

SEQ ID NO: 257474 - DNA, 1431 bp, Klebsiella pneumoniae
atgtctggatttaaagaaggttttctgtggggcggcgcggtggcggcgcatcagctggaaggcggctggaaagagggcggtaaaggggttagcgtcgccgacgtgatgaccgcaggcgcgcacggcgtaccgcgcgaaatcaccgatggcgtgttgccggggaaaaactaccccaaccacgaggcgatcgatttttatcatcgctataaagacgacattcagctgtttgccgaaatgggcttcaagtgcttccgtacctccattgcctggacgcgcatctttccgctgggcgatgagcaagagcctaacgaagccgggctgcagttttacgacgacctgttcgatgagtgccgcaagcacggcatcgagccggtgattacgctctcccacttcgaaatgccgtaccatctggtgacggagtacggcggctggcgtaaccgtaaactgattgatttcttcgtccgctttgcccaggtggtgtttacccgctaccagcataaagtgaagtactggatgaccttcaatgagatcaataaccaggccaacttccacgaggattttgcgccgtttaccaactccggactgaaatatctgctgggagaggaccgcgagccggttatgtatcaggcggcgcactatgagctggtcgccagcgcgctggcggttaaagccgctcgcgaaattaacccgtcattgtgggttggctgcatgatcgccatgtgcccgatttacccgctgagctgcgcgcccaacgacatgatgatggcgatgaacgccatgcaccgccgctactggtttaccgatgttcacgtccgcggccgctacccgcagcatctgctgaactacttcgagcgccgcggatttgcgctggatatcaccgaagaagaccgcgtggcgctgacccagggctgcgtcgactatatcggctttagctactatatgtcgttcgccacgaaagcaacggatgacaacccgcagctggattatgatgaaagcaagagcctggtctctaacccgtacgtgcagaagtcagattggggctggcagattgatccggtcgggctgcgctactccctgaactggttctgggatcactatcagctgccgctgtttatcgtcgagaacggcttcggcgccattgatgttcgcgaagcggacggttcggtggatgaccagtatcgaatcgactatctctctgcccatatcgccgagatgaaaaaagcggtcgttgaggatggcgtggacctgatgggctacaccccatggggctgtatcgacctggtctccgcgggaaccggtgagatgaaaaaacgctacggctttatctatgtagataaggacaatgagggcaacggcacgctggcgcgtagccgcaagaaatcttttgcctggtatcagcaggttatcggcagcaacggcgacaagctataa

SEQ ID NO: 257475 - DNA, 1509 bp, Klebsiella pneumoniae
atggctattagcacacccatgttggtgacttttattgtttatatttttggcatggtactcatcggttttattgcctggcgttcgacgaagaactttgatgattatattctcggcggccgcagccttggcccattcgtcacggcgctctccgccggggcctccgatatgagcggctggctgctgatggggctgccaggggcgatatttatttccggtatttccgaaagctggattgccattggcctgacgttaggtgcatggattaactggaagctggtggcggggcgtttgcgggtgcataccgaagtcaataataacgccctgacgctgccggattattttaccggccgctttgaagatcaaagccgcgtgctgcgaattatctcggcgctggtgattttgttatttttcaccatctattgcgcttccgggattgtggccggcgcacgtctgtttgaaagcacctttggcatgagttatgaaaccgcgctgtgggccggcgcggcggcaaccattatttataccttcgtcggcggcttcctcgcggtgagctggaccgataccgtccaggccagcctgatgatattcgccctgatcctgacgccggtgatggtggtcatttccgtcggcggttttggcgattctctggaagtgattaagcaaaagagcattgagaacgtcgatatgctcaagggcctgaacttcgtggcgataatttcgctgatgggctgggggctgggttattttggtcagccgcatattctggcgcgctttatggccgcggactcgcaccacagcatcgttcacgctcgtcgtatcagcatgacctggatgatcctctgcctggcgggcgccgttgccgtcggtttctttggtattgcctacttcaataacaacccgggcgttgccggggcggtcaaccagaacgccgaacgcgtatttatcgagctggcgcagattctgttcaatccgtggattgccgggatcctgctgtcggcgattctggcggcggtgatgtcgaccctgagctgccagctgctggtgtgctccagcgcgattaccgaagatctgtataaagcgtttctgcgtaaaaatgccggtcagaaagagctggtatgggtaggacgctttatggtgctggttgtggcgctggtgtctatcgccctggcagccaacccggagaaccgcgtgctgggtctggtgagctacgcatgggcaggctttggcgcggcgtttggcccggtggtgctgttctcggtgatgtggtcacgaatgacccgtaacggcgcgctggccgggatgatcatcggcgcggtcacggtcatcgtctggaagcagttcggctggctgggcctgtatgaaatcatccctggctttatctttggtagcctggggattgtggtcttcagcctgctgggtaaagcgccttcctccgagatgcagcgacgcttcgccgaagcggacgcccattatcactccgcgccgccggtacgcgcgaccgccgagtaa

SEQ ID NO: 257476 - DNA, 789 bp, Klebsiella pneumoniae
atgatagccagaaaaatttcgccgtatatggtcgtgccgtttttaatggcgataacgcccggcgcgcgcgccgatgaagccgccgcgccttctgacgggctgactatcggggtggggggaaagtacgcgcctcgttacagcggttctgacaagcagatttggcaggtggttcccgtactacaggggcggaaaggcgctttctttattgatagccaaaaaggcataggctacgacctgtcaggcgacagcggcctctacttcgagcacacgctcggttacgacctcgggcgagcggaaaaaaactcgagctggcgcgatggggctaatacgctgaaggggatgggtaatattaaagccaccatgaataccgccttcgccgtcggctggtcggtcacgccgtggctcaccgttgaaggcaaggctacgcttccgctcaccgacgcccagggcgcgcattatcaaacttccgtcaccctcctgctggttcaaaacccgcaggatatcgttgctttacagtccgccgcgctgtttggcgacagccggtacgtcaatacgttttacggggttgatcgccggcagagcatccgttccggctatcgaccctatcgcgcagccggcggattttacggcatcgacagcgcgctgacctggagccatcaatataacgagcattggggctccatactcagcgccggctatagctggctcggggaacacgctgctgagagcccgctcgtctcacggcgcaatgaaggtaccgtgacggcggcaatcacctggacattttga

SEQ ID NO: 257477 - DNA, 696 bp, Klebsiella pneumoniae
atgttgtccagaagagtgctgataattgaagatgacgccgacgcggccggcgtgcttgaggcctatttacaccgggaaaactatgacgtggcggtgaccatggacggactctccgggctggatatggcgcagcgctggaagcctgacctgatcctgctggatgtgatgctgccagggctaaacggaaccgaggtgttggccagcctgcggcggaaaagcgatgtgccggtgattatggtgaccgcaatgggagacatgcccgatcgtattggcgcgctgcgctacggcgccgacgattatgtggtcaaaccctaccaccctggcgaagtggtggcgcgcgttcaggccgtgctccggcgtagtcgcaaagacgacgcccgggaagacattctgcgctggcaggggctggaggttgatgtcgcggccattgtcgcgaccgtcagtcactcgggggaacctgcgtctattctcgacctgaccccgaccgagttttcgcttctggccacgctgatgcgcgcccccgtacgtcccttctcgcgacagtatctgctggagcgctgccttcccgagagcgaagcgctggagcgcgtggtggatacgcatatttataacctgcgtaaaaaactggaggccgcgggagtatccggcgcgttggtcaacgttcgcggcgtgggctaccggttcagacaaccatga

SEQ ID NO: 257478 - DNA, 1197 bp, Klebsiella pneumoniae
atgatcaagacccgtcactcttctctctggcgctggatttgcgggcgcattctggcgctggctatcggcagcgtgattgttatcgccacctgtatgtggctgcgcttcgccgtgcagaactactggatcatgcataaaatgccgcccgccttgcgcgaggaatttatcgcgctcagccgccatcccgaggccaatccggcgcgttttcatcagattgtcgatagctggtgggggttgagctattccacgccctctatcgcctcggcggactgggtgaccgtcgcggtgctggtgctggtcatgatccccttcattgttgtgatggggctgcgctacgcccgtccgctctcgctgcagttcagccgtcttcgtgatgcggcgaaggacgtgaccggagggcaatttggccgccaggcggagctgattgaggacgcgccggcggaaatgatccgctttgccgccgactttaacaaaatgaccggccagctggcccgctacgataaagaactccgcgcctcgcatgtggcgatggcgcatgagcttcgctctccgctaacggcggcgattggccgtctgcagggcatgctggatggcgtttttgatacccagccgcagcaactggaaatggtgatgaaacagctccagcatctgaatcggctgacggatgaactgcatctcctttccctcgcggatgccggcaatctggtcctggatgaccagccattcgctctggatgagctcctgcaggagcgagccgcatggttaacgccgcaggcggacgctcagcgcgtcacgatcgccattcagccttcgcctgcatgcccctttcgcggcgacgccttccgcatggggcaggtctttaccatcgtgatggaaaatgccgttcgctatgggcgcaaggggggccatctttctattaaactgcgccgcgaagagggggcttacctcatcgattttgttgatgacgggcccggcgtggcgcggcattttttaccggaaatgttccagcgtttcacccgcgaggaggcgtcccgcgccagacactccggcggcagcggcctgggattatccattgcgcgcgctatctgcgcggcgcacggggggcgtattagcgcggcgctaccggcgagcggcggtctgctgattcgcgttcatctgccgtacgaccccggcgcggaagaaaagagcgcatcttga

SEQ ID NO: 257479 - DNA, 1149 bp, Klebsiella pneumoniae
atgttatatgagttagttctttcccttcgtcagtgcgtgtacgctttgctcggcgccgagcgatcgctaccctggtttgcgctgctgccgccgatcgtactggccctgatgatcgtaccgctggtgggctgcggcgataaaagcggcgataagccggcgccggcccgcccggtgcgctacgtggtcatcggctccccggcaacgcttccctctctggaaagaaccggcgagatccatgcgcacgatgagacggccctgagctttcgtacggcgggcaggatgatgacgcgcgcggtggatattggcgatcgggtcaattatgggcagctgctggccacgcttgacgataccagcgcacaaaaccagctggatagcgcgacggctgacgaagagagcgccagagcgaccgcccgggtggccgcgctgaacgttagccggatgcaaaagctcatcgcgacaggggcaatcgcccgctcccagctcgacagcgcgcgggcggactggctggtcgccagcgcccgggtgaagagcagcgaggccgctttgcgcaacgccagggaaagccttggctggactcgcctgacctcgccgggtgaggggatcattacggcggtcagcgcctctcccggtcaggtcgtcaacgccggtgagacggtggtgacgctggcggccgggcaggcgcgcgacgtggtgtttgatattccggatcccgctaaggttgaggcgctaagggcggaggaatttcaggttgctttgctcagcgacgccggggtgaacgctttcgccattttgcgtgatattagcccgcaggccgatccccagacccggacatggcgcgtcagggcgaccctcaagaaaccgcccgccgcgatggcgctgggttccagcgtcacggtaaggctgccgtcatcaggttcggcgggttacgcggtaccggcttcggcgctgagccgttgcggagaaaaaccggccgtctttgtgattaccccgcagatgcaggcgcagctgcgcgttgtggttcccgccagctacacggcttcttccgttatcatcgcctccggacttatgcccggcgaccgggttattaccgcgggcgtgagtaaacttcgcccgggggaaaaagtcgtcgccggagagaagcagccgtga

SEQ ID NO: 257480 - DNA, 3075 bp, Klebsiella pneumoniae
gtgaaaaaagcgccgtcaaaaaatacctttaacctctccgcctgggcgctggaaaacccgcaaatggtcagcttttttatgctgctgatgatggttatcggttcgctcagctatacgctgctgccgcgaaatgaagatccggcgttcaccatcaaaacggcggtagtctctgcgcagtggccgggcgcatcggtaacggacacgacccatctggtgacggatgtcctggaaaaaaaattgcaggaaacgccctggctcgattatatcgaaagtgaaacccgggccggacaaacggttatctatattaatctgcgtgatgacacgccggcgcaaaaagtcccggcgatctggtatcagatccgcaaaaaaatgcaggatattgcgccatcgctgcccgaaggcgcgcaggggccgagcgtgaacgatgagtttgacgacacgtacggcacgatttatgcctttattcctgacggatataccctccgggaggtgcgccagcaggtggagacgatccgccgtgaactgatgtccgtgccggatatcggcaaaacggttctgcttggcgagcagcaggagcagattgcgatcgctttttcacccgcccgactggccggtatggggctcagcattcagcaggttacggatgctctgcgggcccagaatgcggtagttccggccggcgttctgcgcaccgggcaggagaagatgacgataaacgtcagcggggcgctcaggagcgaagagagcttacgcgccgtcaccctgcgcattaacgatcgctatcttcccctgaccgacattgccaccatcgagagaagagcggctgaaccgccttctgcggcgtatcgcgttaacgggcgtcctgccattggtctggcgatttccatggcgccaacgggaaatatgctgcgctttggcgcgacgttgaacgacagaatgagcgccatcggtgccgggctgccgcacggtattgagatggtgaaagtggctgaccagtcggcggtggtcagcggcgcggtaagcgggtttgtccgggtgctggtggaagccgtgctgattgtgctggcggtttcttttgtctccctgggattaagggccgggctggtggtggccgcggcgatcccgctggtgctggcgatgacctttgccggaatgatgctggcaggcatcggcctgcagcgtatctctctcggggccctgattattgcgcttgggctgctggtggatgatgccatgatcgccgtggaaaccatggtatcccggctggaggccggggatacgcgacggcgggcggcgacctatgctttcaaaaccacggcatttccgatgctgaccggtacgctggttatgattgccgggtttattcccgtcggttttgcctcatccagcgctggcgaatactgcttttcgctgtttgccgtggtgctgatggcgctgctgagctcatggatcgtggcgattctgttctctcctttgaccggagcatggctgctgccggaaaagcttaaacatcatgccgctggcccgggccgaatggcgcggggatatggacgacttctgcgaacggcgctgcgccaccggctcgccaccctgggaattgcgctggccgtgctggggctatcggtgtatggcacaacgtttatgcagggggagtttttcccctcatccgatcgtccggagctgctggtcagcctgacgctgctggccaatgcttcgcagtctgcaacggagaaacaaacggaaaggctggaacgggcgcttgccgggaatcgcaatattgaccattactcgacctatgtgggttcgggcgctatccgcttttacttaccgatggatgttctgctggataatgaaaatacggcgcagctggtcgtggtggcgaaggatctggccgcccgggaccgcctgcgggaacagttaaatacgctgctgagcgcgcaattcagcgatctaacctcgcgcgtttcgccgctggagctggggccgccggtgggctggccgatcaaataccgggtcagcgggccggattatctcaaagtcagagagtatgccgggcgtctggccgaggcgatagggcgctcgccgttaacccgggaggtgaatcagaccgcgggtgagccggagagaaccctcgttctgcaggtgaaccagaccgccgcgcgggcggcgggggtgtcgtcgcagagtctggcgcagacgcttaataccgtctggtccggcacgacggtgacgtcgataagggatgacgatcggctggttgacgtggtgctgcgggcgaatgacagcgagcggttgaatcttgccaccctgtcatcgctgacggtggaggggcgcgatggacaaaaaattccccttggcgcggtagccacgccggtctggggagtggacgatccggtactctggcgtcggcaaaggttgccgtttatcaccgtacaaaccgacctcgcgccggggatgcgggcagaaggcgtatcggacggtttgcgcccgacggtggataaactgcgcgcgggtctacccagcggttacagcattgttgaaggcggggtggtcgcggagtccgaaaaaggcaatagctcggtttttgatattttacccgtcaccctcggggtgatgctgttactgctgatgctccagctgcggcgctattcgcgtatgctgctggctctgttcatggccccgttcggcttaccggggatcgtcatggccatgctgccgagcgatacgcccatgggatttgtggctctgctcggcgcgatcgcgctggcggggatgattattcgcaatgccgtgatactgatcagtgaggtcgacaataatctcgctcagggcatggaaagcgatgccgccattattgccgccgcggagcaccgggccaggccaatatttctgaccgcttgcgccgcaatcctgggcatgatccccatctctcaccaggccttctgggggccaatggcatatgccatcattggcgggctgatcgtcgccacgctcgtcacgttaaccgtactgccggcgtcttttagcatgttgctggggatggggagatactggaaaaggcgtcacgccgcttga

SEQ ID NO: 257481 - DNA, 306 bp, Klebsiella pneumoniae; identical to SEQ ID NO: 188671

SEQ ID NO: 257482 - DNA, 591 bp, Klebsiella pneumoniae
gtggctgaagggaaggttctacaaaaacaacggcttcggcggatggaaatcgttgccgcggcgcagaaatgttttgcggaaaagggcctgcacggcgcctccgtagcggatattgcgcgtcaggctggtcttagcgtaggccagctatatcgcatcttcgccagcaaagaagagatcgttgaagtcatcgtcagtgagatcgtgaatgccagagtgggcgaaatcgttgccgggaatcatgatttagcccgtatggcgtccgtattagccggcgcgatcccagtgaccggctctacaaaaagcgataattatctgctgatggaaattaacgccgaggcgtcccgaaatccgcgcctgcgtgaaattatgaaccaggccgatcgccgcctgaaagaggagggcgggcgactaacccggcactatcaccctgagatgtccgcagagaaaattagcctcgcctgcgaatttatcgcgatattaaccgaaggatcggcctatcgttgcgactttgcgacgactccgacggtagataaagcggcgatggaaaacctgtaccgcgatgtttttcagctgctgtttacacaaaaatag

SEQ ID NO: 257483 - DNA, 1200 bp, Klebsiella pneumoniae
atgcctacccgcgctacggttttgtccctcgccctgctggccgccgccagcgccaacgccaatgactggcaacgccagggcatcgtagagggcaatctacccgcctcgtggcagcagttgaaagcgcagatgacctacccggactcgtggctctctggccactctcataattttaatcaatggcgacagcaggctcgtatgctgcttcggcagtctctgctgaccccggcgtcgacaatccccttcgcgccgcaaacgctcatgagagaagaccggggaacctatatcgccgagaagctggccttcaacgtaaccgacgataacaggattgccgcgctgatgttgacgccaaaatcacccggccctcacccggctattgtcctgttacacgatcatggctcaaagtttgacattggtaaggagaagctgatccgcccctggagtgacgccgcgcggctagccagcgcccaggcgtgggcggataaatttttcagcggccggttcatcggcgatgaactggcgcagcgtggttacgtcgtgatagccatcgatagcccaggctggggagatcgagggcctatggtctacgagcagcagcaggccctggccagtaactactttaaccttggacgttcgctggcaggtgaagtcgcctatgaagatctgcgtaccgttgatttcgtcagtactttaacagcggtggataatacacgcatcggggtattgggtttctcaatggggggctttcgcgcctggcaactggccgccctgtctgacaaagtggccgcgactgccgttatctcctggtttggtacctggcgcggcctgatgcacccgggcaacaacgtcctgcgcgggcaatcggccttttatatgcttcatccaggcttatccggccgtctcgacattcccgatatcgccagcatcgccgcgccaaaaccgatgctcatttatagcggcggcaaggataagctgttcccggcagaagccgttaacgatgccttcgcaaaattgcatacagtgtgggggtcgcaaaacgcgcaggataagctggaaacgaagacgtggccggaactgggccacgtcttttataaagaacagcaggatgaggttttcccctggcttgccaggtggctcaaacctgagcctgatggcggttatttggcgctacgcaaaacctgcaggcagcgcttaagctga

SEQ ID NO: 257484 - DNA, 585 bp, Klebsiella pneumoniae
atgtctgaactaatcctcgcgtcaacctcgccctggcggcgaatgctgctggaaaaactgtcggtgccttttgaatgcgcggcgccggaagttgatgagaccccgctgcccggcgaacccgcccgccagctggtgctgcgtctggcgcaggcaaaggcgcaggcccttgccgcgcgctaccctcagcacctcattataggctccgatcaggtttgcgtcctggacggtgaaattaccggcaaaccgcacacggaagaaaacgcccatcgccagttgagaaaggccagcggcaccatcgtcacgttctataccggcctggcgctgtacaattccgccaacggtcacctgcaaaccgaatgcgaacctttcgacgttcatttccgccgtttaagcgaccaggaaattgagagctatatccgcaaggaaaacccgctgcagtgcgccggaagctttaaaagcgaagggttaggcatcacgctgttcgaccgcctcgagggacgcgatcccaacgcgctggtcggtttgccgctcattgccctctgccagatgctgcgccgggaggagtgtaaccctctgctcacctga

SEQ ID NO: 257485 - DNA, 240 bp, Klebsiella pneumoniae; identical to SEQ ID NO: 183171

SEQ ID NO: 257486 - DNA, 789 bp, Klebsiella pneumoniae
atggcttaccgttcactcgcattcaatactgagatcatctggcgggccccgctcccttcggctgagcgtgaactggcaaattcaatacgcgacaaaattagcgcgttacgtccgcatctgctggattttctccgtctgaatgaagaagcccctccccatgcgctaactctggctgagtggtcacagcccgcgacgctgagttcgttcatcgcgacctggtccgaccatatttatcgtcaccagcccggtcaaccccgtgagcaaaaaccgctgctgtccctctgggcgcaatggtacatcggtttactggtgccccctttaatgttggcgctgttgagcgaagaacgcgccattagcctggcgccggaacatatgcgcgtcgagtttcatgagtcaggccgcgccgcctgtttctggattgatgttcattcagcaggtacttccccgacagagtccgcgcagtcccggatggaaaagctggtcaccacggctttacaacccgtcgtgcaggcgcttgaagccaccggcgatattaatggcaaacttatctggaacaatactggctacctgattaactggtatctgggagaaatgaaaacgttgctgggagatgaaaaagtggccgctctgcgccagcgctgcttcttcgaaaaacagctatccaacggcgaggataatccgctgtggcgaaccgtggttttacgtgaaggacagcttgtgcgccgcacctgctgccagcgctatcgcctgccggatgtgcagcagtgcggggactgcacgctgaaatga

SEQ ID NO: 257487 - DNA, 741 bp, Klebsiella pneumoniae
atggagctgggcggcaaatcgccggtgctgattttcgaagacgccgatattgagcgcgccctcgacgccgcgctgttcaccatcttctcgatcaacggtgaacgctgcaccgccggctcacgcatctttattcagcagagcatctaccccgagttcgttaaacgcttcgccgagcgggcgaaccgcctgcgcgtcggcgacccgaccgacccgaacacccaagtgggggcgctgattagccagcagcactgggagaaagtctccggctatatccgcctcggcattgaagaaggggcgaccctgctggccggcggcgcggataaaccgaccgatctgcccgcccatctgagaaacggcaacttcctgcggcccacggtgctggcggacgtcgataaccgcatgcgcgtggcgcaggaagagatttttggcccggtagcctgtctgctgccgtttaaagacgaggcggaaggtctgcgcctggccaacgacgtggagtacggcctcgcctcgtatatctggacccaggacgtcagcaaagtgctgcgcctggcgcgcggcatcgaagccggaatggtgttcgtcaacacccagaacgtccgcgacctgcgtcagccgttcggcggcgtgaaggcctccggcaccggccgcgaaggcggcgaatacagctttgaagtgttcgctgaaatgaaaaacgtctgcatctcgatgggcgaccatccgatcccaaaatggggagtctga

SEQ ID NO: 257488 - DNA, 546 bp, Klebsiella pneumoniae
atgaaaaagctgaatatccttctcctcacggccttgaccgccgtctcgggatccgcactggcgatgggcggtaccgttgagcagggcaagaacttcaccaacctgaatctggaaatggggaaatcctcctctggcctgtatgtggaaagcaactggctcaaaaataccgatgacggtacccagacaggcggcgtcggcgcgggttataacctggaactcggcccggtgatgctcaatgccggcgcgaaagctatctacctgggtcccaaaaaaggcgataacggcgtggccttccctatcggtggcggcgtcaacgtggccctgaccgacagcatccatctctatggtgagggctatgccgcgccagagggcctgaacaacagcgtcaaaaactacgttgaagccaacggcggcgtaagctggacgcccatcaccccggtcacgctgaaagtgggctatcgccacgtcagcgtcgacggcaaagatggccgcccgggccacacgctgattgacggcgcttatgtcggcggtggggttaccttctga

SEQ ID NO: 257489 - DNA, 321 bp, Klebsiella pneumoniae
atgaacggccgcttcgccgcgctttgcgcgctgagcctcgccgtgctgctgtcaggctgcgtccagtacaaatgggtgaaaccgggcgtcagcgatacggagatgaataaaaagctcaccgagtgcgaagcgcaggcgctgatcgatctccccccggataacgtcgtcaccggttcaagctcggaaaaaacggacaaagagaacaagaaaaaggacatttccaccagctatacggtggaggacgccaatgcggggcgcagagatacgcttgtagacagctgcatgtttaaaagcggctgggataagattgaagttcagtga

SEQ ID NO: 257490 - DNA, 816 bp, Klebsiella pneumoniae
gtgagccatacgcgcaatattcagcaaaccttttggcgcgacgaacagctgccctggctggagctgcgcagtacctggaacagccgccaggcctataaacgtcatcgccatccgcagctctccattggggcgattatcgagggggaaacgcgctgtctctgcaatggtcaggagtatctgctgcggccgggcgatctgattattattcccgcccaggcgccccacagctgtaatccgcgcgacggccagccgcgcagctaccatatgctctatctcgagctaagctggtgctggcgacagctggcaggcgatgggcatcatgagcgattgatagcctcccagccggtgatacgcgatgccgaactgtttgcccggtatttgcagatcgtggaattgatgagccagcagaacaccgccgcgttacccgaaagcgtcgcccgcttgctgcgcggcctgccgctgcgcccgctcgcgcctgcggcgctaagtcaaaccagcgcgcgtttgttcagtcgtctggcaaccaatctgcaggcgccgccgacgctggatagcctcgccgaggagtttgcgctgcgtaaagagacgctgatccgcgccttcaagcacgataccggcctgacgcccgccagttttatcaatatcgcgcggattgagttcgccaaatcgcgcctgcgcgccggggatactatcgccgatgtaggctaccaggccgggtttgccgaccagagccactttcataaaacctttgtcagctataccgccgccacgccgcgccagtatgcgcagcgccgatcaataacagacaataattag

SEQ ID NO: 257491 - DNA, 435 bp, Klebsiella pneumoniae
atgattggtatatttaaatatacagcaaaaaaagacatggtattaggtattagcgatcagcaaaccggggctaaggctgttatcttaccagcgtcctcaccgttaaataaaattctgtggtcggttgatgacaggaccggcgagatcgtcctggccgccagtgaggagctgctgctgggtatccgcgaggatcgtatgggttcaggcgcagcgattgagcttcaggttcgcgggaataaagcgacgcagcggtgggatttagtcagctcacgtcgctttattaaaagcaaacaaaatccgacctttgttatggacagctacaaccgcggcacaaacccggggaatccgattattcttttcgaatttaacggctcggaagcgcagcagtgggtatttgtgccgatggatatgttgacggcaaatagcccggaataa

SEQ ID NO: 257492 - DNA, 705 bp, Klebsiella pneumoniae
atgcggctggttcagctctctcatcattccatcgccttcccctccccggaaggcgctttacgtgaacctaatggcctgttggcgctgggcggcgatcttagcccggcgcggctactgatggcctatcagcgcggtatttttccgtggttttcacccggcgatcctattttatggtggtctcccgatccgcgagcggtactgtggccggagaaattccatctcagccgcagcatgaagcgcttccatcagcgctcgccctatcgtgtgacgctgaatcacgccttcggtcaggttatcgagggctgtgccgaccatcgcgatgagggcacatggataacggcaggaatcgttcaggcctaccatcagctgcacgagctgggacatgcgcattctattgaagtgtggcagggagatgctttagtcggtggaatgtacggcgtcgcgcagggcgcgctgttttgcggagagtcgatgttcagccgtgccgaaaacgcctctaaaaccgcgctgctgatctttagccaggtattttcacaggatggcggaaaattaatcgattgtcaggtgctgaataagcatacggcatcgctgggcgcagtggaaattgctcgccgggattatctcgactatctctccgtgctgcggacttatcgtctaccggaacgattctgggtaccgagggtgctatttgcaggagaagcgtaa

SEQ ID NO: 257493 - DNA, 219 bp, Klebsiella pneumoniae; identical to SEQ ID NO: 173880

SEQ ID NO: 257494 - DNA, 621 bp, Klebsiella pneumoniae
atgcagcggtttgtggattcaatcagaaaagcagtaaaagatgaaaattggttctccgcaatatttatagcgttagctatgccagatatttgtggtaatttagaagatccaagtgtaggtaatgttggtaaaaaatataggaagtggtttaatcaatatttaaaagataaatatgaccatgaaaatgaatgggaaagacggttgaatattgacccatcgacagcaaaggagttaattgataatgctaaaggaaatgctaatgttcaaaaatatataaatgatcaaaaaaacaaaaaaatcgagcgtaaatgcaggtttactgcgcaggattgttataaattccgttgtgcatgccttcatgcgggcatggcaaaaagtgaaaggggaccaataaaccttacccctccaatgtctaacggcagtatcgttcatatggcgataataaatggggatttgcagttgcaaatagacattttttgtgaggatgtttgcaaggcagtcgaagtgtggattaataaaaacgcatctaaccacgatattcagagtaggataaaagaattaatcgttgtggagcctataataataggtggcattagtctttttggtccatacaatccttag

SEQ ID NO: 257495 - DNA, 174 bp, Klebsiella pneumoniae
atgacacctgaagactatctttcaccggactgggagagcaagggaaaggttcacgactggaaaaattatgccagtgatgggctaatcaggatatggggtgactttacgctggagcaaaagctggtgattgcacaaagtctgcaaaaagcagctgatctcgaagaatgggagtga

SEQ ID NO: 257496 - DNA, 1662 bp, Klebsiella pneumoniae
atgtgtaacagattattgcaaagctattgcctgaagggacaggatagtgaacattacctgccgttttccctccagaataactataaaggcggcggtctgagaagattgcgccccgagcaccccccgttaatatgggatgtaaaaaaagaggtatttgtgtcgactgcaaacaataaaccaacagaaagcgtcagcttgaacgctttcaaacaaccacgatcgttctatctcatcttctcgattgagctatgggagcgttttggtttctacggcctgcaagggatcatggccgtttacctggttaaacagctgggtatgtcagaagcggattctatcaccctgttctcctcctttagcgccctggtctacggcctggtggcgattggcggctggctgggcgacaaggtgctgggcaccaagcgcgtcattatgctcggtgccattgttctggccatcggctatggcctggtagcgtggtccgggcacgatgcgggcatcgtctatataggtatggcgacgattgccgtcggtaacggcctgtttaaggctaacccctcttccctgctctcaacctgctatgaaaagaacgacccgcgtctggacggtgcatttaccatgtactatatgtccatcaacatcggttccttcttctctatgctggccacgccgtggctggcggcgaagttcggctggagcgtcgctttcgccctgagctttgtcggcctggtgatcaccattgtcaacttcactttctgccagcgctgggttaaacagtacggctcgaagcctgacttcgccccgctgcaggtaggcaagctgctggcgacaatcgttggcgtggtggttctcatcgcgattgcaacctggctgctgcacaaccagggtgttgcacgtatggcgctgggcgtggttgcgctgggtattatcgttatcttcgctaaagaagccttcgcgatgcagggcgccgcgcggcgcaaaatgatcgtcgcgttcatcctgatgctgcaggcgattatcttctttgttctgtacagccagatgccgacctcccttaacttctttgcgattcgcaacgttgaacactctctgcttggcatcgctttcgagcctgagcagtaccaggcgctgaacccattctggatcattatcggtagcccgattctggccgctatctacaacaaaatgggcgataccctgccgatgccgatgaagtttgctattggtatggtcctctgttccggcgccttcctcgtactgccgctgggcgctaagtttgccagcgacgcgggtatcgtgaacgtcagttggctggttatcagctacggcctgcaaagtatcggtgaactgatgatctccggcctgggtctggcgatggttgcgcaactggttcctcagcgtctgatgggcttcatcatgggcagctggttcctgactaccgctggcgccaacctgatcggcggctacgtcgcgaacatgatggcggtgccggataacgtgactgacccgctgatgtcgctggaagtttacggtcgcgtattcctgcatattggtgtcgccaccggcattatcgccatcctgatgctgctgacggcgcctaagctgaaccgcatgacccaggacgatgataaaacggcaaaagcccgcgataccgctacggcctaa

SEQ ID NO: 257497 - DNA, 1950 bp, Klebsiella pneumoniae
atgtttaagttattttccgcttttcgcaaagataaagtctgggacttcaacggcggcatccatccgccagagatgaaaacccagtccaacggtaccccgctgcgtcaggtgtcgctgccgcagcgtttcgtcatcccgctaaagcagcatatcggcgcggaaggtgagctgtgcgtgcagccgggcgatcgcgtcctgcgcggccagccgttgacgcgcggctggggccgaatgttgccggtgcacgccccaacgtccgggatcgtggcggccatcgccccccactctaccgcccacccttccgcgctggcggaaatgagcgtcattattgatgccgatggcgaagatcgctggattgagcgcgatgggtggtacgattatcagaataaatcccgcgaagcgctgattgagcgtattcaccagtttggcgtggccggactgggcggcgcgggtttcccgaccggcgccaagctgcgcggcggcggcgacaaaatcgacacactcattatcaacgccgccgagtgcgagccctacatcaccgccgatgaccgtctgatgcaggattgcgcggcgcagatcgttgagggtattcgtatccttgcccatattctgcagccgggtcaggtcctgatcggcatcgaggataataaaccgcaggcgatttctatgctgcgcgcggtattagccgacacgcacggtatttccctgcgagtgatccccaccaaatatccctccggcggcgcgaaacagctcacgcagatcctcaccggcaagcaggtgcctcacggcggacgctcctctgacatcggcgtgctgatgcagaacgtcggcaccgcctatgcggtgaaacgcgcggtaatcgacggcgagccgctgacggagcgcgtcgtcaccctgaccggcgaagcggtctcgcgtccgggtaacgtctgggcgcgcctcggcaccccggtcagccatttgctaaaggatgccggtttctgcccgagcgctgacccgatggtgattatgggcggcccgttgatgggcttcaccctgccgtggctcgacgtgccggtcgtgaaaattaccaactgcctgctggcgccgtcggcgagcgaaatgggcgagccggaagaggaaaaaggctgcatccgctgcagcgcctgtgcggacgcctgcccggccgatcttctgccgcagcagctttattggttcagcaaaggccagcagcacgacaaagccaccagccataatctcgcagattgcattgagtgcggcgcctgcgcctgggtttgcccaagcaatattccgctggtgcagtacttccgccaggagaaagccgagatctccgcgatcgcgcaagaagagaaacgcgccgcggaggccaaaattcgctttgaggcgcgtcaggctcgcctggagcgcgataaagcggcgcgtctggaacgtcataagcaggccgcggtccagcctgcggcgaaagatcaggacgccattaacgccgcccttgcccgggtgcgtgaaaaacagcgtgacgcggcgcagccgattatcgtgctctccggcgccaaaccggataacagcgaagccattgccgcccgcgaagcccgcaaggccgaggcgcgggcgcgcaaagccgaacagcagacggctccggcggtagatgccgccgccgatccgcgcaaagccgccgttgaagccgcgatcgcccgagcgaaagcgcgtaaagctgaacagcagacggctcccgcggtagatgccgccgccgaacaaccggcagccgccgatccgcgcagggccgccgttgaggccgctatcgcccgagcgaaagcgcgcaaagcagaacaacagcaacaagcagttcccccgtcggcagccaatgacgacgcccgcaaagcggcagtcgctgaagcaatcgcccgcgttcaggcccggaaagcatcccggcaggcagttaacgaggattaa

SEQ ID NO: 257498 - DNA, 408 bp, Klebsiella pneumoniae
atgacggcgaaaacagcaagcaaaattaccttatgggagtttttccagcagttagggaaaaccttcatgttacccgtggcgttgctctccttttgcgggatcatgctggggatcggcagctctctgagcagccatgatgtcctgacgcttctgccgtggctggacgtgccgctgctgcaggccgttttcatctggatgggcaaagtcggctcttttgccttcagctttctgccggtgatgttttgtatcgccattccgctgggcctggcccgggaaaacaagggcgtcgccgcgtttgccggttttgtcggctacgccgtgatgaatctggcggttaacttctggctgacggccaaaggcattctgccgaccaccgatgccgccgtcctcaaagcgaataacatttag

SEQ ID NO: 257499 - DNA, 1776 bp, Klebsiella pneumoniae
atgttgagcgatctcagcaacgatgaaagtaaaagacgcgcggcgattgacctgttaaaaaatcccgacgagggacgggacgaagcattaaagaagtatacgcatctggtctgccagttgctgaaaatgccgatgagttttgtctcggtgctggatgatgaaaagcaatatatcaaatccgctcagaatatcgccgccacggaaacccgcctgggcgacgcattttgcgaacagaccttgaaacagggtaaaacgttcatttgtcgtgatacgcatcagcacccggtttttcagcgcgatcgcgccgtcagagaagcgccgttcattcgtttttatgcgggatgcccgctgacaacccgggatggggtggccgtgggtaccttgagtatcctggatacgcaacccagggaactttccgacgagcaggtcgctatctttaacacgctggccgagctggtatcggacttcttagcctcctggcactcggtaggctataccgacgtcgtcacgctattacccaatcgtcagcgcctgctgaaggacattgaggtgtcggcggtgagcgccttccggctggtcatcattgactgcattgatatgccctttgcctacgagatggcccgctcattggggatgattgccgtagaaaacttacttcgcgacatgaccgctcagctgcaggcacgtctgcctctcgcgggccagctttacgccgtggcggtcggacgatttgcttttttaacgcctgagccaacggctctgtcgctggaaaacattgcacaaaaccttcagggaacccaggccaggattggccctgaagttcccctggatttggatattcacatgggtgactccgggctgtgcgacagcaccctgacgccgaatgaaattctgcgtcgtgcggtgagcgctttgcatgaggcgataagccaggggctccgttttaccacctataatgacgccctggatacccgcaaaaagagggatttcagcctgctgaccgaactcagacaaacgctgcagggaaaccagggcttatatctggtctatcagccgaaaatctcgctggcgaccgggcgcgtgacgggtgctgaagcgctggtcagatggaagcatccgacaaacggcgaagtcctgcccggcgaatttatcccgctggtcgaaaagaccagcctgatgcgtgagctcacggcctgggttatcgatcgcactatcgcgcagctgagcgagtggcgggaccagggactgactctgccggtgtcaattaatctggccgccagtgacttttctcggcccgatttcgctgaggagcttgaacagaaactgcggaatgcgtctcttgagccggcgctgctgggattggagtgtctggaaaccgagaagatgcttgaaagtccggccgcgcttaacgggttgaacatgcttaaaaaacgtggatttaaaatttctctggatgactttggttcgggatacagcaacattaattacctgcggcaaatgcccctggacatcatcaaactcgaccggtctattgtgagtcatattgtcgacgaaaaagccagccgcattattgtgcgtaacgttatcaagcttctcaagcagctcgattacatcgtcctggccgaaggcgtcgaggatcgcaaaacggtcgagatcttgcgaagcctcggctgcgatgaggttcagggctatttctatgccaggccaatggtttctgcagattttgcagcatggtcccgcgccagaaacgcagcgacggaaaggaaccccctgtag

SEQ ID NO: 257500 - DNA, 348 bp, Klebsiella pneumoniae
atgcagtggaatattgaaaatagccttgtatgtcctgtaaccggaacaggattttcagttgcggcaagtgctaaaaatctcaaattaatcatatggtataatggtgattattttttgaacactggttcggttattaacatcactcaaaatgaagtgctcattaacggcgagcccggcgatttacaggttattcacgctttcccctatacggaaatcctgtggtcaacgtttgcccggtatatcgattgtccgggcaatgaggatcctatgttgctcatctgccatcgaagaagtctctgcaaattcgccttgtgcccctacggtgcgaggcaaaagaggccagaataa

SEQ ID NO: 257501 - DNA, 879 bp, Klebsiella pneumoniae
  misc_feature (803)..(812): n is a, c, g, or t
atgcgtattggtgtaccaaaagagagactcgcccaggaaacccgggccgccgccacgccgaaaacggtggagcagctgcttaagcttgggttcagcgtcgcggtagaaagcggtgccggtaagttggccagtttcgacgatgaagccttcgttcaggctggagcggagatcgtgagcggtgatgacgtatggcagtctgacgtcattctgaaagtgaacgcgcccgatgacgatgaaatcctgctgcttaatcccggcacgacgcttatcagctttatctggccggcgcaaaacccgcagctgatggaaaaactggcggcgcgcaacatcaacgtgatggcgatggattcggtgccgcgtatttcgcgcgcgcagtcgctggatgcgttaagttcgatggctaacatcgccggctaccgcgcgatcgtggaagccgcccacgagtttggccgtttcttcaccgggcagatcaccgcggcaggtaaggttccgcccgcgaaggtgatggtgatcggcgccggggttgctggtctggcggccatcggcgcggccaacagtctcggggcaatcgtccgcgcgtttgatacccgtccggaagtgaaagaacaggtgcagagtatgggcgccgagttccttgagctggattttaaagaggaagcgggcagcggcgacggctatgccaaagtcatgtctgaagcctttattaaagccgagatggcgctctttgccgcccaggcgaaagatgtcgacatcatcgtcaccaccgcgctgattccgggtaaaccggcgccgaagctgattannnnnnnnnnaaccggcgccgaagctgattacccgcgaaatggtcgactccatgaagcccggcagcgtggtggttga

SEQ ID NO: 257502 - DNA, 1389 bp, Klebsiella pneumoniae
atgtctggtggattagttacagctgcatacattgttgccgcgattctatttatttttagcctggcggggctttctaaacacgaaacctcgcaacagggcaactactacggtattgccgggatggcgattgccctggtggcgaccattctggggccggacagcagcaacgtcgcgtggatcctgctggcgatggttatcggcggcgctatcggtattcgtctggcgaagaaagttgaaatgaccgaaatgccggagctggtggcgattctgcacagcttcgtgggcctggcggcggtgctggtaggctttaacagctatctgcagcatgaaacagggatggaacagattctggtcaatattcatctgaccgaagtgttcctcggcatcttcatcggtgcggtgaccttcaccggctccgtcgtggcgtttggcaaactgtgcggcaagatgtcttcaaagccgctgatgctgccgaaccgtcataagctgaacctggcggcgctggtggtttctttcctgctgctgatcgttttcgtacgtaccgacagcatcggcatgcaggtactgtgcctgctggtgatgaccgttatcgccctggcgtttggctggcacctggtggcctccatcggcggcgcggatatgccggtcgtggtgtcaatgctgaactcctactccggttgggcggcagcagcagcgggctttatgctcagcaacgacctgcttatcgtaactggcgcgctggtaggttcttccggtgcgattctgtcgtacatcatgtgtaaggcgatgaaccgttcgttcttcagcgtgattgccggtggctttggttctgacggcacggcctccacggcggatgaagaagtgggcgagcaccgtgaaatcagcgccgaagaaaccgcagagatgctgaaaggttcgcagtcggtgatcatcaccccgggctacggcatggcggtggcgcaggcccagtatccggtcgcggaaatcaccgagcgactgcgcgcgcgcggaatcaaagtgcgtttcggtattcacccggttgccgggcgtctgccgggccatatgaacgtactgctggcggaagcgaaagtcccgtatgacatcgtgctggagatggatgagatcaacgatgatttctccgataccgacaccgtgctggtgatcggcgctaacgacaccgttaacccggccgcgcaggacgatccgggcagcccgatcgccggtatgccggtgctggaagtgtggaaagcgcagaatgtgattgtatttaagcgttcgatgaacactggctacgccggcgtacagaacccgctgttctttaaagagaacacccacatgctgtttggcgatgccaaagccagcgtcgatgcgattctgaaagcactgtag

SEQ ID NO: 257503 - DNA, 1311 bp, Klebsiella pneumoniae
atgccgcaactttatgatttcatcaaccagctggcgccaaaaatgaccgaatggcgtcgcgattttcacctgcatgcggaatccggctggctggagttccgcaccgccagcaaggtggcggagatacttgacgatctgggttatcaactggcgctgggtcgcgacgttatcgatgccgatagccgtatgggcctgcctgatgaagagaccctggcgcaggcgttccagcgcgcccgcgcgcagggtgcgccggagcgctggctgccggcgtttgaagggggcttcgccggggtagtggcgacgcttgacaccgggcggccggggccgacgctggcgtttcgcgtcgatatggatgcgctcgatctcaacgagcagcatgacgatagccaccgtccgcatcgcgatcgttttgcctcctgtaacgaaggcatgatgcatgcctgcggccacgacggtcataccgcaatcggcctggggctggcgcacgtgctcaaggaatatgccgcgcagctcaacgggacgatcaagctgattttccagccggctgaagaaggtacccgcggcgcgcgcgccatggtggctgcgggcgtacttgatgacgtggactacttcaccgccattcatatcggtaccggcgtccctgccggcaccgtcgtttgcggtggcgataactttatggccaccaccaaattcgatgtgcagttcagcggcgtcgccgcccacgctggcggtaaacctgaagatggacgtaatgcgctgctggcagcggcccaggccgcccttgccctgcatgccatcgcgccgcacagcgccggggcgtcaaggattaacgtcggggtcatgcaggccggtaccgggcgtaacgtggttccctcttccgcgctattaaaagtcgaaacccggggcgaaaccgacgctattaaccagtacgtctttgagcgggccaaacaggcgatcgccggcgcggcgacgatgtatgaagccagctaccagctgcacctgatgggcgcagccacctccagcgccccgtcgccggcgtgggtggactatctgcgccagcagacggcccaggtccccggcgttaaacaggccgtcgatcgtatcgctgccccggcgggctccgaggatgccaccctgatgatggcccgggtccaggaacgcggcggtctcgcttcatacatgattttcggcaccgaactgagcgccggccaccacaacgaaaaattcgatttcgacgaaagcgtgatgacccaggccgtcgccacgttagcgcgcatcgccatgaactttccctggcagcgaggtgtgtaa

SEQ ID NO: 257504 - DNA, 687 bp, Klebsiella pneumoniae
atgattgataaaagcgtgtcgacgctacgtgatgccatcgctgggatccacgacggagcgaccataatgattggcggttttggccccgccgggcagccgacgtacctgatagatgctctgatagaacagggggcccgcgatttaaccattatcaacaacaatgcgggcaacggcgaagttggcctggcggcgctgctgaaggccgggcgggtgcgcaaaatgatctgctcgttcccgcgtcaggtcgactcgcagattttcgacgatctctatcgccgcggcaaagtcgagctggagctggttccgcagggcaacctcgccgcgcgtattcaggcggcaggggctggccttggcgcggttttcactccaaccggctacggtacgccgctggcggaagggaaagagacccgcgagatcgacgggcgtcactatgtgctcgaatatcctatcaaggccgactttgcgttgattaaagcccatcaaggcgaccgctggggaaacctggtataccgcaaggcggcgcgcaacttcggcccgattatggcgaccgccgcgaaaaccactatcgtggaagtctcgcagctggtgcccctcggtagccttgacccggagagcatcattaccccgggcatttttgttcagcgcgtcttctccctggaaaacctgattgccgctaaaagcgcctga

SEQ ID NO: 257505 - DNA, 282 bp, Klebsiella pneumoniae
gtggtggaaatagcagcccccctcaagcaaagtcacatactcttttccggcgttaatcagctccgggtcctcttcgccaggccgtggctttggccccattcccagcaggccattttcgctgtgcagaaagatttctttatcagcgggaagatagttagcaatgcgggtaggcaagccgatccccagattgacataagcgccttcaggtatatcgcgagccacgcgctgggccatctcatcgcgagtcagtttttgcataatggggtcctcaggcgcttttag

SEQ ID NO: 257506 - DNA, 387 bp, Klebsiella pneumoniae
atgccctttacccgcattagcctccatcagagttataacgatacgcaaatcatgcagatttccgacattctgcaacagagccttgaaacagaatttgccgtcccgccccacgatcgctttcaggttttcgaacggctgccggcgaaccagcatgtgttcgaccgccgctataaaagcgctggccgcagcgacagttttattcagttccatcttctggcaggtaagcctcgttcagtggagcagaagaggaacttctgccgtaccctgtgccagcggctgcagacgaaactgcatattagtccggatgatgtgatggtgatgatgcagttcaataccgccgatgagtggagtttcagccacggactgctgctctctgaggaggcgtga

SEQ ID NO: 257507 - DNA, 303 bp, Klebsiella pneumoniae
atggccaaccccctcgatcgtgaaaccctggctcgcatcgcgccgaagctagccgagctgagtcagaatgtactttttaatgatatctggacgcgtgaaccgctttctccccgcgagcgcagcctggtgacgctcggcgcgctgacggcgctgggccgcgttcagcagctcccctggcatatccgcttcgcccagcaaaatggcctgacccgtgaagaaatcgttgaggttttcacccatctggcattctacgccggctggcccgcggcggtttccgccctcgaatgcctgcaagaggagtaa

SEQ ID NO: 257508 - DNA, 885 bp, Klebsiella pneumoniae
atgaataagctcccactcacgttcgatctcgacgcgctgcgcagttttgtcaccggtattgaatgcggcagctttgcgcaggcggcaggtcgcctctgccgttcaacctcggcggtgagcgctcagctgaaaaagctggagcagcagtgcggcaccgctctggtggagaagagaggccgccacctggcgctgacgcagaatggcgagataattatgggctatgcccggcgtctgctggcgctgaacgatgaagcgcagcgagccctgcagggcgaacttttgcagggagaaatacgcattggcatgcaggaggattttggcgagtcgcttatgcccggcattcttggcgagttcaaacgtcaccatccaggaatgcgaattattgcccgtgtcgatcgcaatcgggcgctgctcaacgccctcaatgacaatatgcttgatatggcgctgctgtggcagccggagagcgcgcagcgtgaaggcaaaccgatcggccagagccggctggagtggataacccatccgcagctggatattgccgcgctgctggcggagggcaagccgttgccgttggtgatgctggacagcccgtgcctgatgcgttcccgcgccatcgactgtctggaccgggccaacatcgcctggcaggtggtgtttatcagccatagtctgagcggcatctgggcggcggtgcaggccggactgggcattaccgtacgtacgcgcatcggcatgcccggcaacctgcgcgtggcgggaagcctgctgccatcgccggggaatctcggtattacgctgacgcacggccaggggaacgacggggttcacggagcgcgggcgctgttggggcaactgatggaagacgcgctattaagcgtgatgtga

SEQ ID NO: 257509 - DNA, 1188 bp, Klebsiella pneumoniae
atgcgtatcgccttaaaatcagcattgatgcttacctcccgcgtcatacaagtaattaatcccgaattacacctgcatatgcaacgcacggcgctgattgcgctggagcttgcgcaggcatcgggcctatcgcgccggcagcagcaaactatcttttgcgccgcgctgctgcacgacattggcgtgctgggcgataaaagggcgttttcgtcgctgaacgccatcgataacctcaatgacccacatcagcaccggggagccgaaatgctggccgggttagccaccctggcccccatcctgccgattatccgcgatcaccattttagcccaaaccacagaggcagcctcgaacagcatattgtctattttgccgacgtttttgaacgccagctccctggtgataagagcgcaaccacctatcaaaccgatatgagtattgataacttccgcgcgctttaccaggcgatcgacccgccgctgtgtcagaccttgtgccagctcgcagaaaaagagcatttttggctgcatcttaatcccggacatattcagcgaatgttggaaatcatcggccccatcaacgatgtgtatatcgatatcgacggactgaaagatatctgtctacttattgccaaaattgtcgatacctacagcagctttaccgccagccacagtctgaaggttggtcaaatttcgcgcgccctcgccgcttatatgagtctgccggatctggagtgcaggaagattgagattgccggttatttgcacgatatcggcaaagtgtatattccgctggcaatcctcgagaaacagggtgagctgaacgacgaagagttgcttcaggttcgcgagcatagctatatgaccggcgaaattcttagcaccttcagcgaactcggcgagataattaactgggccgcaaaccatcatgaaaaactggatggcagcggttatccgcttcatctcaatgaggattacctgcaactaccggatcggattatcgccatcgcggatatattcaccgcgctgaccgaagaccgcccctatcgcccaggaatgcgccgtcagcaagcgttacagctgatagagagtgatgttataaatggcgcgttggataaagatgtgtatcgcatattgcatcagcatgccgaagcgctgcacgctattattactcacacgctgcccccttaa

SEQ ID NO: 257510 - DNA, 768 bp, Klebsiella pneumoniae
atggaactgcgaacccaaaagctcaccgccggctatggcggcaaacacgttatcaatcatctcgacctgacgctgcccggcggcaaaatcaccgcgctgctggggccaaacggctgcggtaaatcaacgctgctgaagtgtttctcccgcctgctaacgccgctcgccggcgagatctggctcggtgatgtcgccttaacgcgcctctccgtgcgtcagctggcgcgccgactggcgctgttgccgcagcagcatcacgttccggaaggcgtcagcgtacgcgagctggtcggctatggccgcagtccgtggctaccgctatggggtcggcttacagagcacgatcgacagctggtcgacagcgcgctacagcgcaccggcatcgctgcgctggcggaacagccgctgaccgccctttccggcggccagcggcagcgggcttttctggcgctgctgctggcgcaggatacgccgctggtgctgctcgatgagccaacgacctggctggatattaatcatcaggtggaactgatgacgctgatgcgcgagctgcagcggatgggaaaaaccgtggttaccgtgctgcacgatctcaaccaggccagccgctactgcgatcatctggtagtgcttgaaggggggcaggtgcgggctcaaggttcagcggaaacggtgctgacgccggagatgctgcgggagatctttcatctggaagcggaaattcacccggagccgatgtcgcagcgcccgatgtgcgtggtgaaataa

SEQ ID NO: 257511 - DNA, 954 bp, Klebsiella pneumoniae
atgagacgacgcatcgtttttttactgctcgcgctgacgctgttaaccctcttctcgctgcggatgggcgcgatcccgctgccgtggcaagtgctgctcggcggatggcatgcggacagcgagtatcactatgtccttatgcaatatcgcctgccgcgcgtcgtgctggcgctgattattggcgccgcgctggccgtttccggggcgctggttcagggtgtggtgcataatccgctggcctcgccggacattctgggaattaaccacggggcgagcctggcctcggtggccacattgtggtttttgccgtccctgcccctgccgtggttgccgctgctggcctttatcggcgggatggcagcgatgacgatcgcgatcgcgcttgccgggttttcccgtccaatgcgcctggcactcaccggcatcgcgctgtcggcctgctgggccagcgtgaccgattacctcttactttcccggccgcaggagatcaacaatgcgctgctgtggctgaccggcagcctgtgggccagggacggttcattcgtcgttatcgccctgcccctgctggcgattttgctgcccttaagcttcgccctcagccgcgatcttgacctactggcgttaggccgcgaccgcgcgggaaccctcggcgtcaacgtgcgccggcttaacggctacgcgttgacgctggcggtcgccctcgcgtcgatcggcgtggcggtttgcggccccatcgcctttatcagcctcgtggtgccgcatcttgtgcgtcgcctgttcggcggtcgccaccgctatttattgcccctgtccgcgctgacgggcgggctggttctgctactcgccgatctgctggcgcgaacgctgcatccgccgcttgagctgccggcaggcgtattgacggcgattatcggcgcgccctggtttatctggctgcttgtgagaatgcgttaa

SEQ ID NO: 257512 - DNA, 999 bp, Klebsiella pneumoniae
atgaaactcttccatcgcgcgcgctttatctggggattgccgctgctggcgctcaccggcctgttctggttgagcctgttctgctattcgccgatcccgatttcgccgttaaacgcgcttcacgccctgctggcgccagatacgcctgcgcttgcggaggcgctggtgcttaacctgcgcctgccccgcagcctggtagcgataatgctcggcgcctcgctggcaatgtccggggccttattgcaaacgctcacccataacccgctggcgtcgccttcgctgctgggcattaatagcggcgcggcgctggcgatagcgctgaccagcgccttcagtccggcgccgctggcaggcttttcgctggcgttgatagccgcctgcggcggcggactaagctggttgctggtgatgaccgccggcggcggctggcgccagcagctggatcgccatcggctgatcctcgccggtattgctctttcggcgctatgcatggctctgagcagaatgaccctgctgctggcggaagatcgcgcctggagcattctgacctggcttgcgggcggcgtttctcacgtgcgctgggccgagttctggcagcttttcccttttttcgcgctcattgctcccggcgtattcctgctggccaacgcgcttaatctgctcaacgtcggcgataccgcggcccattcgctgggagtgaatttgccgcgcctgcgcctgcttatcaacgcggccgtgttgttgcttaccggcgccagcgtcagcgtcgccgggccggtggcctttattggcctgctggttccgcatctggcgcgcttttgcgcaggtcacgatcatcgttttcttctacccatgagcgcggtgttgggcgccctgcttatgctgctggccgatattctcgccagagcgctggcctggccaggtgaactgccggcgggcgcggtgctggcgctggtcggggcgccttgttttgtctggctggtcaggaggcggggatga

SEQ ID NO: 257513 - DNA, 903 bp, Klebsiella pneumoniae
atgtttagccttgttcgcctgtgtattttcagcctgctgtttctggcaggcccggtattcgccgtcaccgtgcaggatgagcacggtcgctttacgcttgataaaacgccgcagcgcatcgtcgtgcttgagctctccttcgtcgacgcgctggcggcggtcaacgtcagcccgattggcgtggccgatgacaacgacccgtcgcgtattctgtcggacgtacgcgcgcgcctgaagccctggcagtcggtgggcacccgcgctcagccttcgctggaagcaatcagcgcgctgcatcccgacctgatcgttgccgatagcagccgccatgccgggatctacgccgccctgcggcagattgccccggtactgctattgaaatcgcgcaatgaaacctgggaagagaacctgcagtccgcggcgattatcggcaaagtcgtgggtcaggacgaggagatgcagcggcgtctggcgcagcaccggcaaaaaatggcggcgttttcccgtcaactgccggctggcgccagcgtgctgtttggcacctcgcgcgaacagcagtttaatcttcattcatcgcaaacctataccggcagcgtgctggcggcccttggcctgaaggttccgctgccgaacggcggcgcgccgatggcggcgataaatctcgaacagctgctggcgctaaatccgcaatggctgctggtcgcccactaccgcgctgaaagcatcgtcacaaaatggcagcaggacgcgctgtggccaatgctgcaggccgagcaaaaacagcaggtcgccgccgtcgatagcgacagctgggcgcggatgcgcgggatcgttgccgccgagcgtatcgccagcgatatggtgaaaatcgtccaccaccaggccgtcgatatcgcgccatga

SEQ ID NO: 257514 - DNA, 948 bp, Klebsiella pneumoniae
gtgaaaccaatgctaagcgactcccgtcgtcaggcgctgcgttccgcttcgcactggtacgcggtcctcagcgaggggcgcgtgagcccgcagcaggaggcccgctggcagcagtggtatgaacaaaacaacgaaaatcagtgggcgtggcagcaggtagaaaacctgcgccagcagatggggcagttgccgggcgggctggccagccgcgcccttcacgatagccgcctggcgcgtcgtcacgtgctgaaagggctgctgcttttactggtcgccggcggcggctggcggctctgggagtccgagctggcggaggggctgcgcgccgactaccgaacggcgaagggtatgccgcgccagcagcggcttgccgacggtacgctgttaaccctgaatagcgaaagtgccgccgatgtccgttttgacgcccggcagcggatggtgcatttacgctatggcgaaatcgccatcaccaccgctcaagacagccggcggcggccattccgggtgcaaacccgcgaaggcaccctcaccgcgctcggcaccgaattcaccgtccgtcagtttgccggcggcacccggctggcggtacagcagcatgccgtagaagccgttttaccgtccggcggcgcccaaatcgttaacgccggcgaaagcctgtggtttacccgcgatcgtttcgccgctctggtgaagctcaacggcggcgaggatagctggacccgaggcgtgctgacctttcgcgataccgcgctgagcgaggtggtcgccaccctcgccctctatcgcaccggagtgctgcgctgcgatcccgccgtggctgatttacgcctgagcggcacctttccgctgggcgatccggacgccatcctgcaggtcatcgcgcaaacgctgccgattaaattgcggtttgtcacccgctactgggtcacgctcgccgcggcctga

SEQ ID NO: 257515 - DNA, 1014 bp, Klebsiella pneumoniae
atgtccgattttattctcgcgcgcgtgacgcaaacgctagccaatgaacactccctcgaagcattggtgcgacagctgcttgagatgctggagcttgttacccgaatggaatccacctacctgacgcgtattgacttcgacgcgcagcgacagctgattatgtatgcgcataacagcagcgaaatgcagatcccagaagggttctccgtcccatggaacgactcgctatgtaaacgtgcgctcgacgagcgttgccttttcagtaacgatgtcgccgaacgctggcgttcgtgtatcgccgcgcaggatttgggcatcgccaccttttttagcattcctgtgcgcctgaccgacggctcattattcggcacgctgtgcgccaccagccgggtaagacaaccctataaccttgagggtgagcaggtcatgaatttgttcgcgaacctcatcgcccactacgttgaaaaagagacgctagtgcagcagcttcgctcggccaacgtcgcgcttgaaatgcactcatacactgatgagcttaccggtttaccgaatcgccgctcgctgtttaagtatcttgccgcgcagtttccgcgggcccgcgagcagcggcgcagcatgctgctgatttttatcgatctcgacgattttaaagcaatcaacgatcgattcggccatccgtgcggcgataactttctgattcaggttggcgaacgtctggcggctcacgtacgcagcggtgatattgtcggccgtctcggcggcgatgaatttttaattgtcggaccgggccccgaattagccgaccagcaggagtatatcgccgcgttacgtcaagcgctgacggggatctatttccttggcgagcaccggattaactacccgggggccagctttggcgttattgaggccgacccgcagcagattgacgtagaacaggcgctacgcgccgccgacgacgcgatgtatctggataagcagtctcgtcgtcagggaagattttttcatattgactaa

SEQ ID NO: 257516 - DNA, 240 bp, Klebsiella pneumoniae
atgaaggggatgatactgatgctgccactggcgcttgccggatgcgcgcagactcagccgacacagcaagcacatccggtagggatggctaacccggcttcggtttactgtcagcagctgggcgggaaacaggttcccattcaaagcccgcagggcgtgcgcaccgagtgcaagctacccggtggtgaaacgttagatgaatgggagctctggcgccgcgatcatccggctaagtcatag

SEQ ID NO: 257517 - DNA, 345 bp, Klebsiella pneumoniae
atgattcaatgtaaacgcgtttatgacccgcaggaagagagcgacggctaccgtatactggtagaccgcctgtggccgcgaggaataaaaaaagaggcgctcaattacgctgagtggtgcaaaaccctggcgccatcgacagatttacgcaaggcttttcacggcgagacgctcgattttgcccactttagccagcgctatcgccaggagcttgaggcccatcgtgatgaaggcgagcgcctggccgcgctggcccaccggcagacgctgacgctgctctacgcggcgaaaaacacccggcataaccatgcccaggtgctggctgactggctgaaagcgctatga

SEQ ID NO: 257518 - DNA, 510 bp, Klebsiella pneumoniae
atgaaggacaaaattctggttagcgcctgcctgatgggctttcaggttcgctataacggcagtcacaaagcccaactggctaacgcgctgtctcgctggcagagcgaggggcggctggtcacccactgcccggagctggctgcggggttgcccatccccagactaccggcggagatcctggacgcacagggagcggacgttatgcgaaatcgtgctcaaattgtcgaaagcgacggccaggacgtcaccgcgcactatcagctggccgcctggctggcactaaaagccgcgcaggaggaaggctgtaccgcggcgctgctcaccgacggcagcccaacctgcggcagtcagtttatctatgatggtacctttaacggacggcgcaaacccggagccggcgttgccgccgccctgcttcgcgagaacgggattacggtattttccgaacagcaactgccgcagctgcttgcctggatgaaacaaagggagagtgacgatgattcaatgtaa

SEQ ID NO: 257519 - DNA, 1503 bp, Klebsiella pneumoniae
atgaaattacagaataaattactccgttatttcatttctgcgggggtggttgtcctgacatcttcgtttctggtgtatgaattagtcgccagccatcgggatatgtcagaatacatgcgatatatcatcgaaaagggcgaatccgccttcctgtacgataaatatcaaaatcagctcgtgatctcccaggtcgcgcgaaagctggatacgcatccgactgccgaaaaagcccaacaggcctgcgccagcgtcgagaacaagggtaaagtcttcggcctgaatatcgccgggcataccttccccgggcttcacggtacgctcagtaccacgcaggcgtcgtgcgggccatggatcaacgctctcccggcgctgcaggcatttgatgccgctatcgcccaaagcgatatgaactcagcgctgaatgcgacaacattcaaatcagacaaacgtttccgctactatcttgatttagataataagtatgcctatttctattcaccaattgagataaaaagcaatccagtcgccaactgggactttcttcacgacagcaaactgggcatcactcagaacagcctcaacggtttacttcgtggccgcacgctgatttccagcatctatgctgacgcgttaaccgggcagaatattttgtcatttttaaccccggtctatcatcgggatcggctgaagggcatcgtgatggtggatgtcactcgccatgatattgagaaacttctttacaccgccgaccgccctttggtctggcgctatctcgacatcacgttaacggactccgactcaacatctgaaatccgtgtacaccgcagcaacacgcattttttcagctatgcccaccatagccagaaggtagcggaaaacctgcatattgcgctgtcgctggatatgacctattttctgcttagctcctggaagctattcctgttttacctgatatctaccggcgttttactgcatctggtacgcatgcactttcgtctgtatatcgacgttttcaaagagaatattagtgattctttaaccggtctttacaaccgtaaaattctctcctcgctgctggaatcccgcatgcaaaagcttaccgagcagggggtgaatatcgtgtttatggcgctggactgcgaccggcttaaataccttaatgacacctgggggcacgacgaaggcgaccgcgcgattgtgctgctcgcgcaatccatttccgccgccatccgtaaaagcgattacggcatccgtctgggcggcgatgagttcttcctgatcctgatcgattatgaggaacaagaggcgcaaaatatccccgagcgtattcgccagcacctgagggcaattgacattaaccggcgcgttaatttctcatggggcgcctacagcatggcgccgggggatagcctggccgatgtaatgaaaatcgccgatgcccggctgtacgaaaataaaaagcaaaaaaagtatccttacccggggcgagaagaagaatcttga

SEQ ID NO: 257520 - DNA, 1158 bp, Klebsiella pneumoniae
atgatggaaaacgcagcggtgcaggcatccccccgaaagtttaaaaaaataagggagctaaacaggcgtcgtaattatttatttaagaaaatacgcaatgtcattcgagtctatatcgctaaagcgttctgggatagtcgtgtgcgccgcgaagctgatttaacctctgttaaaacggtgttgctaatgcgtaatgaaggggcgatcggcgacgtggtagtagattcagcgctggttaaatgcctccataaggcaggtatgaccgttgattttcttttaacgaaatcaaacagtcaggtcatgcgtgataatccacatattcgccatatttatgaagctgagaatgtcgactcggcggcttatctgcgtaagtttacccataacgttcctcgctccgttattaatgagcttgcgaataataagtacgatattgtaattgacccgtcgctgtttgatattccggttcaccgcatgctgcttttacggcagataaaacccaggtcggtactgggatttaataaatggccctccatcaatcactatacccggtcttttgattttgactgtgaaaactggcacgtcagcaagacattttcgatcatcgctgattatctgcagctggataagaaatatctgcactcttatgacctgcatatcccgcaggatgttaatcatcaggttcgtgaatatctggcggcgctgaacgggcgtaacgtggtgattaatatttttgccgggcatcaggaccgtagtatgtcgcagacgcagctggctgcgcttatcgccaggctgtgtcaggattatcccgacgtcaacatcatcctgctcgatcaccgcgatgaaatccgcattcccctggcggaaaaggtctgcgtgaatccgtttaaaacgctgcatcactgcatggcgcttattgcccaggccgatttagttatctcaccggatacttcggtggtccatatggcggcggcgtggaaaaaaccgcttatcgcggtctacaaagatgtgcggatgaataatcgactctgggcgccgggatacgacaaggcgcggcagatcatcgttaagtgcggcaaggtgcatcagctggagagcttgcccgacctgattatgtcggagattgatcccggtactttgcaacaggggcgggccgggtaa

SEQ ID NO: 257521 - DNA, 1284 bp, Klebsiella pneumoniae
atgacctggttcatagaccgacgcctgaacgggaaaaataaaagcgccgtcaaccggcagcgctttctgcgccgctataaagcgcagataaagcagtcgatctccgaggccatcaacaagcgctcggtgaccgatattcagagcggagagtccgtctccatcccaacggacgatattaacgaaccgatgtttcatcagggacgcggcggcctgcgcaatcgcgtacaccccggtaacgatcactttgtacaaaatgaccgtatcgaacgccctcagggcggcggtggcggtggaggcagcggtcaggggcaagccagcgccgacggcgaaggccaggacgagtttgtctttcagatttcgaaagacgaatatctcgatctattgttcgaggatctcgccctgccaaatttgaagaaaaaccagcagcgccagctgacggagtataaaacccatcgcgcgggctataccgctaacggcgttcccgccaatatcagcgtcgttcgctcgttgcaaaactcgctggcgcggcgcacggcgatgaccgccggtaaacgccgggaactgcacgcgctggaagaagaccttgataccattagcaaaagcgaaccggcacagctgctggaagaggagcggctgcgcaaagagatagccgaactgcgggcgaaaatcgaccgcgtcccgtttattgatactttcgatctacgttacaagaactacgaaaaaaggccagaaccgtcaagccaggcagtcatgttctgcctgatggacgtctcgggctccatggaccaggcgaccaaggacatggcaaaacgcttttacatcctgctgtatctgttcctcagccggacctataaaaacgtcgatgtcgtttatatccgccaccatacgcaggctaaagaggtcgacgaacacgaattcttttattcgcaggaaaccggcggcacgattgtctccagcgccctgaagctgatggatgaagtggtcaaagagcgctacgacccggcgcagtggaatatctacgccgcgcaggcctcggatggggataactgggcggacgactcaccgctgtgtcatgaactgctggcgaagaagatcctgcccgtggtgcgctactatagctatattgagataacccgtcgggcgcaccagacgctgtggcgggagtatgaacacctgcagtcgaccttcgaaaactttgctatgcagcatattcgcgacccggaagatatttatccggtatttcgcgaactgtttcacaagcagacctcaaaagcggacggttaa

SEQ ID NO: 257522 - DNA, 855 bp, Klebsiella pneumoniae
atggcagaaaggaccattcgttttggcgagcatccggcggttcccgttatcgggcaggggacctggtatatgggtgaaaacccggcgctgcgcgcgcaggaggcggctgcactgcgcgcgggcatcgatcttggcctgacggttatcgatacggcggaaatgtatgctgacggcggcgctgaagaggtcgtcggcgaggcgattcgcgggcaacgcgatcgggtggtgctggtgtctaaagtctatccatggaatgccggtggacgcaaaatagcccgcgcctgcgaggccagcctgcgccgcctcaataccgactatctggatctttatctgctgcactggcgcggagattattctctacaggagacggttgccggcatggaagcgctggttgcgcagggtaaaattcgccgctggggcgtgtcgaatctcgatgaggatgatatgcaacagctctggcaggtggagggcggcgaacggtgcgcgaccaatcaggtgctctatcatctggcttcccgcggcattgagtatgacctgctgccgtggtgccagcagcggcggctgccggtaatggcctattgtccgctggctcaggccggtcgcctgcgcaatggacttttaaatcataccgttgtgaaaaatattgcgcaggagcggggcgtgaccgcggcgcagattctgctggcgtgggtgattagccgccgggaggtactggcgatcccgaaagcgtcgagcattgagcatgtcgcgcagaatgccgcggcgctggatattgtgctgaacgatgaggagcttgcgcttctcgataaagcttacccggcgccggccagaaaaacgccgctggatatggtgtaa

SEQ ID NO: 257523 - DNA, 996 bp, Klebsiella pneumoniae
atgactatcaaagtaggtatcaacggttttggccgtatcggtcgcattgttttccgtgctgctcaggaacgttctgacatcgagatcgttgcaatcaacgacctgttagacgctgactacatggcttacatgctgaagtatgactccactcacggccgtttcaacggtaccgttgaagtgaaagacggtcatctgatcgttaacggtaaaaaaatccgtgttaccgctgagcgtgacccggctaacctgaagtgggacgaagtgggtgttgacgttgttgctgaagcaaccggtatcttcctgaccgacgaaaccgctcgtaaacacatcaccgctggcgcgaaaaaagtcgtactgactggcccgtccaaagacaacaccccgatgtttgttaaaggcgctaactttgacaaatacgaaggccaggacatcgtttccaacgcatcctgcaccaccaactgcctggctccgctggcaaaagttatcaacgacaacttcggcatcatcgaaggtctgatgactaccgttcacgcaaccaccgcaactcagaaaaccgttgatggcccgtctcacaaagactggcgcggcggccgcggcgcagctcagaacatcatcccgtcctctaccggcgctgctaaagctgtaggtaaagtcctgccagaactgaatggcaaactgaccggtatggcgttccgcgttccgactccgaacgtatccgttgttgacctgaccgttcgtctggaaaaagctgcttcttatgaagaaattaagaaagcaatcaaagctgcttctgaaggcgcaatgaaaggcgttctgggctacaccgaagacgacgttgtatccaccgatttcaacggtgaaatctgcacttccgtattcgacgccaaagcgggtatcgctctgaacgacaactttgtgaaactggtttcctggtacgataacgaaactggttactccaacaaggttctggacctgattgctcacatctccaaataa

SEQ ID NO: 257524 - DNA, 2136 bp, Klebsiella pneumoniae
atgctcacccccctgctacgccgctatacccggaacagcgcctggttatataacatcaggatttttatcgccctctgcggcacgaccgcgtttccctggtggcttggcgaagtaaaactcacgattcctttaacgcttggggtcgtggcagcggcgctgaccgaccttgatgaccgactgacaggacgtctgcgtaatctggccattaccctcgtgtgcttttttattgcctcggcctcggtggaactgctctttccctggccgtggttattcgcagcaggattaaccgtttctaccatcggctttattttgctcggcgggttgggccagcgctatgccacaatcgcctttggtgccttgttaatcgccatctataccatgctgggggtaacgctttatagccactggtatctccagccgctgtttttgctggccggggcggtgtggtacaacttactcaccctcgcaggtcatcttattttccccatccgtccccttcaggataaccttgcacgcagctacgagcagttggcgcactatctggaacttaaatcgcgcctgttcgatccggatattgaagatgaaagccaggctcctctgtatgacctggccatagccaacggccagctagtggcaaccctgaatcagaccaaagtttccctgctgacgcgcctgcgcggggatcgcgggcagcgcggaacgcgtcgcaccctgcagtattacttcgtggcacaggatatccacgaacgcgctagctcttcgcatattcaataccaaacgctgcgcgatcgctttcgttacagcgacgtgatgttccgcttccagcgaatgctgtccatgcaggcgcaggcctgccagaaactgtctcgtgccatcctgctgcgcgaaccctatcttcacgatactcactttgagcgcgcttttatgcaccttgacgccgcgctcgatcgcgtaaaagccagcggcgcgccggcagaacagattaaggcgttagggtttttgcttaataacctacgcgcaattgacgcccagctggcgacaattgaatctgtccagaccaccgcgcagttcagtaacaacacggaaaacctgctggctgacgaccagcctggcggttttggcgatgtctggctgcgcttacgcagtaatatgtcccccgagtccgccctgtttcgccatgcggttcgtatgtcgttggtcctgtgcgctggctacgcttttatccagctgaccgggctgaatcatggttactggatattgctgaccagcctgtttgtttgccagccaaactataacgcgactcgacaccggctggcgttaaggataatcggtactctcatcggcgtggcgataggtctcccggtgctgcttctcgttccgtccgttgaaggccagctgtttttaattgttttaaccggcgtgctgttcttcgctttccgtaatgtgcagtacgcccatgcgacaatgttcattaccctcctggttttactttgcttcaacctcctgggtgaaggttttgaagtcgccctaccgcgcatatttgatacgctgatcggctgcgctatcgcctgggccgctgtcagctttatttggcctgactggaaattccgcaatctgccgcgagtactcgaacaagcaatcaacgctaactgccggtatttagacgccatacttgagcaatatcatcagggacgcgacaaccgccttgcctatcgcattgcgcgaagagccgcgcacaacagggacggtgaattggcatcagtagtctcaaacttatcaactgaaccaagagcgggctcgcaaattcgagaaaccgcgtttcgtttgttgtgcctgaaccacacttttaccagctatatttcagccctgggcgcccatagggaaaagctgacaacgccagatatcctggcgctgctggacgatgccgtttgttatgttgatgacgcgctgcaccactcgccggccgatgagcagcgggtacagcaagctctagcaagcctgcagacccggatacagcatctcgacccccgtgccgagagcaaggagccgctggtgcttcaacaaatcggactgcttctggcgctgctgccagagatttgtcggctacagcgacaggttgagattcaacctgaatag

SEQ ID NO: 257525 - DNA, 2256 bp, Klebsiella pneumoniae
atgcgtttaccacaacttgcgggctgcgtgattatcggtatcctgccgctactctggttgcccgttctgcccgggcggtgggttacctgggggttaatggtcctggcgctactcattgcgcaatgtcggcgcagacctgcgcaatacgcggcattgataacgctgttttttgtctggggagtgctcagcgctcgccagacgctatggccgacagagaggttaacggacaggaatcagcgggttgaagttgagctgaccgcaacggacgggcagacaacgcatcagggcaaaattattcgtctggatgggcgtcggctgtttcctgctccggggattagcctctacggcaactatctgccagaaacgccctgcgcaggccaggtttgggccatgacgctgcgggcgcgtccagtccacggtcagctcaacgatggcggtttcgatagccaacgctatgcattagcgcagcatcgtccgttaaccgggcgctttatcacggctgaaatccgggagcgaaactgcagtttgcgagcgcgttatctggcttcgctgaatcacacgctggccgcgttgccgtggcaatcggtgatgctagggttaggcatgggggagcgtctggcgatacctcgcgagataaaatccctgatgcaggaaaccggcatatcgcacctgatggcgatttctggcttacatatcgcgctgggggcttctctgggctggttgctgctcaggggcgcgcaattctttctcccgtgccgctggcttggctggcgggcgccgctgcttatgggcctggcgagcgcgatattttacgctgggctaaccggcatgcagccgccggcgctgcgcacctgcgtcgcgctggctgcggggggcgcgctgaggctatccggaaaacgctggtcgccatggcagctatgggtctgctgcattggcgcaatactgtttgccgatccgctggcaatgttatccgaaagcctgtggctatcagcgttcgccgtagcggcgcttattttctggtatcaactggcgccgatgccggccggcaaaaagaactggctactgcgtcaaagccttgcgttatgccacctgcagatcggattgatgttcctgctcgctcctctacagatcgctctgtttcacggtataagcttaacgtccgtggtcgccaactttatcgccgtgcctctggtgacctttgtcgtcgtcccgttgatcctggcagccatgtttttacacctctgcgcgccgtctatcattgagatggcggtctggcaatcagcggacaggatcctggctatcttattctggttattacgccagctgccgtccggctggctggggcttgacgctcgctggcttgggataagcatagtgccgtggctggcgctgatcgtctggcgctttcacgcctggcggacggcgcccgcattttgcttgacctgcctcgtgctgctgagcaggccgttctggcgaagcgcctcagttgacgaatggcgagccactatgctggacgtagggcaggggctggcggtggtcattgaacgtcagggcgcggcgtttctctatgacaccgggcttgcctggcctgatggcgacagcggccagcagattattatcccgtggctacgctggcaccatttgcagctggaggggatcgttctcagccacgagcatctcgatcaccgcggtgggctcaactcagtgttaaaagcatggccgcagacagcggtgcgcagcccgctgggctgggctggtcatttagcgtgccggcgcggagaaacctggcagtggcgaggcttaacctttcgcgcgctttggccgctgcctggggcgacaaaagcgggaaataatcgctcttgcgtggtgcgaattgacgatgggcagtacagtattctgctgaccggggatattgaaacgccggcggagctggcgatgattagccactactggcagcatcttgcgtctacacttatccaggttccgcaccacggcagtaatacctcgtcagggatagccctactgcggagcgttggcggcaaggcggcgcttgcttccgcttctcgctataacgcctggcgtatgccatcagcgaaagtgattcagcgctaccggaatcagcgttatcaatggttcgatacgccgcatcaggggcaaattacggtcgttttttccccggacggctggcaaatccatggcttacgggatcaagttttacctcgttggtatcatcagtggtttggcgggaaggcgtag

SEQ ID NO: 257526 - DNA, 768 bp, Klebsiella pneumoniae
atgtcgacgactttaaccttcaattttcaacaccgttcgctggtgccttttgcccatgattacgctcatggcgatagcgaaccctggcatcagcacgattgcgcccaactgctgcatattctcagcggcgtggtgcgggtggaaactgcgcatggctactgggtcgtgccgccggggcgaggcgtctggctgcccgccggtaccccgcacaccctacgggttaccggcgctgcggctgcgcgaaccctatttatcgatcccctcgcgcgcgccgatcttcccgctgcctgccagatagtgcaggtgactccgctgctgcgtgaactgattgtcgcgtcgctgacgctggcggaatcctacgcgccgggcagccgcgatgaacgcatctacgaactgatccttgatgaaattcgcgtcatggcggtgctgccgtttggcctgccggagccgcaaagcgaagcgctgcgccgtttatgccagaaggtaagagaagcgcccggcgactcgtggagcagcgccgaggcggcgaaagagagcagcatgagcgagcgcacgctgaatcgtcattttcagcagcagaccacgctcacctggagtgaatgggtgcgccgggcgaagctgatggaagcgctggttcgcctggcgcaggggcagtcggtactgcgggtggcgctggatctcggctacggtagccacagcgcttttagcgctatgtttcgccgggtaacaggcgtcgcccccagcgactacttccgttcgccggagtaa

SEQ ID NO: 257527 - DNA, 624 bp, Klebsiella pneumoniae
atgtcatacagtggcgaacgagacaactttgcaccccatatggccctggtgccgatggtcattgaacagacctcacgcggcgaacgttcatttgatatttactcccgtctgctcaaggagcgcgtcatttttctgaccggccaggtagaagatcacatggctaacctgatcgtggcgcagatgctgtttctggaagcggaaaacccggaaaaagatatctatctgtacattaactctccgggcggcgtgattaccgccgggatgtcgatttacgacacgatgcagttcatcaaaccggacgtcagcaccatttgtatggggcaggcggcttcgatgggcgccttcctgctgaccgcaggggctaaaggtaagcgtttctgcctgccgaactcccgcgtgatgattcaccagccgctgggcggctatcagggccaggcgacggatatcgaaatccacgcccgcgaaatcctgaaagtgaaaggccgcatgaatgaactgatggcacatcatacgggtcaatcccttgagcagatcgagcgtgataccgagcgcgatcgtttcctgtctgcctcagaagcagtggaatacggcctcgtcgactccattttgactcatcgtaattga

SEQ ID NO: 257528 - DNA, 1275 bp, Klebsiella pneumoniae
atgacagataaacgcaaagatggttcgggcaaactgttgtactgctctttttgcggcaaaagccagcatgaagtgcgtaagctaatcgccgggccgtccgtgtatatctgcgacgaatgcgttgatttatgtaacgacatcattcgcgaagaaattaaagaagtcgcgccgcatcgcgagcgcagtgcattgccgactccccacgaaattcgccaccatctggacgattacgttatcggccaggagccggcgaaaaaagtgctggcggtggcggtatacaatcactacaaacgtctgcgcaatggcgacaccagcaacggcgttgaactgggtaaaagcaacattctgctgatcgggccgaccggctccggtaaaacgctgctggcggaaaccctggcgcgtctgctggatgtgcctttcaccatggcggatgccaccaccctgaccgaagccggttacgtgggtgaggacgtggagaacatcatccagaaactgctgcagaagtgcgactacgacgtacagaaagcccagcgcggtatcgtctacattgatgagattgacaaaatttcccgtaaatcggataacccgtcgatcacccgcgatgtttccggcgaaggcgtgcagcaggcgctgctgaagcttattgaaggtaccgtggccgcggttccgccgcagggcgggcgtaagcatccgcagcaggagttcctgcaggttgatacctctaaaatcctgtttatctgcggcggcgcgtttgccggtctggataaggtcatttcccaccgtgtagaaaccggctccggcattggtttcggcgcgacggtgaaggcgaagtccgataaagccagcgaaggtgaactgctgtctcaggttgaaccggaagatctgatcaagtttggtctgattcctgagttcattggccgtctgccggtcgtggcgaccctgagcgagctgagcgaagaagcactgattcagatcctcaaagagccgaaaaacgccctgactaagcagtatcaggcgttgttcagccttgaaggcgccgagctggagttccgcgacgaagcgctggacgctatcgcgaagaaagcgatggcgcgtaaaaccggcgctcgtggcctgcgttctatcgttgaagccgcgctgctcgataccatgtacgatcttccgtcaatggaagacgtggaaaaagtggttatcgacgcttcggttatcgatggtcagagcaagccgctgctgatttacggcaaaccggaagcacagcaggcgtctggtgaataa

SEQ ID NO: 257529 - DNA, 366 bp, Klebsiella pneumoniae
atgaaacgaggaatgaaatcgcttattgccgcggtactggtttgcgcggcggggagtcagatagcgcaggcggcgccctctgcgggtaaagcgtcggcgacggtaaaggagagcgtgcagtcgccgcaggcaaaagcgccggatgggttaaacgcggccgatagtgaaggcaccagggtgagtattaatcacgccagcgcggaggagttggctaaggcgttgaatggcgtcggtctgaagaaagcgcaggctatcgtgagctatcgcgaagagtacgggccgtttaaaaccgttgacgaccttaagcaggtccccggtatgggcaactcgctggtagagagaaacctgtcacatctgaagctgtaa

SEQ ID NO: 257530 - DNA, 234 bp, Klebsiella pneumoniae; identical to SEQ ID NO: 189877

SEQ ID NO: 257531 - DNA, 741 bp, Klebsiella pneumoniae
atgattgggccaatcattaactccacttcaacgcttatcggcgggatcgtcggcggcttaattggcgatcgcttaagtgaaaaattccgtactgcgctacctctgacttttggtgcggcctccatgggaatgggaataacggtcatcattaaattacacgcgctgcccgtagtcgtcgcgtcattactcttcggcgctattatcggtgaaatattttctatcgagaaaaagattggccgcggcgcatctaaattacgttttattatcgataaaattgccccgcaaaaaagcggcagcacattatcacaagaggagtatctcgataaattcgtggggattctggtgctgttcgtggcctcgggaacgggcatatttggcgccatgcaggaagggataaccggagacatatccatcctgttaaccaaatcattcctcgatatcctgaccgccggtatttttgccaccctgcttggcctttcggtcgcgactatcgcgatcccgcaatttatcgtccagatgattctgctgttcatcgggcaatcaatcatgccaatgctaacgccagaaatggttgcggatttctccgggcttggcggttttattatgtttgtgacgggattgcggatctgcggtattaaatccttcccggtagcgaatctacttccgggactgatcatcgtcatgcctctctcatggctgtgggtctcaacgctattgccgtggatccagtcgattagctaa

SEQ ID NO: 257532 - DNA, 1485 bp, Klebsiella pneumoniae
atgcccatggaacaaccaaaagtgacggatctgcgctccgcattggctgtattaagccattacgatgatgaattgatctataccgatgaacctgttgatcctattgccgaattatctggcgtataccgctacgtcggggcgcacggcaccgtccagcgccctactcgcgtgggcccggccatgatttttaacaaaatcaaagggtacgacgacgtaaaggtgctcatcggtctactttgctcacgcaagcgcgtcgcccacctgtttggcaccacgcctgaaaacctggcgtttatgctaaaagactccgttgacaaccctattgcgccgatagtcatcccacgcgacaaggccgcgtgtcaggaagtcgttcacctggcgaccgatcctgatttcgatatcctgaaaatattgcctgcgcccaccaatactccggaagatgccggcccctactttactctcggtatgtgctacgccgccgacccgcaaaccggtgaacgtgacgtcaccattcatcgtttatgcgtccagagtaaagatgaaatatcaatgtattttgttccaggccgccaccttgatactttccgccagaaagccgaagccgccggaaaagcgctgcctatctctatcagtattggcgtcgatccggcaattgagatcggcgcctgcttcgagcccccgacaacgcctttaggttttgacgaactgtcaattgccggtagtttgcgcaaccagcctgtagagcttaccgagtgcgtgagcgttaatgcgcttgctatcgctaacgctgaagtcgttatcgaaggcgaactcttaccgaacgtgagagtgcgtgaagatcagaacaccgataccggtaaggctatgccggagtttccaggctacaccggcagcgctcaggctcaggttccggtaatcaaagttaaagctattactcaccgccgccatccaatcctgcaaacctgtattggagcaagcgatgagcacaccaatctggccgggatcccaacagaagccagtatcttgcaaatggttgaaaaggcattgcctggtttcgttcagaacgtgcattgcccatcgccgggcacaggcaaatatctggccgtgctacaggttaaaaaacgcacgccagcggatgagggcaggcagcgccaggccgcgcttctcgcgttttcggctttctcagaattgaaacatgtcatgttgattgatgaggatgttgatgtttttgatattaacgatgtgatgtgggcgatgacaacgcgctaccagggggatgtcagtactatctttataccgggtgtacgctgccatccgctcgatccgtcatccgatcccgcattcagcccatcaatactcggccacgggattgcctgtaaaacgatttttgactgcaccgttccatggaacctgaaagcgaattttcagcgcagcaaattccttgaggtggatgttaatcgtttcattccgggcttcaaaaaatag

SEQ ID NO: 257533 - DNA, 942 bp, Klebsiella pneumoniae
atggattatcggcaattacatgcttttgtggtactggcgcaagagctgcatttcggacgggcggcgcagaggcttaacgttacccagcctgcgctcacgcagcagattaaaaaccttgagaatacgttgggcctgatgctgtttgttcgcgatcggcgcaatgtttcattgaccacagaggggctatttttgattgacgaggcgcgagttattcttggtcactgcgataagttcctcgaaaatgtaaacagcctgcgtctggggtataaaggacagttaaaagtcggctatgttgggtcatctattctcgatccggcattgacattgttaataaaaaactatcggcataagaaatcagagaccgatttgataatagaagaacataacgctcatagtttattaacattgttactggataaacggatcgatctggcttttgttcgttcgccaataccgcaatatgaacagctggaatatatgaatattgccacgcgttcgcttattgccgtcctgccgcgtaaccatgaactgggtaaccggcggaaaatctccctggcgttactggcgaaagaacaattttttatgcaaaaggacccttacggcgtgggcctcggctggtcggcaattaacgcctgccagcaggccgggtttaccccgcagaaaattcagtatacccgtgatgtatcggtggctattggcctggtttcaatgggaatgggtgttgctctggtgccagaaacgcagagttcgatgctgatgtccgatgtaagctactgcctgctggaggaaacatttgccactaccacgctcactctgtgctggcggcggcatactaaaaataacatcctgcgcgattttataaactacacccgggagctcaccgaccgtcagcaccacagggcgactcaaagcgtggcagcccaacggtctgacgatctttga

SEQ ID NO: 257534 - DNA, 408 bp, Klebsiella pneumoniae
atgagtgaatcaccgcgtttaatcactaccctggcgatgccgccaatcgatgaagtcaccgttcccttccgcggtttaaactttctgcgcccggagctgcttcttgattttgtgaccattagccaaaatccgctactcgccgtcaccccggtcgcgctgctctactctagcgtcggcgtccttcagcacattgaattacgtaaactccctatcgaagtcagcggtcgcgtggtctatccaatatcaacgcttaagcttccggccatgcgcgcaaaactggtgattaacgctcagtcaaaacgcctgaagtttcttgaaaccctgctgaccaatataccgaatgagaatgtccatggcatgcaggtgcttggcctggcgctggaatttaccgttgttaaaacggcttaa

SEQ ID NO: 257535 - DNA, 1455 bp, Klebsiella pneumoniae
atgaatattccggatgatgctttttttactttactcgagcaggccctgcgcggtaaaggaagtgaaaccctacagcgtaccctctatcagcaactgcgcgaggctattttgcagggcacgctggcgggcgatagtcgtctacccggttcgcgcgccatggcgcagcatctggggctgtcgcgcaataccatcaacagcgcgctggagcagttggcgatagaaggatatctattgcgtagtcgccaggggacgtacgtcgcgcccttgaggtctcagggagaaggggacattgaggcgcgcgttattgtgctccctgaatatttacagggactgccggcagcaattcaccgtgattcgcccacgctgctctttacgccgggaatgcctgcggttaattactttccactttccatctggcgtcgactgctcgatcgggtactgcgcgaagaggccagcgcattactgggctacggcgatgcgcagggagagctcgtactgcgaaaagccattgcccggcacctcgcgctctcccgggggatccgctgcgaagccagccagattgtgattactgaaggggcgctggaaggcgtcgatttatgcacgcacctgctgagcgtagccggcgatagggcatgggtggaagagcccggttatccgggagcaaaaagcatctttctcaaatcagggcttcatataaagggcgtaccggttgatcgtgaaggaatgcgttttgatacctctgatgatggcgaagcgccgcgattgatctttacttcaccttcacatcaatacccctgcggagccgtcatgagcgccgggcgacgactggcgttactggaatatgcccgccggtatgattcgtggattattgaggatgattatgacagcgaatttcgctatagcggtgagcccattccggccatgctggggatggcgaagcacgggccggtggtttatctggggacgttcagcaaaacgctgtttccagcgctgcgcatcggttttatggtgatgcctcccgcgctggcggacgctgcacaaggcgccattggggcgctattacgcggcgggcaccgggctgaacagaaggcgctggcgttgttcattgaagaggggcactacgcacgtcatttggccgccatgcgccgtttgtaccgcaaacgccagcagcagctgcgggacgtccttgctcaagaacttaaccatccttatgaactcttgggcggcgaggggggcttgcacctgaccgtcgctatcgacaacgtggatgaccaggcgattgcgcagcaggcccggcggtttcagctggcgcccggggcattaagccgtttttatcttgatgcaaaaacggcgcgaagcgggttggttctgggctacggaaatacgtccgcctcacattttattgctgcggtacggacgctcaatcgtcttattgcgcagaaccgacgcgagtaa

SEQ ID NO: 257536 - DNA, 150 bp, Klebsiella pneumoniae
atgataatggtggcgactttgaagaaggagaaccagaactccagctcgccgaagaccttcacgctcatcaggttgacggcgcagataatcaggaccacgctgagcacccaaacccagtgcggtaccgccggaaaccagacgcccatatag

SEQ ID NO: 257537 - DNA, 363 bp, Klebsiella pneumoniae
atgcaaagtttacttattttgatcgccggcccggtacgcagcggcaccaacaatcgcgcggaacttatcgaggctaatctgcacaatatggcccaggttgcgctacgcgtttaccagaaagggcatattcccgtggtcggcgaatggctggcgttacccgtcgctaaagcggcgggctccaaagcaattggcgatgcgattagcgaagagtatctctaccccgtcgcccaccgtttaattagccgctgcgacgctattttgcgcatgccgggcgaatcccggggagcggacctggatattgaggaaggcaaaaaacgagggctggcgatttactctgctcttgaggagatcccggagcggtaa

SEQ ID NO: 257538 - DNA, 666 bp, Klebsiella pneumoniae
atggcaattttgaccattggggtagtaccggtggcggagatgttaccgcttttaactgaacatatcagggaagaacagatcgaccacattagcctgttaggtaaaatggcgcgcgaagaggtgatgcgggactacggcattgagcccggcgatgagatgctattgaccttacttaacgacaatgaaatcgcgcaggtctcgcggcagaaggttgaacgtgttttacgtagcgtcattgcgatgctcgataaacaagattacgacctgatattactcatgagtacccatccctttcgtggatttacggcgaataatgcgatcctgcttgagccgcaaaggattatcccgccgctggttgcctcgattgtcgacggtcatcaggtgggggtcattgtgccggttgaagagattttgccgatgcagcgggataaatggcaggtgttagaaaacacaccgctgtatgccatctccaacccggttagcggtagtaaagagaatttactgtctgcgggcagggagctgattgagcaaggcgcggatgtactgatgttggattgtctttgctaccaccagcagcatcgcgacatattacaaaaggcgctggatatcccggttctgttgtcaaatgtgctagtttcgcgactggcggcagaactattagtttaa

SEQ ID NO: 257539 - DNA, 828 bp, Klebsiella pneumoniae
atgagcgtggtcatcaatgacaaaccgcgtcagcggggactgaagtggcgctggccgctctcgcgtcagctcagcctgagcgtggcgaccctggcggtactgctggctatctggtgggccgttgccgccctgcagttgattagtccgctgtttctgccgccgccggggcaggtatggcagaaactgatcgctattgccggtccgcagggctttatggacgccaccctctggcagcacctggcggcgagcctgacgcgtatcgtcatcgcgctgctggcggcggtgctgctcggcgtgccggtggggatcgccatggggctgagccccacggtgcgcgggatcctcgacccgctgatcgagctttatcgcccggtgccgccgctggcctatttaccgctgatggtgatctggtttggcatcggcgagacctcgaagatcctgctgatctacctggcgatattcgcgccggtggcgatgtcggcgctggcgggggtgaagagcgcccagcaggtgcgcattcgcgccgcgcaggctttaggcgccagccgggcacaggtgctgtggctggtgatcctgcccggcgcgctgccggagatcctcaccggcctgcgtattgggcttggcgtgggctggtcgacgctggtggccgcggagctgattgccgccacccgcgggttaggttttatggtgcagtccgccggtgagttcctcgccaccgacgtggtgctggccggcatcgcggtgattgccatcatcgcttttttactggaactggggctgcgcgcgctgcagcgtcgcctgacgccctggcatggagaagtacaatga

SEQ ID NO: 257540 - DNA, 771 bp, Klebsiella pneumoniae
atgatgctgcacatctcgcatctttccgccgactacggcggtaaaccagcgctggcggatatcaacctgacgctggacagcggcgaactgctggtggtgctggggccctccggctgcggtaaaaccacgctgctaaacctgattgccggattcgtgccttatcagcacggcagcatcaccctcgaaggccagcgggttgaaggaccgggagccgatcgcggcgtggtctttcagcatgaagggctgctgccgtggcgcaacgtgcaggataacgtcgcgctcgggctgcagctggccggggtcgacaaaacgcagcgccgggcaaccgccgcgcggatgctgaaaaaagtgggccttgaaggggcggaaaaacgctttatctggcagctctccggtggccagcgtcagcgggtcggcattgcccgcgcgctggcggcaaatccgcagctgctgctgctcgacgagccctttggcgcgctggatgcctttacccgcgagcagatgcaaaccctgttgcttagcctgtggcatgagaccggtaagaaggtgctgctgatcacccacgatatcgaagaggcggtgtttatggccaccgaactggtactgctctcgccggggccggggcgcgtgctcgaacggctgtccctcgattttggccgccgcttcgtcgccggggaatcctgccgcagcattaaatcggacccgcggtttatcgaacagcgcgaatacgtcctcagccgggtatttgaacaacgggaggctttctcatga

SEQ ID NO: 257541 - DNA, 963 bp, Klebsiella pneumoniae
atggcactatcatcgcgtatcacactcattgccgcgctggcgctggcggcatttcaggcccaggcggtcaacgtcaccgtggcgtaccagacctccgccgagccggcgaaagtcgcccaggcggacaacactttcgctaaagccagcggggcgaccgtcgactggcgcaagtttgacagcggcgcgagcatcgtgcgggcgctggcttccggcgacgtgcagatcggcaacctcggctccagcccgctggcggtcgccgccacccagcaggtgccgattgaagtgtttctgctggcctcaaagctcggtaactccgaagcgctggtggtgaagaagagcatcaccaaaccgcaggacctgatcggcaaacgcatcgccgttccttttatctccaccacccactacagcctgctgtcggcgctgaagcactgggggattaaaccgggccaggtgcagatccttaacctgcagccgccggcgattatcgccgcctggcagcgcggcgacattgacggcgcctacgtctgggcgccagcggttaacgcgctggaaaaagagggcacggttctcaccgactcgtcgcaggtgggcgagtggggcgcgccgacgctggacgtgtgggtagtacgcaaagactttgccgaaaagcatcctgatattgtcaaagccttcgccaaaagcgccattgacgcgcagcaaccctatatcgccaacccggacgaatggctgaagcagccggaaaacatcagcaagctggcgcgcttaagcggcgtaccggaagccgacgtgccggggctggtgaaaggcaatacctacctgaccgccgcccagcaggcgcaggagctgaacgggccggtgaataaagccatcatcgacaccgcgaagttccttaaagagcagggcaaagtgcccgccgccggcagcgactacagccagtacgttaccgaccgttttgtaaagtaa

SEQ ID NO: 257542 - DNA, 777 bp, Klebsiella pneumoniae
atgaaccctcccgacgcctggaacccgctgcgcgaatttaccgatgcgcggattgcgctgggccgcagcggcgccagcctgccaacccgcgaagtgctgaatttcggcctcgcccacgcccgggcgcgcgacgctatccaccagcctttcgccagcgaccagttagtccagccgctggcggagctggggctgtcgacgctgaccgtgcgtagcgccgccagcgatcgccatatttatctgaatcgcccggatctcgggcgacagctgaacgaggagagccgcgccgacctcgccgccagcggcgcacgccccgccgacctgctgctggtgattggcgacgggctatcgtcgtacgccgtgcagcgccaggcggtgccgctgatccgcgctctgctgccgtacctgaaaaccctcgggctgagcctcgccccggtggtgctggcgcaccagtcgcgggtcgcgctcggcgatgatataggcgaaacgctgaaggccagagcggtggcgatattaattggcgaaaggcccgggctctcctcgccggacagcctcggggtgtatttaacctggcagccgcatcgccagcggctggagtcggagcgcaactgtatttctaatattcgtccggaagggctgagctttgatgccgccgcttttaagctggcctggctgctggaacaggcctttttgcggcggcttaccggggtgcgcctgaaagatgaaagcgataatccggcgctgcatggaaaaataaaacctttgagccaattaaaataa

SEQ ID NO: 257543 - DNA, 969 bp, Klebsiella pneumoniae
atgagcgatgtaatagaggttatcgttgacggtatctggcgccagggcagccagagcctcgctgtcaggctggtggcgcagaacggccaaccgctccccgcctggcagcccggcgcgcatattgatgtgcatctgccgtgcggccttatccgccaatattcgctgaccggcccggacggccctgacgacggctacctgatctgcgtggcgctggagaaagcgtcacgcggcggctcgcgctatatccatcagcagctgcgccccggccagacgctgttgatttctcccccgcgcaatctgtttcctttacgcacagcggagcgggtgacgctgctggcggctgggatcggcattacgccgctgtacgcgatggcgctcaggcttaaggcggaaggcgtgccgtttaccctgcactattacctgaaaaaccgcgcgcagggggcgtttgtccgcgaactgcagcggcggttcagcgccgaaagcgtggtgattcactgctcttgcgaaggagacagcgcccggcaacatttagccgccgcgctgaacaatacgcataccggatatccgatttatctctgcgggccggagggatttatgaccgccgcgcgtcgggccgccatggaacggggctgggcggaaacgctgatccatagcgaagcctttcagcccatcgctatacccgccggcgctgaggagggagaaacctttagcgtgacgctggcgtcctcgggagagcggtggccggtgcccccgcataaaactatcgcccaggtgctccaggaaaacggcgtcgccgtcccgctctcctgcgagatggggatttgcggcgcctgcctgacgccggttatcgagggggttgtcgaccatcgcgacaccgtacagtcggaggcggagaaatccgccagcgcgcagcagatcgccctgtgctgctcgcgcagccgatcggcgaatctgtgcattgatttatag

SEQ ID NO: 257544 - DNA, 1029 bp, Klebsiella pneumoniae
atgctcgaactctcctcaatctcaaaatcttttgccggtacacgggtgctcgaaaacctcaatctgacggtggccgcaggcagccgtacggcgatcgttggcccctccggctccggtaaaaccacgctgctgcggatcctcgcgggtttcgaaacgccggatagcgggcggattgtcatgcaggggcgcacgctgtttgcgcaggggacatttattcccgcccacctgcgcggggtgggctacgtgccgcaggagggcgcgctgttcccccatctgaacgtcgcggacaatatcgcctgggggctcgatggcagtcgccaggagaaatcccagcaggtagcggcgctgatggagagggtctcgctggacagccaactggcgaaccactggccgcacgaaatttccggcggtcagcagcagcgcgtagccctggcgcgcgcgctggcacagcggcccgcgctgatgctgctggatgaacctttttccgcccttgataccggactgcgcgcggctacgcgtaaagccaccgccgatttactggcgcaggccggcgtcgcgtcgattctggtcacccacgatcagaatgaagcgctctcctttgccagccaggtcgcggtgatgcgtcaggggcgttttgcccaggttggtacgccgtatgaggtctacagtcacccggttgatgaagagaccgcgctttttctcggcgatgcgctggtgctgcccgccgagctgcgcggcggccgcgcgcgctgcgcgataggcgaactcttaaccgacaatccgcaggccgtcggccagggaagggtgatgctgcgccccgagcagctggttatctctccctgtccggcggatggacaaccgcttaccgtacgcgatgtggactttagcggccatctctcgacgttaactctggcgatgcccggccagaaagagcccctgatcgtcaaaaccgtcagccagccgttatggcggccgggggcggcggtacgcattgaggtggtgggcgaggcgcgggttttcgcccgctag

SEQ ID NO: 257545 - DNA, 1575 bp, Klebsiella pneumoniae
atgtcttctctgagtttcgcgctcggaaaaaaagcccaacgcctgcccaagcgcaggcgtcctgcttttccgatgatcgcgttagccgttctgttttctctgctggcgctcttgccgccgggttttgttattgccgtgggggtcgataccggctgggagacaatccgggcgctggtctttcgtccgcgcgtcgctgagctgttgagcaacaccctgtggcttatcgcgctgacggtaccgctgtgcattgcgctgggcgttggcctggcctggctgacggagcgcacgctgctggcggggcggcggctctggtctgtgctggcggttgcgccgctggcgatcccggcctttgtgcaaagctacgcctgggtcagcgcggtgccggcaatgcacggcctgtctgccggggtgtttctttcgctgctggcctattacccgtttatctatatgccggttgccgccgttctgcggcggctggacccgacgctggaagatgttgccgcctcattgggtacgccgccgtggcggatctttttccgcgtggttttgccgcagctcaggctggcgatatgcggcggcgcgctgctggtggcgctgcatctgctggcggagttcggcctgttcgcgatggtccgtttcgatacctttaccaccgccatctatgaccagttccagtcaaccttcagcggcccggcggcgaacatgctgggcggggtgctggcgctttgctgcctggccattttgctgctggaaggggcgtcgagggggaaggcgcgctatgcccgcatcggttcgggcgccgcgcgcgaacagcagcggcagccgctgggccggctgtcggcgatccctcttcagctcgcgctgctgacgctggtgatgctggcgttgggcgttccgctgatggtgctttgccgttggctctggctgggcggcgtggaaaactggatgagcgccgacctgtggctctccctgcggcaaacgctgctgctcggcgcggtgggcgcgctcctcaccaccgcctgcgcaattcccatcgcctggctgggcgttcgctatccgcagcgtttttttcgtctgctggaggggtgtaactacatgaccagctcgctgcccggcatcgtaacggcgctggcgctggtgacggtcaccattcactatgcgcgtcccatctatcagaccgaggtcacgctgctgctcgcctggctgctgatgtttatgccccgggcgctggtcaacctgcgggccgggatcgcgcaggcccccgtcgagctggaaaacgtcgcccgcagtttaggccgcagccccggccgggcgctgtggagcgtcaccatgcggctggcggcgccgggcgcggcggcgggggcggcgctggtgtttctcggcatcaccaatgaattgaccgccacgctgctgctctcgccactcggcacccgcacgctgtcgaccggcttctgggcgctgaccagcgaaattgattatgtcgccgccgccccttacgcgatgctgatgattctgctttcgctgccgctgaccggcattctctatattcagtcgaaaaaaatcgcaggcctgtaa

SEQ ID NO: 257546 - DNA, 1017 bp, Klebsiella pneumoniae
atgcgttttcgtctggtgtcttattgctccgctgcattgatggcttcttccgcgtttattgctccgcaggcgctggcggcggccagcagcgacgggattgtggtctacaacgcgcagcatgaaaacctggttaagtcatgggttgacggttttaccaaagagaccggcattaaagtgacgctgcgtaacggcggcgatagcgagctggggaatcaactggtgcaggaggggacggcgtccccggcggacgtctttctgacggaaaactccccggcgatggtgctggtggataacgcgaagctatttgcgcctctggcggccgagacccttcagcaggtcgccccgcagtaccgccctgagcacggccgctggataggcattgccgcccgcagcaccgtattcgtctacaatccggcgaaaatcagcgaagcgcagctgccgaagtcgctgatggatctggcgcaaccgcagtggaaagggcgctgggccgcttcgccatccggcgcggatttccaggccatcgtcagcgcgatgctggcgctgaaaggcgagcaggccaccctggcatggcttaaagcgatgaaaaccaattttgtggcctacaagggcaacagcacggtgatgaaagcggtgaatgccggtcagattgatggcggcgttatctatcattactaccgctttgtcgatcaggcgaaaaccggcgagaacagcaaaaatacccgtctccactactttaaaaaccaggatcctggcgcctttgtcagcatttccggcggcggcgttctggcctccagcaaacatcagaaacaggctcaggcctttatcaagtggatcaccggcaagcaggggcaggatgagctgcgcaccaataacgcctttgaatacgccgttggcgtcaacgccgcgtctaacccgaagctgacgccgctgcaggcgttagaggcgccgaaggttgagccgtcttcgctgaacagcaaaaaagtggtcgatttgatgacccaggctggcctgctgtaa

SEQ ID NO: 257547 - DNA, 396 bp, Klebsiella pneumoniae
atgtcctggtaccctatgcgcaaccgtcggctccctggtaaatggtttttgatactgacctgcttcgtcatggcattctgccttgttcagcgggcggcctatctgcaccattttttggcggacgccagcgcccaggcgcaggagagcgttctcagcgcacaggcccagcagccctcttcagaggaggctgagcaagggccttcgccctgccagctgagcgccaaatccttgctctgcacgcagccgcttttctttgatggcgcattaccggccgttcttttattccttaccctgcttcagctgctcgccgcgggccgtccggtggttttgcgggacgatcccgttcgtccgcccacgctgcgaatacatctcaaaaactgcgttttccgtgagtga

SEQ ID NO: 257548 - DNA, 2025 bp, Klebsiella pneumoniae
atgctgaatatcttcaggggcttcgtcttcctgttactgacctgcgcgggcgttgcccacggggcggacacaggatggctgacatccccgcaacacgaccacgcccggatccgcttccaggcggaaaaaggcaaagatcggatcgacggactgctctctattgagctggcttccggctggaaaacctactggcgctcgccgggtgaaggcggcgtcgccccgcaaataatctggaacaacggcgaacgggcgcggtggtactggcctgccccgtcaagattcaagatttccggcctgacgacccagggctaccacgaccgggtggcgatcccgatgacgatcgccgccgtccccggcgacgtgctggaaggcacgcttacgctgtcgacctgcagcaacgtctgtctgctgaccgactatcggctgcatctcgatttcaatcagcccgcggacggcgagttccggaacgcctttgcccgggccatgcgcgctgtcccggcggataacggggtgacgaacgatctcgccgcgcatctggtcggtagccagctggtcatcaccgcgaccacgaccggcgaatggaaaaatcccggggtctattttgaccctatggacggggggattgtggccggcgatccggagattcgcgccgagggcgaccgcctcaaggtgacggtgccggtcaccgatgaatggggagaaatacccgccacgctggcgggaaaagcgctgtcgttggtgctgacaaatggcgaaaaagcgcagcagataaaccttacgactggcgccgatctcgcgccaacggcgacggttagtctcgggaaaatagtgcttttcgcgctgctcggcggcgtcatcctcaacctgatgccctgcgtgttgccggtgatgggcatgaagctcagcgcggtgctgcaggccggggccaatcggggcatggtccggctgcgctttctggccaccagcgcgggcatcctgacctcgtttgccctgctggcgctgatggtgacgatactcaagctcaccggcgcctcgctgggctgggggatccagttccagaatccctggtttatcggcgtaatggttgccgtcacctttcttttcgcgctgaatctgttcgggatagtcgagatgctgcttccctcggcagccgttagccgggtggcgaccgccggcggcgccgggatagcggggagtttctgcgagggcgtttttgccactctgctggcaacgccctgctcggcccccttcctgggcacggcggtcgctttcgcgcttgccgctccgtttcatgagctgtggctgattttcatggtgctcggactgggcatggctgcgccgtggctgttcgtcgccctgttcccgcaaaccgccgccctgctcccccgccctggccgctggatgaacagcctgaaaatggcgcttggcgtcatgatgctggcttccagcttctggctgacgacgctgctcggcgttcacctcggcgagacctccagcgtcgtgatgacgttgactctcaccgtggcggccctgatcgccttgttagtcgcccatcagcgaacggctcccgccttctggctggtggttatcgccctggcggcgtatggcggctttcaggttcgcggtctgctggcgcagggttccaccgtctcgtcgccgcaggctaacgctcagcaaattcgctggcagccccttagcgaggaggccatccgcagcgcgcgggctgaaggcaaacgggtgtttatcgatatctccgccgactggtgcgtaacgtgcaaagtgaatgaactccgggtgttaaatcagcccgccatcatccgcgcgctggctcagcccgatgtcgtggcgctgcgcggcgactggagcaagccttctgagccgatcgcccgtttcctgcagagccgcaatcgctacgccattcccttcaaccaggtctacggtccgggccagccgcagggagaaatgctgccgccgctgctcgataaacaaaccgtcctcaaggccctcaatcgtgccaaaggttaa

SEQ ID NO: 257549 - DNA, 723 bp, Klebsiella pneumoniae
atgaaaaaaacgctgctcaccctcgctctcctcccggcatctttgacggctgcggcgtcttcgccgcttacgccggcgcaggaggcccgcgtgcaggaactggttcaggagacgctaatcggccatcctgaaattttgatcgccgcggccgaaaaactcgatcggcagaatgcccaggccggacaggaatcgctaaagcaggtactgtcgcaggacggcgagtttatctttcacgaccccaactcaccgcgaatcggcgcgcaaaatccgaagctgacgctggtcgtctttaccgatcataactgcccgtattgtaaaaagtttgacccctatctggagaagattgtggaaaaatacccggacgttgcggtgatctttaagtttctgccctggcgctccgaaagctcaatgaccgcggccagggatgcgctcaccctgtggcgcacgcatcctgaacagtttgttaaatttaaccctatcctgatggcgaaaaaggggtatcacgacagtgccagcattgagcaggcgaaaaagaaggcgggggtcatggcggctcagccggatgcgcaaagcctggagacgattaagcgcagctttgctatcgccgaaaagcttggcattcagggaacgccggccacgcttatcggcgatgagatgctctcaggctggatcccctgggagcaatttgatgccacaatcggcgacgcgctgaaaaaacagtaa

SEQ ID NO: 257550 - DNA, 759 bp, Klebsiella pneumoniae
atgaaatactttttactgctggcggcctggatgatgccgggcctggcgcttgccgagggggctatcccccagatagttaaaaattttggtgaacagcaaggaatcaaaattattaaggagatagattcccccggcggcgtgaaaggctgggtcggtcagtatcaggatatgggagtgaccctgtttttgacgccggacgggaagcacgttatttccgggtatctttacgatgataaagggcaaaacctcagcgaggggtacttcaaagaagcgatctataccccgttaggccgcgaaatgtggaagaagctgaacgatgcccggccgctcaaggaaggcgctgattccgctgccagaaaagtgattgtcttcgccgatccgttctgcccctactgcaagtcgttctggtcagcggcgcagccgtgggtaaaagccggtaaggtccagctgaataccctgctggttgcctttctcaacccgaaaagcggccaatacgccacggcaatcctgaatgccaaagatccggtagccgcctggcaagagtatgaactctccggcggcaaaaaactcccgcgctttgacggcgtgacgccgcgcgaaacctttaatcttcttcagcataaccaaaagctgatggatgatttgggcgccagcgcgacgccggctatctattacatgaatgaacagaacgaactccagcaggtgatcggcatgcccgataagaagcagctggtggagatgttcgggcctgagccctga

SEQ ID NO: 257551 - DNA, 336 bp, Klebsiella pneumoniae
atggaacgcttatttgtctacggcacgctgcgtccgggccactcgaatgcccatattatggacaacattggcggtgagtggcagcccggctatgtgaaggggctgttttatgaacgcggctggggagcggcggcggattttccggggatcgtgctcgacaacaacgggcctcgggtcgacggctatctgttcctgtccgcgaatcttagcgcccactggccgatgctggatgcgtttgaagagggctacgatcgcgttgccgttgacgttaccacggaagacggccagcgcgtgaccgcctggatctatcagctacagccgaaggtcgcagcgtaa

SEQ ID NO: 257552 - DNA, 378 bp, Klebsiella pneumoniae
atgagtcagatagtacgaaaaaattaccctgaactgggcgaggtcaaggctccctacgttcattcggttaagcacggaaacacgctttatatttctgggctcaccgcgttcggtacccgagcgcagcatgacggaattgccgcccaggcggaggagatttttacccagatacgaaccgttgcccaggccgaaggcatcgatttttcgtctcttatcaaagtcacgatctttatcacttcttttgatgagctcgacgagctgcgcaaagtgctttaccggaactacggcgattgcttacccgccagctcgctcgttgaagtcagccgcctgttttctgcggatctcaaaattgaaattgaggcgatattcggcctgtga

SEQ ID NO: 257553 - DNA, 222 bp, Klebsiella pneumoniae
atgtcctcaagaattaaaggtctggtcaagtggtataatgagtcaaagggatttggtttcatttcacctctcgatggcagtaaagatatctcggtccattgctcggcgcttcgtggtgataattttaataccctgtttgaaggccagaaagttgaatatgccatactccatagagatgacaagggccctgctgccacccacgtcaccctgtgcgataaataa

SEQ ID NO: 257554 - DNA, 825 bp, Klebsiella pneumoniae
atgccaacaaaaattcatagattgctattgtcgctggcgatcgccgccgcgccttttttcagccatgccgaagagtccacctgggatcatattaagcaatcgggcgaattgcgcatcggagtcgcgcagggggaaccgtggtattttaaagatccagccaccggtcagtggaacggcattggctataacgtaggtaaagtactggcaaaagatttaggcgtaaaactggtgccggtggaaaccacctgggggaatgcggtcgccgcgctgcaggccggacagattgataccatgctggtgctggaccccaccgatgaacgccgcaaagccgccgacttttccgaccagcccttcctctggtatgcgcagggggtcctgatccgcgacggcgtgaaggccgagagctgggaagatcttaatcgcccggatattaagattggcgtcacactcggcagcagcccggacctgatactgaccaaaaaattacccaaagtgcagttggtgcgctttaccaatatggatgaaggcgtcgcagccttctacgccggacgcgtcgacgccctctcgtacgttcacccggcgctagcgctgcagcaggcaaaagtgcacaaaggcaacctgattctgccaaaaccgattattgccatcagcaccggcggcgcgctgcgcaaagagagcgatccccgcttccgcaacttcctgaatgaagagtttgccaaaatttaccagtcgggacagagcaaacagttttatgaagacgcccttaagctacgcggtgtggatatcagcaaagtgccctcggtgattaaagaagagtggaaatga

SEQ ID NO: 257555 - DNA, 1410 bp, Klebsiella pneumoniae
atgccaaactttgattctttaaccgctacgctggcgcgttttgccggcgaactcactccggctgcgataccggcgtcggtgaaagccaggatcgctctgcattttatcgatagcctgggctgcggcattgccggcggcgaagacagcgtgctgcgtaaaagcgcgcgggttattcggagccagtacgcgacgggcagaagcgtggcgcttgacggtggaactccgctctccgccagcggcgccgcgttccttaacgccgctgcgataaacgcgctggattatgacgatggttttgaagtcgccgggcgggggatggggcatcccggcgccacgctggtggccggggcgctggccgcggtgggccagggtgggccggtcagcggcggggcgttgctgacctctctggtggcggcctgggaaatcaacagccgcgtgattatctctcagcagccgagtcctgaaaggtttcaacaagtgtatggcgtgtgccagcacgaatcgctgggggcggcggtggcgtatggtttactgcgcggctgcgatgccgcggggctggaaaatagcctgggactggccgcctcgttaacccctttgcccacgttgcataagtacaactggcaggcgcgtccactggtttcgtttaaggattacaatgcgccggcggcagaggccggcgtacgcgcggtggagctacacctcgcgggaatagtggggccgcgcgcgatactcgatggcgaacaggggttctggcggatgtcaggctccgaccgctttcagccagaacggctgacggagaatctggcgacgcactggcagctcaggcacgccagtttcaaagactatccggtatgccgttggatgcatacggcgctggcgtcgtttgagcatctgctggagcgtattccgtcggcagagtcgattgagcggatacgcgtctatgggagtttcaccctggcgcgttttttcgccgacgcgcgtcccgtcagcaataccgatgcgcagttcagtctgccgctggcgatagcctgcctggcgtttaaaatcgcgcgtcatcagtggagcagcgatcggacgcgcggcgcggcgccactccttgcctttgctgaccgggttgaaattatcgccgatgagacctttgaacagctgatgctgcagcatcgccgtcccgccgcgcgcgtggaaattgtgctaaagggaaggacgatcgccggagagcgtatcgacttcccgccggggtgcgcagaaaatccgctgccggaacagcggatcgttgataaatgcgtggccaacctgtcatcacgcctcagcgctccgcgggcagcgcggctgattgacgctctgctggatatggaacgctgcgcggacattggcgcggcaatcgcgccgcttctgcccgcgccaggagattaa

SEQ ID NO: 257556 - DNA, 672 bp, Klebsiella pneumoniae
atgtcgtatcaatgggattttgccgccatctggccatatcgcatgctgttgctggaggggctgtggggtaccattcagatcggcgtcaccagtattttattcggcatgctggccggcattgcgctggcgttgatgaaggcctcgccgctaacgctcttccgtatgccggcgctgatactgatcggcttttatcgtaatactcccgcgatcgtccacttcttctggatctactacgctctgccaatcgtcagcccgctgacgctctcgccgttcgctgccgctgtactggcgctctccgcccagtcggccgcgttttatgccgaagtttaccgcggcggcatccagtcgatcggcgccggacaatgggaaggggcgaaggcgttgggcatgtcgcgcgccaccgcgctccgacgggttattttccctcaggcgctgcgcagaatgattcctcctttccttgagcgttctttcgaactgctcaaatccaccgcccttgcttcgtctctggcgtacagcgagctgctgtatcaggcgatgcaaatcaacagtcagacttaccggcccctggaagtgtattcgctcatcgcggtgatgtacttcaccctgctgctgattatcagccagggcagccagctgcttgaacgacgccttgccgtctccgacacacgttaa

SEQ ID NO: 257557 - DNA, 666 bp, Klebsiella pneumoniae
atgcattatcagtgggacttttcccttgtctggcaaaacttgccggtactgctgaagggactgggcgttacgctggagctatggctgctggcgggaattgtcggcacgctgctcggacttgccgttggcgtcgtccgtgcccgcgggccgcgctttttttatccccttaccagcgcctttgtcgaggtgttccgcaatacgccggtgcttatccagctcatctggttctactatgcctttccggtgctggtgggcattcagttttccacttttggcgccgccgcgctggcgttaaccctgtacaccgccgcctacagcaccgaaatttttcgcgccgggctacagtccatcgaacgcggacagtgggaaggggcaaaagccttaggcatgccgccgggcgtgatgctacggcgcatcatcctgccgcaggtatttcgccgtatgctgccagccctgacaaaccgcatgattgaactggcgaaggtgacctccctggcctcgattctcacggttaatgaactgatgtatcagggcaggctgctaagcagtacctggtatcgcccggtggagattttcaccgtcgtcgccctgctctattttgtgctgatctggcccggaagttacctggcggcacgactggagcgccgctaccgtccacatccttaa

SEQ ID NO: 257558 - DNA, 780 bp, Klebsiella pneumoniae
atgtcagagaaaaaagtcgtcatgcggatacgcgccctgcacaaacgctttggtgcgcaaagcgtgttacagggcatcgatttagatatctatgccggtgagaaaatcgccatcattggcggcagcggctcgggtaagagcaccctgctgcgctgtctgaactttatggaaatacccagcgctggcaccgtagaactggacggcgttaccctcggtaaaatcgacagccgcggtcagcggcgctatagcgaaaaacagctgagcgatgttcgccagcgcgtggggatggtgtttcagcaatttaatctcttcccgcatctgacggtactgcaaaatgtcagcgaagccctgatatcggtgaaaaagatgcgtcgcgaagaggcgatgcgcattgcccgcgcgcagctggaaaaagtggggctcggccataagcatcaggcctggcccggcagcctgtccggcggtcaacagcagcgcgtcgcgattgctcgcgccctggcaatgacgccagagataatattgttcgatgagcccacctcgtccctcgaccctgaactcgtgggggaagtcctgcataccatccgtgaactggcagatgagggacggacgctgctgctggtcactcatgagctgggctttgcctggcatttcgccgatcgggtgatttttatcgaaaacggcgtgattcatgaaatgggcaccgcggaagaggtgctgcgccatccgcgccaaccgcgcacccaggccttcctttcccgtttcgctgaacgggcattttaa

SEQ ID NO: 257559 - DNA, 966 bp, Klebsiella pneumoniae
atgagtttagctctctccggtcaaagcagtcaggcgtacctgcaggatacgcgcaacgacaatgtgcaagtgtacgtcaacggcgaattcgttcatcgcgatcgcgccacggtttccgttttcgattccggctacgtctgcggcgacggggtctgggaggggctgcggctggtaaacggcaagctgatcgcccttcaggcgcatctcgatcgcctgtttgccggggcagccgctatccagctcaatatcggccatagtcctgaggagctaaccgatattatgtacaacacgctgaagatcaacggtatgacggacggcgcccatttgcggctcatgatcacccgcggcaaaaagcgcacgccaaatcaggacccgcgctttatcctcggcggcgccactatcgtctgcgtggcggaatataaggttgttgatgaacaagccaaacggtgcggccttgccctgttcacctcgacctatcgtaccagcgcgccggatgttttcgatttgcgtcttaattcccacagccgcctgaatttgattcaggcgctattgcaggcgctggatgccggcgcagatgaagcgctgatgctggaccctcatggttttgtcgccagctgcaattccaccaacttttttatcatacgccagggcgagctgtggacctcaaacggcctgtactgctttaacggtattacccgccgcacgatcttgtcactggcgcgccagcagggcctcggcgtacaggaaagatcctttacccttgccgaagcattcactgcggacgaagcttttgtcaccggaacgctggcaggtattaccccggtaagcaggctcgacggcaggcgcttcgacctcaacgaaaatcccgtgacccaacgcatcagcggctggtatcaggactatttacagcaggaggagtcgccgcccgccgacaatggctggacgaaaaaaaacccgcagagatag

SEQ ID NO: 257560 - DNA, 579 bp, Klebsiella pneumoniae
atgaagccaaaacaagcggaaattatccgccattctatgtccctgtttaacaaagaggggtatcagtcgccgagtattgaccggatttcggagaatgcgggcatctccaaaatgacgttctaccgctactatccggataaagaggcgctcattcttgatattttacagcagaaagagtgtgattttatgcaggcgctgcaggacattaccgcggataaacccacggggcgtgaaaagctgtttgccgtctttgaatactacaataactggttcacctgtgcggattttcacggctgcatgttcacccgcgccctgtttgaatacgggacctcgtctcccgctatccggacgatatgttcacagtttaaatcgcgcctctaccagtttttccgcgacatcctcatcggactattaaaaccagagcctgcggaacgggtggcgatgatgatgcttatgctgattgatggcgcgattgccgcccaacaggccgagtcatcggaatgccgggagatccctcccggtataacggcctggagcgcggcaaaagcgcttatttattcagagggcggtactctctga

SEQ ID NO: 257561 - DNA, 1092 bp, Klebsiella pneumoniae
atgcgtaagacagaaaatggtttcaccgggaacgaaccgcattccgcaatggccaggctctctctggatgacatgattgatcagcttctccacagcaacgcgctttcactaaaacttacggctaatccgctactggccgacagagtctggtacctgactgaaaacacctgcatcaaggcttttaccgccaacgacccgcaggctaaaaagcgtgcccacggcgcgctgtttaaactgtaccaggcttggctggcggagccgctatcggcggcggcaaaaaaccagttccatcccttgctctgcgggatcagaagctacatcgagacagaatggcttcgggtggaaaaaaaacggttcgctttcccggcacctgcgcttaacgccggcaatatcgttgaggaacttcgtgacctctgtcagaaacacccggcctcgcaccatcctctgtttgattttctcgcttcttccgcttccgctacgcaaatcgactatttcttcaaaagcgatagcgcgctgaatctgctgtttttcgatctggtggcaatggggctggtcggttctctgccggaaacgcgcgcagagattgcccacaatctctgggatgaaataggccagggcagccaggagatcacgcacgttaatctgtataaggatttactgaagcgaagggatattgcgttgcctgaaaatcatttcgcccatctgtacgactggcagggactcgctggctacaatgcgtttatgttgggcggcgttaaccgtcagcattactacaaatcgcttggcgtcatggcgatgacggaactgttggatccgccgcagtatcagaagctggtgacaggttgccgccgtattgggctatcggatcgcgacgtccattattactcagagcatatcgaggttgatatcggccacgcggatggatggctgaataacgttatcgtgccgatcggcaataaaaatccggctgcgctggaagaggtctactctggcgcagcgctgcgtcttcagacttgctgcgattattacgattgtctgctggaggcgttacgcacgctcgctgaccgcgaatcagagagtaccgccctctga

SEQ ID NO: 257562 - DNA, 654 bp, Klebsiella pneumoniae
atggccctgtttagcgtcgttacccttctgctgtctccgcaccgcctggggcatcgcgatagcgctgcggcgccctcttcctccgggtttatcacgccggcatttatccagggaacgctgctggtttcgctgatcctgagttcgctgttttgctatatctcgctgtcgccggccatttttatgcagcagcttgggctgagcacaatgcactactcgctgctgttttccgcttccgttttattttttattattggcaatcagttctcaaaatttgagcgtataaataatccctgggttttgttaatcatgaatgcgctggcggtctcgccatttattatcgatagccactcactcatattatgcatcgctggatcgatgatttttaatttcagccctggcgcctatttcccgaccgccaactttatcgcactgcaaatcaaagggactaaaaccagtattgcggcatcagtcaccggttttatccaaacagtctgcgccggcgccatcagctatttcgcggtaaaactcacggataccggcctagggtttgacagaaccctcggcacgagcacgttaacgctggcaattttatctcttctggtagtcacgacaatgaaggtaacgcaatggaaaattggcaaaaaaggaaaatag

SEQ ID NO: 257563 - DNA, 219 bp, Klebsiella pneumoniae
gtgttctctgaacatattaatgaacgggtggtagccaaaagggatggcaaggtcattaccctcgacgaaggcagaaaaatggtggaatttgtctcatgttcgtatctcgggctggagactcatccggcgctgaaaaaagcggatatcgacgcgattgagcgttttggcgtgcaggtttccgtcgccagaacgcgttcccgcagttggaagcgcgactga

SEQ ID NO: 257564 - DNA, 615 bp, Klebsiella pneumoniae
atgactaagaatatgaacgtaccatcagcacgtggcccactcgatcacagcgtccgggagcaaatcgtcaacgccgcatttgagcatttcgggcattacggctacgaaaaaaccaccgtagcggaattagctaaatctatcggtttttcaaaggcctacatctataagtttttcgattccaaacaggctatcggcgaagttatttgcgctaaccgcctggagacgatcatgacggcggtacttgcagcggtggcggatgcgccatcagccagcgaaaaattacgccgcctctttcgcgcgctcaccgaagcgggaagcgaactgtttttccacgatcgtaagctctacgacattgccgccgtcgcctcgcgggataagtggccttcaacggaaaggtatgcggaacgcctgttaaagctgattgaaagcatcgttgtcgaaggcaggcaggccggcgagtttgagaggaaaacccctcttgacgaggcaacctatgcgatatacatggtgatgtgccccttcattaaccctgttcagctgcagtttaacctcgaaacggcgccgacggcggcggtcattctctcctcgttgattctcagaagcctggccccctga

SEQ ID NO: 257565 - DNA, 840 bp, Klebsiella pneumoniae
atgcacaagacttttaccctcaatcataccgacaatatcgaattgaacttgtaccagtacggcgaggagagttgtcataaggggcaccgttatggccccgctgttcgccagcattacctatttcattatgtgataagtggaaccggcaccttttacagtgaatccggcgcttttcctgtcgtcgcgggggaggggtttttgatccacccccatgatgtgaccacctactgcgcggataaaaaggatccgtggcattatatgtggcttgaggtcgatgggctgatcgccgccagaattttcgcggagtgccatctgagccggcaatcaccgatttaccggcccaacctgaataaagacaacgtcagcgccctcggctacctgcggcaaattgtcgaacatggcgatgaacaccggctgaaggtgcaggggctgtgctatctcttcttttcgaccttaatcagcaatacgcatgatcaaagagctcctctccgtgatgacaagaccaggcacctgcaaaaggcgatcaaaaaaattgaaaatcgctaccacgaacctctgagcgttgagagcctggccgcatactgtaatatcaaccgcagctacctttgccgattgttcaaaagcgcctacggtataggtcccaaggcgtatttgctcaatttccggatgagcatcgccctcagccttctcaaaaacagcaatacggcgattaaagtggtgggcatttccgtaggctatgaaaatcagctgcatttttctaaggcttttaagaaaatgcacggcgtatctccggctaaatggcggcaaaaatacctttctgaacagcaggcggcgaggtga

SEQ ID NO: 257566 - DNA, 1308 bp, Klebsiella pneumoniae
atgattaaagtgacatttatgggcgcgggcagcaccattttcgccagaaacgtactcggggacattatggcgaccccgacgctgaaagaggtggagattgcgctgtacgacatcgacggcgcgcgtctcaatgaatctctcgccatgttgaacaatatcaacagcaataccaatgcgggcagagcgaagatcgccgcttaccttggcgttgagaaccgccgtgcggcattgaaaaacgcccattacgtggtgaacgccatccaggtcggcggctacgacccttgcaccattaccgacttcactatcgcgagaaaatatggtctccggcagacgattgccgataccctggggattggcggtatcttccgcgcgctgcgcaccatacccgtaatgtttgatttcgcacgggatatcgaagccgtctgcccgaatgcctggttactcaactacaccaatcctatggccacgataaccggcgctatgctgcgtcatacggaggtgaaaacggtcggactttgccacagcgttcaggtctgcgctgaaacgctgttgaaaagcgtggatatgccaatcgaggacgtgcaatttcatatcgcgggtattaatcacatggcctggctgctggacattcgccgccacggcgaggatctgtacccggaaattaagcgccgggccagcgccctgcagggcaagcatgatgatatggtgcgccatgaaatcatgaaaattttcggctattacgttaccgaatcgtcagagcacaacgccgaatacatgccttactggatcaaacgcaactacccggagctgatcgagcgattcaatattccgctggatgaatatccgcgccggtgtattgagcagattgaacaatggcagcagcagaaagtggcgctgacccatgacaccagcctgacccacagccgtacccatgaatacgcgtcttatatcatcgaagcgatggaaaccgatcggccctataaaattggcggtaatgtgctcaacaccggtttgatcgccaacttaccttccgaggcctgcgtcgaagtaccttgtctggtggatggacagggcgttacgccatgctacgtcggcaacttgcctgagcagctggcggcgctgaaccgtaccaacatcaatacccagctgttgaccgtcgaggcggcggttacgcgcaagcgcgaagctatctaccatgctgcgctgctcgacccgcacacttccgccgaactgtcgatcgatgacatccgcaagctgtgcgatgaactgattgaagcgcatggcaactggcttccagcctaccattaa

SEQ ID NO: 257567 - DNA, 1293 bp, Klebsiella pneumoniae
atgttttacttaaaaaacaggaatttttggattttcggtgccttttgctttttctatttctttatcatgggcgcggtactgccgttttttccgatatggttgcatgatgtcaaccagctcgatcagcgacaaaccggactggtgtttgccagcatggcgctgtttgccctggtattccagccagtttttggctttgttacagacaagtttggtctgaagaaacacctgctgtggatgattatcttcctgctgctgtttctggctcctctgtttatctacgtgttctcaccgctgctgcaaagccacttttttctgggggctctgttgtgcggtatttatcttggactggtctgcagcggcggctcgccagccattgaggcctatattgagaaagtcagccgccgcagccagtttgagtatggccgcgcccgcctgtttggctgtatcggctgggcaatttgcgcctccattgtcggctatatgtttactattaataaccagttcgcgttctggctggcgtcgagtttctcgctggtattggccggtttgctgtatctgtttaaaccggaagaaaacgcgactctggcggtagcggatggcctggcgctgaatcaaaaacccataaagcttaaagcggcattgggattgttaaaaatgcgcaaattctggtgtctggtgatgtatatcgtcggggtggcgtgcgtgtatgacgtcttcgatcagcaattcgctaacttctttacctcctttttccgcgaccgacacaccggtacccaggcgtttggctatgtcaccacgccaggtgaatttcttaacgcttttattatgttttttgccccaccgatcattaaccgcattggcggcaaaaatgcgctactgattgccggtatgatcatgtcggcgcggatcatcggttcttcccttgccgactctgtgacggaggtgattatcctgaagaccctgcatatgtttgaagttccgtttctgctggtaggcattttcaaatacatcaccacccagtttaacgttaatctctccgcatcgatttatctgtgggggttttgcttctttaagcagctgtcagccatcggcatgtcctacgcggcagggatgatgtacgtcacttacggtttcaaaacctcttatctgatccttggctgcaccgcgttgctgtttaccattatttcagccttcgcgctgagcggtaaggtacggcgagctaccgggcaacccgcgcaggacgtatcgttatcgaatataaaaggcgaattcggatcggaagcgcaacgttaa

SEQ ID NO: 257568 - DNA, 345 bp, Klebsiella pneumoniae
atgtttatttctgaatccgtgatcgccgttatcattgattggatcgacgataacttacataaaccactgcgtatagaacaaatagctcattattcaggttattcaaaatggtatctgcagcgtttgttcctgcaatataaaggagagagcctggggcgctacattcgtcataaaaagctggattcagctgcccgcgatttacgcgagaccgatgagaatatttacagtattggcttgcgctacggctatgactcgcagcaaacctttacacgattatttacccggcatttccatttaccccccggtgaatatcgcaagaaaaacaaaacagcgtatttgtcctga

SEQ ID NO: 257569 - DNA, 597 bp, Klebsiella pneumoniae
atggcgaaaattcaacgagatcaggtgattgaggcagcattagctctcttagatgaagtcggtctggaagcgttgacgacccgcaagctggcacaaaaactgggcgtggaatccgcgacgttgtactggcatttcaaaaacaaagccaatttgctggaagaaatggcttcagctgttttagccaaacaccatgcgctacctgtgcccgaagaaacttcggaatggacaagctggctggcggataacgcacgtagtttccgccgcgctctgctcgcccatcgggacggcgctctgttacatgcaggaacatcgccgacccgggtgggaggagaaaccttttatccaaaactggtttatcttgttcgagccggtttcactgaggcagaagccgcaatgatattactcgcgattagcgaatacactttggggtgcgtattagaggaacagtcgcgaacgtacggtaatgataataaaatgttatcaaaaataccggcagaaattgcccatatcgaatcgttggtcaatccacatccggataccgcttttgagtatggtctgtctttgataattaaaggattatcaatgccatcagcttaa

SEQ ID NO: 257570 - DNA, 1437 bp, Klebsiella pneumoniae
atgaatatccatcaaggcaagctggtcaaggaaacaacccatccgcgaccgacaaatgccataccgccagtgttgtggatgcaggcagccattatcacgctgggagctttttccaccatgctttcatcaacgatgctcagcgctgcgctgcctgccatggccatcggcctgggggtaccggactcggcaatacaatggatagcaacagcgtatcttatggcccttgcagcaggcgttccgctgagcgcctgggccgtcagacgctttggcgctacgcagctttggctctatgggctgattttatttgcgatcttctcggcagtttgcgccctttccccacgtttcgaggtgctgcttgccgcaagaatgttgcaaggtctggcagggggattactcgtaccggcggggcaaactattcttggcctggtcgtcggacgcgaacgcctggggcgggtcattggcacgattggcgtcgccatcgtcattgcccccttattggggacatcgcttggcgcactcctggttgaaagctgcggatggcgagggttattttggatcaccgtgcccttctgcctgtgtgcatatcttaccgggtggaagttgcttccccgtccggcaataaaaaatgacaggcccctctcgctggactggctgggactggcgctggtcttttgcagcctgccgatgctgatggaaggcatgaaagagctcagcctgaataacggcaaatatggctggaacgtcatcatgctgagcgtgggcgccctgttcacctgcttgtttatttatcgctctttgcgcatcgaatcccccttacttcatctcggacttttcaaacatcggggcttcactttatctgccgtattgatgactatcggcggcgcggtgaattttggcgggcagttcctgcttcctttatattttcgcgacgtttgccataaaacgctggctgaagtgggcttgctgcttacgcctcagttaatcggttcggcgataggatttccggtggcaggctacttttctgataagctggggccacgcgcggtgctgatcgttggcggcttactcgcggcatttgccaccctgccgctggggatgattgatgcgcaaagtcgctattcgcttgtgggtggagcaatcgccgtcagagggttcggtttagccctggcgacggtacccgctatggcagcgggcatggcgatggctggcagccgtcatgtcgctgatgccgcgcctattcttaacatcctccagcgtattggcgcgatggcgggaacggcattgattaccgcgagctacattagattcgctccgactaatgggagcttaaccgcctttcaccacgccggatggatacttaccgctggggccgtactgctcgcgctttgcgcattttttatggtaaatcattccgttttaacaacgcaggaagaataa

SEQ ID NO: 257571 - DNA, 786 bp, Klebsiella pneumoniae
atggatttgcagatacaacaacgagtggcgctggtgtgcggtgccggaagcggccttgggcaggctattgccctttcgctggcgcaggagggcgtgagggtggcggtcaccggccgcaatgctgataaactggcgcaaacggtggagcgtatcacccggacgggcggtactgcccgcgcctggccgttggatctggccgccccggaacggtttgattcggtgattgccgatattcgccagcagtggggcgatatcgatattctggtcaacaactccggtggcccgcggcccgcatcggcgcaggggacagatggcgcagtctggcaacagcagttttcagtgatggtcgcctcgttgattcagctcaccgataaactcctgcccgccatgcgcagccgcggctggggacgcattattaccaccacgtcatccggcgtaattacccccattcctggcctcgccctctcgaatgcgctgcgcatgagcctgctcggctggtcgaaaaccctcgccagtgaagtggccggcgacggcgtgacggtgaatgtgatggtgccagggcgcatcgccaccgaccgcgtggggcagctggacgcactcagggcgcaacgggaaaacagcagtgcggaagcggtcgccgaaaagagtcgtctgagcattccggccgggcgctacggtgaaccgcaggagtacggcgccgccgcggcgtttctggcaagccagcttgccagctacattaccggtgcggtgattcgggttgatggcggattgatcggcgcgatttag

SEQ ID NO: 257572 - DNA, 897 bp, Klebsiella pneumoniae
atgcagcctgactccactgcgagcagtcgccggatagcccggcaaatactcgacctgatatctgaagcaaaattcgatccaggtcatcatttacgcgagcaacatcttgccgatgcgctgggggtttcgcgtacgccggtgcgcgccgggttaaaagagttgacccgaatgggggcggttgaagcgcgtccaaatcagggttttttcctgcttaaacgcagcaatgagctggagctgctggagattgagcagtccaagagcaatgaccagaagctttacgaacagctggtccatgaccgtattgcgggcgtgctgccggaatcgtttacccagactgaaatcagtcagcgctatgaggtcgatcgcggggtgctgacccgtacgctggtgaagctatcggaggacggcctgattgcgcgcaatgcggggcacggctggcgctttctgcaaaccctcaactccgatgtcgccctgcgcaacagctacggttttcgcctgatgattgaaccgacggcgctgctgacacccaacctgcatgtggacaggcagatgcttaaacgcctgcgcgcccagcatctgcgcctcatcacccacccggacattacgcaggttccggcaaaagagattttcgaaaccgacgctttatttcatgagttgctggcggaagccagcggcaatctgtttgtggtacaggctatccagcaacaaaaccggctgcgccgtctgctggaatttggcagctatcacaataagcgccgcgtaaaagagtggtgcgaagagcacgttgctatcatcgatgccctgcgagagaacaagcaggaacaggcggcggaattgatgagaaaacacctgcaatacgcgtttgaccaggtcaatgttaaaaacggtcgcgcatag

SEQ ID NO: 257573 - DNA, 726 bp, Klebsiella pneumoniae
atgtcgatcgaacttatgtggcagtacttcctctcacccgagtttgttcagggtgcctggatgacgctactgattaccctctgctcactgttgtgtggcgtggtgctgggcctggtgttggcgctgttgcaggaagcgccgtttcgcgccgggaaagggctggcctttttctacctgtggctgtttcgcgggacgccggtgctgttccagataatctttgtctacaacgtgctgccaggcttcggcttacgcttctccgcatttacctgcgcagtgctggcgctttcgcttaatgaaggcgcctacatggcggaaattctgcgctctggcctgcaggccgtaaaaagcggccagcgcaccgccggcatggcgctcggtatgaccagcgggcagatcatgcgaaaaatcgtgctgcctcaggccgcacgcatcgttctgccgccgatgggtaaccagatgatcagcatgctgaaatcgagcgcgctggtctcggttatcgccgttcaggaactactgctggtcgccaaccagaccgccagcgccagcttccgctacttcgaagcgctatgcgccgcaggcatctattacctgctgctcaccagcctgtttatggtcttccagtcgtggctggaaagcgtgctggatcccaaacagcgccgcagcaaaagccagaagcggctgaaccgcctgtttaaattaccaaaacccgcccgggaggaaccatga

SEQ ID NO: 257574 - DNA, 741 bp, Klebsiella pneumoniae
atgagcgagaaaccgctgctggagatgatcggtattgataagacttttggccgccagaccgtgctcaagaactgctctattgaggtgcagcgcggggaaaccgtggtcctgattgggccatcgggctcggggaaatccaccctgctgcgctgcgtcaacatgctctcccctgccgacagcggcgacgtgttcttcgccagccagcacatcagccggggcgaagtgccggtgcacaaactgcggcagcgtattggcatggtgttccagaactacgagctgttctcgcacctgacggcggcggaaaacatcatgctggccccgatgacggtgctggggatgaaccgcactgatgcccgtacgctggcggacaacctgttggcgaaggtgcgcatcaacgaacgcgcggaccactttcctgacgagctctccggcggccagcagcagcgcgtggcgattgcccgagccctggcgatgaagcccgagctcatgctctacgacgaacccacgtcagccctcgacccggagatgatccgcgaggtgctggaagtgatggcggagctcagcgcagaaggaatgaccagcatggtggtgacccacgaaatgggcttcgcccgccgggccgctaacaaaattctttttatggaagacggcgaaattatcgatcgcgccagcaccagcgatttcttcgccggcaacgtcagcgagcgcgcgcagcgcttcctgacgcaaatattacattaa

SEQ ID NO: 257575 - DNA, 1176 bp, Klebsiella pneumoniae
atgttcagttatcaggttgacagcgcgcgtatgaaaaaggacttagcgacgctggttgccatcaatacggagaatccgccgggccatgagcgtgaagccgccgaatgtctggaaggctggctgctgaccgccggattcgatctctcctttagcgaatacgcgccggggcggaccaacgttatcgccgtcctgcacaatggaccggggccgtgcttcgcctttaacacccatatcgacaccgttccggcgggcagcggctggaccagcgatcccttcacgctcgccgagcgcggcgggcgcctgtacgggcgcggcgcctgcgatgccaaaggcccgctggtggcgatggttgaagccctgcgtttgctggccgccactcgtcagcgctggtccggcacgctgatgggcgtgttcaccgccgatgaagaggtcgccagcgaaggggcgaaattctacgtacgtgataacccaccggcgattgatttcgcggtgattggcgagccgacatcgaatgcgaccttctccgctcacaaaggcagcttgcgtcctcgcgtgcgggtaaaaggcgtcaccgcgcactccggcacgccggagctgggggttaacgccatttaccagtccgcgcgccttttagggctgattgaagaggcccaccaccagcaggtgcgttgccgctgccacgatctggtcggtaacgccagcctgacggtgacccgcatccacggcggccatgcggacaacgtggtgcccgacagctgtgagctgctgcttgaccgccgcatggtcccgggtgaagacgaagcggtcgtcaaggccgaactgcaacagctgctcgaccacgcgcacgctcatgcgggcgtggaagccgaaattatcgcctggcagcccaccaccggtggcgcgacgcaaaccgacagcagcgaagccattgtcgagcaaagccttgccgcctgccgccgtcacggacagagcgagcccggcccgtttggttttcagggcggctgcgacctggtgcatttccgttcgctgggcgcaaagggcgtggtcattggccccggctcgctggccgtggcgcacaagcccgatgaattcgtccccgtcgatgaatttatcgccgcggcatatatctatctcgatattgcgctcgccatgctgccgccggagcccggtttatga

SEQ ID NO: 257576 - DNA, 1170 bp, Klebsiella pneumoniae
atgcaagatgttaacaatgtgattcagggcagtgagtccgcctttagcgctgacgaatatgcgcaacgcattcgacgtacccgcgaacgcttaagcagcgcgggcgtggacgtcatgattgttaccggaccagaaaacattttctggcttaccggtcagcaaacgccgggatattacacctttcaggcgctgctgctgccggtagaaggggatccggtctttgtgattcgtcagctcgaatactttaactttatcgccaacacctttatttcagatgccgctatttaccaggatggcgataacccggtggattttctggtggctatgctgcaacagcgcggctggctcaataagcgcataggactggataaacgcggctggttcctgccgattgccgtgtatgaagccctgcagtctaagctcggcgcgattgccgatacggctggcgtcatcgaaccgctgcgcgcggtgaagtcggccgcggaggtggaaaaaatcgccgccgcggcccgctatgtcgatgcgggtatgcgcgccgggatggcggcgattcgcagcggcgcagacgaaaacgcgctggtctcggcgatgatgggggccgccattgccgccggttccgagtatgtcggtatggaaccgctggtctcaaccggcccgcgaagcggcgtgccgcacggcacatggcgacgtcgggtgatgcaggataacgacccggtttttctggagatgtctgccgcccacgatcgctaccacgccgcgatgatgcgctccgcctggctgggccgcccgcccgctatcgccatcgaaatggaaaaagtttgtcaggaagccctgcaggcctccctcgacgccattcgtccgggcgctacctgcgaagcgccgcacctggcctgccagaaggtgatcgaccgcgccggtttcactgaaaacttcaaaaaacgcaccggttactccatcggcatcgcctttgcgccggactggggcgaaggcggcattctcagcctttacagcggcgtcaccaccgagctgcagccaggaatgactttccacatcccaccggccctgcgtatctacggtcaattcaccgtcggcgtcagcgaaaccgtggtggtgactgaaaccggatatcgccagctgggttccctggctcgcccattaacactgctgtaa

SEQ ID NO: 257577 - DNA, 924 bp, Klebsiella pneumoniae
atgaaagatatcaatgagtgtcgtgaacgcctgcgcggtattttcaacatcaccgtcaccccgttcgacgccagcggcgcgatcgactacccggcgttgcgtgaaaacatcgaacgcgtgattggtctgggctatgacggcctgctgattggcggcacctacggcgagttcccggtaatgaccgtcgaagagcgccgcgaattgtttcatgaagtgatggcctgcgtggatgaccgcgtggcggtaatgctgtgcagcgccagttccgatccgcgcgacgcccgcgagctgaccgttctggcaagcgagttgggcggcctgccgatggtcaccgcgccctttgttagcgaaatcactgacgaacagattgtcagctacttcaatgagatggcaccgttatccaaaaccggcattctggtgtacaacgcgccgggcatcggcattaccctctccccgacgctgctggaacggctggcagagatcccgaatgtggtcggcatcaaacagggcgatctcaaccccaccgccatcgaccagattgccaaccgcctgcgcgggcgtctgcgcctgttctgcgcctccgatctggctttcctcggaccgatgatggccgggtttgacggcatcagcacgaccaacagcggcgcgctgccggagctgatcgtcaatacgttccgcgccgtggaacggggcgatgccgccactgcccgcgatttgcatcagctgtggtacgcgtatcgagccctggcgcgcaaatacgggcagccgcagctggtgaaagcggcgatggcgctgcgcggctttaacggcggcaccgtacgcgcaccgttaaaaccgatcggcgacgcggcgctggcagagctaacccgcgtcatgcaggcgctcgccagcgaccagcgcagcggggttacgctggcgcgttaa

SEQ ID NO: 257578 - DNA, 1098 bp, Klebsiella pneumoniae
gtgtcaccgatctttattctcgataacagctccgtccccgcccgctacggtatcaccgccagcctgtgggctaatcgtcttgggttgcccctctggagccttcgccccgacttcgccggggacgttcccgacagtcatcagcacgtcattcgcgcagggtactgcgtgaccagcggtctctggcgcagcgatacgctgcgtgaagaggtgcgcgatatcgccagcctgccgccatcagacgccgttattgtgctggcgtcctcgcaggcgccgctcatcgccgacctgccgggccagcggctttacagcgatgacagcaaccaccgcctgacgctcagcgacgggcaacacacgctgttagcgctcacccccgaccgctatggccgctgggatgccgggagaccgtcgtccgccagggcgtccttgcgcatcgcgctgattggccgcgaggcggaccaccgtctggtctatcccgccacgctcggctcactgggcgatgccgcggcgtcgctggggctgaacctggatgtccatgtcttcgcgtcggtcagtctgtccgccgagttacacgaacttcacctcttccagggcgtggtgctgccaggcggttcctcaatggcggcggtcaacggacaaatccgcgtggcggaagatacgcttaaccgcgggcagccaacgctggggttgtgcctgggaatgcagagcatgatgactgctgccgtgcgccggagtccgggtttcgaatcggccattcccgcggaagtcgctccgcatgaggctctgcacagctttgttccctttgccgatggtcgtcatcgctgcggcgtattccctttttcctcggggcttatccccggcgatgtccacgaaatgcactacaaccatcgctactgcttcaacaccgacttattgccggcgctgtcccccggcggggtcagcgtgagcgcgcaacgcgacggtatcgtggaggccgtttcccagcctgagctgccgttctggcacggggttcaggggcatccggaactgatgtcccgcccggatgcgccccatccgctgttcgtcgcgtttctaaaggtggcgcttaacgcgccagcgtaa

SEQ ID NO: 257579 - DNA, 1209 bp, Klebsiella pneumoniae
atgaataacagtcaaatcgcccgtcgtatgctttccgtacgcccttcaccgacggcggccatttctgaccgggtacgggcgctggaagccgcaggcaagcaggttatcaacctgggcgaaggggaactggattttgctaccccggcccatattagctatgcgggcattgaagctatcgtgcttcaccagactaagtataccgccgtttccggcaccgcagcgttgaagtcggcgattgccgccaagttcgcgcgcgacaaccagctgcactaccgcgcggaggagatcatcgccgggagcggcgccaagcagctcattttcaatgcctttctggcaaccctggacgccgggcagcaggtgattattcccgccccctactgggtctcctacccggatatggtctctctggccgacggtgaaccggtgattgtgccgtgtgatgaacaacacggctggaagctgacgccggaacaactggccgccgccctcacctcgtcaacgcgctggttggttctcaactcgccgggtaacccgaccggggcgatatacagcgaacgggaactgcgcgcgctggcagaggtcctggcggattacccgcaggtgctggtgatggccgacgacatttacgagccgctgcgctacgacaatgtcccgtttatcacttttgctcaggccgcgccgcagctgatttcgcgcaccctgacggtgaacggggcctccaaaagccacgccatgaccggctggcgtctgggctatgcgggtgggccgcagtggctgattgccgccatgcagatcctgcaatcacaaagtacatctaatcccagcagcatttcgcaggcggcggcggtcgcggcccttaaccattcggcggatttcttcgacggctggctgcagacgctggataaacgtcgccagcaggtgctggggatgattgccgccaccgagggcctgagcgctggcatcccccagggcgcattctatgtctttgccaactgccagcagcttattgggcgggtgacccctggcggcgaaaccctccgcgacgacagcgggctggctaactggctgttagaacacactcaggtggccgtgttacacggttctgcgttcggcatgccggggtatttacgtatcgcctacgcggtagaagatgggctgctggcgcaggcctgccagcggattgccggggcctgcgcgcagctgcgttag

SEQ ID NO: 257580 - DNA, 732 bp, Klebsiella pneumoniae
atgaaagcaacggcacagtcaacgaaataccaggtgataaaggcagcactgttagatgaaataagaaacggtacttttaaacccggggaaaaattctacagtgagtcggaattaaaagagcgttactccgtcagttccgccacggttattcgcgctattcacgaaatggtgaatgaaggctacctgattcgttatcagggtaaaggcacttttgtttcgaaagccaaacgaaatgagaacattgttttctcagaatcagataacgatttaaaaggcatgcagtcggttaaagttatcgcctgtgaactggaaaacgatccgtgtattaaagaaaaactcgggttaaatgatgatgaaaaatattatcatattgcgcgcttaaagtttgataataacaaaccttatgcattacagatttcgcatattccggcccgctacttcgccagtcaattgacgattaagaattcggcactcagctctatttatgaggcttttaaggttaacaatggtcttgatatgtacaccatgccctatcggcagaccatctgtgccctgaccgatgctgcgccagaagtcctgcagcaccttgagctcacggctcaccagcccgttatcatgatgaaacgctacacccacgacgagcaaggtcaggtgattgaatatattgagacctggaaacggttagaatcattttatattgaaataagaacgccagataagggggcaggatga

SEQ ID NO: 257581 - DNA, 438 bp, Klebsiella pneumoniae
atgaaccaattattattaatctctcatgggggtttcgccagcggtgccagacaggccacagaattaatactcggagcgcagccaaaccttcatgtagttgaactggatggtgagaaagggatagcagtatttaaacaggaacttctcgataaaatcaccatccttagcgcagcagaatccaaaattattatcctctctgatttaaaaagtggttcgccatataactccgcaatggagattattgtcactaacaacctatggaataatatcaccctgctctctgggatgaatttaaacttaattctggaaatggcgatggcaattgatgaaagtcactcgccagcctcgctgaatgaaataataactacggcgcgtgatggtatttaccatttacagcaggcagcgcttgccgcccacacagatgacggagacgagtaa

SEQ ID NO: 257582 - DNA, 783 bp, Klebsiella pneumoniae
atggagcacattgcggtctggcagatagcgttactgacgctttattcagggctggcgatatacgacggcaacaacacgacgcttgggttagtgaaaccgagcatggcgggcttctttgccggtctcattatgggcgatatgaccaccgggcttatcgtcggcggcaccctgaacctgctggtactgggcgtgggcaacttcggcggcgcgtcgatcccggattacatgaccggtgcggtgctgggtaccactttcgcgattatcagcggccagggcgcggcgtttggcgcaaccattgcggtgccgattggtctcttaatggtacagctggatatcctcgcccgcttcagcaacacctttatccatcataaggccgacaggctgattgaagagggtcaggtgaaggcggcggccaggatgaacctgctgggccaggtgcctatttcgctctcgcgtatgctgccggtgctgttggcgctgatcctcggggcaaccttcgttaatgacgtcgtgacctggatccccgcgtccatcatgaacggtcttaaagtcgccggtggcctactgcctgcgctgggtatctccatcctgctgcgctatttaccgattaagaagaacatctcgtttcttattctgggctttttcctggcggcctatctgaaagtgccggtgctgggcgccgcgctgctgggcctggcaattgcgctttacgtcttcaactcagaaaaacaggtaacgcaaactaccgaatccccggcaaatggagcaatgggcgatgaataa

SEQ ID NO: 257583 - DNA, 780 bp, Klebsiella pneumoniae
atgaataaagtactaaaacgcgtgttctggcgctggttcctgttcggtcagtctggctggaactacgaaaaaatgcagggtctgggctatctgtacagcatctatccgttccttgagaaaaagtacgcaaaacccgaagagctgaaggatgcggcgaaggtacacagccagttctttaacaccaacaacaccatggcgccggggatcctcggggtgaacatcgccctggaagagcagaccgggcttgcgggcaaagatgcggttgccggaatcaaaaccggtctgatgggaccgctggcgggcatcggagatacgctgttctttgttattccgaccaccattatcggttctgtcgcttcgtacctcgcgctgcagggcaacccggtggggcttgtcctctggctactgttcgccctggttcgcatgctgtttatgcgctttagcatcagcacggggtatcaggaaggggtcaacctgctggggtctttgaccaatagcctcaacaaaattacccgcgcagccaatattctcgggctgacggttatcggggcgcttatcccctcggtggtgaaggcgaatcttaatttcgaattcagctacggcgaagtgtcgctcaagctgcagagcattgccgaccagattatgcccgggcttattccgctgctggttgtggggttcacctactggctgctggggctcaaaaagatgaactcgactcgcgtcatttttgtcctgattgctttaggtattatcggctacaacctgaatattctcggttaa

SEQ ID NO: 257584 - DNA, 492 bp, Klebsiella pneumoniae
atgaaaggtattgtgcatattcgtgtcgatgaccggctgatccacggccaggtggccacccgctgggtaagccacttcaacgccaaccgtattatggtgattgacgacgccgtagctgcaaacgatgtagagaaaatgctgctgcgcagtgcagccccggaaggctgcaacacctctattctctcttttgagaaagccagcgccaatatcctcgccggcaactacgacggtcagcgcgtactgatcctgctgaagaccccggagctggcgctgaagctgatgaacgccgggattgccctcccccagctcaatatcggcaatatgtccaacaaagacgatcgccgccagatcaaacgctcggtcagcgtcaacgatgctgagatcgcggccatcaacgcgctgctggaaaaaggcgtggcggtgacggcgcagatgacgccggaagagccgaacgcctgtatcaccacgtttttaaaagccgataagggataa

SEQ ID NO: 257585 - DNA, 705 bp, Klebsiella pneumoniae
atgtcaccacatcagcagcagtattatcagcatgttttagcaacgctgaatcaggtgtttcttactcagagcgctgaagttgagcaggcggcggcgctgtttgccgagtgcgtcaaagccaacggcattattcacggctttggctccggccactcgtttgccgcggcggttgagctggccggtcgtgcaggcggcctggtcaataccaaagccattgaccagttctatggaccaaccggctggtttgattcgctgaaagggattggcgacatcttctccgggctgctcgatctgcgcgagtcagactgctttgtgattatctccaactccggcactaaaccgctgcacgttgagctggcacgcaaggtcaaagagagggggctgaagctggtggttatcacccgctacgccggtgagtcgacgccaacgagcgagagcatccgcgactatgccgatgtcattctcgataacggctgcccgtccggtgactgcacgctaagtatggataacggcaacatcatgaccggtccggtgtcctcgctgtctgcggccttcatcatcaataacgtggtgatccgctgcatcgagatgctgctggaacaaggtatcgcgccgccggtgatgcgcagcatcaatctgcccggcggtaaagaatacaacgacatgctgatgagtcagtacaaagagcgcgtattcacgctgtag

SEQ ID NO: 257586 - DNA, 1167 bp, Klebsiella pneumoniae
atgaaagagagtctgtcgaatcgcctcacaccgctgccctttcctgccctcacgcccgacgcctgtcgggatgagctgacggcgtgcgcgcggcggatcgcacgtaacatgggtctgtacggcgagaaattcccctcagcctgcacgctcaataatcgctacgttctgaaagagaataacgactggaccaacggattctggaccgggatgcaggcaatggcctgggagttcagcggcgatcgcgcatacctggacggcgttgaacgcaacgtggcgagttttaaagcccgcctggcggcgcactacgtcctcgatcaccacgatatcggcttcctttatagcctgtcggcagtcgcgtactggaaactgacggagcgcgaagcgctaaccccgcttattctggcggcggccgatctgctggtaaaccgttttcaccacagcgccggttttatccaggcctggggtatgcttaacgacccgcaggagtaccggcttattatcgattcattgattaaccttcccctgctccacgtggcagcaaagatcagcggtgaatcacgttatcgggaagtggctgaacgccactatgcggcggtcatcaacaacatttttcgcgaagacggctccactttccataccttctattttgaccagacaagcggtgcgccttcgcacgggaaaacctttcagggctacagcgataactcctgctgggcccgcggccaggcgtgggccattctcggcatcccgcttcactggtcggccaccggcgaaaccgaccactacgaacggtggcagcaggcctgcgagtatttcttccgctacctgccggaggacggcgttcccgcctgggatctgctgctggctgcagatcccgacgccccgaaagacagctccgcgctggcgattgcggtctgcggcctgctggaagcgcataagcactttccggatgccggttaccagacactggcgcgtcaatgtctgctggcattaatgcgcggcgcgtctgcccgcgaggatgatgtctgcgaaggcttacttaaacacggtgtttacgcctatgccctcggtaaaggcatcgatgaatgtaatctctggggagattacttctatatggaagcgttataccgagtctaccaaccacaatggtcaggatactggttatga

SEQ ID NO: 257587 - DNA, 759 bp, Klebsiella pneumoniae
atgacaatgattcagagctatttagatatcgtccagaaaaaacttaacgacattactcaacagcaaagccataaaatcacttccaccgccgtggaactggcaaaaatcattaaccagggaggtgtaatttatattttcggctgcggccactcacatattttcgctgaagatgtattttatcgtgccggaggtatcgccccggttcggccaatatttatcgaacctttaatgttacatcagggggcggcggcttcatcatattatgaaaaacagaatgactatattgctgagcatctggagagattctcgatcaccagtaaagatgcgctgattgttatctcaacttccgggattaaccccgctccggtcgatgcagcactctgggcaaaacagcacggggcatttaccctggcgctgaccagctttctgtatgccgagacccagccgtcgaagcacaaggctggccttaagctgcgggactgcgtggatgtcgccattgataaccaggtgccaatcggtgatgcggtgctttcccttacagagcatgcaacgccgttcgcgccggtttcctcaatgaccggactgtttattatgcataccctgttcgcggaaatcatagcgaacctggggagtgaaaataaatctctgccggtatttttgagcggtaacattgcgaattccgcaaaacataatgaatatcttctcgaaaaatacggtgcgcaaatcccggagctcataaataacacgagttttaaataa

SEQ ID NO: 257588 - DNA, 1413 bp, Klebsiella pneumoniae
atgacaactcatagactcagagtttctctgtgtacaccgctgtttctttttattgccgcagatgcctttgcggaagaagaaacggattatgaagcgccttctcagtttgagaaagcgttttatgatgaaggcaaattaaatctcaatacctcactatatattcgtcatcgtgctgtaaaagactccacgaccggtaaatacggactgggtccagccgggatccagaaccagaccggtaacgtggcgattagctatatttcaggctattaccaggacgttattggctttgatttctggggcaacgccaacattaaactcgggcataccgtcggtcagtcggagatcctttactacgactacgattgcggcgagccgggcaagttcagcccgtgcgagaggtcctacatgagcgtgtcggttgccgcactcaagctcaaccttggcgatgcaggcaccaatttcaagctggccgcgggctatacccccattaactccggtaccgtaaaaagcagttggggcctcaaccctcacgcttttcgcgggtttgacagtgccctgaccctcgacaaactgaggctgacctacgcctgggccgaccgcttcaagaacgactggagccgtgattttaaaccgatgaccacggcctggcaccagaacaacgccgccggactcgatgacaacggcaaaaccattaaagccggtgcaatcatcgattacattcacacggtgggcgcagtctataactttggcagtaccgtgcttgacgtgggctatggcgaaggtaaaggctaccgtcgcaactggcaggcacaggtagagcgtcacgatacgttgacaaaggatgtctccctgcagagtaagctcttctaccagggcgcgcgctacattgaagatctgtcgaaaataaaagatcctgcaacggaatattatgtgggggttggttttaacctgagccacgacaacaccgtgtggtcccttggttatagccagaactacgccccgaacaccggagattacaacttccgcttaaccccgtgggcgaactccgataagcgtgattatcagccgacgctgtcgcagctggaagactttaacgtttccggcgcccgcgcggttcgttttggcgtgagttataactttgccgatctgaatctaccggagttaaccctgggcggtgccggaacctacggctggcacgtggttagcgatgtcagtaaaaccggttcggcgagaaagtacgacgggagcatggtgtcgttcgatctttccgctcgctatctggtggcggacggcatggcgaaaggcctctcctttaccctgctcccggcgctcttccgggcgacagacagcaactataaaaccgatcgtaacgacgtgaagtttatcgtcggctacagcatcaatatcttctga

SEQ ID NO: 257589 - DNA, 558 bp, Klebsiella pneumoniae; identical to SEQ ID NO: 202605

SEQ ID NO: 257590 - DNA, 126 bp, Klebsiella pneumoniae; identical to SEQ ID NO: 202604

SEQ ID NO: 257591 - DNA, 792 bp, Klebsiella pneumoniae
atgaaattcagattcggatcgtattttctgctcccgtttatttcagttgtcgtttttaataccagttttgctcaggataatgcaccagataaaacgttttccgctacccaggagaaaagaattggagaaatcgcagcggattatctgcgtgctcatcctgagatacttattcagatgagcgaggcacttcagcaggagcaggaggcgaaacagacccgcggccttaaatccgcagcactggaacaacagggaaacattctgggtaataaaaatatcccctcctgggggcccggggacggaaaggtgatggtggttgaattctttgactaccagtgcatctggtgcagtcgcttcgcgccagaactggagaaggtcatcaggagcaaccaggatgtgcgctacttcttcatggagtggccggtcttcgggagccgatggccggtttcattactggcagccaaaaccggtctgaaggtctggaaggaaaaggggccggaggcatatctggcataccataacggtatttatgcaaccggtttaaatgaaggcagactgaccaaagagacagtcacgaaaacatcaggtgatattcagttcagacaggaaaccattgatgaaattaataccacgctgaaaaatattaatgacatcgccacagcaacaggattaaccggtacgccgggaattattgtgatgccggtgaagggcgcgacggaagaaaataccacggtattttccgggatgacagagtcggaaagtcttcaggccgcaataaataaatcccgtaaataa

SEQ ID NO: 257592 - DNA, 672 bp, Klebsiella pneumoniae; identical to SEQ ID NO: 202603

SEQ ID NO: 257593 - DNA, 2826 bp, Klebsiella pneumoniae
atgctggaaatctacacgatagccggcggcgactggttcaggggcaacctgaatgccatttccgccttcatgagtaccggtacctggtcctctattgagaaaatgtgcattgctttttccgtgctgatcgtcgccggcagctgggtgaaaaaacacaacatcatggatctggtcggctgggtgtttgcgctgacgctggtctcgatgctggtcgtcatccgcaaaccggtgcagattatcgactacagcaatgtgtcccaggtctatcaggttgataacgtgccaattgggctggccattccggcgtcactgaccacgcgtgtgggcaatgctctggtgcagagctatgagatgattttcgccctgccggacagtgtgacgtacagcaaaacgggaatgttatttggcgggaacctggtggccaaaagcaccgactttatctcgcagaacccggaaatcaccaccctgttctcagactatgtccagaactgcgtgatgggcgatattttcctcaatcacaagtatacgtttgaggaactactgaactcgtctgacccctacacgattattttttctaaccccagcccgcttcgcggcgtttttgacaaaaacaatcagtttaaaacctgccaggaagcctcccgtgatttgaaatcagccctggcgctggatacccagaccggcgggaagacctggagctactatgtgcgccagctttttgggggtaaacctaacccggacctgctgttcagccagatgatcggtgacagctacaacttcttttacagttcggggcagaatgcagggcagattatccgccagaacgtgacgatgaatgccctgcgcagcggaatccagagctacgcagcccgcagtggcgatacggccagcctggtgaacattgccaatacctcgtcgctggaaaaacaacgtctggcccaggcgacaatggggcatcaggcgctgcgttctctgcccatgatgcagacagtgatactgggtattatgtttggcctgttcccgatcatggtcatggcggcgatgttcaacatgatgaccatgcaggtgctgaagggctatgtctttgccctgatgtggctgcagtcgtggcctctgctgtacgctatcctgaacagcgcgatggcttactatgcgaaacaaaatggggtgccggtggtcctctcagagctctctcagctgcagctcaaaaactcggatattgccaccactgcgggctatatctcgatgatgatccccccgctcagctgggcgatgattaaaagtatgggagcaggtttctccagcgcctacagccactttgcttcgtccggcctcagctccacgtcgcaggcctcctccagcgtagtggacgggaactattcgttctcaaatatgcagacggacaatgtcagcgggaacagctggagcaccaacagttccaccgcgtttgggcagatgacccgacagctggggaatgggggcacggagacacagacaggggacgggaccatgctctgggaggctcgttcctctaagctgccagtagaaattaacgtcagccggcaactggccagcgccaatcaacagatggcccgggaatccgatgttcaggcggaaagcgcactacatggctataacagcagtgtgacaagtgcatggaacagcctgaaacagtttggcacaaatatggggagcagtgcatcgacgacgagtggggccgacactactgagtcctcacaggactcaatggccagaagtaaaatgtggaatgcagttgttgctaatgctaaagccaataacatcagtaacgagcaatccttccagaatcttatggatgaaaatacaagaggttcgatcactggtgaagtttatggcagcgctaaagcaagtggtggttttgaaattttcggcacaggaggacgcgcggaagtcggtggaaaagcttcaattaatggaactgctagtaccggctcaacggatacggttggacaatctgggcgtaactcagaagacagtcgtcatgatataagtagtcaggcagctaaagattttaaagaaggatcagattactttaccagccgaaaaactactacatcaggcaatattacggataataatgccagctcgcgtgttgaccagtttgccgcatcactttccagcgcaaaaaacagttatgatcaatacacgaatagtcgtacacgtagccatgaatacagtgaaatggcttcacgtactgaaagtataagtggtcagatgaatgagaatctgacgcagcagtttgcgagctttgttcagcaacgtgcgccacaggacgctgcaaccattctgaccaacaccagttctccggaagttgctgcacaacgcgaagccctggcgcgagaatttgttaaaacgcaggtagagcctaaagtggatggcgcctatcaggaggcgagagggagtattggtcagggaatgcctaatgtatctggtggaggaggtgcgggttccgtagaggctgattatagccagcacagtggtagcattgatgacatgacgcataatgccggaattaaggataatgtgggtcatacagtcgatacgatggtttctcaaaacaaagaggcacaccgagaaagccaacagggaattaagcagcaggagggagaggtcaaaaaacagcagaccgatctggaaacccaccacaaaacagcaggaaataattttacaggtcaatataataaagaaattgatagtcagagaactacgttaataagcgatactacggaaaaacttagagagaacgcactgagaaggtctaaggacttaaatgataagcttccatag

SEQ ID NO: 257594 - DNA, 390 bp, Klebsiella pneumoniae
atggaaaaccacgcagaacagcagaaaacgacgccccggctgtatcgacggaggctggccatcgtcgcgcttgttgtcttcgtcctggcgaccaacgtctttctctcgcgggtggtactggagtacaccgcaccgcgggtggtggcctttgatatgaagaaaacgctcgacagttttatggacagtgtcagtcagaaacagctgtcagaggcgcagtcgaaagcgttgtcggaaaggtttaacagcgcgctggagcagagtctggcggattaccagcagcagcatcatgtgctcattctggtctcgcccgcagtggttcagggcgcatccgatgtgacccgcaccattcagcacgacattgcccgccggatgaagggggagcgtgaatga

SEQ ID NO: 257595 - DNA, 300 bp, Klebsiella pneumoniae
atgaaatcagatgaggcgagctggtttaaacatgctcttaatttgtctgcagcaatcatttttgcaggattcctgttttatcctgtttacacgaattacagagataacaaaatggcgactgaacaacagttgctgaaaatttctcaagaaataccctgtgcgggagaggcttttcggaaggtgcttcttaataatccggagccgttaacccttcgctcagcgaataaaatttcctcagagtgtaacgagaggagtaagcaacttcaggtattaagtaaaacccgttccgatgatgagtga

SEQ ID NO: 257596 - DNA, 189 bp, Klebsiella pneumoniae; identical to SEQ ID NO: 202602

SEQ ID NO: 257597 - DNA, 279 bp, Klebsiella pneumoniae; identical to SEQ ID NO: 202601

SEQ ID NO: 257598 - DNA, 570 bp, Klebsiella pneumoniae
atgaaggaattaatactgttaattcctctgggcagcgctttgcttttaaccgggtgcgcgggcacagagacggaattcgaatgtaatgccacgacatcggatacctgtatgacgatggagcaggcaaatgaaaaggcgaaagcaaaagaggaaagtgcttcggcaaagccggctgcggccgggttgccacgactggctgacggcaatttcagaacgacgtcgccgggatcatatccgttgccgccacaacccgggtttgtgcagacaaaaaccacatcggttgcgccggtaaataaaagcaattccggtttgctgaataataccgctgcggcagccagaccggtttataccgtgaatacggttatgccgtcagtgcgtccggtaacggtatcaaccctgacttcaccgccgacggtacccggtcaatatccgcgccccctgagaaagggggaacagataacgtcattgtgggtggcgccctatatcgacaccgatgatgtttatcaccagccggcgacggttttatttgttgtcacaccatcggcatgggggcagccccgcattaactaa

SEQ ID NO: 257599 - DNA, 159 bp, Klebsiella pneumoniae; identical to SEQ ID NO: 202600

SEQ ID NO: 257600 - DNA, 2121 bp, Klebsiella pneumoniae
ttgtatctgtttgaaagcctgaatcagctgattcaaaactacctgcccgaagagcaaattaaacgtcttcggcaggcttatctcgttgcacgtgacgctcacgagggccagacacgttcaagcggtgaaccctatatcacgcacccggtagcggtagcctgtatcctggccgagatgaaactcgaccacgaaacgctgatggccgctctgctgcacgacgtgatagaagatacccccgccacctaccaggacatggagcagctttttggtaaaagcgttgctgaactggtagagggggtgtcaaaacttgataagcttaagtttcgcgacaagaaagaggcccaggccgaaaactttcgcaaaatgattatggcgatggtgcaggatatccgcgtcatccttatcaagcttgctgaccgcacccacaacatgcgcacgctgggctcattgcgcccggataagcgccgccgcattgcccgcgaaacgctggaaatctacagccctctggcgcaccgtttaggtattcatcacatcaaaaccgagctcgaagagctgggctttgaggcgctgtatcctaaccgctaccgcgtcattaaagaggtggtcaaagcggcgcgcggcaatcgtaaagagatgattcaaaaaatcctctccgaaatcgaagggcgtctgcaggaagcgggaattccctgtcgcgttagcggtcgcgaaaagcatttgtactccatctactgcaagatggtgctcaaagagcagcgttttcactcgattatggatatctacgctttccgcgtcatcgtccatgattccgacacctgctaccgcgtgcttggccagatgcatagcctttacaagccgcgtccgggtcgcgtcaaagactacattgccattccaaaggcgaacggctatcaatctttgcacacctcgatgatcggcccgcacggcgtcccggttgaggtacaaattcgtaccgaagacatggaccagatggcggaaatgggggtggcggcgcactgggcttataaagagcacggcggcgagagcagcaccaccgcgcaaatccgcgcccagcgctggatgcagagcctgctggagcttcaacagagcgccggtagttcatttgaatttattgagagcgtgaaatccgatctgttcccggatgagatttacgttttcaccccggaagggcgcattgtcgaactgcccgctggcgcgacgccggtggatttcgcctacgcggtgcataccgatatcggccatgcctgcgtcggcgcgcgcgtcgaccgccagccgtatccgctgtcgcagtcgctctccagcggccagacggtggaaatcatcaccgcgccgggcgcacgcccgaacgccgcgtggctgaactttgtcgtcagctcgaaagcgcgcgccaaaattcgccagctgctgaaaaacctcaagcgcgacgattccgttagcctcggacgccgcctgctcaaccacgccctcggcggtagccgtaagctggcggagattccgccagagaatattcagcgtgaacttgagcgcatgaagctgacaacccttgacgatctgctggccgaaatcggcctcggcaacgccatgagcgtcgtggtggcaaaaaacctgcagcagggtgaaacgaccgccgtgcctgtacagccggcgcctatcggccataaccatctgccgattaaaggcgcagatggcgtgctgatcacctttgccaaatgctgccgtccgatccccggcgacccgattattgcgcacgtcagtcctggcaaaggcctggtcatccaccatgagtcctgtcgtaacattcgcggctatcagaaagagccggagaaatttatggcggtcgagtgggacaaagagacggcgcaggaatttatcaccgaaatcaaggtggacatgttcaaccatcagggtgccctggcgaatcttaccgccgcgatcaacaccgcctcttccaatatacaaagcctgaatacggaagagaaagatggccgcgtttatagcgcctttattcgcctcaccgcgcgcgatcgcgtacatctggcgaatattatgcgcaaaattcgcgtcatgccggatgtgataaaagtcacccgtaaccgaaactag

SEQ ID NO: 257601 - DNA, 1011 bp, Klebsiella pneumoniae
atgaaacgagaactggccatcgaattttcgcgcgtcaccgaagccgccgcgctggcaggctacaagtggttaggccgtggtgataaaaacaccgccgacggcgccgccgtcaacgccatgcgcattatgctcaacctgatcaacatcgacggcaccattgtgattggcgaaggcgaaatcgacgaagcgccgatgctgtacatcggcgagcgcgtcggtaccggccacggcgatgcggtagatatcgccgtcgatcccatcgaaggcacccgcatgacggcgatgggccaggccaacgcgctggcggtcatggcggtaggcgataagggctgcttcctgaacgcgccggatatgtacatggaaaagctgattgtcggcccgggggcgaaaggtaccatcgatatgaacctgccgctggcggagaacctgcataacatcgcccgcgcgctgaataagccgctgagcgaattaacggtcaccatcttagccaagccgcgccatgacgacgtcattgttgagctgcaaaagctgggcgtgcgcgtgttcgccatccccgacggcgacgttgccgcctctattctgacctgcatgccggacagcgaagttgacgttatgtacggtatcggcggcgcgccggaaggcgtcgtttccgcagcggtgatccgcgcgctggacggcgatatgaacggccgtctgctggcgcgtcaccacgtgaagggcgacagcgaagagaaccgccgcatcggcgaaaacgagctggaacgctgcaaagcaatgggcattgaagccggcaaagtgctgcgcctggacgatatggcgcgcagcgacaacgtcgttttctcggcgaccggcatcaccaaaggcgatctgctggacggtatcacccgtaaaggcaatatggccaccaccgaaaccctgctgatccgcggcaaatcccgcacaattcgccgtattcagtcgattcattatctcgatcgcaaagatccggatatccagctgcacatcctgtaa

SEQ ID NO: 257602 - DNA, 429 bp, Klebsiella pneumoniae
atgaccctacagcagtggctattctcaattaaagggcggattggacgtcgcgacttctggatctggatcgctatctggatagtgaccatgagcgcgttgttcacgctggccggcagtaatcttcttaatctacagacggcggcttttattctggtgtgcctgctgtggccgacggcggcggtgactattaaacgcctgcacgatcggggtaaatccgggctttgggcgctgctgatgattctggcgtggatgctgctggcgggcaactggtcaatgctgcctggggtctggcagtggggcgtcgggcggtttataccgacgctgattatcgtcatgatgctgatcgacctgggcgcgtttgtcggcacccagggcgcgaataagtttggtaaagagacgctggacgtgcgctggaaagcggaatcctga

SEQ ID NO: 257603 - DNA, 1305 bp, Klebsiella pneumoniae
atgtcgctctggttttcccaccctctgttccttccctctatcatcgtcggcatcactattctcctctgggcgacctctttactaccggagtttatgaccgcgctgctgttttttgccgcggcgatgatcgccaaaatcgcgccgccggaggtgattttcggcggctttgcctcatcggcgttctggctggtgttcagcggctttgtgctggggatcgctatccgcaaaaccggacttgcggacagggcggcgcggtcgctttcgtcgcggctgaccgactcctggccgctgatggtcgccagcgtggtgctgctcagctatgccttggcgtttgtgatgccgtccaatatgggacgtatcgcgctgctgatgccgattgtggcggcaatggccaggcgtgccggtattgaagaggggacgcgcccgtggtttggcctggcgctggcggtggggttcggtaccttccagctgtctgccaccatcctacccgccaacgtcccgaatctggtgatgagcggcgcggcggagggatcatatggtattcacctgaattacctgccctatttactgctgcatacgccggtgctcggctggctcaaaggcgctgtgctgattgcattaatatgctggctgtttcccggaaaaccgcacccgccgcgcgacatgacgccgctgccgccgatgagccgcgatgagaagcgcctggcgtggctgctggcggtggtgctgacgctctgggtgaccgaaagctggcacggcgtggggccggcctggacggggctggcggcggcggtggtaacgctgctgccgcgggtcggctttatcagcggcgaggagttttccagcggcgtgaatatccgcacctgtatttacgttgccggcattctcgggctggctatcaccgtgacccaaactggtatcggcggcgtggtgggcaatgcgctgctgcagattatgccgctggataaagagagtccgtttaccagctttctcgcgttgaccggcattaccagcgcgctgaactttatcatgaccgccaacggcgtaccggcgctgtataccaccttcgcgcagagcttctccgatgcgaccggcttcccgttgctgagcgtgattatgattcaggtgctggggtactccacgccgctgctgccgtatcaagcgtcaccgattgtggtggcgatggggctggggaaagtgcctgcaagggcgggaatgctgctgtgtatcgcgctggcggcggtgagctatttgattctgctgccgctggactatctatggtatcaggcgttggggaaactatag

SEQ ID NO: 257604 - DNA, 771 bp, Klebsiella pneumoniae
atgcgaagagtacgataccttttattagcgctgctggtggcggttgtggcggttgtggcggcgatggccggcggttactactggctccattccggcaaccctgacgcgttgcgcaaaattgttctacaacagtgcgtccccaatcaacagcagcgccagaatcccgcgccctgcgcggaagtgaacctgaagggcggctatgtcctgtttaaagaccgcaatggcccgctgcagtatctgctgatgcccacttaccgcattaacggcaccgaaagcccgctgctgctcaatcccctgacgccgaacttcttctggcaggcctggcaggggcgtgaaatcatgagccagcatcgtggttccgccgtatcggatgacgcggtctcgttgacgatcaactcgcgcagcggacgcacgcaaaatcatttccatatccatatctcctgcctgcgtcccgatgtccgtactcagctggacaaggaagcgcccgctatcagcagtcgctggttgccgctgcccggtggactactgggccacgaatatctggcgcgccgggtcaccgaaacggagctggcgcagcgcagcccgttcctgatgctggctgaagaggtgccggaagcgcgcgaacatatggggcgtttcgcgctggcgatggcgaagcagagcgacggctcgctggtgctgctggcgaccgagcgtaacctgctgacgctgaatcgcgcatcggcggaagagattcaggaccatagctgcgccattctggcatcccgttaa

SEQ ID NO: 257605 - DNA, 1203 bp, Klebsiella pneumoniae
atgtttcatctcgataccttatcgacgctcgttgccgcaactttagtgttgctactgggtagaaaactcgttcaaaccgttcctttcctcaagaaatacaccattcctgagcccgtcgcgggcggcctgctggtcgcgctggcgctgctggtattaaagaaaagcatggatatcgaaattgatttcgatatgagcctgaaagatccgctaatgctggcgttcttcgccactatcggcctcaacgccaacctcgccagcctgcgggctggcggtaaagtcgtggggacgttcctgattgtggtggtggggctgctgctgctgcaaaacgccctcggtatcggcatggcgaagctgctgggcctcgacccgttgatggggctgctggccggttcgattaccctttccggcggccacggtactggcgcggcgtggagtaagttgtttgttgagcgctatggtttcgccaacgccaccgaagtggcgatggcttgcgcaaccttcggcctcgtccttggcggcctgatcggcgggccggtggcgcgctatctggttaagcactcttcttcccctgacggcacaccggacgatcagctcgcgccgaccgcgtttgaaaagccggatatggggcgcatgatcacctcgctggtgctgattgagagcattgcgctgatcgccatctgcttaacggtagggaagatcgttgcgcaactgctggcgggaaccgtatttgaactgcccactttcgtttgcgtattgtttatcggcgtgatcctgagcaacagcctgtcggcgctggggctgtatcgcgtgttcgatcgcgcggtgtcggtgctgggtaacgtcagtctgtcgctgttcctggcgatggcgctgatgagcctgaagctgtgggagctggcgtcgttggcgctgccgatgattgccattctggcggtgcagacggtagcgatggcgctgtatgcggtgtttgtgacctaccggatgatgggtaaaaactacgatgccgcggtgctggccgccggccactgtggtttcggcctcggcgcgacgccgacggcgattgccaacatgcaggcgataaccgaccgtttcggtccgtcgcacatggcgtttctggtggtgccgatggtgggcgcgttctttatcgatatcgttaacgcgctggtgattaagctctatctgctgctgccggtattcggctga

SEQ ID NO: 257606 - DNA, 675 bp, Klebsiella pneumoniae
atgaaacgttcacagattaactacgcgattgataaagcgcacgctatcgccgagtcctttcgcatttgcttacccgagtttgccagctttaccgccgatatctgggcgaaaaagcggactgaagagtggcgagaagttcgggatctacagcttggctgggatattaccgattttggcagcggccgttttcaggaaaccggactgacgctgttgaccctgcgcaatggcgcgccgggcgattcgcgctatcccaaaccctacgccgagaagatgttgcagattcagcaggatcagcaaaccccctggcattttcattatcacaaaatggaagacattctgaaccgcggcggtggccggctctgtctgcagctggcatgggcaacagaagatgaacggctggatatgcagcgcagcgtgagcgtcgcggttgatggccgccagcgcacgctgaaaccggcagaaaccctggttcttaaccccggacagggtgtttgcttgccgcccacgctgtaccaccgtttttgggctgaaaacgcgctggtgatgggctgggaaatttcgatggtgaacgatgataagcgcgataaccgttttctggaagagagcggccgcttcccgatgattcaggaagatgaaccaaaaaaatggttattgtgcagtgagtatgggtgctga

SEQ ID NO: 257607 - DNA, 933 bp, Klebsiella pneumoniae
atgaagtatttggggctggatatcggcgggagcaaaatcgccgccgtagtgatggatgaacagggccatgaatggaggcgttttcgcgttgaaacgcgaaaacagacccggcagcagtttattgcaacgctggtggagttaatcaccgcgattggtgatgagctggctcagcctttggctatcggtatcgccctgccggggagtatctccccgcagagcggcaagatccgcaatgccaatattcaggtcatcaacggctgccgcttacaggatgagcttgagcagcgcctgggccagccggttgtgctggcgaacgatggcaactgtttcgctttatcagaggcctgcgatggcgcaggcgccgattattcactggtatttggcatgacgctggggaccggatgcgggggcggtattgcgcttaatcgccagattttccccggcgcgtcagggattgcggcggagtgcgggcatatcacgctgccgggatatcaggaggtcaacgatgggccgcccgcgcgctgctattgcggaaaatataactgcgtcgagtcctttatttccggcaccgggctgagcgcgcgctatcgtctgctgacccaagaggcgctcagcagtcaggctattatcgcccgggcgctggagggcgagcatgccgcctgcgagcaggtgctgcgctttcgccagcagctggcgcggacgctggcgacggtggtgaatcttatcgatcccggcgtgattgttctcggcggcggtctgtctaacgtggcgctgctggtgaacgacctggaggcggatgtcgccccgctggtgtttaccgaccatttcattacccccatcgtgcctgcccgacatggcgacagtagcggcatgcgcggcgcagcctggctagccgtccgaagcggagtcgaaaatgaaacgttcacagattaa

SEQ ID NO: 257608 - DNA, 861 bp, Klebsiella pneumoniae
atgttagtttcaatgcacgaattacttaaacccacccgtgaacacggttttgctatcggcgcatttaacgtggcggatagctgttttattcgcgccgtggtggaagaggcggaagcgacaaatacgccggcgattatttccattcaccccagcgagcacgattttgttggcgacgcgttttttagctacgtgcgggatatcacccagcgcagccgcgtgcctttcaccctgcatctggatcatggcgcatcggtggaacatgttttacgtgctatccagtgcggcttcacctcggtgatgatcgatggctcgttgctgccctatgaagaaaacgtggccctgacccgcgaggtggtgcggctggcgcacgcggtaggcgtgtcggtggaaggtgaactggggaccatcggccagaccgggacttccgtggaaggcggcgtgtcagaagtgacctataccgacccggcgcaggcggaagatttcgtcgcccgcaccggcgtggatacgctggcggtggcgattggcaccgcgcacggtatctatccgaaggggatgcagccgaagctgcagatgcacattctgcgcgatatcgccggacgtctgtcgattccgctggtgctgcacggcggctcggctaatccggatgcggaaattgcggaatccgttacgcttggcgtcggcaaaatcaatatttccagcgatatgaagtatgcctatttccagaaagcgcgcgaaattctggcaaaagagacctggtgggatccgaatgtgatttacccggagccgataaacgccgcgcgcgaggtgattcaccacaaaatgaagctgtttggctcaaccggcaaggccagcctgtactaa

SEQ ID NO: 257609 - DNA, 852 bp, Klebsiella pneumoniae
atgtttgccgatatgaaaagtatggtgatcaaagcctggcgtgaacggtatgccctgctggcgattaactgcatgaacctggaaagcgcacgcgcggcggtgcgcgtggcggaaaaacatcgcgcgccgattattctcaacctgtatcagggtcacctgtcgcactttccggcgacgacggcggcggcggtagtcagggtactggcggaagaagcgagcgtacccgtgacgttaagtctcgatcacggcaaagacccgataaaaatacgtcaggctttccgcgccggatttagtgggttaatgatcgatgcttcggcgttcgcgctggcggagaacatccgccagacccgagcggtcgctgaactggccgccagcgttgggctgtgcgtggagggcgaactggggcacctggcggatgcgccgcgctacgaccaggccagcaatgccgatttaatgacccagccgcaggacgtctctccctttatcgaacagaccgggattgacctgctggcggtctccgtgggaaccgcccacggtatgtacgcccccggcgtaacaccgatgctcgatttcgaccgcctggcgcagatacagcgcgcgtcatccgtgccgctggcgctgcacggcgggagcggtacgccgttcgagcagctgcaacgttgcccggaattcggggtcgcaaaaatcaacgttggggcggcggtatttgaagcggggaaagcggcgctgctgcacaccctgtgccacgacagcaccattgagctggccgatgcgctatcggtgatggagcaggccagcgctgacgccatcgtcccctatttacgcgcatccggctctatcaacaaagcctga

SEQ ID NO: 257610 - DNA, 1092 bp, Klebsiella pneumoniae
atgagtgagaataaaactcccgtctcacaggaaattaagaagcatttattaaccggtatttcatggatgataccgctgatcgtcgccgccgggatctgtatcgcgctgggacaagtccttggcgggacgaacgtcggcgagaaaaccggcaccattccgtggatgttaaaccaaatcggcggctggggaatggggctgattgtacccttgatctgcgccgctatcgcttactccattgccgatcgtcctggatttgctccgggtttgatcgtgggttttgtctgcgggcaaattcataccggttttattggcggcatgctgggcggcttcctcgtgggctacacggtactggcgctgaagcactatattcggctgccgaagtcgatgcaggggctgatgccgattatggtgctgccggtattaagcaccattattagcggtttgctgatgatgactctgatcggcaagcccattgcctggctgcaggacgcgctgatccacctgctggagtcgatgcagggcggctcgcgtttcctgctgggcgccatccttggcgccatggcgaccttcgacttcggcggtccggtgaataaaaccatgtcgctgtttgccgatggtctgctggtcagcggcgtttacggcccggaagcggtgaagtttgtgggttcgataatcccgccgttcggtatcaccctctcgttcctgctgacccgccataaatatacccgtgccgaacgcgaagccctgaaggccgcgttcccgatggggatctgcatgatcaccgaaggggtgatccccatcgccgcccgcgatctgctgcgcgtcgtgggatcctgcgtggtggcgtcagcggtggccggtggcctgatcatgacctggggcgtcgagagtccggtgccgcacggtgggatgttcgtggtgccgctctttacgcatcccctgctgttctgcctctctctggcgattggcaccgtgatttgcggcgtgatgctctcgctgtggaaaaagccggtaaccgagcgcgatgaagagtttgatgagctgaacgaccaaaaggtcaaagacgacgaaatcacctttaccctcgaataa

SEQ ID NO: 257611 - DNA, 315 bp, Klebsiella pneumoniae
atgaatattgtctgtgttgctgcctgtaccgcaggtattgctcatacttatattgcacgtgagaaactgattaaaggcgcgaaagcgctgggccacaatgtcaaagtcgaaacccagggaaccattggtactgaaaatgaactggcggcggaagatattgacgctgcggatgtcgttattcttgccattgatgtgaaaatcaaaggcgaagagcgttttaaaaataaacggattgtcagagtaaaaacggaagtcgtgattaagtcgccgattcagtttatcgaaaaggtcgaaaaatccttagcgaatgcctga

SEQ ID NO: 257612 - DNA, 471 bp, Klebsiella pneumoniae
atggacataaccaggattttaaacaccaaacgcgttttgttagatatgcacgctacgaataaagcggaagccatcgaggagttaaccgacttattacaaaaagacggggcgataagctgtcgcgaaacctttattcaggatgtctggcagcgtgagtcggaaggctcaacggggtttgaaaatcatattgcgatcccgcatggaaagtcgtccgccgttgttaataccacccttgccattggccgcacccggcaggatatcgcttgggaaacgctggacggcagccaggtacgctgcattattttatttgccgttcgtctggaagatcaaaataccacccatattcgcttattgtctcaggtcgctggcgcgctggcggatgatgacattattgaacaactgctcaaagaaaccagtccgcagaggattattgatctgtttaaccaatatgccgagtcggatatttactaa

SEQ ID NO: 257613 - DNA, 1572 bp, Klebsiella pneumoniae
atgcaaatgattacctcacgacagaacagattattgaaatttctcctgccccgcagagaatacgttacgctgatgaaaattgccgaatatttaaatgtgtcagaaaaaacggttcagcgtgatttacgctttttagaacagtggttatctgagtggaaaatgactatcaacaaacgctcaggcgccggcgtgatgctgatcgctgataatgtcaccgatctgctgcaattagaccaattactcggtaacgagggggaggacagcgatgtcatgatgaataactcccggcgtgtgaaaattgcttcgcagctgttaagtgagacgccgcgggagacatcaattaataagctctctgagcgttattttatcagtagcgcttctatcgttaatgacctgaaaattattgaatcctggattacgccgctcggcttaacgctgatccgcagccagagcgggacgcatatcgaaggcagtgaaaacagcgtccgccaggcgatggcgtcgttaattaatggggtaattaatcataatgagcccggctgtattattcattcccggctggactcaggaagctataaagcgctggtgcattattttggtgaggatgacgttttatttgttcagtcattattacaggaaatggagcgcaagctgtgctggtcattaggcgaaccgtattatgtgaatatttttacccatatcctcattatgatgtatcgcattacccgtgggaacgccttaccgcggcgtgaacaggggcagcagatttttgatgagacgatatttagcgttgcccagaatatgctgcgtaaaattgaactgcggattgaccattcgctgccggaagatgaagtctggtttatttatcagtacatcatctcatccggcgttatggtggaagagcgtgatgacgtcagcatggcgcgctatatgcactcaagcgatgaggccagacaaatcacgagtcgcctgattagcgtcttttctaccatgattgatatcgatttaaccgccgatcgcgcgttatacgatggtctgctcattcatataaagccgctcattaaccgccttaattttcggatttatattcgtaaccctctgcttgaggatatcaagggtgagctgacggacgtatggccgctcacccagcgggccgtcaatcaggttttcagcggctggggcgagtgcgcggtttccgacgacgaggttggctatctcaccgttcatttccaggcggcgatggaaaggcaggtcgccagcaagcgcgttctactggtttgttctacgggaatcggcacatctcatctgttgaaaagtagagtgttgagagcgtttcctgactggaccatcgtcggcgtagtttcggcaagcagcctgcatacccttcaaccgcaggacaagattgaactggttatttcgacgattaatctgccggaaatagctttgccggtagtctatgttagcgcattttttaatgatgccgatatccgacgggttacggagaaaatcattaccgacaaattacatcgcgcggcaatatctgctgtagataatgaagttttatatccatga

SEQ ID NO: 257614 - DNA, 2319 bp, Klebsiella pneumoniae
atgaaaatcagtgatggaaactggcttattcaaccagggctcaatctgatccagcccgtgcaggtctatgaggttgagcagcaaggtaacgagatggtcgtctatgtggcgtcgcgcgaagttcgcgaacgcgccgcccaactggacgttccgctatttaccgtgcgcttcttctcaccgcaggaaggggtgatcggcgtacgcatggagcacttccagggcgcgctgaacaacggcccgcattacccgctgaacgttgtaaaagatgtgaaggtggaaattcacaacggcgctgaatttgccgagctgaagagcggcaatttgaccgcacgcgtcacgaaaggcgacttctggtcgctggatttcctgcgcgacggcgtgcggattaccggtagccagctgaaaaacgacggctacgtgcaggatacgaaaaccaaccgcaactatatgttcgagcgcctggatctcggcgtcggcgacaccgtttacggcctcggcgagcgctttaccgcgctggtgcgcaacggtcagacggtcgacacctggaacgaagatggcggcaccagcaccgaacagtcatacaaaaatatcccgttctatctgactaaccgcggctacggcgtgctggttaaccatcctgagcgcgtttctttcgaaatcggctccgagaaagtctctaaggtgcagttcagcgtcgaaggcgagcacctggagtacttcgtgatcgacggcccgaccccgaaagaggtgctgaaccgctatacccggtttaccgggcgtccggcgctgccgccagcctggtctttcggcctgtggctgaccacttcgtttaccaccaactacgacgaagcgacggttaaccgctttatcgacggtatggcggagcgtaatctgccgctgcacgtgttccacttcgactgcttctggatgaaagccttccagtggtgcgattttgagtgggatccgctgaccttccctgacccggaaggcatgattaaacggctgaaagagaaagggctgaaggtctgcgtgtggattaacccgtatattggccagcgctcgccggtgtttaaagagctgcaggagaaaggctatctgctgaaacgtccggacggttcgctgtggcagtgggataaatggcagccgggcctggcgatttatgacttcactaatccgcaagcctgccagtggtatgccgacaagctgaaaggcctggtggcgatgggcgttgactgcttcaagaccgacttcggcgagcgtatcccgaccgatgtgcagtggtttgatggttccgatccgcaaaaaatgcacaaccactacgccttcatctataacgagctggtgtggaacgtgctgaaagagaccgtcggcgagaaagaagcggtgctgttcgcccgctccgcctcggtgggcgcgcagcagttcccggtacactggggcggcgactgctacgccaactatgaatcaatggcggaaagcctgcgcggcggcctgtcgatcggcatgtccggctttgggttctggagccacgatatcggcggcttcgaaaacaccgcgcccgcccacgtctacaagcgctggtgcgccttcggcctgctgtcgagccacagccgtctgcacggcagcaaatcctatcgcgtgccgtgggcttacgatgacgagtcctgcgacgtggtgcgtcacttcacgcagctgaaatgccgcatgatgccttatctgtaccgtcaggcggcgctggccaatgagttcggtacgccgatgctgcgttcgatgatgctggagttcccgcacgacccggcctgcgactatctggatcggcagtacatgctgggggattcagtgctggtggcgccggtgtttagcgaagcgggcgatgtgcagttctggctgccggaaggtcgctggacccatctgtggcgcaacgatgaagcccagggcagccgctggcataagcagaatcacgacgtgctgagcctgccggtgtacgtgcgcgataacactctgctggcgctgggcaacaacgaccagaaaccggactacgcgtggaacgaaggtaccgccttccagttgttcaacctcgacgatggtcgcgaagccgtctgccaggtgccggccgcggacgggtcggtggtctttacgctgaaggcgaaacgccagggcaacgccatcaccgtctgcggcgaaggcaaggccagcggctggacgctatgcctgcgcaatatccagcaggtagcgggcgtgcagggcggcgctcaggctggcagtgagctgggcgtggtggtgaccgcgcagggcaatgcgttgaccatcacgctgtaa

SEQ ID NO: 257615 - DNA, 1395 bp, Klebsiella pneumoniae
atgaaagatcatattttgtccgtcaaagagaagattggctacggcatgggagatgccgcgagccacatcatttttgataacgtcatgttgtatatgatgtttttctataccgatatctttggtattcctgccggctatgtcggcaccatgttcctgctggcccgcgcgctggatgcgatatccgacccctgcatggggctgctggccgaccgtacccgcagccgctgggggaaattccgcccgtggatcctgttcggcgcgattccgttcggcctcgtctgcgtactggcctacagctcgccggacctgagccataacggcaagctgatatacgccgcggtcacctacacgctgctaaccctgctctacaccgtggtcaacatcccgtactgcgcgctcggcggcgtgattaccgacaacccaacgcagcgcatctccctgcagtcctggcgctttgtgctggcgacggcgggcggcatgctctccaccgtgctgatgatgccgctggtgaactttatcggcggcgaagacaaagcctttggctttcagggcggcatcgcggtgctctcggtgatcgctttcctgatgctggcgttttgcttcttcaccaccaaagagcgcgtcgaagcgccgccgagctctacctcgatgcgggaagacctgcgcgatatctggcgcaacgatcagtggcgtgtcgttggtctgctgaccatcctcaacatcctcgcggtctgtgttcgcggcggcgcgatgatgtattacaccacctggatcatgggatccgctggcctgttcaccgcctttctcaccacctactgcgtcggcaacctgattggctcggcgctggcgaagccgctcaccgactggaaatgcaaagttagcgtcttctggtggaccaacgccctgctggcggcgttgagcgtggcgatgttcttcgtgccgatggacgccgaaatcaccatgttcgcctttatcttcgtgattggcgtgctgcaccagctggtgacgccgattcagtgggtgatgatgtccgacaccgtcgactacggcgaatggtgcaacggtaaacgcctgaccggcatcagctttgcgggcaccctgtttgtgctcaagctgggccttgcgctgggcggcgcgctgattggctggatgctggcgggcggcggttacgatgccgcggccaaaacccagaacagcgccactatcaccatcatcatctcattgttcaccctcgctccggcggtctgctatctgctgagcgcggttatcgctaaacgctactacaccctgaaaaccccgttcctgaaaaaaatgatggcggagctggctcagggggcgcgtcgcaacgagcaggaattcattgcagcgccgaacggcaaagaattgcaaaactaa

SEQ ID NO: 257616 - DNA, 192 bp, Klebsiella pneumoniae
atgtcaatcatagcgcgcgaaaaaaaaccaaagggcggcggtcagtctccgcagtttaaaatgcgcattgatccggcattaaaggaacagctggatgctgtggcagcggaagagggagtgagtctcgcgagctggtttaaagaactggcgagaagcgcgctaaaagcgaaaggcattgaaccgaaaggctga

SEQ ID NO: 257617 - DNA, 615 bp, Klebsiella pneumoniae; identical to SEQ ID NO: 189879

SEQ ID NO: 257618 - DNA, 606 bp, Klebsiella pneumoniae
atgaatacgctatttctgattggccccggcggggtgggaaaaagcacggttggagcgctgctggcgcaggcgatgaactaccggtttatcgatctcgatagcgaattttgcgagcagcttttaaatattcgccaatatattcagcgcaatggatacgagtgctatgtgcgtgataacgccgcgctatgctctcgcctgctggcggagaatccgcataaaaaacgagtggtggtgctctcctcgggatttcttgccaccgatgtctgcccggagattgtcgccgtgaatcggcagcttgtgcggcagtccgggtattccatcctgctattgccttcagaggatatcgatatcgctacgcgcatcgtggtcgcgcgccagctgatgcgcggctttggtctggtcagagaaaaagaagagatgaagttccgccagcgctttagggaatattgtgcattagacgattgccgggtagtttcgtctgaggagccggagagggtggcggagctggtgcgggagaaggtggctgcggaacagcggaaacaaaaaagcctggaggcgatgcgtgagctgagtgaactatcacagaagctgggattgtataactaa

SEQ ID NO: 257619 - DNA, 303 bp, Klebsiella pneumoniae; identical to SEQ ID NO: 188758

SEQ ID NO: 257620 - DNA, 810 bp, Klebsiella pneumoniae
atgaaactcacggaagtggcgattgtggcggtggacgggtttagcccgttccactactcggtgccctgtatgctatttggcgatacggtctcggaaaccaaacgctttaacctgcatatttgcgccgaacggcccgggctgctgagcgcccgcgatggattcgcgctgaacgccagcggcgatttttccctcctggagcaggcggatatcgtggtggtgccctactggggggcggtaaatcagcgccctccgcagtcgctgctggacggcctggttcgcgcgcgcaataacggcgcgcagatcgtcggcctgtgcctcggggcgtttgtactcggctacgccgggctgctggacgacaggcgcgcggcgacccactgggagtttgagcaggattttcagcgcctgtttccgcaggtgcggctggatatcaacgcgctgtacgttgacgatgaggggattatcacctcggcgggtaccgcggcggcgctcgactgttgcctgtatctcattcgccagcgctttggcagccttgtcgcgcataatctcgactcgctggcgcaggtggcggcgatgagccgccggaccctgacccgccatttcgccaaagcgaccgggatgggcatcgccgactggctggccgccgagcgcctgcggcgcagccagcacctgctggaggcgggggatttaccggtcgggcaggtggcggaggaggtgggctatcgctccgccgtgacctggcgccagcagtttaaagcgcgctttggcgtcagcccggcggagtggcggcgcacctttcgccgcggagcttag

SEQ ID NO: 257621 - DNA, 732 bp, Klebsiella pneumoniae
atgactcaggatccctgctggccgctgcgctttaaccaccagcagctgccggttcgctactgcgccgacccaacgctggccgagcaaccgctgtttgaccgggctcgcgacggggaagcggtggctcagctctggcaggccccgcaggggtttgtggtgccgggaagctatcggaaatttgctgaactcccggcgacgagcgagcagttcgccagccggggatggccggtctggctgcgccgctccggcggcgggctggtgccgcaggggccgggaattgtcaatctcagcctggcctggccggtttatcactcgctgggcgaagccgcagagccgatttatctttccctctgcgcgctgctgcagcgcacgctggcgactttcggcgtggccagccacttccaggcggtcaacggttctttttgcgatggtcgctataatctggcctgcggcgagggcgagaatgcgcgaaaaatagccggcacggcccagtactggcgaccgatggcggaaggtcaaggccatgtggttctcgcgcacgcggtggtgttgctggatgccgacctggcagcggctcaccgggcagccaatgattttgaagcccggctcggcagtgggcgggtttaccgcgccgataaaaccgtgaccctggcggagctgatttcagacggggccgatttgctgccgcgctttcgcgaggcgctggcgcagcagctcgataatatcagctga

SEQ ID NO: 257622 - DNA, 234 bp, Klebsiella pneumoniae
atgatactgattaccggcgacgcccatagcggccaacgccgcgacgccgaatctttactcaactctttcgtttcggcgatctacatcgctacctcccggatatccgacaatcaaatcgccgcgcgcattcaacaccaccgtgatacccggcttgcccactggcggctggaagaatgcggccgtgctcaagccgcgcgcacaagtcaggttacggccggcggcggagatgaataa

SEQ ID NO: 257623 - DNA, 336 bp, Klebsiella pneumoniae
atggaaacaactaagccttctttccaggacgtactggagtttgttcgcctgtatcgtcgtaagaacaaactgcagcgtgaaattcaggacgttgagaaaaagatccgtgataaccagaagcgcgtcctgctgctggacaacctgagcgactacatcaagccgggcatgagcgttgaagctattcagggcatcattgccagcatgaagagcgattacgaagatcgcgttgacgactacatcatcaaaaacgccgagatctccaaagaacgtcgcgacatctctaaaaagctgaaagcaatgggcgaagcgaaagtagaagataaatctgccgagtaa

SEQ ID NO: 257624 - DNA, 1059 bp, Klebsiella pneumoniae
gtgcgcgcggataaatcacttaagccatttgaaattcggctgtatcgccattaccgcatcgtccatggcgtgcgaatagcattggcctttgtgctcacctttgtgctggtgcgcctgcttaatgttcctgaaggcacctggcctctcatcaccctggtggtggtgatggggccaatctccttctggggaaacgtcgtaccgcgcgcgtttgagcgcatcggcggcacgatcctcggctcggcgctcgggctggtggcgcttaagctggagctcatctcgctgcctatcatgctgctgtggtgcgcggtggcgatgttcctctgcggctggctggcgctgggcaaaaagccttaccaggcgctgctgatcggcatcaccctggcggtggttgtcggcgcgccgccgggcgatatgacgaccgcgctgtggcgaagcggcgacgttatcttcggttccctgctggcgatgctgttcaccggtatctggccgcagcgggcctttctgcactggcgcatccagatggccagctacgtcaccgccttcaaccggctttatcaagccggcttctcgccgaacctggtagagcgtccgcgtctggaaaagcacctgcaaaaggtcctcaacgacgtggtgaaaatgcgcggattgattacgcccgccagcaaagagacgcatatccagaaagccatctttgaggcgatccagaccgtcagccgtaacctggtgtgcatgctggagctgcaaatcaacgcttactgggcatcgcgtcccggccacttcgtgatgcttaatgcccatacgctgcgcgaaactcagcagatgactcagcaaacgctgttgactatcgcccacgccctgtatgagggcaacccgcagccgatcctggccaacaatgaaaagctcaacgaaatcgttgccgaactgcgccagctcatcaaagagcagcaggacgacaatttctccgaaacgcccattcatggttatgtctggttaactatcgagctggcgcgccagctcgaactgctgtcgcatttgatctgccgggcattgcgtaaataa

SEQ ID NO: 257625 - DNA, 219 bp, Klebsiella pneumoniae
atgcccatcgtgattttccgtgagcgcggcgcggacctgtacgcctatatcgcgaaacaggatctggaagcgcgagtgatccagattgagcataacgacgctgaacgctggggcggcgcgatttcgctggaggggggacgccgctactacgtgcatccgcagccggggcgtcccgtctttccgataagcctgcgcgcgacgcgcaataccttgatataa

SEQ ID NO: 257626 - DNA, 663 bp, Klebsiella pneumoniae
atgtccgacaacgataccctattctggcgtatgctggcgctgtttcagtctctgccggacctacagccggcgcaaatcgtcgactggctggcgcaggagagcggcgagacgctgacgccagagcgtctggcgaccctgacccagccgcagctggccgccagctttccctccgcgacggcggtgatgtcccccgctcgctggtcgcgggtgatggcgagcctgcagggcgcgctgcccgcccatttacgcatcgttcgccctgcccagcgcacgccgcagctgctggcggcattttgctcccaggatgggctggtgattaacggccatttcggccagggacgactgttttttatctacgcgttcgatgaacaaggcggctggctgtacgatctgcgccgctatccctccgccccccaccagcaggaggccaacgaagtgcgcgcccggcttattgaggactgtcagctgctgttttgccaggagatcggcgggcccgccgccgcgcggctgatccgccatcgcatccacccgatgaaagcgcagcccgggacgacgattcaggcacagtgcgaggcgatcaatacgctgctggccggccgtttgccgccgtggctggcgaagcggcttaacagggataaccctctggaagaacgcgttttttaa

SEQ ID NO: 257627 - DNA, 1386 bp, Klebsiella pneumoniae
atggcagacattttccgcaccgataagccgctggcggtcagccccatcaaaaccggccagccgctcggcgcaatcctcgccagcctcgggatcgaacacagcatccctctggtccacggcgcgcaggggtgcagcgccttcgccaaagtcttttttattcaacatttccacgacccggttcccctgcagtcgacagcgatggaccccacgtcgacgattatgggcgcggacggcaatatttttaccgccctggataccctctgccagcgcaacaatccgcaggctatcgtactgctcagcaccgggctgtcggaggcccagggcagcgatatttcccgcgtggttcgccagtttcgcgaagagtatccccgtcacaagggggtggcgatattgacggttaacacgccggatttttatggctccatggagaacggcttcagcgcggtgctagagagcgtcattgagcagtgggtgccgccggcgccgcgcccggctcagcgcaatcgccgggtcaatctgctgatcagccacctctgttcgccgggtgatattgagtggctgcgccgatgcgtcgaagcgttcggcctgcagccggtaatcctgccggacctggcgcaatcgatggacggccacctggcgcagggcgatttctcgccgctgacccagggcgggacgccgctgcgccagatagagcagatgggacaaagcctgtgcagcttcgccattggcgtctcccttcatcgcgcctcatcgctgctggccccgcgctgccgcggcgaggttatcgccctgccgcacctgatgaccctcgaacgctgcgacgcctttattcatcaactggcgaaaatttccggacgcgccgttcccgagtggctggaacgccagcgcggccagctacaggatgcgatgatcgactgccatatgtggctccagggccagcgcatggcgatagcggcggaaggcgatttgctggcggcgtggtgtgatttcgccaacagccaggggatgcagcccggcccgctggtggcccctaccggtcatcccagcctgcgccagctgccggtggaacgggtggtgccgggggatctggaggatctgcaaaccctgctgtgcgcgcatcccgccgacctgctggtggcgaactcgcacgcccgcgacctggcggagcagtttgcgctgccgctggtgcgcgcgggttttccgctctttgataagctcggcgaattccgccgggtacgacaggggtatagcgggatgcgcgatacgctgtttgagctggcaaacctgatgcgcgagcgtcaccaccacctcgcccactaccgatcgccgctgcgccagaaccccgaatcgtcactctccacaggaggcgcttatgccgccgattaa

SEQ ID NO: 257628 - DNA, 471 bp, Klebsiella pneumoniae
atgccgccgattaaccgtcagtttgatatggtccactccgatgagtggtctatgaaggtcgccttcgccagctccgactatcgtcacgtcgatcagcacttcggcgctaccccgcggctggtggtgtacggcgtcaaggcggatcgggtcactctcatccgggtggttgatttctcggtcgagaacggccaccagacggagaagatcgccaggcggatccacgccctggaggattgcgtcacgctgttctgcgtggcgattggcgacgcggtttttcgccagctgttgcaggtgggcgtgcgcgccgaacgcgttcccgccgacaccaccatcgtcggcttactgcaggagattcagctctactggtacgacaaagggcagcgcaaaaatacgcgccagcgcgacccggaccgctttacccgtctgctgcaggagcaggagtggcatggggatccggacccgcgccgctag

SEQ ID NO: 257629 - DNA, 1143 bp, Klebsiella pneumoniae
atggaacgcgtgctgattaacgataccaccctgcgcgacggcgagcagagccccggcgtcgcctttcgcaccagcgaaaaggtcgccattgccgaggcgctctacgccgcaggaataacggcgatggaggtcggcaccccggcgatgggcgacgaggagatcgcgcggatccagctggtgcgtcgccagctgcccgacgcgaccctgatgacctggtgtcggatgaacgcgctggagatccgccagagcgccgatctgggcatcgactgggtggatatctcgattccggcttcggataagctgcggcagtacaaactgcgcgagccgctggcggtgctgctggagcggctggcgatgtttatccatcttgcgcataccctcggcctgaaggtatgcatcggctgcgaggacgcctcgcgggccagcggccagaccctgcgcgctatcgccgaggtcgcgcagcaatgcgccgccgcccgcctgcgctatgccgatacggtcggcctgctcgacccttttaccaccgcggcgcaaatctcggccctgcgcgacgtctggtccggcgaaatcgaaatgcatgcccataacgatctgggtatggcgaccgccaatacgctggcggcggtaagcgccggggccaccagcgtgaatacgacggtcctcggtctcggcgagcgggcgggcaatgcggcgctggaaaccgtcgcgctgggccttgaacgctgcctgggcgtggagaccggcgtgcatttttcggcgctgcccgcgctctgtcagagggtcgcggaagccgcgcagcgcgccatcgacccgcagcagccgctggtcggcgagctggtgtttacccatgagtcaggtgtccacgtggcggcgctgctgcgcgacagcgagagctaccagtccatcgccccttccctgatgggccgcagctaccggctggtgctgggcaaacactccgggcgtcaggcggtcaacggcatttttgaccagatgggctatcacctcaacgccgcgcagattaaccagctgctgcccgccatccgccgcttcgccgagaactggaagcgcagcccgaaagattacgagctggtggctatctacgacgagctgtgcggtgaatccgccctgcgggcgagggggtaa

SEQ ID NO: 257630 - DNA, 261 bp, Klebsiella pneumoniae
atgatggagtggttttatcaaattcccggcgtggacgaacttcgctccgccgaatccttttttcagtttttcgccgtcccctaccagcccgagctgcttggccgctgcagcctgccggtgctggcaacgtttcatcgcaaactccgcgcggaggtgccgctgcaaaaccggctcgaggataacgaccgcgcgccctggctgctggcgcgaaggctgctcgcggagagctatcagcaacagtttcaggagagcggaacatga

SEQ ID NO: 257631 - DNA, 447 bp, Klebsiella pneumoniae
atgagaccgaaattcacctttagcgaagaggtccgcgtcgtacgcgcgattcgtaacgacggcaccgtggcgggcttcgcgcccggcgcgctgctggtcaggcgcggcagcaccggctttgtacgcgactggggcgtttttttgcaagatcagattatctaccagatccactttccggaaaccgatcggatcatcggctgccgcgagcaggagctgatccccatcacccagccgtggctggccggaaatttgcaatacggggatagcgtgacctgccagatggcgctcgcggtcaacggcgatgtggtcgtgagcgccggccagcggggacgcgttgaggctaccgttcggggagagctcggcgacagctacaccgtcgactttagcggccgctggttcagggtcccggcgcaggccatcgcccttatagaggaaagagaagaatga

SEQ ID NO: 257632 - DNA, 801 bp, Klebsiella pneumoniae
atgaacccatggcaacgttttgcccggcagcggctagcgcgcagccgctggaatcgcgatccggcggccctggatccggccgatacgccggtttttgaacaggcctggcaacgccagtgccatatggagcagacgatcgtcgcgcgggtccctgaaggcgatattccggcggcgttgctggagaatatcgccgcctcccttgccatctggctcgacgagggggattttacgccgcccgagcgcgctgccatcgtgcgccatcacgcccggctggaactcgcctttgccgatatcgcccgccaggcgccgcagccggatctctctacggtacaggcatggtatctgcgccaccagacgcagtttatgcgcccggaacagcgtctgacccgccatttactgctgacggtcgataacgaccgcgaagccgtgcaccagcggatcctcggcctgtatcggcaaatcaacgcctcgcgggacgctttcgcgccgctggcccagcgctattcccactgcccgagcgcgctggaagagggtcgtttaggctggattagccgcggcctgctctatccgcagctcgagaccgcgctgttttcactggcggaaaacgcgctaagccttcccatcgccagcgaattgggctggcatcttttatggtgcgaagcgattcgccccgccgcgcccatggagccgcagcaggcgctggagagcgcgcgcgattatctttggcagcagagccagcagcgccatcagcgccagtggctggaacagatgatttcccgtcagccgggactgtgcgggtag

SEQ ID NO: 257633 - DNA, 531 bp, Klebsiella pneumoniae
atggcgaacattggtattttctttggcaccgataccggtaaaacccgcaaaatcgcgaaaatgatccacaagcagctgggcgagctggcggatgccccggtcaacattaaccgcacgacgctggacgactttatggcctatccggtgctgctgctgggcacgccgacgctcggcgacggccagctgccggggctggaggccggatgcgaaagcgaatcatggagcgaatttatcagcggcctcgacgacgccagcctgaaagggaaaaccgtggcgctgttcggcctcggcgatcagagaggctatccggacaacttcgtcagcgggatgcgcccgctgttcgacgccctgagcgcgcgcggcgcgcagatgattggcagctggccaaatgagggttatgaattcagcgcgtcctcggcgctggaaggcgaccgctttgttgggctggtgctggatcaggataaccagttcgaccagaccgaagcgcgtctggcgagctggcttgaggagattaaacgcactgtgctgtag

SEQ ID NO: 257634 - DNA, 1407 bp, Klebsiella pneumoniae
atgacttcctgctcctctttttctggcggcaaagcctgccgcccggcggatgacagcgcattgacgccgcttgtggccgataaagctgccgcgcacccctgctactctcgccatgggcatcaccgtttcgcgcggatgcatctgcccgtcgcgcccgcctgcaatttgcagtgcaactactgtaatcgcaaattcgattgcagcaacgagtcccgccccggggtatcgtcaacgctgctgacgcctgaacaggcggtcgtgaaagtgcgtcaggtcgcgcaggcgatcccgcagctttcggtggtgggcatcgccgggcccggcgatccgctcgccaatatcgcccgcacctttcgcaccctggagctgatccgcgaacagctgccggacctgaaattatgcctgtcgaccaacggactgatgctgcctgacgcggtggaccgcctgctggatgtcggcgttgaccacgtcacggtcaccattaacaccctcgacgcggagattgccgcgcaaatctacgcctggctatggctggacggcgaacgctacagcgggcgcgaagcgggagagatcctgattgcccgtcagcttgagggcgtacgcaggctgaccgccaaaggcgtgctggtgaaaataaattcggtgctgatccccggtatcaacgatagcggcatggccgacgtgagccgcgcgctgcgggccagcggcgcgtttatccataatattatgccgctgatcgccaggccggagcacggcacggtgtttggcctcaacggccagccggagccggacgccgagacgctcgccgccacccgcggccggtgcggcgaagtgatgccgcagatgacccactgccaccagtgtcgagccgacgccattgggatgctcggcgaagaccgcagccagcagtttacccagcttccggcgccagagagtctcccggcctggctgccgatcctccaccagcgcgcgcagctgcacgccagcattgcgacccgcggcgaatctgaagccgatgacgcctgcctggtcgccgtggcgtcaagccgcggggacgtcattgattgtcactttggtcacgccgaccggttctacatttacagcctctcggccgccggtatggtgctggtcaacgagcgctttacgcccaaatattgtcaggggcgcgatgactgcgagccgcaggataacgcagcccggtttgcggcgatcctcgaactgctggcggacgttaaagccgtattctgcgtgcgtatcggccatacgccgtggcaacagctggaacaggaaggcattgaaccctgcgttgacggcgcgtggcggccggtctccgaagtgctgcccgcgtggtggcaacagcgtcgggggagctggcctgccgcgttgccgcataagggggtcgcctga

SEQ ID NO: 257635 - DNA, 456 bp, Klebsiella pneumoniae
atgccgccgctcgactggttgcggcgcttatggctgctgtaccacgcggggaaaggcagctttccgctgcgcatggggcttagcccgcgcgattggcaggcgctgcgccggcgcctgggcgaggtggaaacgccgctcgacggcgaagaggagcgccagcagctgggcgcttggctggcgggctggatgcagcaagatgccgggccgatggcgcagattatcgccgaggtttcgctggcgtttaaccatctctggcaggatcttggtctggcatcgcgcgccgaattgcgcctgctgatgagcgactgctttccacagctggtggtgatgaacgaacacaatatgcgctggaaaaagttcttttatcgtcagcgctgtttgctgcagcagggggaagttatctgccgttcgccaagctgcgacgagtgctgggaacgcagcgcctgttttgagtag

SEQ ID NO: 257636 - DNA, 891 bp, Klebsiella pneumoniae
atgaaaccactgctggatgtgctcgtcattcttgatgccctcgacaaagagggcagctttgccgccgcctcggcgaagctctataaaacgccgtcggcgctgagctataccattcataagctggaaagcgatctcaatattcaacttctcgaccgcagcggccaccgggcgcgcttcacccgtaccgggcagatgctgctggaaaaggggcgcgacgtgctgcacaccgcccgcgaactggaaaagcaggccgtcaggctgcatcagggctgggaaaatgcgctgatactcaacgtcgacgctacctttccgttctcgctgctggccccgtcgatcgcggcgttttatcgccagcatcacgccacccgtcttgaattccgccgcgataccctcggcgcaaactggcagacgctggtggaagggcgggcggatcttctgctcggcgcgctgggcgaccccccggcgctcagcggctacggctctgttctactgggggaggtggcgcaggcgtttgtcgttgcgccccagcatccgcttgcgcagattgccggtcctgtgggctggcggacgctgcgccgccatcgcgcgattaccaccgacggcgcgtggccgcaggccgacggtcaggagagcctgacggtattcgatctttccgcccagctgatgctgctgtgcgccggactgggctggagttatttaccgctatttcaggtgcagcctttaatcgcccgcggcgagctactgataataaaaacgacggtccccgaaccggtcaatcgcgcatggataggctggaatgaagacgtttgcgggcaggcgggcgagtggtggcgaaaggagatattagcaaatagtgctatccatcaggtctataatactaaaatcgtatga

SEQ ID NO: 257637 - DNA, 702 bp, Klebsiella pneumoniae
atgtgcggcatcgacagctatccgctgcgtctggagccgcagctggtctgcgacaccgaggatctggatgccttaatgaacgtcgacgcgctggtgattactttaccggcgcggcggaccggtcccggagaggacttttaccttcaggcggtacaggaaatcgttgataccgcgctggcgcatcacgtgccgcgtatcatattcaccagctcaacgtcggtttacggcaacgccagcggcacgctgaaagagaactccccccgtgacccgcaaaccgccagcggacgggtgctgaaagagctggaggactggctgcataaccttcccggtacctcggtggacattctgcgcctcgccgggctggtggggccgtcccgtcacccggggcgcttctttgccgggaaatccgcgccggacggccagcacggcgtcaatctggtgcatctccaggatgtgatcgccgcgatcgaactgttattgcaggctccgaaaggcgggcgcatctataatatatgtgcgcctaagcatcccgcgcgcggcgtcttttatccgcagatggcccgcgagctagggcttcccgtccccgtattctctgataacccggagaacggtagcggcaagattgtggatggcagccgtatttgcaacgaactggggtttgagtaccagtaccccgatccgctggtgatgccgatggagtaa

SEQ ID NO: 257638 - DNA, 285 bp, Klebsiella pneumoniae; identical to SEQ ID NO: 202239

SEQ ID NO: 257639 - DNA, 210 bp, Klebsiella pneumoniae; identical to SEQ ID NO: 187475

SEQ ID NO: 257640 - DNA, 699 bp, Klebsiella pneumoniae; identical to SEQ ID NO: 187476

SEQ ID NO: 257641 - DNA, 300 bp, Klebsiella pneumoniae; identical to SEQ ID NO: 187477

SEQ ID NO: 257642 - DNA, 255 bp, Klebsiella pneumoniae
atgagaatgattgaatatcgtggcgtacttattcccgcgccgccaccgatggtgcaattaagttgcgagccgggatttaccgggcgggttgttattgagctggaagatggtgaattcgtcaaacaatacccgctccgcaaagaagaaacattctgcttgcctgaggcttttctcgaactggctcaggaagctggatatcaggtgatagctccagccagggaggttgaccgtgctgacagcaatacgaattcctga

SEQ ID NO: 257643 - DNA, 795 bp, Klebsiella pneumoniae
atggaaaaacaaatgcaggtagttaacggtgttccgatgatgggtagccgtgcaatagctgaagttaccggaaagaaccacgaccacgttaagcgcgatattctggcgatgctggcacagcttggattccattctccagacttggagaatgatgattttaaaggttttttcattaacaggaaagaataccaaggccgcaatgttattgatgagattttcctcaatgaaaacctgtcgatgaccctagtaacgggctatgacgccgtgcgccgactggcccttattgagcaatggcagggtatgaaaaaggagctgtcgcaaccgcgcattgcagtgccgtcaccccctcagtcaccagacatgctctcgctggcccgcgttgtggccgaggcaaccgcatcagcgacgatgaaagcggtgatggatgtagtcagcgtcaaacaggtagcggttactgctactcctgcagcgcctgcacctgctattgccacacaaccagaagcggcaacccctgaaagtgagttcgtacgcgtcgtcaaaatcgcctgggaaaccaccttctcagatggatcctgtcgccgtcttatcaggttcgccaatctgcctacgcagaaatataaaggcagtcgggggctgctggtacatcgtggggccttcatgcaggcgcttgggacactgatcgaagagtcactaccgccaggagatggtcgtaagcgctggaaacatcctgagttcggcagctttgagcttcataaagatctcaatgagattctcgggggcagccacggtgaatga

SEQ ID NO: 257644 - DNA, 654 bp, Klebsiella pneumoniae
atgaaacctgaaattttttttgctgcaaataatagaaatagaacagcagaagtcgctcgtgctgcatggcgatttatgaataaatccagaatttctgcagaaaaaaatcctatgattattgggccgctagtttcactggtttctgcagcaatggggattgtaagtagtactttgtcccttgcaggaacaatagcagatagagctccggctccacactctcttcggctgaatattcgttttcaaaatctgaccaatcgaatagctgttgtagacgttgctcaaaattcaaactcaagaacatggaactctccagccattttaagtggccagactgttgtatttcctttcaccattggaggaaggcaggcaggtgaccattcattctcaataatggtaacggacgagacgggtaatcaatctcatagctatagtttcagcataacggataatactaacgatgtgcgagtaacacgtgccattgtcggtgttggcggatgggtatcgggacctgccacgacaaatttacgtgaaaacattcccatgatttactcaggcgctgaaagttcaggtttacctgtgactttatattgtacgtcagtaatggggggagttatgaatcaaactgttaatattgatgtttcattattaaattaa

SEQ ID NO: 257645 - DNA, 828 bp, Klebsiella pneumoniae
atgaatgaaaagaaaaacaaccttactaatgtaaataataatttcattggctcaagacttattcctaatacaggtcttctatatcgttttaattttcccagcgacgcggcccgagagattggccagggatatgctcttcgccaaaataccattggtatgattgaaccaatgagtttagaagatactgaaaatcttaaaattccaccgggagtagcaatagcgggggtttctggaattttagatttaataggaggagtcatcgatatagctgactcagctttgtcttttgcgactgcagttcctgggcgcgttaaacataatattatgttcaaaaatgacgcggatatgatagttgtacctgggcaggtaaacgttccaaacggttacaattataatgaagtgccaaagatcatgtttcccggagagtctagctcatttagcgaaagtcatttgccgaatgcaaatagtacacaaagactgagtttttcctttagcgcaatatctactgatgaaaatattctgccagtaaccacaaacgcttcacaggccggggtctttaacttcgaagtgtttgttggtagaaatgctaacaccgttttcctggaaagagttcatggttttatctcaacgaatcatgaggttttcgaactgaacgtcggcgtcaataacgtgtcaggacgttctttgaattacgttggttttcgcggtgctgcgggaaccaatctaccgtcatttggtatcgcactaatggaaacgcagattgcaacagcggcatccacaactatgagtacaaaaatagtcttcacgccgttaaatattcgctcatga

SEQ ID NO: 257646 - DNA, 543 bp, Klebsiella pneumoniae
atgatttttccggttcaattttctaccctgcccgtgacgccgtggaaaaatggccgcggggaaacgcgcgaaatcgtcagcattgcctcgccggacgcgccgtttctctggcgcgccagtatcgccacgctggaaaacgacggtccgttctccccttttcccggcgttgaccgggtcatcaccctgcttgagggacagccgctgtggctacggggcgatgatatcgcccagcgccttgagctctggcaaccgtgggcgtttgccggcgagtggcctattgccagcgaaggcatcagcggacgcggtctggacttcaatattatgacccagcgcacgcgcgccgcggcgcgcgtgaacgtcgtcgcggaaggacagcggcccggcgcggagggcatcgcatggattctccagggtagctggcggctggctgacgcggtttatcaggccggcttcgggatctggtggcaggacgaatcgccaggcgagctgttaccgcagtctgcggacgcccgacttttactggcggaaatcgttcgccgctag

SEQ ID NO: 257647 - DNA, 1158 bp, Klebsiella pneumoniae
atggagcaacgccgcgtttacggcaaaaaccactggtatcatgagacccagtcaacaatctgcccggtggatgtattgccgctcgtcccagaagccgcccacgtcgaagatcgttttctactcgatctgacgctccccgaagagctgctcgaggcgcatgcgcgctggcttacgcccgcccggcggctggcagatgtcctcttccccacgtcagtgacggttaatcgtctgcagacgtttagcgcctacgatcggctgagtacggcgctgaccgtcgcccaggtttatggcgtacagcgcctgtgcaatcactacgccgcccggctggcgccgcttcccggtccggactcctcgcgcgagagcaaccgtcgcctggcgcagattacccagtacgcacgccagctcgcgagctctccttcgctgattaacgcactctcccgcagccagctagatgaagttgggctgaccagtcgcgatattatcctcatcaatcagatcattggctttatcagcttccaggctcgcgctatcgccgcattccatgccgcgctgggctacccggtgcgctggatccccggcatgccgcagcaggaagatgctccagaagcgcttttcgacacgagggggagtgattggcagccagggcttgacgattccgacttgcgctatgccgacgatgatcgccagtctcttttagcgaactggcaaaaacatccgggccttttcgaactggctccgctgctggcggcccaggaacctccgctggcgctacaggaacagcttctgacccatcttagcggccaacagccgttcgccgcgcaggtggcgctgatagccgcgcggattaatggcagcgtcagctgctttaacgcctgggcttcgcgatgtccagatttggccgatctcacggacgctttgcgcggtaatgaatccggcgtccaggcatggggagacaccccgtcaattgagcgccagcttttacaatccgtacagcttttgacccgcgcgcccgaccgcttcagcgccgcccagctaactcccctcactgaatacgggctttcccggagcgcggctatcgatcttctcgcctggtgcgggctgtgcggttggatgaatcggctgaaaatcgccctcggcaatgtaggtcaggagacgtaa

SEQ ID NO: 257648 - DNA, 357 bp, Klebsiella pneumoniae
atgaaatcgttgcatgaacttcttattctgaatcatttttattactgctttcttctggctattaaacttaacaaattcaatcttccctctgtgaatagtatcaatcagaaagtatttataaaacagtggctttgttctgcgcagaaaaaaagactatttgacaaattggtctatgaagaaattcagtggttacttgaaatcctttcggataaggcaacaacccttcaacaattcgagtttaatattgagctgatttaccatcgctctttcgaaatgattaaagaaaaggaagttatggtgccccctgttagttgtattagtgctaaccgaacggactcgccatttttaccttcataa

SEQ ID NO: 257649 - DNA, 1056 bp, Klebsiella pneumoniae
atgaaggcactgaatttgtatggtgtacaggatgtccgctatgaagatgtgcagaagcctgaaattgaaaatgcaaatgatgttctgattaaagtacatacggcgggtatatgtgggtcggatatatcgcgctttggtaaaattggatcatataaccccggtctgacctgggggcacgagttttccggcaccgtagagagtacggggagtggggtcacctcggtaagtaaaggcgatcgcgtcacggcttgtaactgcttcccctgttttcattgtgactactgtaaacagggaaattatgcccgatgtacgcatatgaaggtgctgggaggccaggtcaacggtgcttttgctgaatacattcggatgccagctgagaatgtcctcaagttacccgactctatggactttgcgacagcaagctttattgagccatccagcgtggttgtgcatggcatgcggcaagttgatatcaagcctggtagcagtgtggccattgttgggtgcggtactattggcttacttgccgttcaatgggcaaaaatctgcggagcgggggacgtatttgcctttgataccgacgaagataaactcgcagtagcgacgaaaacaggggcaacggcaaccttctgcgtcaaagatgaaaactatttatcccggttccatgaaatcacctatgacaaaggtgtcgatatcgtttttgaatcatctggtaatgctgcagggatcggctcatccctgcttctggcggcgaaaggcggcgcggtggttctcatgggtatcccgtacggtgatgtcgctttaccccggttgaattttgaaaaaattgtgcgtaatgaattgaacgtcattggttcctggaactcgatttctgcaccgtttcctggaaaagaatggcagacatccatccattatctcagttctggaaagattgatgtctctccactgataacccggcaggttcgaatggaagatgttccgtcgcttttgccagatctttataaccgaaaagcgtttttcgttaaggttctgatcaacgtcgaagcgttgccctga

SEQ ID NO: 257650 - DNA, 786 bp, Klebsiella pneumoniae
gtggctcaaaaatggttacaacgaatcttacttgtcaatgatgacggtattgacgcgccgggaattaaattgcttgaggatgtggcacaacagcttgccgatgaagtctgggtcgtggcacctgcaactgataaaagcggcgtggctaactctgttagcctcagagaaccggttcgagtggaacagcgggaggagcgccgatatgccgtgcatggtactccggctgattgtgtcacgatggctgttcagcatttaatgaaggagcaacttccgcaactgatactgtcaggcattaacaatggttccaatatcggttttgaaaccgtgctttctggaactgtgggagcggccatcactggcctcttgcttggcgttccgtcggtcgccctgagtcaggacaagcgacctgaagatccggtgaactggcgaaccgcagaaacattttgcctgcccgtcctggacacgttaatcagtcgaggattaccaactgattgctgccttagcattaattttcctgacttgcctgcggacaagattaagggaattaaagccacgcgtcaggggattggcaaagtgaaaggattacaggttattcccacaacagacccacacggagaagattattactggatccgtgtggagcatgggatcgccgagtttcctgagcatagcgaggcaggggcggtttcagagggatatatctctgtcacgcctttaatgtttgagagaacggccacggaaagctggcatcagctttccgtggatctgagtgcgtcgcccttgtga

SEQ ID NO: 257651 - DNA, 792 bp, Klebsiella pneumoniae
atgaaagatgattattattggtgggatctggaggggactgctttcaaaggggtactttatgattcgattaatacatattttctgtatgatcattcctacgctgattggaatgagttctctaaagcagatccccatatggcatatgcgcatttgacctatattagatttaacgcattagaacaacaattcgtagatttaagagtcatccctcaaatgctaggggttaataatttgccattggtttcaaaagtaagaaatataaatcgatatgattggcttaaggcaattgttgatttggcattatttagattttcaagccttcgcgatataacctttcattttgttaatgaggttttagaacttaatatcccagattactctttaaatattaaacaattcggtaagattattaaagacactcattctgatattttgagtaacttaaaaataattgattcctctggtggtcctctacgtacagatagaaatacaagagctcataagggattctgtaatttatacaccgatgatgatgagatgtttaagaatatgtcgtggatagagggctatggttcacacttagaaggatatgatttaaatgtaatatatgaaaaatcaagagataaaatatacgatcttgtagttaatgaaatacaaagtgctctctcttcttgtaaaaatattgtcgatgagctttatttttattatagagataggcatgaagagctatctataaattccaggagtggtgtatctgcacatttctataattatcatggaaagaaggagtaa

SEQ ID NO: 257652 - DNA, 1242 bp, Klebsiella pneumoniae
atgaaaaaatatgatcaggttgataaggcttttgattttttagtaggaaaggaaaatcggcaagaattttttactattgctgatttagcagtggctactggttggaaagttcagacatgtaaaacatatccaactaaaagatggagtaaatatatatcaagggatggcgctcaatataccacacttggattaaaatacttaagtaaggaagacttcagaaatcttcatagtcagaagagcgttgaaccggccaaaagtgagcgaagcattaatttaaaaaaagcaagagagttcgctatgcttgctgtttctgtttacaataatccatttacagagtttaaaactcatggttttatagttaatgtagttatagcatatacatcattatttcatgctatattcgcaaaaagaggtgttgattatttttacttgaatgatgatggctctcataaaattgttgatggtgacaaaaaagcgtgggaactgaaaacctgctgtgaaaaatattggcttggaagaaataccccagaaaaatcgaatgtattttttttaataggtttacgtaatatcattgaacaccgaggtctccctgaaatagatacactaacttttggtgagtgccaggcttcaataaataactttgaagatattctcattaacgaatttggtgatgaaaatgctttaatggtaaacttatctcttgcaatgcaacttacaaggatgtctcagcaagcgcagatcgacgctttgaagaaagtccaatcaaaaaatttcactattgttaagaaatatatcgaggattataaaagagacttggagcaagaaatattagaaagtcaacaatatcgactcagagctttgttagtccccttgattggtaaaaaggcatcaagttctgatatttctatagagtttatcaatgttaataatctcaccgaagatgaacttgagaaatttgatactggaattgctttcatcaaaggagtggaaaatcaatttaagttgaaacctaaaaaggtagttgagttggttcaaaaaaaacataagtcttttaatcttagtactcatgcaaagttttggaagcattttgatgtcagaccatctcatgtagataaaactctaaaagggaagtactgtggttatatcgaaggttttgatgggtatttatataatcaggaatgggtgcgtaaaatactaagtgtttattctgatagtaaagagttggataaggttttaggctga

SEQ ID NO: 257653 - DNA, 195 bp, Klebsiella pneumoniae
atgtacttaattttgaaatctaacagagggctacatgttcaattatcggcctctgatgccgaagggctattgaatgttgctgcaatgtgcagattattagatgttgactataacggcgtgagacaacgtatttttcgtggtgaaactgtagagcaagcgattcaccattttttagataagaaaggcggtgaataa

SEQ ID NO: 257654 - DNA, 225 bp, Klebsiella pneumoniae
atgcttctcatgaattatgaccgtgtgatcactcacaaaggcgcttcccttattctctctgaaaagatgattaagcaagcggctgattttctcaatgtggacgttgagactattcgagaggctacagagaaattctggcctacagccacgatcacaaaatcaaatacccctcacccatcatcagggcttgaggcacgattaaaactaatagcaaaaggaaaataa

SEQ ID NO: 257655 - DNA, 339 bp, Klebsiella pneumoniae
atgactaatgacacaattcaatctctactccttagtttcgaagataactatcatctcccgctactacaggaagtgaataaaacatacatcacagcaacgccggagagcctcctgaacgctgtcaaacatactgagcaagccatcacagcccttgagcacctgcaaacctctgtagcgcgtttggtggagcgtgacggcagcacaataaccgctgatcaggcgtggcgagcagcaaatgcccttgaagagcttgcttgcagtctccagtacgtcaccgctgaacttgcagagcttgccatagagatcgcggaagaatgcgctgtatgtgaaagtgaataa

SEQ ID NO: 257656 - DNA, 750 bp, Klebsiella pneumoniae
atgaccgacattataaacggagacatttacaagtattttggtacagaagaagcattcatcgaagcgagccacattaccaaccttaaaacaggtgagcgcgtggaactctccaacgatgcaaaagtattatactcgcgtatgcgcaagcgttatcacttctttaccacgtcaagaactggcgggaataaagggatctaccatgacaacatagaagagttgaaagatagtgctaatctctcgaagagcacaacgctacgatgtttgaacgtgttaaaacaagttggtttagtggttgccacgctgtcaggccgatctaaccaatggactgtagccaacattacaccagattctttcttgcttgagcgtaacgcagggacgtcaaaaaatcctgtctgggtagattgcctaaaacatccagtgtttggcaaagctaaagaagacgtagcgccagaggcagaggaagaaaaacagcagtcagtgccagaagaggccaaagcagatccgaagccggagaagccaaagcaaatgcctacgaagaaacccgcctccataccagctaaagaaattaaaatagagccagtcaatttaaactttcttgatagttatcgggatgaatgggaaaacccagacaagaatttacctgtttcacaacatccgaaaatcagatggctacttattaacggatacctggacacagagaagaatccaaaacttaatacaatttatgaggaaataaaacatctatgctaa

SEQ ID NO: 257657 - DNA, 2322 bp, Klebsiella pneumoniae
atgcgtaatctcatttattccgatttaacgcccaaaggattatctcttttaataaagcgggccctctattctgtatgtatggtattttctttatcaacgtcgatttatgccattgaatttaatacagatatgatcgatgccgaagatcgggaaaacgtcgatctctcgcaatttgaaaaaaaaggctacatccctgttggtacctatttagtacgcgtacaaataaacaaaaatacgcttccgcgcgcctataatctcgaatggataaaatcggataatgaaaatgggtctctgctttgcctgactcaagaacatctaacagaatttggttttgcggatgcgtttatcttgtctctacagccgctgaacccgcaaggttgcctcgatctgagccataaatcggacctggtcactcgcctggacaaagcgaatatgatactaaccttaacggttccccaggcgtggatgaagtatcgggccaaaaactggaccccgccggagttctgggacgtgggggttactggttttatcatggattataacctctacgccagccagtatgttcccagccatggcgacagcaaccaaaacgtaaatacctacggtacgctgggtttcaacttaggcgcatggcgtctacgcagcgattatcagtacgatcagtcgtttactgaaaataactccaacggcagcaacagcagtctgccgcgaacctatctgttccgccctattccatccctggcgtcgaaactcaccatggggcagtatgatctcagttccgatctctacgatacgttccattttaccgacgcttcactggagagcgacgaacagatgctaccgccggacctgcgcggatacgcgccgcaaataagcggcatcgctcaaacaaacgccagggtcaccgtttcacagaatggccgtactttgtatcaaacttccgtttcccccggaccgtttacaattaccgatctggggaccacgttgcaggggcaactggatgtcaccattgaagaagaagatgggcgtaaaagcacgtttcaggtcggttcagcctctatcccgtttctgacgcgtcagggccagatacgttataaaagctccgtgggcaagcctacatcaaccacccacaacgacattaacaacccactcttctggacgggagagatttcatggggctggctgagcgatatctctttatacggcggcgcgatcgttaccgccgacgactaccaggcggcgaccagcggaatcggctttaacctgaatagctttggctccctctcctttgatgtcacacgggcagaggccaatttacgcgatgacaatgaaggcaagcagcgtggcttcagctatcgcgcaaactattctaagcgcttcgaggaaacgggcagtcagataaccttcgcgggttatcgtttttcggataaagaatatgtcacgatgagtgaatatatcaattcgcgtgatggtaacaataccaacaataatgaaaaagagagctatgtcctctcatttaaccaatatatcgaaccgttggcgctaaacagctatctgagcattacgcgcaatacctactggaatagtgataccaataccaactattcattctccgttagccgcaactttgatattggcgatttcaagaatatgtccgcctctctggcaatgagccgcgtgagctggggcgatgatgaagaaaatcaatactatttctctatttcagtaccatttgaaaacaaccgcaatgttacctacagtttgcaacgctacggcgacgacgccgctacacaaactgcaacatactatgacagttcggaccgcaacaacacctggaatttatccgtatctggcagcgataaagactatagcgatggcgaagcggccttgcgcggttattaccaacactactctccctggggccggctaaatgttaacggcagcgtgcagcccagcaactatcgcacattaagcgcgggctggaacggttcgtttacggcaacgcgttatggggcggcattccatgattatagccccggtaatagttcccgcgtcatggtggatgcggatagcatctctggcgttgaagtgaataacaatcgcagtaagactaatatatttggtatttccgtggtcccatcggtgggtaactatactaccgccacggtaatggtaaataataataacctacctgaaggtgtcgatgtcactaactcggttattcgcaccacgctaaccgagggagccattggttatatgccgctcagcgcgacctggattggcccctatatttccatacactttttatcacttaacccatga

SEQ ID NO: 257658 - DNA, 573 bp, Klebsiella pneumoniae
atgttaaagaaaacactgctcgctgttgccaccactacccttttatctacagctgcttttaatgcaagcgcaatcgatcagggtcacggtatcgttaatttttccggcacagtaattactgcaccttgctctgttgctccggaaagctctcagattgacgtaaatctgggtcaggttgctgacaccgtgctgaatggcggccagtattctcagtctgctgacttcactattcaactgcgtgattgcgtactgaccagcactgatactgaaggtaaaaccactactattaacaaagttaatgtgacttttacctctgctaacgttgatgtttccgacactagcctgatgtccaacaccaaagaaaacaactacggcggcgcaactaacgttggcgtgcgtatcctggatgcaggttacaacaccgttactctgggcaccgcagttccggtcatgtttaccgataccaacccgactcaggatctgaacttccacgcacgtatggaatctccgaccaaaaaagctaccgaaggtgatgtttacgctcaggcaaactacgttctggcttatcaataa

SEQ ID NO: 257659 - DNA, 852 bp, Klebsiella pneumoniae; identical to SEQ ID NO: 188529

SEQ ID NO: 257660 - DNA, 1824 bp, Klebsiella pneumoniae
atgtggtcggcaacgaaagaaaaatcaaatccattgtcatcgcgtgacgacgttattcgcgctgttacaacgatgctgagcgcgctcgacgcccaatttccggccggtcaggcgcagttcacgctcggcgatacctgcgcgcattatgatacgaatattgccggtatggaggggttatccagagcgctatgggggctatttccgctgtgggcgggcggtgaagagacgccttttgctgagaaatatatccaggcgattaagctaggtaccgatcccgatagcccacagtattggggcgatacggggccatacgatcagcggctggtggagatggcggcctacggtctgggcctggcgttactgcagacgcgcctgacggatgtattcagcgaaaaggaactggcgaatttccaccgctggctgaatcaaatcaccgatgcgcagatgcccgacagcaactggaactatttcgctattatcgttcagcttgggtttaagcgcgcgggattagccttcgatcaggccgccatcgatcgccggtttgcgatgatggaagcctactatttgggcgaaggatggtactccgatgggccggggcggccaaaagattactacatctctatggcttttcatttttacggcctactgtacgccaccctgagtccggatgatgcagagcgggccgccacgttacgcgaacgctcccgtttgtttgcccgggattttatctatatgtcggcggcggatggttcatccgtaccctttgggcgcagcctgacctatcgtttcgccatgattgccttctggagcgcggtggcgttttccggggtggacgaattttctcctggcgtggtgaaaggactgatcctacgccatttacgctggtggcagcagcagccgattttcgatcgcgacggtattctgacgctgggttttgcctatcccaatctggcgatgtgcgaggactataattcgcccgggtccccttactgggcgctgaaggttttcctgattctggcgttaccggcagatcatgatttttggctagcggaagagttaccgctgccgccgctggctaaggtgcgcgtgataccccaagcggcgcaaattttgcagcacgatcgccattctcgccatgtaacgatgctgacgtcgggccagctggagttaaataattacgtcaataccgaagccaaatatacccggtttgcctactccagccgctttggttttacccttgagcgggggcggtatggccttaagcatgccgcctgcgactcgatgctcctgctatctgacaacgataattactggcgcggacggcgcgaatgcgaggaagtgacggtagcggagaacgcgattttctgccgctggtcgccgtggtcagacgtacatatccgcacctggcttatcccctgcggcgactggcacgttcgggtacaccacattgccagcgctcgacggctacagtccgtggaggggggctttgcggtactgaaggcggagccctgcctggaggccggcagcagcctgattctggccagcaatgggagcagcatgatagccaatcttgctcccggtatcgccaggcagggcgaggccgttatcacgccgcccaatagcagtatcatgtttgcgccctgcgcggccattcccactttaaccaccgagctggctcctggcgaacattggttggcctgtgcggttatcgccagcgctgagataaataaagtttttgccgatatgccgttactcattcgacaagatcgccgctttattattatggatagccaaaaagaaacccagcaaactatttatttttaa

SEQ ID NO: 257661 - DNA, 1269 bp, Klebsiella pneumoniae
atggaaagtacctatacgaataacaaagttgagtattacaaaataagcgccttcatttttctgtattttttcacctggtctgccagtattggcctgctcgccatatggttagggcaaaaagcgaatctaagcggcgcggttattggcaccgtctttgccgtaaatggcgtattttcagttgttcttaaacccatttatggctatatacttgataaaatagggatgagtaaatatctgctctattttgtggtgctgatgtcggcattaatggcgcctttttttatttatgtttatcagccgctactgttaaccaagacgatgctgggtattattgtcggtgcgatctatttaagcttcgcctggtatgcgggcgtcgcggcctgtgaatcctataccgaccgttacagccgtctgaacaatatggagtttgggcaaattcgcatgtggggatcgctcggatgggcggtagcgtcttctttctctggcctgctgtttaacctctcgccagcgtataactttatcctgggaagcgtcacgtcgatagtgatgctggccgttttattaagcctgaaagtcaacgaaaatgcggagaacgccgcgcaggtgctggtcaaagataaaatttctccggcggatgtttatacccttctgcgtaaccgtaaattctgggcattctgcctgtacgtggccggggtggcgtggatgatgtttatcgcggagcagcagttttcgcgctattttgtcacgttctttgccgatgtccataaaggcaacgccatttttggttatctgggaacggtacagtccgggatggaatttattatgtatatggtcattccattctttgttaactacattggcgcaaaacgtggattattaattgttggcctgctggtaggcgccaggttggtgatttctggcctgtgtgattcccatctgttgatttcgctattaaaaccattgtatggcctggaaatatgcctgctgttggtttcagtatttaagtatatcgccgagcactttgacaaacgcgttaatgcaacgatgtatttgttaggttatcaggcgatgttatatgttggtaatgtggtcgtctcgtcacctgccgggtttatgtacgatcgtatcgggtttgagaaaacgtatattattatgggcatggttgcgctggtttttaccgtgatatcggcatttaccttatcgtcatgccagagtaaacggcgcagctctgccaccctcaatgtttcagaaaataacgcatcaaaataa

SEQ ID NO: 257662 - DNA, 1191 bp, Klebsiella pneumoniae
atgttaaataatatcgtagaggaaccattgcgcgatttccccggcgagccgatctcaatggattgcttccgggaagaaatgaagcgggcgcgtgaagatgtccttgaactgattggccgtcatttaacggaattcggtgaacaatttcccgctgagacctgcgtcgaaggttattatccgttgactgaaaacgtcgagtggacgaccagtttttggaccggacagctatggctggcgtgggagatgagcggtgaagataagtttcgccagatggcggagaaaaacgtgcggactttcggtctgcgtattgcagggcgtcacgacaccaatacgcatgatttgggctttctctacacgctttcctgcgtggcggcctggcgtttaaccggtaatcgcgacgcgcgcgggttctcgctgatggcggcggaggctctgttggagcgctttcacgcgaaggcgcagattattcaggcctggggcgatctcaacgatcccgcccaggccgggcggatgattattgactgcacgatgaatctgccgctgctttattgggcaagcgagcaaacgggcgacccgcgcttcagggatgcggctctggcgcacgtcaggcaatcggcggcttttctggtacgtgaagatgcttcgacctggcacacctattatatggatgttgtcagcgggaagccgcgctatgggaatactcagcagggttatgccgatgattcatgctggtcccgcggccaggcgtggggaatttatggttttctgctcagctatatctataccggcgacagggcgctggtcggcctggcaaaaaaactggccaactatttcctcaaccgcctgccagaggactatgtctgtcattgggatctggcgctgataaacaccgatgcgctgcgagactcttcttcggctgctatcgccgtatgcggtatgctggagttggttaagcagttgccaacgaccgacccggatcgcgaacgctatcaacagtgggcgatggcgataatggcctcgctaacgaagggctatctgatggcaaaaagtgacaagggtaatggtttactcaagcactcggtctaccatctggcgagtaataaaggcgtcgatgagtgctgtagctggggggactatttttacgttgaagcgctgatgcgcatgacgcagagctggaaactgtactggtaa

SEQ ID NO: 257663 - DNA, 492 bp, Klebsiella pneumoniae
  misc_feature (464)..(473): n is a, c, g, or t
atgagcaacatcctgattattaatggcgcaaaaaagttcggccactctaacggccagctgaacgacaccctgactgaagtcgcggaaacctatctgcgcgacctcgggcatgatgttaaagtggtccgcgccgatagcgactacgacgtgaaaaccgaagtgcaaaacttcctgtgggccgattccattatctggcaaatgccgggctggtggatgggcgcgccgtggacggtgaaaaagtacatcgatgacgtctttaccgaaggtcacggcgcgctgtatgccagcgatggccgcacccgctccgatgccagtaagaaatatggctccggcggcctgattcagggcaaaaaatatatgctgtccctgacctggaacgcgccgatggaagccttcaccgagaaagatcagttcttccacggcgttggcgtcgatggcgtttacctgccgttccataaggccannnnnnnnnntttacctgccgttccataa

SEQ ID NO: 257664 - DNA, 2259 bp, Klebsiella pneumoniae
atgagcgatatggcagagcgcctcgcgctgcatgaatttacggaaaacgcctaccttaactactccatgtacgtcatcatggacagggcgctgccgtttattggcgatggcctgaagccggtccagcgtcgcatcgtctatgcgatgtctgaactgggtctgaacgccagcgccaaattcaaaaagtccgcccgcaccgtcggcgacgtgctgggtaaataccatccgcacggcgatagcgcgtgttatgaagccatggtgctgatggcgcaacccttctcttaccgctatccgctggtcgacggtcaggggaactggggggcgccggacgatcctaaatccttcgccgcgatgcgttataccgaatcccgtttgtcgaagtatgctgaactgctgctgagcgaactggggcagggcaccgttgactgggtaccgaactttgacggcaccctgcaggagccgaaaatgctgcctgcgcgcctgcccaatattctgctcaacggcactaccggcatcgccgtcggcatggcgacggatattccgccgcacaacctgcgtgaagtcgctcaggcggccattaccctgattgaaaaaccgcaaacgtcgctcgacgatctgctggatatcgtacaggggccggattatccgaccgaagcggaaatcattaccccccgcgccgagatccgtaaaatctaccagaatggccgcggttcggtgcgtatgcgcgcggtgtggacgaaagaagacggcgcggtggtgatcagcgccctgccgcatcaggtttccggcgcccgcgtgctggagcagatcgccgcccagatgcgcaataaaaagctgccgatggtggatgacctgcgcgacgaatcggatcacgaaaacccgactcgcctggtgattgtcccgcgttctaaccgcgtggatatggagcaggtgatgaaccacctgttcgcgacgaccgatctggaaaagagctaccgtatcaacctgaatatgatcggtctcgataaccgtccggcggtaaaaaacctgctggaaatcctctcggaatggctgactttccgtcgcgataccgtacgccgtcgtctcagctaccgtctggaaaaagtcctcaagcgcctgcatatcctggaaggtttgctggtggcgtttctgaatatcgatgaagttatcgaaattatccgccacgaagatgagccgaaaccggccctgatgtcgcgcttcggcatcagcgaaacccaggcggaagcgattctggagttaaaactgcgccatctcgcccgactggaagagatgaagatccgcggtgaacaaagcgagctggaaaaagaacgcgaccatctgcaggccattctggcttcagaacgcaagatgaataacctgctgaagaaagagctgcaggccgacgctgacgcctacggcgacgatcgccgttcgccgctgcgcgagcgtgaagaagcgaaagcgatgagcgagcacgatatgctgccgtccgagccggtcactatcgttctgtcgcagagcggctgggttcgtagcgccaaaggtcatgatatcgacgcgccggggctgaactataaagcgggcgacagttttaaagccgcagtgaaagggaagagcaatcagccggtggtcttcattgacaccaccgggcgcagctacgcgattgacccgatcaccctgccgtccgcacgcgggcagggcgagccgctcaccggtaagctgacgctgccgccgggggcgacggtggaacatatgctgatggaggccgatgatcaaaaactgctgctggcttccgacgcaggctacgggtttatttgtactttcaacgatctggttgcgcgcaatcgcgccggtaagacgttgattagccttccggataacgcccacgtgatgccgccgctggtgattgaggacgagtccgatatgctgctggccattaccgccgccggccgcatgctgatgttcccggtcagcgacctgccgcagctgtcgaagggcaaaggcaacaagattatcaacatcccgtcggcggaagcggctgcgggccaggatggcctggcgcatctgtttgtcctgccgccgcaaagtacgctgacgattcacgtcggcaaacggaaaatcaaactccgtccggaagagctgcaaaaagtcaccggcgagcgcggccgccgcggctctctgatgcgcggactgcagaagatcgaccgggtggagattgattcaccgcgtcgcgcctccgcgggcgatagcgaagagtag

SEQ ID NO: 257665 - DNA, 2184 bp, Klebsiella pneumoniae
atgagcgcaatatccctgatccaaccggatcgtgaccttttctcctggccgcagtactgggccgcctgctttggccccgcgccgttcttgccgatgtcgcgagaagagatggatcaacttggctgggatagctgcgacattattctggttaccggcgatgcctatgtcgatcacccgagcttcggcatggcgatctgcggacgcatgctggaagcgcaggggttccgcgtggggattatttcccagccggactggaataataaaaacgactttatgcgcctgggtaaaccgaacctgttcttcggcgtcaccgccggtaacatggactcgatgatcaaccgctacaccgctgaccgtaagctgcgccatgacgatgcttacacggcgggtaacgtggccggcaagcgcccggatcgcgctacgctggtctacactcagcgctgcaaagaggcgtggaaagatgtgccggtgatcctcgggggcatcgaagccagcctgcgccgtaccgcgcactatgactactggtccgataccgtgcgccgctcggtgctggtggactctaaggccgatatgctgatgttcggcaacggcgagcgtccgctggtggaagtggcgcaccgtctggccgccggcgagcctatcgggcaaattcgcgacgttcgcaacaccgccatcatggtgaaagaggcgctgccgggctggagcggagtcgattccacgcgtctggatacgccggggaaaatcgacccaatcccgcatccgtacggtgaagatctgccgtgcgcggataacaaaaccgtcgcaccgccaaaacaggaagcgaagcgcgtcaccgtgcagccgccgcgtccgaagccgtgggagaagacctacgtcctgctgccttcctttgaaaaggtgaagggcgacaaggtgctctacgcccatgcgtcgcggatcctgcaccatgaaaccaaccccggctgcgcccgcgcgctgatgcagaaacacggcgagcgctatatctgggttaacccgcccgctattccgctttccaccgaagagatggatagcgtgtttgccctaccgtataagcgcgttccgcatccctcatacggcgatgcccgcattccggcctacgagatgatccgcttctcgattaacattatgcgcggctgttttggcggctgttccttctgctcgattaccgagcatgagggccgtatcattcagagccgctccgaagattcgatcatcaatgaaatcgaagcgattcgcgacacggtccccggctttaccggcattatttccgatcttggcggtccgacggctaacatgtatatgctgcgctgcaagtcgccgcgcgccgagcagacctgccgccgcctgtcatgcgtttacccggatatctgtccgcatatggacactaaccatgaaccgacgattaatctttatcgccgcgcccgtgacctgaaaggcatcaaaaagatccttatcgcgtccggcgtgcgttacgacatcgccgttgaagacccgcgctatatcaaagagctggccacccatcacgtcggcggctatctgaagattgccccggagcatacggaagaggggccgctgtcgaagatgatgaagccgggaatgggcagctacgatcgttttaaagagctgtttgatacctattcgaaacaggccggtaaagagcagtatctgatcccttactttatctccgcacacccggggacgcgcgatgaagatatggtgaacctggcgctgtggctgaagcagcatcgtttccgtctggatcaggtgcagaacttctatccgtcgccgctggcgaactcaaccaccatgtattacaccggtaagaacccgctgggtaagattggctataagagtgaagatgtggtggtgccgaagggcgacaaacagcgccgcctgcacaaggcgctgctgcgctaccacgatccggctaactggccgctgatccgccaggcgctggaaaccatgggtaaaaagcacctgattggcagccgtcgcgattgtctggtaccggcgccgacgatcgacgaaatgcgcgaagcgcgtcgccagaaccgccatacccgtccggcgctgaccaagcatacgccgattgtgcaccagcgctcgaacggcggggcgacggcgaagaagcccgtaaaacgcggtaaggtcgccggtcgttaa

SEQ ID NO: 257666 - DNA, 495 bp, Klebsiella pneumoniae
atggaacgctttctggaaaatgctatgtacgcctcgcgctggctgctggcgccggtttattttggcctttcgctcggtttgattgcgctgacgatcaaattttttcaggagatcttccacatactgccgcatattttcagcgtcagtgagtcggatatgattctgaccctgctgtcgctggtggatatgaccctggtgggcggtctgctggtgatggtgatgttctccggctatgaaaattttgtctcgcagctggatatcaacgaaggtaaggagaagctcagctggctgggcaaaatggacgccacttcgctgaaaaataaggtggccgcctccatcgtggcgatctcctctattcacctgctgcgggtgtttatggacgcgaaaaacgtcccggacaataagctgatgtggtacgtcatcatccacctgacctttgtgctgtcagcctttgtgatgggctacctcgatcgtctgaccaaagtgaaacactga

SEQ ID NO: 257667 - DNA, 888 bp, Klebsiella pneumoniae
atgacgcgattaacggccaaagatttcccgcagcagctgctcgaatactatgactactacgcccacggcaaaatcagcaaacgcgagtttctccagctggcggggaagtataccgtcggcgggatgaccgcgctggcgctgtttaatctgctgaagcccgactatgctctggcagagcaggtaccgttcaccgacccggatatccgcccggagtatattcattatccctctcctgacggccacggcgaagtgcgggcttatcaggtgatgccggcgaaaatagccgacaaagcgcctgccgtggtggtggttcatgagaaccgcggcctgaatccctatattgaagacgttgcccggcgggtggcgaaagcgggctatatcgcgctggcgccggatggcctgagctccgtcggcggctatccggggaatgatgatgaaggccgcgcgctgcagcagaaagtcgatcccgtgaagctgatgaatgatttctttgcggcggtcgcgtttatggcgaagcatccgcaggcgacggggaaggtcggtatcaccggtttttgctacggcggcggcgtcagcaacgcggcggcggtggctatccctgagctggcctgcgcggtgccgttttacggccgccagccgccattgaaggaggtcgataaaattaaagcaccgctgctgctgcactatgccggcctcgatagcggcattaatgaaggctggcccgcctatgaacaggcgttgaaagaataccataaagtctacgaggcctatctctatcagggcgtgaatcacggctttcataatgattccacgccgcgctacgatcgggctgcggctgacctggcctggcaacgcacgctggcatggtttgaacggtatttacgttag

SEQ ID NO: 257668 - DNA, 288 bp, Klebsiella pneumoniae
atggaaaatcattttggtaaaggcttaatggcggggctacaggcatcctatgctgataccgctacgcatgcggcgaacttttgcgccgactataaacgcgggtttgtgcttggctactcgcaccgcatgtttgaaaaaaccggcgatcgccagcttagcgcctgggaagcggggatcctcacccgtcgctacggtctggaaagagattgggtgatggacttctttaaagagggaaattcgtctaccgcgcagcgctactttatggcgggctatcggctggaaagctaa

SEQ ID NO: 257669 - DNA, 867 bp, Klebsiella pneumoniae
atgtcagagaataactaccagccacctaaagtgtgggaatggaagcaaaacaacggcggcgcattcgccaatatcaaccgtcccgtttccggcgcaacgcacgatcgggtgctgccggtgggcgcgcacccgcttcagctctattcgctggggacgcctaacgggcagaaggtgaccattatgctggaagaactgctggcgttaggcgtcagcgacgcggaatacgacgcctggctgattcgcatcggcgaaggcgaccagttctccagcggctttgtcgaggttaacccgaactcgaaaatccccgcgctccgcgaccactccaccacgccgccgacccgcgtttttgaatccggcagcatcctgctctatctggcggaaaagttcggcttcttcctgcccaaagatccggcaggccgcactgaaactctcaactggctgttctggctgcagggctcggccccgttcctcggcggcggttttggccatttcttcagctatgcgccggtgaaaatcgaatacgcgatcgaccgctttacgatggaagccaaacgccagcttgacgtgctcgacaagcagcttgcccgcggccgttttgtggcaggagaggagtacaccatcgccgacatggctatctggccgtggtacggcaacgtggtgctggggaacgtttacaacgccgccgagttccttgatgccggtagctataaaaacgtgctgcgctgggcgcaggacgtcggcaaccgcccggccgttcagcgcggacgtatggttaaccgcacctcaggcccgctcaacgagcagcttcacgagcgccatgacgccagcgacttcgacacgcaaaccgaagataagcgccaggcgtaa

SEQ ID NO: 257670 - DNA, 561 bp, Klebsiella pneumoniae
atgagcacaccttcgcatctgactgcccaaccgctggtctgggggcatggcccacgcacctttgaggtgttcctcgaacccacctgccctttctccgtgcgcgcctttaataagctggatgatctgctggatgaagttggcgcggataacgtgacgatcaaaattcgtctccagtcccagccctggcatctgttttccggcgtcatcgtgcgctgcattctcgccgcttccaccttgccgcacggccgggagcaggcgcataaggtgcttaaagccgtcgccgaccacagcgaagagtttgagtttaccgaccactgcagcgggccaaacatggacgccacgccgcagcagattatcgagcgtatcgaacgctatagccacgtttcgctggctgcggcgtttgcccgcccggagctgcaaaacgagatcaaatggcacagcaagtatgcccgccagaacggcatccacgtgtcgccgacctttatggttaacggcctggtgcaggcggatctcggcagcggcgacgacgtcagcgtatgggccgcgcggattctggcttag

SEQ ID NO: 257671 - DNA, 339 bp, Klebsiella pneumoniae
atgttgaagaaactcgcttttattgccccgcttttggcgcttatcgccctgcttatctggtggttcacgccccgctacgccgaagaggatgtcgcgtactaccgctccgtcttctgcgcgatcgaccatcaggacagccgcgcgtttctccgcgatatggaaaatatgattgaaggcggcaattcggactatgcgctacataagacccattacgtgcccgccctaggccaacggatgctggacacctggcagcagctcacgccggaagaacagaaaagtatcagcaaggaccagcagcgctgtcgccagctgatgagcgaaaaacagcgttcgcgctaa

SEQ ID NO: 257672 - DNA, 591 bp, Klebsiella pneumoniae
atgccaggcgacgcgggttttaccgaaggcgatggcgctggtggcgtaatccagcagcagcggcggatggccgacgcgcgggaacaccacgcacagcgggttggtgccgaagcggctgtctttcccacggaacggggcgaccatcacgttgccaacgacgttaacgaaatggatagagatcattccggcggccgcgcactgttccgcccagtagccgatgcggccaatatggtgcgcgttgcgcagcgccacggcggccaaaccgtgctgttttgccttctcaataccgatctgcatggcttcatgggccaccacctggccgaatccgccgttgccgtccagcgtgaccaccgcgcccgcgtccttcatcacgctggcgtggcggttgagctggagatagccctgcgcgtgggagcgtacgtagcttgggatcataccgacgccgtgggaatcgtgcccggccaggttggcggcaataaggtggtcggcgataagcgacgcttcggtgggggagcttcccatatgggtgaaaagggttttaacaaattgatgcagatccgtggcctggaagcgatgtcctgtttgcactga

SEQ ID NO: 257673 - DNA, 873 bp, Klebsiella pneumoniae
atggaacttcgttatttgcgctacttcgtcgccgtcgccgaggcgcggcacttcactaaagcggcaaaagaacttggcatctcccagcccccgctaagccagcaaattcaaaggcttgaaagagaaattggcacaccgcttttccgccgtttaacgcggggcgtcgagctgacggaagcgggggagtcgttctatgaggatgcctgccagattctggcgttaagcgacgcggcgctggaaaaaaccaagggaattgcccgcgggctgaacggtcgcctctcgctgggcattaccagctccgacgcttttcatccgcaaatctttagcctgttacagcaatttcagcaaagttacccgggggtgacgttacatcaggtcgagggcaatatggcaacgctgatgggggcgcttggcgaagcggagctggatattgcttttgtgcgcctgccctgtgagagcagtaaagcgttcaatctgcggattatcgatcaagaaccgatggtgattgccctggcgcgttcgcacccgctatcgtcccaccgcgagctgacgctggagcagttgacggacgtggcgccgattcttttcccgcgtgaagtggctcccggactctacgaactggtgtataacagctatctgcgcgccggtattgatatgcaaagcgcctatcagtcatcgcaaatttcatcgtcattgagcatggtggaggccggattcggctttgcgctggtgccgcagtcgatgacctgcatcacgctgcccaacgtgagctatcatccgctgatggggacgccgctgaaaaccgatatcgctatcgcctggcggcgctacgagcgctcgcgcacggtgaagcgttttttggccatgttttaa

SEQ ID NO: 257674 - DNA, 1338 bp, Klebsiella pneumoniae
atgtcataccgggaaaatcatgctcaatggaacgcctttattcacgccctgaaacaggaagtcaaacccgcgctgggctgtaccgaaccggtctccgtcgccctcgcctgcgccgtggccgcgcggcagctctccggcgcggtggtgcgtattgaagcggcggtttcgccgaatttaatgaaaaacggcatgggcgtgactatcccggggacgggaatgaccggcctgcctatcgccgcggccctcggcgccatcgccggcgatccgcaggcaaagctcgaggtgctgaagagagccacccggcgggaaatggaagccgccagggcgctgcttgaggccggcgccgtgcgcgtggtactgcaggagccctgcgatgagattctgtacgttcgcgctaaggtctacgcgggggatgagcacgcgacggtgaccatcatcggcgaccacaccaacgtcgtggccattgaaaaaatgggccactccctgtttatcaagcacgaaagcgcggccagcgatcgtggcgtcgacccgctgacgctggttgcccgcagctcactgcgcgatatctatgatttcgtttgcgaggttccgccgcacgagatcgcgtttattctcgaggcgggcgcgatgaacgacgccctgtcaaagaagggcctggttaaggagtggggtttgcatatcggcccgactctgaagcgccaggtcgacaacgggctggtttccgacgatatgtttaccgagatcctctaccgcaccagcgccgcgtcggatgcccggatgggcggcgcatcgctaccggcgatgactaactccggttccggcaaccagggcattacggcgaccatgccggtggtggtggccgccgaacgtcttaacgccagccggcagcagctggcccgcgcgctggcgctctcgcacctggtcgccatctatatccattgtaaactcccgcgcctgtcggccctgtgcgccaccaccaccgccgggatgggcgcggcggcggggattatctggttaatgaacggcagctttgacaccatcgccatggcgatcaacaacatgatcggcgacgtcagcggcatcatttgcgatggcgcttccggcagctgcgccatgaaggtctccaccagcatctcttccgcctggaaagcgattctgctggcgctggataactccgtcgtttccggcaacgacggcatcgtcgatcgcgatgtggaaaactcgattgctaatctttgcgccattgccgggcgggccatgcagcacaccgaccggcaaatcatcgaaattatggcgcacaagcgttatcaggcggtaagcgccgggaacgaagcataa

SEQ ID NO: 257675 - DNA, 909 bp, Klebsiella pneumoniae
atggcttcgacaaccgcagtagccgctatcaaagaatggcggaaaaataataaatttatttgtcacgttaaactcaactataaaaaggcattgcgtaaatgccgcgagatatcgctaatcggagggaaatataaggaatatcagacattatgtgaaaactacgcttgcgcgaaattaaccggcgcaaccgaggggctggttaactttgaagataaacccttcaaagcctatttaaataaaaaaatgtcaaaaagagcgaaactcaatattgctcatggcgcattgaattttatagagaaaaccttccgtcccgaggcgttgccgcagctgtacgatatggcggcgttcggtcgttcattaatcgctattccgctgaaaaacggtacctgtattgatgtgaagcttctggcatcgccttttcaggaggagggggagctgatgctgttaatgttcctcggcgataggcgcgtctacagtatctgtttttcctgtaccgcagatggtcaggcgtggattggcgggatccagggggggaaagacattgataatgaagaagtgaaggcgctgaccaaagagctttacggcatccgccctaaaaacttaattatcacgctgctgtacggctttttgtcgcatttcaatatcaaggagatctatgcgattgacagccattatcatgttaaaagtgagagagtaaaaaccagttattctgagctttggctggaaattggcggcgagaagcatcgtcgcggctggtataaattaccgccgagcgagataaagaaaagcctggaagaggttaaaagcaagcaccgcagccagtttatcaagcgagaaggcttgaaagagctggcacagctggatcttgccgccgcgctacgcgatatttgcgtcaagcgtaacggctaa

SEQ ID NO: 257676 - DNA, 807 bp, Klebsiella pneumoniae
atgatcaagctgtgcgcgacctgcggcacttcttacgacgacggcgacaacaccctgagccggtgccgtatctgtgaggatgaacgtcagtacgtcccggccagcggccaggcatggattgaattagagactctggttcgcacccatgtgaataagtggcagcagcattgcggcgagctgttgagcatcaagacggtaccgaaatttgccatcgaccagcgcgcgtttctgctgctcaccccgcaggggaatattctgtgggactgcatcgccaatctggacgcggcgacaaaaacgctgatagccgcgctgggcgggataaaagcgatcgccatttctcatcctcattactacaccacgatgcagacgtgggcggaagccttcgatgcgcgaatctaccttcatgccagcgatcgcgaatggattatgcgcgatagcccggcaatcacgctgtgggaaggggatgcgctggagatcctccctgcggtgcggctgctgcggctgggcgggcatttcgccggtgggaccgttctgcactgggcaaaagatgacggcatcatgctggcgggcgatattatccaggtgacgccgggggcgcacgccgtttcgtttatgtggagctatcccaatttgctgccgctggcggcagccagcgttgagaagatcgttgagcgtctgggcgatacgccctttgaggcgctgtacggcgccttcgaggggcagaacgtcacgaaaaatgcccggcagatcgttttagattcagcgcagaaatatctggcctgcctgaatacgacggcgcaccgctga

SEQ ID NO: 257677 - DNA, 1611 bp, Klebsiella pneumoniae
atgaagaaaattgccattatcggcgccggtccaaccgggatttataccctgttttcactccttaaacgcggtgaaccgctggacgtgtccatttacgaacaggctgaggaagcgggcgtgggcatgccctatagcgatgaagaaaactcgcgcatgatgctggccaatatcgccagtattgaaatcccgcctctgcagagcacctatctcgactggctgaaggcccagagccggacgcaccttgcgcgctatggcgtcgattatgaggcgttgcacgatcgccagtttttgccgcgcatcctgctgggcgaatactttcgcgaccagttccttggcctggtcgtcgaggccagggaacagggctttcacatccgggtcaatgagtcctgccgggtcagcgacctgcaggcgaccacagaaggggtcagactgtgggtcgaggatgggccggtcgccgaagccttcgacctcgcggtgattgccaccggccacgtctggcccgatgaagaagagtcgacccgcacctggtttcccagcccgtggtctggccttatggaagccagcattcccccctgccgggtggggattatgggcacctcgctcagcgggattgacgccgcgatggccgtcgccgtccagcacggctggtttatcgggtccgacgatgacgccctcgccttcaggctggacgaggcaagcgaggcgctaagcatcgtgctgatgtcgcgctccggcattctgccggaagcggatttttactgccccattccctgggagccgctgaacatcgtcagcgaaagcgcgatggaacacgccatcgccgcgggcagcgacggtctgctcgatcgcgtctttgagctggtagcacaggaaatcgcccttgccgaccccctatggagcgaaaatatcgcccttcacagcctgaatgccgacagctttagcgaggcgtggttcgcaaagcgccagcagcacaacccgttcaactgggcgcaggcaaaccttgaggaagtcgaacgcaacaaacgcgcgcgatacacggttccctggcgctacgcgatcctgcggctgcatgaagccgtgcaggcgatggtccctcatcttaatgaccatgaccgggagcgtttcaaaaatggccttgcgcgggtctttatcgactgctatgccgccattccttcggagtctattcgccggctgctggcgctgcgcgaagcgggcgtcatcagtattctcgccttagggcatggctatgagatggcggttgaggaggaaaaaacggtgattaccagcgaacaaaatcgctatacgtttgatgtgtttattgatgccagagggcaaaaagcgctgaaaaataaagacctgccctttccgcacttaagggagcaactgctggcgaccggcgaagatatcccggaagtcggagacgattatacgttactggagccctccgaggtgcgcggacgcatcgcctttgccgccatcccctggctgatgcacgaccagccttttgtgcaggggatcaccgcctgcgcggaaatcggcgcggcgatagcgaaggccatatccgcgccggcgagccgctcccgccgccgcttgtcgccaatcgatctttaa

SEQ ID NO: 257678 - DNA, 162 bp, Klebsiella pneumoniae
atgacggatttctttgagcgcccgaaaatccgcttttttgccacctggatgcgctgggaccacgcgctggataactactgcgcaacggacaccttcggcagcgccggataccatagcgcgggtacgctattcttcggcgcccagctcgaaacctggttctga

SEQ ID NO: 257679 - DNA, 504 bp, Klebsiella pneumoniae
atggcgagtgaaaaagagaggttgcccgggataaaagagagtgaattttttcttaattttgaatgtgctgcccgcaaatatggcctcgggatattattagggataattctggcggcactgttggggattttttcaggtggctatttcagtacggctgaaaaaacaaacgcgccgggtaatttaacggtgacctatgagcgctttggccgtttacaaaccgagttcaggctaaaaattaccgcccggccccgcgtcgccgataaatatatttttagcctcggcggtgattttacctcttcctttgaaccaggcagcatctggccccggccggatcggatgtacagccagaacgatcggctgtttttggtgtataatgatttgaaaagcatgaataatttttctatatggctttacgttacgccgaccagtccgggaaaatcgaaccactctttacagctaaacggcgaacccgaaatccgcttctggcaatttatttacccttag

SEQ ID NO: 257680 - DNA, 990 bp, Klebsiella pneumoniae
atggcagtcatggcgatcactggcggtactgcgggagtcggcaaagcaacggccctgcgctttgcgcaggcaggctatgacgtcggcattattgcccgcgatgatcacagcctggaagcgacgaaacgggagctccttcgctatggcgttcgggttcataccgtcgaggccgatgtggctcatgccgatgcgctgctggcggccgccggcgaaattgaaaatcggctcggggcgatcgacgtgtgggtcaataacgcgatgtgcgcggtgctggcgcctttccgggcgatgacgcacgacgaatttttgcgggtcacggaggtcacctatctgggctacgtcaacgggactcgcgccgcgctggagctcatgacgccccgcgatcgcggggtgattatccaggtcggctccgcgctggcctatcgctcaattccgctacaatccgcctactgcggggcgaaggctgctattcgcggctttaccgatgcggttcgcactgaactaatgcatgaaaatagcggcgtgagcattgccatggtgcagatgccggggctgaatacgccgcagtttgagtgggcgcgcaataagttcgcctgggcgatgcgcccggtgccgccggtatttcagccggaagtggccgcgcaggctattttcaacgtcgcgcgcaggcccgtacgtgaactttgggtggggagcagcacgatccagtccattgtggggcaatttcttttccccggcttgcttgaccggctgatggtcaaaaaagcatgggaagggcaaatgacacgccatttgaacgctgatgaccgtcaggactacctcgaacaaccggtcaggggattacataaaacccacgggcgtttctcctccgaggcaaaatatcgcgccaccgccattacctccggtgtgccgggaaaaacgctgctgggcggcgcggcggtggccggattgctcctggcaagatggttgacctcgcgcaaacaccgctaa

SEQ ID NO: 257681 - DNA, 1626 bp, Klebsiella pneumoniae
atggctgactggcatacacgggccattatctaccagattgattccgccctcttttatgatttcaacagcgatggctgcggcgacatcgccgggattacggccaagctgcgctatattcgccgaatgggcgcgacggtaatctggataacccccttctacctgacgccatttctggacgaaggttacgatgtcagcgaccacctgcaggtcgatccgcgatttggtcaactggcggatatcatcgcctttatcgagcaggcccgcgaattagggatgcaggtcattattgaactgctgattcagcacacctccgacgctcatccgtggtttcaacgggcgcgccgcagccgcagctcgccgtttcgcgactattatctatgggcggatagcgatgatgacgatacgccgccgatgtttcccggcgtcgaggagagcatctggacgtgggatgaagaagccgggcaatattttcgccatatgttttatcgtcacgaacccgatctcaacctggcctcgcctgccgttattaaagaggtcgaaaatatcattatcttttggctgaagctgggggtttccggctttcgtctggatgccgctgcgcatctcacaaagcaggccggacgcggcgaggagaaacgggggctgtggatcctggaacatctgcgccgacttgtcgagcggcataacccgcaggccattctgctgggcgaagttgacgttgacgtcgagcagtaccgcgactatttcggtgataataaccggcttaacatggtgcttaacttctggttgaacaaatacttttacgtcagtctcgccagccagaacgcgcgcccgctgattaacgcaataaagaaaaccatcgtccctcccgacgcctgctgcttcgctaactggttgcgtaatcatgatgagctggatctggagggtatcggcaacaagaacaaggagaccgtgctggaggccttcgcgccggatgaaaagatgaacgtttatcagcgcggcattcgccgtcggctcgcgccaatgctaaacggcaatcggcagcggctggcgttctgtcacgccgtgctgttttcgctgcccggcgtaccgattatgcgttatggcgatgaaatcggcatgggtgacgatctggcgctcgaagagcggtacgcggtacgtacgccgatgcagtgggccggttcagccggcggcggcttctccgcagccgaccccgatacctttgttgcccccatgattgaccgggggccgtttcgctatcagaaagtcaacgtggctgattcactgctgcaccgccattccctcctgcatcgcataatggatatcgccaatacgcgttccgagttcccggaaatcgccgttgccccttttcgtatcattagcaccgatcggcaggcgattctggcgatttgctacgataaccatgagcgtagcgtcatcacctttcttaattttagtgaaaaagcgctgcgctttaccgcgaaagggatcgacgaggcggtctggacgccctgcctggccgacaaaacctacgctgacgcgcttatccccggtaagcgcgttgagctggagattagcgcgtatggttaccgctggttctggaccaatagcaacgcgctgcgttag

SEQ ID NO: 257682 - DNA, 201 bp, Klebsiella pneumoniae; identical to SEQ ID NO: 188337

SEQ ID NO: 257683 - DNA, 237 bp, Klebsiella pneumoniae
atgtcaccgggcaccagctcctcaatggcaatttcctcctgcgtcggccccatgttacccggaccgcgacgcagcaccgtcgccgtggtgcggaccattgatttcagcgcctgcgccgctttgttagtgcgaaactcctgccagaaacgcaataacccgctcaggctgaccatcgtgacgataatgataatcccggtcagatcggtctcttcgccgttacgcagcggcagccagtaa

SEQ ID NO: 257684 - DNA, 684 bp, Klebsiella pneumoniae
atgttgatgtttccttatatcgcaaatttactcgccgcgatgctgttgggcgcgctgattggcgccgaaagacagtggcggcagcggatggccggcctgcgcactaatgcgctggtcgccaccggcgcggcggtgtttattctcagctccgttgccgcttccccggatagcccgggccgtattgcggcgcaggtggtctccgggattggcttcctcggcgcgggcgttatcatgcgcgaaggcatgaacgtgcgcggccttaataccgccgccacgctgtggtgctcggcggcgattggcgtcctgtgcgggttaggccagttctggcaagccgcggcggcaacgctgatcatcctctgcgcgaatattttactgcgcgaagcggcgcagcgaattaatcatattcccggcgcgacagaagaagagaaatgctatgtcctgaatattatctgtcatagcgaacatgaaaacgcgattcgtcagcaactactcgctatcagcaaagagatgaggctcagcctgttggggctggcatccataaccgcgcaagaacaagggcataaagaaattcgcatcgagctggtcggcaatgccgattatcgcaaggcgcgagaccttattatggaaaaaattggcggtcacgaaaatattacgtcagtccgctgggccattgagggaagttaa

SEQ ID NO: 257685 - DNA, 516 bp, Klebsiella pneumoniae
atgtccagtaagaaagtcctacaggcagcgctggcggcggcgctttcgctgtcaatgatggcaacgccggtcttcgccaatcctggcaacggcaacggcaacggcaacggcggcagtagccatggtaatagcggtaaccatggcaacaacggcaatagcggtaaaaacaacgcagacaagggcaatcagggtcacaaacagggtaatcaggggcagagaaaaaattacggcaaacccgatcatgtctctgccgatatcagcttttccagagcgcgttcgctggcggtaaactacggtttaaccggctaccagtcgctgccgccgggaatagccaaaaacctggctcgcggcaaaccattacctccgggcattgccaaaaaagcggttccggcatcgatgctcaatgaactgccttactatccaggctatgaatggcgggtggtgggtcaggatttagtgctgatcgcgctaagtacggcgatcgtgacgtcgataattaatggcgtttttgattag

SEQ ID NO: 257686 - DNA, 1164 bp, Klebsiella pneumoniae
atgcccggttatctggtacgcgcaacgttggttatcgctttcgttcagttcatcaacgcgcttgaatatatgatttttaatcccttatttacctggatggcgccgacgtttcaggtcccggtaagccaggcgggttacgtcaccggtatctatacgctggcttcagtcatttcggggatcggcgtatggcgatgggtcggtcagctcaaaccgcgccgttttttgctctgcaacatggccctgttggggggattaacggcgatgacgctaaccaccacccgttttgacgtattgttattctggcgtttccttgccggggtggtcggcgggaccacgatgggcgtggccagtagtctgctggtcaacattatgccgccgcagctgcgccctcgggcattggcctcaacgattgccgcattctcgctggtcagcattgtcggcatgccgacgatgctatttctcagtgaaaaaatcggctggcagagtgcccccgcgacgatcggcggactctgtataatcgctttaccgctgatagtccttgcgctgccggaacagtccatcgaggcgagccctcaggcgggcttgcgatggtcatcctcgctgctgtttcatgcctccggcaacgccctcacgcagttcagtccaatgttaatcattccgctgttggtaccgctacttacgactaagctgggggccagcggcgacgaattgccgtggctctttttcgccggcggagcggcagggctgtgcgccactaaattgaccggcaggctgtgtcagcgttatagcggctaccgcatcagcctgctgggcagtctgctgtttatactgagcctgagcattgcttttatcttcaaccacggcggcgcactgtttatgctgctgtttctggctgccgcctactgccgcctggtggcctcatcggcggtggcgatgcgttttccagcggatagcgccagggccgggtttacgcttttacagaataccctgatgtcattaagcacggcggcggcctttctgctttcgtcgtggttgctctcggttgacgggggcggcgaacgggcgatgcaggggatattgctgctctgcgccctgagcgcattgccgctgccgtggctgctgcgggttcaggagaaaagattagccacgcgcgccgccggctaa

SEQ ID NO: 257687 - DNA, 771 bp, Klebsiella pneumoniae
atgccggggctggaagccatatcgttagtcacggaacagagcttttcgcgccattcccacgatcggttcggcatcgggattttcactcagggcgcgcagcgttcgtggagccatctgggcaaagttgaagccgccgccggaaatatcattatggttaatccaggggagatgcacgacggtatcccgctggagggcccacgcagctggcggatggtctatctcgatcctgagcgcgttgtcgacgaactgcagggagagatgaaggccgaagagatcctcctgcgtccggtcgtcgacgacccgcagctgcacgggcaaatgcagcggctgtttcgcgagatcgtcgccagcgcgcccgacgataccgccgtggaagaggcgctgctgctctgcctgatgcaggtgagccaatatcatctttgcgccaggcggcccggcaaaatcggcactcccgccattgcgctggccaggcaatatctcgacgacgccccggaagaaaaaatttctctcgacgcgctggctaccctctgcggtctcagccgctttcagctgatccgcggcttcgcccgtgaaaccggcattacgccgcacgcctacctggtacaggcccgcgtacgcctggctcgccgtctgctggcggaaggctactcccccgccgataccgcgttcatggccggttttgccgatcagagccatctgacccgcgcgtttcaaaaacagtttgccgtcacgccgggtagctatcaggcgctcgttcaggcgagtcgctag

SEQ ID NO: 257688 - DNA, 618 bp, Klebsiella pneumoniae
atggcgctcatcagccctgagtttcttttgacttcgcttattgtggttatcgctcccggcaccgggacgctttacaccattgccaccggtctggcggcgggcagacgaatgagttttgccgcggccttcggctgcaccctgggcattattccgcatatgctggcggcgataaccgggctggcggccatcctccacagcacgcccggcgcattcgaactggtgaagtacgccggcgtcgcctggctgctgtacctcgcctgggccacgctgacccagcgcggcagcctgagcgtggaaggcgtcgtgcaacgcaacccgcggcaggtcatcagccacgccattctgatcaatttgcttaaccccaagctgccgctcttctttctcgcctttctgccgcagtttatgcagcgcggctcggcttcgccggtccgggaaatgctgatcctgagcgccatgtttatgctgatgacgctgctggtttttatgctctatggcgcctttgcggcggcgatgcgcgggtacgtgctgactcgccccagggttttacaggggctgagagtcagctttgccgccggttttgtcgggctggggattaagctgattctggcgcaaaggtag

SEQ ID NO: 257689 - DNA, 486 bp, Klebsiella pneumoniae
atgccgctgccgccgacggagcgtatctggccgacgccgaccggtaaagcgatgttctcggttttccacggcgtgcgcgaaaacctacaggtggaaggtaacgatgtgatgcggctggtgacgctgcgcagccacgatcagtacaacaccaccatttatgccatggacgatcgctaccgcggggtgtttggccgtcgcgacgtgctgtttatgaacgagcaggacatggcggagcagggattcgagcatggcgatcgggtcgatatcagctccgcgctgccgggccaccagcagcggctggaagatatcacgctggtcgcctacagcatcgcgccgggcaccgttgctgcctactaccccgaagcgaacgtgctggtccctctggattatctcgataaagagagcggtacgccgtcgtataaatcggcgcccgtccgtttaaccctgcgctcgaaagagatccgcccgctggcggggctgcgctaa

SEQ ID NO: 257690 - DNA, 909 bp, Klebsiella pneumoniae
atgagcgggatgactgatgagaatcggcgttctcaggttgcgcgtaaaacgacgctggtcagcgtggtggtcaacctttttttatccagcgctcaggtgctggcgggcgtgttttgcggatcgcaaggactcattgccgatggtatccattctctttccgatttagtcgccgattttgtcgtgctgctggcgaataaaaaaagccgccagccttcggatgacgatcacccctatgggcactggcgctatgaaaacggcgcttccctggcgattggcgcgctgctgttactggttggcgcggggatgctgtggtccgcctgcggcaagctgtggcatccggagtctatccagaatgtgcatattaccgcgctgtgggtggcgctcgccgcgctggtcgccaaagagattttattccgttatatgctaagggcggctaagcaaatccactcttcaatgctgattgccaacgcgtggcacgcccgctcagacgccgcgtcttcggtagtcgttgcggtcggcatcatcggtaatctggccggtttcgcgtggcttgacccggttgccgcgctggtcgtcggcgcgctggtcacccgcatgggctataccttttcgtctgacgccctgcatgacttaatggatcgctcagtggaccgcgataccgagcagcagataaccgccaccattctggcgacgcccggcgttgcggcgctgcatgacctcaaaacccgccgtgccggagatttcattctggtcgatgtgcacattgaagtaccgggaaatttatcggttgcgcaagggcacgatattgcgctgacggcgcgctcgcgagtactaaatagccataacgttatgcatatgatgattcatatcgacccttgtcgcgcggaaatagccgcaatgaatacgtag

SEQ ID NO: 257691 - DNA, 480 bp, Klebsiella pneumoniae
atgatagtgcttcgccccatgcgtaatgaagagtatcccgcttatctcgactattttatccccgactacgcggcggaaatctcggccaattatgcgctttcgccggcggccgctttagcccaggcgcagcgcgaaatcgccgcggatctgcctgacggcgtcaatacccgcggccaggttttatgctgcttattcgatgacagcgacggagcagaaaagcgggtcggctatctctggtacaagccggatgaagaaatgcgctccgcctttatctgcgatttttatatttatccggcattgcaggggcaagggttgggtaaacaagcaatggcggcttttgagcatgcgctgaaaagcctgggcatcagccaagttaagctgcgcgtcgccggggataacccgcgcgcgcgccatctctacgacgccgcgggtttccgcgtgaccggcgttaatatgagtaaaaatatcccgacggattga

SEQ ID NO: 257692 - DNA, 696 bp, Klebsiella pneumoniae
gtgataaaatcaaaccccgacgaaaagaaaaaaacggccagaacgattagaatagttttggttctattaagtattaccgccatcatcaccggcctgtgtctcctcagcggtgatatgtggagagtaacgccctattatgattccataaatgctaaagccggagatatcgttggcctgatcatctattcaccaagtaaatttttcttcgcgttactgtatgccttcattgtaccgctggtatggttattacttatccgtacaatccacagtcgcatcctccagagctcaatattccctttattactatttattctcgtggtgatattcatttttctacaccctgaaatcacaccaggccgcgatgcaggctatcaatacagtcgtcacaatatttatcatacctctatatcatggcggaaagaaaaaccaggccactatttaaatcatcagtcgaaatatgaaacctatctccaggccaaagatcctgatgggtacatggaaaggaataatattaaaagcgcatggtcctgcgaaactcagcgttattcaatgtttttcaccctgtcaatctatgagagctggtttcctgatggcgacgcccgcgtgctggaggctcaatgtcgcaaaatcacagacatccatatgctctctgaagaaacgctgctccttgcaaaatggaacatgaaaaatgaataa

SEQ ID NO: 257693 - DNA, 681 bp, Klebsiella pneumoniae
atgaataataaaaaagttatactcaaccccattttaagaatatggctggcgatatttgccataatcattttcattagtgttctcagcgcgttcaatggagagcgctggcattttaataaaacagtagattatttcaaagcggcaaccggagacgtgacaacgcatgagctatacactccagcaaaaatattcttcgctctgatattctcttttgctccgcccttactctggttgcttgttgttaacaaacgaaagttaatggcagtaacgcatggcgttataccattagttttctttttattgtctattctttttttctttctcaaaccggaagttattcccggtggggaaacgacaacttaccgctatggagcgcatagtctttattacgaaaaaattcgctggcaaaaaatgtccgctgataattacatcagcactaaatccgaatacaagacatttcttgaatacaaagacccaagaggctatcgcgagccggagaatataaagaatgcttatgtttgtgaaactgaaagagaaaagatatttttcaccctggtaatcaataaaacctggtttccggatgattatcccaacatcatggacgcgcactgtactcagattaaagatattcgttcactatcggaatacacgctttccagtgctcgctggtttccgatatag

SEQ ID NO: 257694 - DNA, 1713 bp, Klebsiella pneumoniae
atgagcacattactaactgcacaatctcttcatgttgatacggcgtttggcccgctgttcacaaacctctcctttaccctgaaaaaaggcgaccgtattggcctgattggctacaacggctgcggaaaaagtactctgctacaggtgctggacggcacgatcgtgcccaattcgggtagcgtggcgctggccaatcactgtctgatggcgcgagtggaacagcatctacccgatacgctgttagcgcagcctctgctgcaggcggtattggcgaaacttcccgtccttgagcgtgagagccagcgctggcaagcggaaaggctgctggcggagatgggttttacgccagatgaggtcctgcagcgggcgtcgacgcttagcggcggtcagcacacccgactgctgcttgccagagcgctgatccagcaaccggatctcctgctgctggatgagccgggaaaccacctcgacctgccgaccctcctgtggctggaaagcttcttgcagacctggcaggggagtttcgttctggtgtcgcatgataatatcctattggatgctgtaactaatgccagttggatcctgcgcgacagaaccctgcacgccttctccctgccctgcagcgccgcccgtcaggcgctggaagcccaggacgccagcgacgcgctgcgccataaagcggagcaaaaggagatcgaccgggtcgccgccagcgctaaacggctggccatctggggccggacgtatgataacgaagatctctcgcgcaaagccaagcagatggaaaagcaggttcagcgcctgaaggagagccaaaccgagctcaccgatggaacgccctggcggctggcgctgcgcggcgacatgctgcgggctgaccgactgctggagatggaacagctccccgttccgcccgagccgggtctgccggccctgttcaccgcgggcctggcgcgcctgaaaagcggcgatcgggtggcggtgatggggcgtaacggctgcggcaagtcttcgctgctgcgtctgctgtggcggcaaatgcagcaggaaacgacggatcccggtctgcgtttgcatccgcggctgaagcccggttactacgaccagaccctgcatcagctggcggatggcgacacccttctcgacgcgctggagccctttgaaccagcggcggaaacgcgccggcgcgcgctgatctccgccggatttatctgggcgcgtcacgggcaaaaggtcgccaccttaagcggcggcgagcgttcgcgcctgctgttcgtcggcctgtcactggcccgctatagcctgctgctgctggatgagcccaccaaccatttagatatggatggcaaaacggcgctggcggcgacgctgaacgactaccccggcggcctgctgctggtcagccacgatcgcgagctcatcaaccacagctgcaatcgcttctggcttatcgacgagcgcgggctgagcgaatggcaaagcgccgacgaggtgtatgacgttttacgcgccgccgttcgccgtccgctcatcgaggaaacaacggtgaacagccgcgaagcagaggacgatcatgatgcgctgctggagcggttaatcatgcttgagcagctgctggccgacgatctggcgcgcaagccaaaacatcaaaaaccgcagctgcaggcgcagtggcgtaaggagatgacgacgatcaatacgaaattaagctaa

SEQ ID NO: 257695 - DNA, 957 bp, Klebsiella pneumoniae
atgacctcatccccgcttattgatgaaattcgcaccgcatcgcgcctgatggtgcgggagcttggctttatgagcgcgacgctggccgccacggactattcaccttccgccgtgcacaccttactggaaatatcgctgcgcggggcgatgaccgccgcgcagctggtgcagattctggggctcgaaaaatcgagcgttagccgaatgctcgcccgcctggttaccgccggcgagctccaggaaataccctccgccggcgacgggcgttttaagcagcttgcgttaacggcaaaaggcgcggcgacggtggcaaaagttaacgcctatggcgcaatgcgggtggtcaacgcgctggcgcacctgagcgacgagcagaaacaaggtgttgctcagggcctcaccgactgggcctgggcgctggaaaaatgtcgcgacgttgaggcgaccgccgcgaaacaggcgattgctatcgttaccggctatcgtccgggaatgattggccgcattgcgcagatgcacggcgagtactatgcgaagcactacggatttggtcactttttcgagagcaaagtggccagcgggctggcggagttttccggtcgtcttgataaaccgcgcaatcaggtttggcttgccgtgcagggcgagcagattgtcgggtcggtggcgattgacggcgaagatctcggtaacaatcaagcgcatctgcgctggtttattctcgacgatagctgtcggggaagcggtattggccgccgtctgctgaatgaagcgttggctttttgcgatagccagggttttgctgcggtgcagctgtggaccttcagcgggctgaacgccgcccgcaggctatatgaatccttcggcttcacgctgcataaagagtggcagggggatcagtgggggcggatgatgaccgagcagcagtttagccggcagcaggcccgcgctgaataa

SEQ ID NO: 257696 - DNA, 189 bp, Klebsiella pneumoniae; identical to SEQ ID NO: 188381

SEQ ID NO: 257697 - DNA, 324 bp, Klebsiella pneumoniae
atgcttaagcaattcgacgtttatcggaacccttcttcgcaaacgaagaaccctctaccctattttatgattgtgcaaaatgatttttatgcagacctacccaccagggtaattattcccctgatgcgtaatgctcatctgccactatggcagcatcctttagttcctgaggtcaatattgaatttgaaacgtttatgctttgttcgccgatgatgacgaaccttaacaataagctgatcaagcgcgaagattttatcggtagcttaaaaagcgccagaggcgaagtgatttccgccattgacgcccttatcaccaatacctga

SEQ ID NO: 257698 - DNA, 885 bp, Klebsiella pneumoniae
atggcgatggaaacccaggacatcattaaacgctccgccaccaacccgataactcccgcgccgcgcgcgcgggattttaaggcggaagtggcaaagctgattgatgtctcctcctgcgtgggctgtaaagcctgccaggtggcctgttccgagtggaacgatattcgcgatgacgtggggcactgcgtcggcgtgtacgacaatcccgccgatctgagcgccaaatcctggacggtgatgcgttttagcgaaaccgaacagaacggcaagctggagtggctgatacgcaaagacggctgtatgcactgcgaggacccgggctgcctgaaagcgtgcccgtccgccggggcgattattcagtacgccaacggcatcgtcgattttcagcaggagaactgcatcggctgcggctactgcatcgccgggtgcccctttaacgtcccgcgcctcaataaagaggataaccgggtttataagtgcaccctgtgcgttgaccgggtcagcgtcggccaggagccggcctgcgtgaaaacctgcccaaccggcgcgattcatttcggcagcaagcaagagatgctcgaggtggccaacgagcgggtggaaaaactgaagaagcgcggctattcccatgccggggtgtataacccgccgggcgtcggcggcacgcacgtgatgtacgtgctgcatcatgccgaccaaccggagctataccataacctggcgaaagaaccgcagatcgataccgcgatcaacctgtggaaaggggcgctgaagccgctctcggcggtcgggtttatcgccacctttgccgggctgatttatcactacattgggattgggccgaacaaagaagcggatgacgatgaggaggatcacgatgagtaa

SEQ ID NO: 257699 - DNA, 318 bp, Klebsiella pneumoniae
atgaaaattctgattaactggcctcctctgcgccaactaataaattatatccgggagcgttttacctttctggtcttgctctgctggccagcaatcatctggctggtttgtcgggcgcttgtctggttaacagatggactgatggttctgctgggaaagcctatcgatcactcctttaccgtgtatcttcagccacttatgacgctaagcgcgctactgagaatttccgtcagctgggtgctgctgctgtttatcctgttcagcatggcgatggggttcacctgggctttgcggcgctttatgaatcgaaataaataa

SEQ ID NO: 257700 - DNA, 318 bp, Klebsiella pneumoniae
gtgattgtctcgccggacggcggtggattcagcgccgcgaccgatagcgcgctggcgaatctcgggctggcgcggcgggttgtcctttccgtgccacatttcctgtttatgctggagacgctgcgtaatagcgaactggtggcggtgctgccggagcggctggtgcgcgacgctggcggcctgacggtggtcgaaccgccgctggcggtcgccgggtttgagatgctgatgctgtggcacgagcgttggcaccgcgatccggcgcaccggtggctgcgccagcaaatcgtatcgtcattagaggggaagccatgttaa

SEQ ID NO: 257701 - DNA, 1413 bp, Klebsiella pneumoniae
atgacccgctatcaacatctggccagcctgctggcagaacgcatcgaacaggggctgtatcgccccggcgaaaagctgccgtcggtacgcagcctgagccaggaacacggcgtcagcatcagcaccgttcagcaggcctaccagacgctggaacagcagcagctgatcgtgccgcagccgcgatccggctatttcgtggccccgcgtaaagctcagccgccggtgccgccgatgtcgcggccggtccagcgcccggtagagatcactcagtgggatcaggtgctgaccatgctcgacgcccgccacgataaatcgattatccccttcggcggcggctcgccggacgtcacccagccaagcctgaagcctatctggcgcgagctgagccgggcaattcagcacaaccttagcgaagtgttgaactacgacgagctggccgggcgtcgcgaactgcgggaacagatcgcccgcctgatgctcgacggcggttcggtggtcaccgccaacgatctggtgcttaccagcggctgccacagcgcgctgtcgctggcgctgctgtcggtgtgccagcccggcgatatcgtcgccgtcgaatccccttgctactacggcaccatgcagatgctacgcggattagggctaaaaaccatcgagatccccaccgatccggaaaccgggatcagcatcgaggcgttagagctggcgctcgatcaatggccgatcaaaggggtgatcctggtccccaactgcaataatccgctgggatttatcatgccggatgcccgcaagcgggcggtgctatgcctcgcccagcgccacgatatcgttatctttgaggatgatatctacggcgagctggcgaccgaatacccgcgcccgcgcaccatccattcctgggatatcgatggccgggtgatgctctgcagttcgtttaccaaaaccatcgctcccggcctgcgcatcggctggattgcccccggccgttattacgatcgtctgctacagatgaagtatgccgcgagcggcaccaacgtcccctccacccagctggcggcctctgtatttattcgcgaaggccactaccatcgccacgtgcggcggatgcggcagatctatcagcgtaatatggagatctacacctgctggttgcgggaatttttcccctgcggaatctgcgttacccgcccgaaaggcggctttatgctgtgggtcgagctgccggagcaggtggacatggtctgcgtcgcgaagcagctgtgccggctgaagatccaggtcgcgccgggatcgctgttttcagcatccgggaagtatcgcaactgcttaaggatcaactgcgccctgccgccgattgagaagcataaagaggtgatggtgcagctgggcatggcggtgaaggtggcgatggagtga

SEQ ID NO: 257702 - DNA, 2334 bp, Klebsiella pneumoniae
atgaacagaaaactctctttgatttgtgcagtagcggtgggcattggcggctggtcctccttcgcatcgtatgcggaaccgacggcgcaggccgtgcagacgacgacggtacccggtatcgccggtacggtggcggacagtcagcccacggcgacgcttgccgacccggcggcgccggtggtggtgctggataacgccccgacccgcgacgtgaagctgaccttcgctaaaatcgccccgcctccgggcagcatggtgctgcgcggcgcgcgccctgagggttcggtcgagttcggcatgcgcagcgatgaagtggtggcgaaagcgctgctgaatctcgactacacgccctctccgtcgctgctgccagtgcagtcgcagctgaaggtgtatcttaacgatgagctgatgggcgtgctgccggtcaccaaagagcagttgggcaaaaaagtcagcgcgcagatccctatcgatccgctctatatcaccgactttaaccgcgtgcgtcttgagtttgtcggccactatcgcgatgtgtgtgaaaacccggccagcagcaccttgtggctggacgtcggtcgcgaaagctatctggatttaacctaccagtcgctgaacgtgcgcaacgatctttcgcatttcccggtgccgttctacgattcgcgcgataaccgccagctgacgctgccgatggtcttcgcctccgcgccggatgtcctgcagcagcaggcggcggccattatcgcctcctggttcggcagcaaggcgggctggcgcggccagcagttcccggtccagttcaaccaactgccggaccgtaacgccattgttttcgcgaccaacgataagcgcccggacttcctgcgcgagcatccgccggtcaaggcgccgacgattgaaatgatcgaccacccggataacccgtacatcaagctgctggtggtcttcggacgggatgacaaagacctgctgcaggcggcgaaggggatagcccagggcaatattctgttccgcggcagcagcgtgacggttgacgatgtcaaacagctgcaggcgcgtaaaccgtacgatgcgccaaactgggtgcgtaccgatcgggcggtgacctttgccgagctgaaaacctacgaacagcagctgcaatccagcggcctggtgccggattccatcaacgtggcgctgaacctgccgccggacctctacctgctgcgcgccaacggcatcgatatgaacctgaactatcgctacaccatgccgccaattaaggacagctcgcgcatggatatcagccttaacgatcagttcttacagtccttcagcctcaacagctcgcaggatgtgaataagctgatactacgcctgccggtgctgcaggggctgctggacggcaaaacggaagtgacaatcccggcattgcgcctcggcgccatgaatcagctgcgcttcgacttccagtatatgaacccgatgccgggcggctccatcgataactgtattaccttccagccggtgcagaaccacgtagtgattggcgatgattcgaccatcgacttctcgaagtactatcactttatggcgatgccggatctgcgcgtctttgctaacgcgggcttcccgtacagccggatggccgatctcgccgataccctggtcgtggtgcccaaatcgccgaccgagggccaggttgccacgctgctggagacggccggcggcattggcgcgcaaaccggcctggcggccattaacctgcgcatgaccgacgacggcggccagattaaggacaaagacgccgacctgctgctgattggctccattccgcaggcgctgaaggacgacacgaaaatcaacctgctggttgaagcgaccaaaagctgggtgaaaatgccgatgcgccactacgatctggccagcatctatcccgataccgaggccagaacgccgaatacccgcaccgacgtcacgtcgaccgggccgatggcggcgattattggcttccagtcgccgtacaacgatcagcgcagcgtcgtggcgctgctggccgacagcccgcgcggcaacgaactgctgacccaggcgcttaacgacagcggtaaacgcgcggcgatgtttggttccgttgcggtcattcgtgagtcgggcgttaacagcctgagggtgggcgatatttactatatcggccacctgccgtggttcgaacgcatctggtttgcactctccagccatccggtgctgctggcgattctggcggcggtcagcatcgtcctgctggcatgggtactgtggcgcatgctgcgtattatcagccgtcgccgcctcgatcttgatgatgagtaa

SEQ ID NO: 257703 - DNA, 1110 bp, Klebsiella pneumoniae
atgatgaacgcggtacgtagtgtggtgttatcggtattgatgctggcggcggcgcaggtgagcgccgcctgccagtggccggcctgggagcagtttaaaaaagagtacgtcagcgccgaaggtcgggttatcgatcccagcgatgcgcgaaaaatcaccacctcggaagggcaaagctacgggctgttctttgctctggcggctaacgatcgcgacggtttccgcaagctgttcgagtggacgcaaaacaaccttgccgagggcgacctgcgcgcgcacctgccgggctggctgtgggggaaaaagagcgatgatcagtggacggtgctggacagcaactccgcctcggactccgacctgtggatagcctgggcgctgctggaagccggacgtctgtggcaaacgcctcactatacggaagtcggcaaagcgctgctggcgcgcattgccgccgaagaagtggccacggtgccggggctggggccgctggtgctgccgggaaaagtcggctttgtcgatgacggcggctggcgttttaatcccagctacctaccgccgcagctggcaacctattttgccgcgtttggctcaccctggccgaaaatacgcgacaacaatctgcgcctgctgctggagaccgcgccaaaaggcttctcgcctgactgggtgcgctaccagaaagggaaaggctggcagctgaaagcggataaaccgattatcggcagctatgacgccatccgcgtctatctgtggaccggtatgctcgatgacggcgataagcaaaaagtccccctgctggcgcgctttaaaccgatggcggctcagacggtttcacagggcgtgccgccggaaaaaaccaacatcgcgaccggtaaaaccaccggcaatggcccggtcggcttctccgcggcgttactgccgttcttgcagaaggaagatgcccgcgccatacagcgccagcgcgtcgccgatgactatcccggggcggatgcatactacagcgcggtcctgacccttttcggccagggatgggatcaacaccgttttcgtttcaccgccggcggtgaattacggcctgactggaaccaggaatgcacaagttctcactaa

SEQ ID NO: 257704 - DNA, 609 bp, Klebsiella pneumoniae; identical to SEQ ID NO: 188476

SEQ ID NO: 257705 - DNA, 429 bp, Klebsiella pneumoniae
atgtccccaacgataccgccgctaagcctgcagggccttgagtttattaagcgcgcccagggattagcgctcgtcccctatcgggacgaaagcggcctgcgcgtgattggctacggccatgttctcaacgactatgaaacgttcagccacttcacgcgcgaggtcgcggagaccttacttactgtggatctactgcaatgccagcgcgagcttaagcgcagcctgcgggttacgcttaatcaagcgcaatatgatgcgctggtctctttagcctttagctgcggggcggcgtctccggcgcttaatattgttttgacccatcttaaccatcagcggttcgctgaagcgttgaacgcatggggaaatattcgcagcggccgcgaacagcggcgcgaagagtgcgcacgattcaaagcctgcaccgattaa

SEQ ID NO: 257706 - DNA, 528 bp, Klebsiella pneumoniae
atgcctgaactggttaccccacgcctgcgctgctcgccgctgcagcttgacgactggcccttttttctcagcctacagcaagacccccaggtcatgctctacgtcgcggatcctcgcccggtagcggaaattcgcgatgcttttgattcgcggcttcccgcgtggtcgccgggggcgccccactggctgtgcctggtggtacgcgaccgctatacccacgccccccttggcctcaccggttatcatcaccatgcccccgacagcgctgaagcgggttttctgttcgctccccatgcacagggcaagggttacggctatgaatctctgcgcgcgctatgcgattacgccttctccacgggcggcatccggcggcttacggcaaccgtcaccgcgggcaacctggcatccaaaaatctgctccagaaggtgggttttcaccaggaaggcgagctacgcgaatgctactggctcaacggtcgctggcacaacgattggctttttggcctgctgcgccgcgattacaactag

SEQ ID NO: 257707 - DNA, 591 bp, Klebsiella pneumoniae
  misc_feature (564)..(573): n is a, c, g, or t
atgagcaagcattatgactatatcgccattggcggcggcagcggcggtatcgcctccattaaccgtgccgctatgcacggccagaagtgcgcgctgattgaagccaaagacctgggcggtacctgcgtaaacgtcggctgcgtaccgaagaaagtgatgtggcatgcggcgcagattcgcgaagctatccatctgtatggcccggattatggttttgataccacgatcaatcacttcgactgggataaactggtcgccagccgtagcgcctatatcgatcgtatccacacctcctacgataacgtgctgggcaaaaataaggtcgacgtgattaaaggcttcgcccgttttgtcgatgcgaaaaccatcgaagtgaacggcgagacgataaccgccgatcatattctgatcgccaccggcggacgcccgagccatccgaatatccccggcgtcgaatacgggattgattccgatggtttcttcgaactgccggcgctgccgaaacgcgttgcggttgtcggcgcgggctatatcgccgttgagctggcgggcgtgattaacggnnnnnnnnnngggctatatcgccgttga

SEQ ID NO: 257708 - DNA, 942 bp, Klebsiella pneumoniae
atgctgaataacgatattactctgcggaagctcgagattttccttagctatatggagtcgatgaatatatcaaaaactgcagagctaatgaacatttcatccgttagcgttcatcgcgcgcttcattcgctggaagataatttacgctgtcctttgtttacccataatggccgcaatctttatcctttacctggcgcatgggttatgcaaaaggaagcgcgggaagtcattaatgcactggaacgctgtatttatcttacccgcaaggcttcggggtatcattctcaggttttacgtttagggctactttattcgctagtgttaaaaaccgcaccgcaaattgttcagggattgaaaaaacgctgcccggaactgaccattgaatttatcatgaactctaataagaaattattagaagcgcttaatgaagagaagattgatgcggttctgatatcgactcctgatgattataacgcccagttatttgagacatggaccatattctctgattccatctaccttgcagttccggtaaccgaagcggatagcttatcgacccccgtagatttacggcatctgcaaaataaaaagtttattgccttgagcgaaggcttcgcgacctggcgaggatttcaggaggcctttcagattgctggatttacgcccgacattaccgtccgggtacatgatattttttcactgatgagtatggtgaatgccggcatgggctataccttaattccggggcggatgcgcggcctgttcagtaacggcattcgcctgctgccgctgcaggagccctatcgaatggaacaggaaatttcgctggtcttcccgcgtagccaggaaaatcagccgggtctgctgtccttactagccgagtgccgtatgtacgccagacagcttatgatggagaaaagcgagacagagaaaaacccgtaa

SEQ ID NO: 257709 - DNA, 432 bp, Klebsiella pneumoniae
atgtactcatttcagcgcatgaaacctgggcaaatcgcgcttctggcctcactttgtacgcaagaagacgaagataattttcgccagaagctattagcggataagcccgaacataaggtgggttttgtttttatgaccgggacatcggatgaaataaaaaataaactacagcgctgtatcatcggctgcgcgtttaagcatcagataattacgcgccaggaatcggccatttttacgttatgtcaggtcagccatcaggcgctgacccatgctttagcgaacagcatcaatggcgatcggatgagaataaaaatagccttagtcagtaatccaaagtggcttgccgtcgctatctacggcgaaagcgtggtctatcagcgattgagtcatgagcttacgggtttttctctgtctcgcttttctccatcataa

SEQ ID NO: 257710 - DNA, 771 bp, Klebsiella pneumoniae
atggaacagctgacaaagattctaaccggtagcttcaccagcaacggtttgattaccgcttttgtcgtggtgggtatcgtatgctgggccgcaagctggatctcaacgcatctgctgcgcggcaagatccacagctcagctattgccatcgtcgccggattgctgctggcctggcttggcggggaactgaccggcggtaaaaaaggtctggccgatatcagcttgttcagcggtattgcgctgatgggcggcggtatgttccgcgatttcgccatcatttccaccgccttcggcgttaagcttgaagaactgaaaaaagccggcatggctggcgcgctggcgctggttatctcgacggtgctctctttttatctcggggcgattgtcgcctgggcttttggctataccgacgccatcagcatggcgaccattggcgcgggggccgtaaccttcatcgtcggcccggtaaccggcgcagcgcttggcgcaagctcggatgttatcgcgctgagcatcgccgccggcgtgattaagtctattgccgtcatgatcttaacgccgctggtagcgaaagccgcgggcctgaactcgcctgccgccgctatcgtctacggcgggctaatgggctccaccagcggagtcgccgcgggtctggcggccacggacccgaaactcgttccctatggcgcaatgacggcaaccttttataccggccttggctgtctgctggccccttcggccctctatctctctttaacccccttcttttaa

SEQ ID NO: 257711 - DNA, 396 bp, Klebsiella pneumoniae
atgattatttacggattgatgttaatgggactgtgcatgttcgccgggctaatcgtgggcgatcttcttggcctggtcttgggtatttccgccaatatcggcggcatcggcttcgcgatgctgtttttagttatcgtgtcacaaaaattagtggataaaggattgctctccaagcctgcggaacagggggtaggtttctggaatgcaatgtatatcccgattgtcgtcgctatgtcggcaaaccagaacgttattgccgcgctcaaaggcggcccggttgcgctcatcgcaggccttggcgccgtttttattggcttcctgttgatcaaaccgctaagcaaaatcggcggccgcagcaatcgggttagttccacggttagcgaggaatgcaaataa

SEQ ID NO: 257712 - DNA, 219 bp, Klebsiella pneumoniae
atgtctgaagttaaatcaaaagtcccgggtgtggtcgatgaagtaaaagccgctgccggggataaaatcgaaaaaggccaggtggtgattgtgctcgaagccatgaaaatgaaaatgccggtcgcctcgccggagacgggtatattaaaaacgctgtcactcaataccggagaccgcgtcaacccaggcatggtgttatttgaaattattgcagagtaa

SEQ ID NO: 257713 - DNA, 687 bp, Klebsiella pneumoniae
atgaccgccctgcaacgacataccctgtgctggctggagccttcgacgctggatgaaatcgcggcgcagctggaggatgaattcggccaccttcctgccgtattgcggcagcaagcgcgggaatatctgctcagcggatcgctaccaggcatcgtacgtcgcggcctgcggagtgagaatagtgttccgcttgggttctctttcccactgcgctggcaagggcagcgagtgcgtctggccactgaagcggcgttatcagcgataacacgttactcaaccccagagcaaacggcatcgctctccattgcagagcgcactaatgcgataggcgcatttcatgccttgcgccaggcatggcgctggcccgggctccagctcggggtctggggttcggtagggctggaaatggccacgccgtggcgatggagcgatgcccactcggatctggatattcgcgttatccccaccgcgccaggcgaactcaacgcatgctgggcctgtttacgtcataccgaagagcaatttcagttacgtattgatggcgagattggtttagctgacggatacgcaatcaatatcaaagagtggttcagcggaagcgcaactctgctggctaaaggagaggatgatgttcaattaagatcgcgacagcaggtcacggcagcaatgagaacatatctctgttaa

SEQ ID NO: 257714 - DNA, 1104 bp, Klebsiella pneumoniae
atgaacgatcccatcgccacgcttgaatggcttcttgaggcccagcccggcattccctctctgcaagagatgccgcgccggacgctggaggacaaaggcattgccggcccaacggcggcgcacgtgattgaagagatccatacgccgcttaacctggcgctggtcaccttcaccaccggcagcagcgcgtttcagaatatcgtcggcgtcacgcacgatgaactggcgctgcgcaccgccgccggaaagcgcgcgctggcggcatgtggcgtaaccgcagggcagcaggtgctggtgacctacgcgccgctggtcaacgtgtttacccgccaggcgctggatgagagcggccttcgctggtcgtttttatcccgctcctgccgggacgcgctgctgatcgccctgtgccggcagccgccggacgcggtggtgggcgagtcctcttttttacgcgccaccctggagcaggcgctgaagatggagctggcggacaggctgccgaaaaagctgacgctgataacggccggaacgccgctggatgaagcgctggttccgctggcggcttctctgggttatgcgctgcacgatatgtatggctgtcaggaattcggctggctgacgcttgatggcatcccgctacgcgaagatatttcgctggttcccgctccgcagggcggagactggcgggaagcgatcgttggcggtttaccaaccggcgacagctttcccgtcgccgccggcggacatctctgcaatccgcagggcaaaatccagacctggaagcgccagcgcaccacgccggaatacgacatggtggtcatggcgaccaccgcgcggcatcgggagatcgtggagcgcaccgcacggacgattttgcgtattaagggacgcgtttgccacgtgtcaacgcagctgataaccgaggccacggccacccatattcgcctctggccaaaggcggttcccggcgaatgtaccgcaggcgttgcgcccatcgatattatcggtccgcaggcaacggcccagtttgacgctctgctgcagtcccagcgggatttacagcggcaggcgaaaaacgatcctgcctggtgtaaagcgcgatga

SEQ ID NO: 257715 - DNA, 333 bp, Klebsiella pneumoniae
atggctctacatcaaatatcacatcatttcagcggtaaaagcgaccgtccgtctctgccgcaaaccgtgcactgcggcatcgtaggctctggcgatctggaagtgttgctggaacctaaagccctggcaggcggaatcgacatcagcatttgtacgccggtcaccgggttcgacgccatctggaaaatcgtcctcacccgctttttagacaacggtccgctgggcgatatgcaggtcagcatcaatgataacaacgcgacgcctgccgtggtggcgttacgccttcagcaagcattacaacaggcaattccgggggaaaaccatcatgagtga

SEQ ID NO: 257716 - DNA, 123 bp, Klebsiella pneumoniae
atgagtatctatttatatacattattaacttatgccatgacgattgttatttcttttgccgtggtcggagtcattgttggcgttaatagagtcatgaataagctgaatattaccgacgactaa

SEQ ID NO: 257717 - DNA, 891 bp, Klebsiella pneumoniae
atgagccaaccaaccgccaatgcaataaggatcggtgagtgtttattaaaagcgctattaatggaagtttgcgcctggccgaaacccggcctggtgacgccgcactcgcagggcgcgcatgacgatatggatatatggctttttattaccagtagctctgccatagcgccctgtttttatgcttgcgcgcaggccggtgaatatcatcagggcgagctggaagatttatttccccaaatacgtcttatcggtattgaatacgaatccaggctgctgcaatccacccgcgagataaatactcagcgcggcatactctttgccggagccgttctggccgccgccgccggctggctaaaaggtcggagacagccgctttccagcgagtcattaagccagtgcgtcgccgggctgtgcctcgatctctgccgcaacgatttcgccgcgctcgcccatcgttccgcgcaaactcacggtgaaaaactgtatctgcaatttggtatcaccggcgtgcgcggcgaggccgaacggggctttccgctggtctgccatattggtctcccagcgctgcgccaggcgctctcgctgagatttagctggcgtgaagcactggtacatacgctgctcgcgctaatggcgcactgcgatgatacgacggtactttcacgcgcaggtccccctgcgctgcacgaaatgaaacagcgcgcgcagcgcctggtcaacctgggaggaatgagccaccccggcatagaacatgagctcaacgaatttaatgcctggtgcgtggacaaatgggtcagtccgggcgggtcggcagatttattagcgctgaccctggcgatgtactttctttgccatcaattgcaagaggaccctaacgaggaagagatatga

SEQ ID NO: 257718 - DNA, 1890 bp, Klebsiella pneumoniae
atgaaaaaaacgctcaaggtttcgttactggctctgtttatttccaatggcgcgtttgccactcaatatgcgttgaacagcgaatacctcgccgtttcatttaatgatgcgaattctgcgatggtgcttaaagacgttaaatcgcagcatcagctttcacccgaagaacttttttttctcactcttccggatgaaacagtcattcacgctgctgactttaaaataaagcatgtggataagaaagataatgccattatcattgattatgcccatccttattttaacatcatggtaaaattgaatctggttaaagacaaatacgtcagcattgattacaccatcgccgctgttgataaggcacgggaagttgccaaaataacattcttccccaccagaaaacagtcgcaagcgccatgggtagaaggttcaataaatagctcaccgattattgctgactcattttttatattgccgaataagcctgtggtgaacacctgggcgtatgaagcaacaaccaaccttaacgttgagctaaaaacgcctttacagcccggtacgcccgtcagctataccacctggtttggtaccttcccggaaaccaaccagctacgacgaagcgtcaaccagtttattgatgcggttcgcccgcggccctataagccctatctgcactacaacagctggatggacattggtttctttaccacctataccgaagcggaagttttaggtcgcatggatgaatggaataaagaatttattagcggacggggcgtgccgctggatgccttcctgcttgatgatggctgggatgatcgtacaggaagatggttatttggccctgcttttagccatggctttagcaaagtcagggaaaaagcggatagtttacatagttcagttgggctgtggctttctccctggggtggatataacaaaccgcgagatattcgcgtatcccatgctaaggaatatggtttcgaaaccgtcgatggaaaattcgcgctctccggccctaactattttaaaaacttcaatgcacagattattaatctaattaaagaagagcatatcacttcatttaaactggatggtatggggaacgcaaattcacatattaaaggtagcgagttcgcatctgatttcgatgcttcaattgccctacttcataatatgcgtagcgctaatccaaatcagtttattaatttaaccaccgggaccaacgccagcccctcatggcttttctatgcagactcaatctggcgtcagggtgatgacattaatctctacggtcccggcacgccggtacagcagtggatgacttaccgggatgcagaaacctggcgttccatcgtacgaaaaggcccgctattcccgcttaactcactgatgtatcatggtattgtaagcgctgaaaatgcctattacggattggagaaagtgcaaacggatagcgatttcgccgatcaggtctggagttattttgctacgggcacccagttacaggagctttacatcactccgtccatgctcaacaaagcaaaatgggacactctggcgcaggcggcaaaatggtcccgtgctaacgccgatatattagtcgatacccactgggtgggcggcgatccgacagcgctggaagtgtatggctgggcatcctggagcaaagaaaaagccattctggggctacgtaacccatcggataaagcacagcaatactatctcgacctgacgaaagcatttgagcttccacatggagaaacttcaaacttcacgctaagaagcgtctacggaagtaattcaacattcccgagcaactaccagggtgcagttatcgtcactctacaaccgttacagatgctcgtcttcgaagcaactcccgctaaataa

SEQ ID NO: 257719 - DNA, 873 bp, Klebsiella pneumoniae
atgagtattatttctaccaaatatcttctgcaggatgcccaggctaaaggctacgcagtacccgctttcaatattcataacgccgaaacgatccaggcgatcctggaggtgtgtagcgaaatgcaatcaccggtgatcctcgccgggacacctgggacctttaagcatattgcgctggaagagatttacgcgttatgcagcgcctactccactagcttcggtataccgctggcgctgcatctcgatcaccacgaatcactggaagatattcgccgcaaggtgaacgctggcgtgcgcagcgccatgattgacggcagccattttccgtttgaagaaaatgtaaaactggtgaaatcggttgtggatttttgccatgcccgcgattgcagcgtagaagctgaactgggacgcctgggcggagtagaagatgatatgagcgttgatgcggaaagcgcctttctgaccgatccccaggaagcaaaacgcttcgtcgaactcacgggcgtagacagcctggccgtggcgattggcaccgcgcatggcctttacaccaaaaagcccaaaatcgattttcagcgtctggcggaaattcgtgaagttgttgatattccccttgtgctgcatggcgcaagcgatgtgcccgatgagtatgttcgccgcaccattgaactgggggtctgcaaggtcaatgtcgctacagaactgaaaatcgcttttgccgatgcggtgaaaaaatggtttgccgaaaacccgcagggtaacgatccgcgttattacatgcgcgtcggcatggacgcgatgaaagaggtgatacgcagcaagattgccgtatgcggatcagccagccgcctgttacaaaccgttaaagcctga

SEQ ID NO: 257720 - DNA, 1155 bp, Klebsiella pneumoniae
atgtcagaaacatataccccagctgccgcgacgaccggaacctggacggaagaagagatccgccagcagcctgcctgttggatccgctccctaaaaaatatcgatagtattcgtccggcgatcgatagcttcctcactccgctactgcgtaaaaacgacctgcgaatcgtcctcaccggggctggtacttcggcctttatcggcgagatcgtcgcaccctggcttgccagccacaccgggaaaaatattagcgcggtaccgaccaccgatctggtgaccaatccgatggattacctgaacccggcacacccgctactgttggtctccttcgcccgttccggtaacagcccggagagcgtcgccgccgttgagctcgcgaatcaattcatcccggagagctatcacctttcgattacctgcaatgaagcgggtagcttgtaccagaacgcgattgacagcgacaatgcctttgcgctgctgatgccagcagaaacacacgaccgtggctttgccatgaccagcagtattaccactatgatggccagttgcctggcagtcttcttgcctaaagtcatcaacagccagacattccgcgatgtggccaaacgctgccagaccatcctgacttcactcggtgatttcagccacggcgtgtttggcaatgagccctggaaacggatcgtttaccttggcagcggcggattacagggtgcagcgcgtgaatcagccttgaaggtgctggaactaacggcaggtaagctggcggcgttctacgattcgccgaccggtttccgccacggcccaaaatcactggtcgataacgaaacgctggttgtgatgtatatctccagccacccttatacccgccagtacgatctcgacctgctggcagagctacgccgcgatcgccaggctatgcgtgtgatcgccattgccgcagaaagcgatgccgttatcgaagccggcccgcatatcctgctgccgccagcgcgtcatttcattgatgttgaactggccttctgcttcctgatgtacgctcaggtattcgcccttacgcagtcgatcgctgtggggaatacgccggacactccctccgccagcggcacggtcaaccgcgtggtgcagggtgtcgttattcatccatggcaggcttaa

SEQ ID NO: 257721 - DNA, 1131 bp, Klebsiella pneumoniae
atgacacaaattctgcgcgccaggcgtctgctgacggaacgaggctggctggacgatcatcagttgcgtattgacgagggggtcattactgccattgagcctattccggcagctactgtactccgcgatgcagagctactcgcccctgcttacatcgatagccacgtccacggtggtggaggggtcgatgtgatggacgatgcgccagatgtactcgataaactggctttgcataaagcgcgtgaaggggtcgccagctggctccccaccaccgtcacggctccgctggagaagatacgccgcacgctggaacgtatagcgcaacgctgctattccaacggtcccggcgcgcaggtgctgggaagctatctggaaggaccctactttacgccgcagaacaaaggggctcatcccccggaattgtttcgcgagctggatctcgtagaactggatgagctgatagccgtttcccgccataccctgcgtgtggtcgcgctggcaccggaaaagcctggagcgctatcggcaattaaacatcttaagcaacggggcatgcgggtgatgctgggacatagcgcagcgagctgggagcaaacccgtgccgcttttgacgccggcgcggacggactggtgcactgctataacggtatgaccggtttgcatcaccgggagcccggaatggtcggcgcagggttaaccgacccacgggcatggttggagcttatcgccgatgggcaccacgttcaccctgcagccatgaagctgtgctgctgtgcaaaagaccgggtagtgttaattaccgatgcgatgcaggcagccggaatgcctgacgggagctactcgctatgtggcgaaaaggtcgatatgcgcggcggtattgtgcggaccgcttccggtagcctggcgggcagtacgctgtcggttgatgcggcagttcgcaatatggttgaactcacaggaactgcgccagaggacgctattcatatggcatcgctgcatccagcccgcctgctgggaatcgcccaccagttgggttcgctaaaggtgggtaaacgcgccagcgttatctctctcgacgacggactgcatttacaacagatttggattcagggtcaggtttttcctctatag

SEQ ID NO: 257722 - DNA, 435 bp, Klebsiella pneumoniae
atgttaggtattattttgacgggacatggcggatttgccagcggaatggaaaaagcgatgaagcagatcctcggcgagcagtctcagtttatcgctatcgattttcctgagacctcaaccaccgcactgctgacttcccagcttgagcaggcagttgaggaactggacggcgaagaaggcctcatattcctgaccgacctgctcggcgggacgccattccgcgtcgcatcaacgctggcgatgcaaaaaaccggccgtgaagtgattaccggtaccaatctgcagctactgctggaaatggtgctggatcgcgatgaactcagcggggaggcgtttcgccgacaggccctggagtgcgggcaccgtggattgaccagcctggttgacgagctaggacgctgccgcgaagagagcgcaacagaggaagggatatga

SEQ ID NO: 257723 - DNA, 879 bp, Klebsiella pneumoniae
atggcatctaatcaacatactttgtcgagtgtgtctaacaccgaagagacgctgctcaccggcgtgaacgaaaacatctatgaagatcagcatattggcgcagatctcaccaaaaaagacattaaccgcgtggcctggcgttccatgttgctacaggcttctttcaactacgaacgtatgcaggcgtccggctggttgtacggtctactgcccgcactgaaaaaaatccacaccaataaacgcgatttggcccgcgccatgaaaggccatatgggattcttcaatactcatccctttctggtgacgtttgttatcggcatcattctggcgatggagcgctccaagcaggatgtcaacagcattcaaagtaccaaaatcgccgttggcgcaccgctcggcgggatcggcgatgcgatgttctggctgacgctgctgccgatttgcggcgggataggagccagcctggcgctgcaaggctctatcctcggcgcagtggtctttattgtactgtttaacgtcgtccacctcggcctacgctttggtctggcgcactatgcttaccgcatgggcgttgcggcgattccgctcatcaaagcgaacacgaaaaaagtgggtcacgcagcatcaatcgtagggatgacggtcattggggcattggtggcgacctatgttcgtctgaacacaacgctcgaaattaaggccggtgacgcggttgttaaactgcagaccgacgtcatcgataaactgatgcctgcctttttgcctttggtctataccctgactatgtactggctggttcgccgcggctggagtccgttgcgccttatcggtatcaccgtggtgctgggcgtcgtcggtaaattctgtcacttcctgtaa

SEQ ID NO: 257724 - DNA, 780 bp, Klebsiella pneumoniae
atggaaattagtctgttgcaggcttttgcattaggtattctcgcctttattgctggcctcgatatgttcaacgggttaacgcacatgcaccgtccagtagtgcttgggccgctggttggtctgattctgggcgatctgcataccggaattttaaccggcggtacgctggaactggtatggatgggtctggcgccactcgctggcgctcagccgccaaacgtcattatcggcaccatcgtgggcacaactttcgccataaccaccggcgttaagcccgatgtcgccgtaggtgtcgccgtaccgtttgccgtcgccgtacaaatgggcattaccttcctgttctccgtcatgtccggcgtgatgtcccgctgcgatcgcatggccgcaaatgcggacaccgcgggtattgaacgggttaactatctggcgttgctggcgttaggtattttctacttcctctgcgctttcctgccgatttacttcggagcggaacacgcgaaaaccgccattgatgttctgcctgaacgtctgattgacggtctgggcgtcgcaggcggcatcatgccagccatcggttttgccgtactgctgaaaatcatgatgaaaaacgtctacatcccttacttcatcatcggtttcgttgctgcggcctggctcaagcttccggtcctggccatcgccgccgccgcactggcaatggcgctgatcgatctgctgcgtaaatctcctgaaccaacccaatcagcggcacagaaagaggaattcgaagatggcatctaa

SEQ ID NO: 257725 - DNA, 474 bp, Klebsiella pneumoniae
atgccaaatatcgtacttagccgtatcgacgaaaggctcattcatggtcaggtcggcgtacagtgggtcggatttgcgggggcaaacctggtactggttgccaacgacgaagtagcggaagacaccgtgcagcagaacctgatggaaatggttctggctgaagggattgccgtacgtttctggtcgctgcagaaagcgatcgataacattcatcgcgctgccgaccggcagaaaattttgctggtatgcagaacgccgactgattttctcaagctggttgaaggcggcgtacccgtcacatgcatcaatgtgggaaacatgcattacgccgaaggtaaaaaacaaattgccaaaacggtttctgtcgacgcgaacgatatcgctgcgtttaacggtctgaaagcagcaggagtggaatgcttcgttcagggcgtcccaacagaaccggctttggatctctttaaactactttga

SEQ ID NO: 257726 - DNA, 1302 bp, Klebsiella pneumoniae
gtgaaacatctgactactatggtggaagagcataaacagaggaaagcaaacgggatctatgccgtctgttcggcgcatccgctggttctggaggccgcgatacgctacgcccatgctaacaacacgccgctgctgatcgaggcaacctccaatcaggttgatcagtttggcggctatacgggaatgacgccagccgattttcaccgctttgtttgccagttggccgacttgctgaattttccccagcagcagctaattctgggcggcgaccacctcggcccaaatcgctggcaaagtttgcccgcggagcaggcgatggccaatgctgacgatttgatcaaaagctacgtggcagccggctttaaaaaaatccaccttgattgcagcatgtcctgtcagggcgatccggttccgctgaccgacgctatcgtcgctgaacgcgccgctcgtctggcaaaggttgccgaagagacctgcgttgcgctgtctggcgaatcggatcttgtctacgtcattggtaccgaagtaccggtgccaggcggtgcccacgagacgttaactgagctggctgtcaccaccccaaatgcagcacgcgccacgctggaagcccattaccacgcctttgaaaagcaggggctggaggccctctggccccgcattatcgccctggttgtgcaacctggcgtcgagttcgaccacacgcacatcattgattatcagccgcaaaaagccgtcgctctgagcaaaatggtggaagcgtacgacacgctggtattcgaggcgcactccacggattatcagaccccgcagtcactgcgtcagctagtgaaagatcacttcgccattctgaaagttggcccggcgttgaccttcgccctgcgcgaggcgctgttctcgctggcggccattgaagaggaattgctttcagccaaagcctgctctggactgcgtcatgtacttgagaacgtcatgctcgatcgcccggaatactggcagagccactaccacggtgacggcaacgcacgtcgtctggcccgcggctacagctattccgatcgcgttcgttattactggccggatagccagattgatgacgccttcgaaagattggttcgcaatctggcggatgacccgattccactgccgcttatcagccagtatttacctttgcagtacgtaaaagtacgcgagggagatctcagtgccgcgccgcgagaactcatcatcagccacattcaggacatactgcagcagtaccatgccgcctgtcagggcgttacttccataacggataacaactaa

SEQ ID NO: 257727 - DNA, 810 bp, Klebsiella pneumoniae
atgagcaacaccgactcttctgccgataagcgggtacccggtaccagcgaaagacgcgagcagatcatccagcggttgcggcagcaaggaagcgtacaagtgaacgatctttctgaattgttcggcgtttccacggtgacgatccgtaacgatctggcgttcctcgaaaagcagggggttgccgttcgggcttatggcggcgctctgatatgtgacagcaatatgtctggcgtggagccttctgtagaagataaaagttcgttaaatacggcggtaaaacggcgtattgccgcagctgccgttgcgctgatcaaatcgggccatcgcgttatcctcgattccggtaccacgacctatgagatcgcccgtctgctgcgtgggcatactgacgttattgctatgaccaatggaatgaatgtggcgaatgcgttgcttgaggcggagggcgttgagctgctgatgaccggtgggcatttacgccgccagtcgttgtcgttctatggcgaccaggccgaacagtcattgcaaaattatcactttgacatgctgtttctcggcgttgatgcgatcgatctggagcgtggcgtcagcacccataatgaagacgaggccagactaaatcgtcggatgtgtgaagttgcggaacgcattatcttggtcaccgattcgacgaagttcaaccgttccagcctgcataagatcgtcgacactcagcggatcgataccattatcgttgatgatggtatcccggtggaaagcctggagggattgcgtaagagcggcgttgaagtcattctggtgagcgcgtaa

SEQ ID NO: 257728 - DNA, 1572 bp, Klebsiella pneumoniae
atggctgacattgaaattaggcaagaatcgccaacggcgttttatataaaagtacacgaaacggataacgtggcgattattgttaacgatcgaggtttaacggccggaacgcgtttccctgacgggctcacgctggttgaacatatcccgcagggccataaagtcgcgctggtcgatattcctgtacacggtgaaatcatccgctatggcgaagtgattggctacgcggtacgcgatatcccgcagggcagctggattgacgaatcgctggtcgaactgccgaaagcgccgccgctgcatactttgccgctggcgaccaaagtcccggcgccgctgccgccgctggaaggctataccttcgaaggctatcgcaacgccgacgggagcgtgggcaccaaaaacctgctcggcattagcaccagcgtgcactgcgtggcgggcgtcgtcgattacgtggtgaaaattatcgaacgcgatctgctgccgaagtatcccaacgtcgatggcgtcgtgggtctgaaccacctgtatggctgcggcgtggcgattaacgccccggcggcggtcgtgcccatccgcaccattcacaacctggcgcttaatccaaacttcggcggcgaagtgatggtcattggcctcggctgcgaaaaactgcagccggagcgcctgctggaaggcaccgatgatgtgaaaggcatcccggtggatagcgccagcatcgtcagcctgcaggatgagaagcacgtcggttttaaatcaatggtggatgacattttgcaggtcgccgagcgccatctggagaaactgaaccagcgccagcgtgaaacctgccctgcctccgagctggttgtcggtatgcagtgcggcggcagcgatgcgttttctggcgtcaccgccaacccggcggtgggctacgcgtccgatctgctggtgcgctgcggagcgacggtgatgttttccgaagtcaccgaggtgcgcgatgcgatccatcttctgacgccgcgcgccatcaacgaggaaatcggtaaacgcctgctggaggagatggcctggtatgataactatctcgatatgggcaaaaccgaccgcagcgccaacccctccccgggcaacaagaaaggcggcctggcgaacgttgtagagaaagcgctgggctctatcgccaagtccgggaagagcgcgattgccgaagtactctctccggggcaacgcccaaccaaacgcggtctgatttacgccgcgacgccggcgagcgactttgtctgcggtactcagcaggtggcgtccgggatcaccgtgcaggtgtttactaccggtcgcggtacgccgtatggcctggtcgccgtgccggtgattaaaatggcgacgcgtaccgagctggcaaaccgctggtacgacttaatggatatcaacgcgggaaccatcgccaccggcgaagaaaccatcgaagaggtagggctgaagctgtttgagtttattcttgatgtcgccagcggccgcaagaaaaccttctcggatcaatggggattgcacaatcagctggcggtgtttaacccggcgccggtgacctga

SEQ ID NO: 257729 - DNA, 534 bp, Klebsiella pneumoniae
atgaggaagctgaccgttaagccgggttctgtcgtggacagtcattcatctaggccagcaatcgctcactggctcaagcagcctacccgggttcagtacgggccgtaccttgtgaacccctatttggccttgctccgggtggagtttaccgtgccgcgaactgttaccagacgcgcggtgcgctcttaccgcaccctttcacccttacctgatcccacttgcgtgggccatcggcggtttgctctctgttgcactggtcgtaggcttgcgcctcccaggcgttacctggcaccctgccctatggagcccggactttcctcccctccgcccgtctcccccgaagaggacgacgacgaagcggcgactgtctggtcagcttcggcgcgaagtatagagggtttgccggcggttgtcatccttccgtcgccatcccgacctgcaatgtcgccgcaatattacgcgacgcacgataaatattgtccgccgcgccgcgaaacgcctcttccagcgtcgttacgctggtcagcacgctaa

SEQ ID NO: 257730 - DNA, 129 bp, Klebsiella pneumoniae; identical to SEQ ID NO: 189981

SEQ ID NO: 257731 - DNA, 780 bp, Klebsiella pneumoniae
  misc_feature (298)..(307): n is a, c, g, or t
atgcggcgcatcgacatcgagttttttcatgacgcggacaatcttcttcagttcttccatcaggtgcgatttattctgcagacggcccgcggtatcggcaatcaggacgtcaatattgcgcgccttcgccgcctggatggcatcgaaaatgaccgatgccgagtccgcgccggtatgctgggcaatcaccggaatattattacgctgcccccaaacctggagctgctcaaccgccgccgcacggaaggtatcgcccgccgccagcatcaccgacttgccctgctgctcgaactgacgnnnnnnnnnnacctggagctgctcaaccgccgccgcacggaaggtatcgcccgccgccagcatcaccgacttgccctgctgctcgaactgacgcgccagcttaccgatggtggtggttttaccgacgccgttgacgccgaccatcagaatcacaaacggcgttttgccttctacgttcagcggctcatccactttcgccaggatatcgcccatctcttctttcagcaggccgtacagcgcctcggcgtcgcgcagctgcttacggctggcgtcgttggtcagattagtgatgatcttacgcgtggtctccacaccgacgtcggcaatcagcagctgctcttccagctcttcaaacagatcatcgtcgattttcttaccgcggaacagactgataaatccggaaccgaggttttgtttggttttcaccaggctgcgtttgaggcgggcgaagaaaccttctttggtcggtttttcctgctctaa

SEQ ID NO: 257732 - DNA, 834 bp, Klebsiella pneumoniae
gtgaactttttcttctcttcacgcgggtcagtccgcatatctttgctcatcatcgccctgctggcgatcgttgccctcaccagccagtggtggttgccgtacgatccgcaggccatcgatctgccttcgcgcctgcggccgcccggcggccagcattggctcggcaccgatcatctggggcgcgatatcttctcgcgcctgctggcggcgacccgcgtatcgcttggctcggtaatggcctgcctactgctggtgctggcgctggggctcatcgtcggcggcagcgccgggcttatcggcggccgcgtcgatcaggccaccatgcgcgtcgcggatatgtttatgaccttcccgacctcaatcctctctttctttatggtaggggtactgggaaccgggctgaccaacgtgattatcgccatcgccctgtcgcactgggcgtggtatgcgcggatggtgcgcagcctgacgatctccctgcgccagcgcgagtttgtgctcgccgcgcggctttccggcgcgggccatattcgggtatttatcgaccatcttgccggtgcggtgctcccctcgctgctggtgctggcgaccctggatatcgggcatatgatgctgcacgtcgccgggatgtcgtttctcggcctcggcgtcaccgcgcccaccgccgaatggggagtgatgattaatgacgcccgccagtatatctggacccagccgctgcaaatgttctggccggggctggcgctgtttatcaccgtcatggccttcaacatggtgggcgacgcgctgcgcgatcgcctggatccccacctgatcgcggagcacgcccactga

SEQ ID NO: 257733 - DNA, 333 bp, Klebsiella pneumoniae
atgaataaatcacaggtggagatattcatgctgatggttcgggaggggagtattcatattgcatcgcagcggttgggtattgtgccttcgttgataacaaccagcgtatgtgcgcttgaaaatgaactgggttttaacctgattacgcgcggcaggaatatcagaaaagttactctaacggagaaagggcacgctttttaccggcttgctccagaattactgagattactcaatgcgattgcggatattcgcgcgggaataaaacggcccggcgagtcttcaccgccgggcaaaataatcagttcagcccgagaaaatactgggcgattttaa

SEQ ID NO: 257734 - DNA, 504 bp, Klebsiella pneumoniae; identical to SEQ ID NO: 188479

SEQ ID NO: 257735 - DNA, 1200 bp, Klebsiella pneumoniae
atgcgtaaacaaattctgatcgtgggcgctggctttgccggtatgtgggcagcgctgagcgccgcacgtctggcggataaaaatcagcaggacattgatattacggtgattgcgccacagcctgaactgcgtgtgcgcccgcgtttttatgaaagcgccgttcaaacgctggttgcgccactgcaaccgctgttcgacgtcaccggggtgactttcctgcgcggcacggttgagaaaatccttccggcctccaaagaggtaagctggaaagatgccaacggtgaaatgcgccagcatcgctacgaccgcctggtgctggccagcggcagccaggtcaatcgcagtacggtcgccggagccgcagagtacgcattcgacctcgatcaactggaaagcgctaccgtactggagcagcatctgcaagatctggcccggcagccagagagcacggcacgtaataccgtggtggtctgcggcggcggcttcaccggtattgagatggcgctggagctaccgggtcgtctgcgggcaattctcggcgccgatgctaagaccagaattgtcgtagttgagcgaggcccgcagccaggctcacgcttcagcgatgaactacgcgaggtgattattcaggcttcagaagagctgggcgtcgagtggctggtcaatgccgaagtggagaacgttgatagctctggtgtgacgctgaaagagggtcggacgattgcatcacagacggtcatatggaccgttggcgttcaggctaacggcttaacggcacagatcgacgccccgcgcgaccgtcagggtcgtctgcacgtgaatgctaatcttcaggttgtggggcatgaagagatttatgccaccggcgacgtggcttatgccgccaccgatgataagggtaatcacgcgttaatgacctgccagcacgcgattctgctgggcaagtttgccgggaataacgcggctgcaagtctgctgaacgttgaaccgttgccgtatcgtcaggagatgtacgtcacctgtctggatctgggcgaatggggcgcggtttacaccgagggctgggatcagcaggtgaaactgacgcgcgccgaagcgaaaaaactcaagatgtcgatcgtcagcgagctgatttatccgccacaagccgataaagcggtggcgttcgagactgccgacccgcttgccccgtttgtataa

SEQ ID NO: 257736 - DNA, 252 bp, Klebsiella pneumoniae
atgctgacgcccgcctgggaagagcatctggccgggctgcaaaaaaccggggccatcacctcccggctgttccttaactggccgatcctcctcgaaacgcaacaggcgctgagtaaagcctccggctccacgccgaggaacaggcaggtcagcccggacgtgaagcgccccgacgccgatgtacagttttacggtaaggtctacagcgcgcagctcaggaaagagttcgtgcgtgaagtgatgatgcagtga

SEQ ID NO: 257737 - DNA, 432 bp, Klebsiella pneumoniae
atggctaagaaacaagtgctggattttaccagcgtggacgcatccacaatcgtagactgcatcatgaacaatgtgatcaccgttcaggcactgcattcattccgtaaccgctgcccaggtggtgccgcaggtgctgacaaactatatccacataccaaagaggcaatccgccttctgaaacaacgtaagaaaatggcaaaggatttccagatccttaaggatatgctcaagccgtataacgctgaactggcgaaagggcggaatgtgctggacataattcaaccgataatcacagcgtggcgcttgtactatgccgataaaggtctggggctcatggatagtcaaatcctgctactccttgccatccagtctggtgatgagtacgaagagataacaggaaaggctatccccgacctgaccacagccgaataa

SEQ ID NO: 257738 - DNA, 726 bp, Klebsiella pneumoniae
atgaccgagacattagaaactaataccgagcagacagtatctggcaagtttgccatgctcccaaacgagatccttggaatcttgggtaaaaacattcttactccatctgggagggttgagaaaatagatggtgatgatcttgtatggtggatgttcttcttcacttttctttaccagaagaaaccgtgttaccaaactagaaaaacgatttcagatcgcttcgagtgcagtgagaagactgtcacgcgccgaacagccagactggagagtctcggattattggacatccagaaacgtaaagggacaagcagtatattcacagcagcatcggtagaggagttcctagcgaagaaaacaaataagaaagtcacaccgaaagaggagagcaacggtgaagatgaacaacaacctgttactgatgcccctgagacttctgcggctgctgctggaaaaccagacggcgtacctgttgtggatattcctgtcgatgctgatttatccggtagtgatgatccatcactgagtgattcaactgggagaaatgtcgttgagttaccgcgaaatggtagacccaagcttagctttaaatctgtatcaccagatgatgacgacctagagaattattctgaagcgccccaagttgattttgacaaagatgggcagccgccgaacaagtggaaatattttgatatggctacaacctgtgaccttttatacgacctgtga

SEQ ID NO: 257739 - DNA, 744 bp, Klebsiella pneumoniae
atgggagccattaacgagatagatattgcaaagctggtattgctacccgcggttttatatgtggctaaaaagatcatcgactgggcgggaaaagtgatgtccagcccgccagcaaagcgaaaaattcgcttcgaaaaggtacctattgaaacgaaaatagaggtgctgaataaaatcgctgagatagcgaacgctgaaatacccgacactaaactctcgaggacacatcagacagtacaaataaagtttttgtatgagcagatcgggattactcttcctgtctggcacgcccatcagctgatcgcttttatcgctgataaaaatatcggctcatatgatgtacgattgatgagtttccttaaaaacccatacttatatcgttgtgaagaaaatgatttttctgtagatgctaaaaaaattaaaaattttcacctcgttagcggggggttctggctattttcaatactcatttttgcttacgcctggtggacgacaatacaatcgttactggccagcgggggcgtaaattcggctatcgcattttcactgttttactttatttccgctattgtggtcactggctatttcattagtcaggtagaagaaacctggcaaagcgccagattcgccaggctgtttgaaaggtggtgtgaggaggaagcgggggtggatagtggggagagtgctgtgctagccgcatcggagccagaagaacagacgcctcaacaagaggtttttaaatga

SEQ ID NO: 257740 - DNA, 477 bp, Klebsiella pneumoniae; identical to SEQ ID NO: 186933

SEQ ID NO: 257741 - DNA, 675 bp, Klebsiella pneumoniae; identical to SEQ ID NO: 186934

SEQ ID NO: 257742 - DNA, 2016 bp, Klebsiella pneumoniae
atgcttcatctggactactcccacctatcaactgagaactctggtgttagggttacgcattggctatatggttcgcaaactgagcgtgagcactttatttacgaattcgagaacgcggcacagcacgggcagatagcgctgaccttaaaaattctcggacacggacccacggggatcgagaagtcgcgctctatcttggaccaaacttcttaccggtgcgcccaggagaccttcagtgattgcatactaaatggcgatccctcggcgttacgcgaaaccattgtagcgaaaatcgagccgcgtgctatttgggttgaatggttgctcgaaaaccgttcatgttctcggaataaatatttggccgatcatcagatcatgaaggcgttggtggtcaatacttccgaggaagattgcatctatgttcttcaacttgtcgcccctactcacggagggaataattgggctttcgatcaactgatcctgcagcattggcagtgtgtatgtgactacctggaaaaaaatattgacaggtcgtcggactattcaagcaacagaaggcctgagttcgtcttaactctatttgagaattcgtcgaaggtgcagacgtcccggtgggtctgtgaacaggtttttgaacgagccgctccggcagtctttcctgagctaatcgaacattgctgtgcgatcttgccggaggatgtacgtaatttgttcctgcgctggaacatccattcgaagaaagagaagtatgactatatcaaggggtgcgttgccaaagccttctcgaggcttgctacattgtacgtggacaccataccctcggacctcgcgcttgctgcggcctggcacaagtttggagacccagcgcgatctagccagcaaagcgtcgctgccagcctcaaagaattgccatctcggtcgtgggaccgagaatcgctgtggacacaactaggcccggccgcccgcgaggcctggcgacaggatctgttcgaacaggtgaatgaggatccagaattagcccaggggctcctcaattttgcttgcctttggctcgagcagacggcattcgccgaagttgagccagtgcttttgcgattgatggatgacgaggaacatctggcgtttgcgaatcggcttgtcagcactgatgtaaggcaactgcaactgaggtgcaagggactactgcggtccaagcagggtgcactggacctagaggggccggtaggacgaggcgagggagccacagagttgcctagcgtaggagcccaaacttggctgagcgatccttctgtggagcaagtcatctatagggcgcttagccagattgaggaagaattttgtcgcgaatattcggagacctggggagaggacgaggaggcccatacggcgcgcctcctgactctgacgatggaggcgatcggcaatgtgagcaaccagttgcgccaactctcaattacgacgcgggggaggtatccgagcttaacagtgaaggtgcgtcaacccagcaagcgggaggaaggggcgaatacaccagccggtgctccgctgggggcagacgtgctgttcctgagccgtatcgtggaaaagggggaaacagttattcagcgtgcgacccttatgcaggtaaaaaagcgcagaggcactgattcgggacgggggttcagttcgagggtaggcatcaacctgaagcagtgcgaggacatactcaagcagtcagaacacgcctactatctgttcgcgactccggcctcgcctcgcccggttctctgggttgccccagcgcggctcgttaggaatttgactcagttgcacacgagcaaaacctcggtttcggcgttgcaggtgcgggacgccagctgctcctacgcggatttttttctgcacgagcttattggcctgtgggctggcgacgagcatgaggacatcatcgccgtcgccaatggcgatcctcggcttgggcgaacacctcgccacattgttgatatcgaggttcgccgccaatctgatcaatcatag

SEQ ID NO: 257743 - DNA, 336 bp, Klebsiella pneumoniae; identical to SEQ ID NO: 186936

SEQ ID NO: 257744 - DNA, 1635 bp, Klebsiella pneumoniae
atgtcgctgattaccattgttcttgtattcatgatagcgatagttgttactgtgtttatatctcatttgttgcccgtaaaaattccattacctttgatccagatagctgcgggggctggtctcgctgccggaggcttccaggttgatttcgatccgcatatcttcctgctgttgttcattccccctctgttgtttctggatggctggcgaataccaaaggatgcgtttttcagtgatctgaaacccatcctgtcactggcgattggactcgttctggtcaccattattggcattggctggtttattcactggcttatcccggcggttacggtggccgccggatttgcgctcgctgcgattctgtcaccaactgacccggtggccgtttctgccatgactgcaaactctccgctgccctcacgaatggcgcatatcctcgaaggcgaatcccttctaaacgatgcatccggccttgtggcatttaattttgcgattgctgcagtgctcaccggtaccttctccccgggagaggcggtgactaaattcttcctgatggccttcggtggcattctgagcggtcttgtggtcgtctgggtaaccggtaagtgcaataattttctggtgaaacggacacgcgaagaaccggccattcagatactgattagccttcttatcccgtttgcggcgtatattctcgctgaggcatcccatgtctcggggatcctggctgccgtagccgcaggcatcgctatgcactatgagcagctgtcggggcctcgtttaccggccacacgcatgaaaagcagtgccgtgtggaatatgcttcagaccacgctaaacgggatgattttcctgatgctgggcgagcagttgccacgtatgttactgaccctgccagatgtggcacaacaggcaggcgcttcatccccgtggtacttactgctgtatgctgtggttatcacactagcccttggcgtgatgcgtttcatctgggtatggctgtccataaccctgacggtatttcgtcagaaacgacggggtaaggtcacgactgcgcgcccccggttcactgcgatggccgtgatggctctcgcgggtgtgaagggttcagtcactctggcggggatactgacgcttccggtcgtactggatgacgggtcaccattcccgggcagagagttgcttatctttctctcaatggcggtgatcctgttatcacttattgtggcagctgtaggacttcccttcatgacacgctctctcggagaggatttgcctcatgacgccggtagcggcaatatcggtgcagcattgactgaagcggccatcaaccgactgagcgatttgcttagccagcctgtcgatgatcccgatgagcaggcattacgagctgatgccggaaatatgctccttgagacataccagcggcggcttcactacaactacagcgatgaacaaaccgacgtcggactggagttgatgaaacgcaccaggcttgagaagtttatgcaacgtgaggctattatcgcgcaacgtaatgagcttttccgtatgcgaaaggcccgtaccatcagcgataccgaattccatcagacgctcagggcgatcgacctcaaagaagagagtcttcattaa

SEQ ID NO: 257745 - DNA, 603 bp, Klebsiella pneumoniae; identical to SEQ ID NO: 186938

SEQ ID NO: 257746 - DNA, 519 bp, Klebsiella pneumoniae; identical to SEQ ID NO: 186939

SEQ ID NO: 257747 - DNA, 957 bp, Klebsiella pneumoniae; identical to SEQ ID NO: 186940

SEQ ID NO: 257748 - DNA, 342 bp, Klebsiella pneumoniae; identical to SEQ ID NO: 186941

SEQ ID NO: 257749 - DNA, 330 bp, Klebsiella pneumoniae; identical to SEQ ID NO: 186942

SEQ ID NO: 257750 - DNA, 729 bp, Klebsiella pneumoniae; identical to SEQ ID NO: 186943

SEQ ID NO: 257751 - DNA, 600 bp, Klebsiella pneumoniae
atgacaaaatttttattgggcgcagcgttgttcgcaacattcaccgtcaatgccagcaccacattcaatccgccccaggatcgcccgaggccccaaaacgtacctgaggcggtaaagaaccagtgtttaacggatgcagcccgtttttttggtatcgacagtgacctggttttcactctgtttgataatgaaggtgggaagattggttcatttgtactcaacaccaatgggtcatgggatattggcccgatgcagatcaattcatcaaatctggctgaggtaaaatctcacttccccgcgataacctggcgtgagcttgcttacgatccctgtgcttctttctgggtgggtacatggtggctgcaccggaaaattatcgaccggaaggggaatgtttttgaaggaattgcagactataacagcagaaccccacgcgtcagagccaactatattttcaagttcatggaacgatataaccggcgtcttcagcgtaacgggaaaatgatgcaactcaatgcatggacagggcttgatcgcgtaaaaccacaaacgccagagatatcgggtaagctcgcgaacaactcaccgccacaaccctga

SEQ ID NO: 257752 - DNA, 3354 bp, Klebsiella pneumoniae
gtgaaggaaagcttacaaaaggtgcaacatgtcttccgcttctggaaagctattgaggcactgacgccacaaagtattgataaagaaaatgctcgtgacatagataatccagcgtacatggtgacattcgacgggctgcttccctggacggatacagagcatgttcgaaaacccgtcccctcaggcaaggtctggcgttactccgctcaatgcgggatctacaatatttcggtcgtagccgatcagcttgaagaaaagcttggtgcccatgatgacgtcgctgaaagtcggaacactggcaaaagccggttgttcgatgtcagtttcagcaataaaggtatcccccaggccacatcattcatgttgtcaatgcccgcatgggctgcttcacaggtgttaaatcatgaccagggtgtgaaagcgttgaaaacacccgtcagtccggacttgacggggcttcccgcgctgtcagatacactcccgatgatggacagcggattccctgaatttgatcagctgaccctgcatattatgcaatggattgatgctgaagctgtccgtttacagcgtgacgagctggcagctgatgttgcctggattaagacgcttggcgaactggtactggagaagaccggtttcccttatgaggcaatggagcagcatgctatctgccttgttaagtgcgccacagtcaggatctcacagaatagccatgaggtgaatctctccgttgagagtaccaaaacgaactcagccagcagcagaacagaggggaaaggaaaggaaaaaaccaaaagtgctgtaccggatgatctgataaacagcttttacattcatgagatggaggcgctcgaaggacactggataaagaaaaatgttggcagaggtttctttgactacatgacgtccgtgtcccgggagaacaggcaggtaacggatgttcgaaccggggaggggttagatgctgcatttgacagactgcgtcccacgcaaccgccggtcggcacatggccctctctatatccgttagcgttcagccagcagttagccgttaatgagctgtggcgtaaaaatgctgagacacccggtatttttgctgtcaatgggccacccggcacaggaaagacaacactccttcgtgatgtggtggccgcagtcgtcaccgcgcgtgccggtaaactgattgagcacaagaacagggttttcttaaacaaaggcacttttacatgcgataagaaaaccatccccttctttccgcttcacgattccattgcagggacatccatcatcgttgcctctgccaataacggcgcagtagaaaacatctcgctcgaactcccgggtattgacgctgtacctgaatgggtaccaaaacagtcagattatttcagcgaactggcttctcacctgatgggtaaaccagcatgggggcttctggccgcaaaactgggtaataaagaaaaccgggaaaatttcctgaatactttctggtggaaaaagcccgatgagcggaatcaaaaaccgacagtgcctccggagacattctcacccgcccggggtgaagggttgcattaccatcttaatttactgaagccgacgcagggagcccgtaaacccgcaatgtcctggtcagaggctgttattcgttatcagaaagccacagtcatcgaagatgaagcacgtcatgagctcgtcaggtattcagaacttgaagaacagataaacaatcaggagcaggcactcatccagtgcggggagagccgggcctcgattaatgccgctctgtcagaacagaacggaatatacctggcgctttcctctgatgttgccggacaggaagaagctggtacccggttacaccgggaactggcggaagccgataaacgcgtccaccagcatgaggcgaataaaccaggcatactgatggcgattttctcactgggtaaaataccgcgagagtggtgggggcgttatcagcgactgaccgatgaaatggattcactgcgtacaacactcgccgaacatattaaggcgttgacgagctcgcaagccctccgtgatgaagcgcacagtcagactgaggcgcttaaatcggagctggcgctttctgtcagcagagagacagcaatcagggaaaaggttgcccgggatatctcggaactggcagaggccaggaccatgatgggggatgcctggccggaccgtaacgcaacggatgaacaaagggaactgtcagcaccatggctcagtaagagatggcgggatacgcgggagaggatgtttcttgcggcactggatgttcaccgcgcatttattgaatctcaccccgttgaaatgtcagcaaacctgaatctggtgagtgactggcttaatggtaaggagataccagataaacaggcagcgcttgcccttgattcactgagtctggttgtccccgttatctccacaacgtttgcgtctgttccgcgcatgtttaaaaaaatcggcaaagaagccattgggtggttactgattgatgaagcagggcaggcccttccgcagcaggcagcaggagcagtatggcgggcaaaacgaacggttgtcgtgggcgatccaaagcaactggagccggtgagtggtattccttcctctgtcgaaggggcacttgcacaatcctatgatattccagccagctggtggccgggtaaaatatcggcacaggtgcttgctgatcaaacgatggagctgggaacctggctaccggatgttgaaaaagggcaggtatgggtaggctgtcctttacgagtacaccggcgttgtgacgatcccatgttcagtatcagtaataatatcgcctacggcgggctcatggtgcatgggaaaaagcaaagcacgtcgtgtttgcctgacagtggctggctggatgttaaaggtaaatcatgtgaagggaactggatcgctgaggaaggtactgcagtagaaaagttacttttgacactgaaagagcaatacggcatagcacctgacgacgtattcctgatttcgccatttaaggactgcgccatgaagctcagaaaactcgcttcccggaccggtttccgttccaaccgaacggggaccgtgcacacgacacagggtaaggaagcggccgtggtcgtgcttgtgctggggggaaacattcagaaaaatggggcaaagtcctgggcggccagcaaacctaacctcctgaatgtggccgtgagcagggccagacagcggctgtatgttatcggggagcgttcactgtgggagaaacatgcctacttctcatccctttcacgagagttagggccactgcaggaaaagatgcataagaatgctgtgacagagccctga

SEQ ID NO: 257753 - DNA, 273 bp, Klebsiella pneumoniae; identical to SEQ ID NO: 186946

SEQ ID NO: 257754 - DNA, 1044 bp, Klebsiella pneumoniae; identical to SEQ ID NO: 186971

SEQ ID NO: 257755 - DNA, 531 bp, Klebsiella pneumoniae; identical to SEQ ID NO: 186972

SEQ ID NO: 257756 - DNA, 756 bp, Klebsiella pneumoniae; identical to SEQ ID NO: 186973

SEQ ID NO: 257757 - DNA, 465 bp, Klebsiella pneumoniae; identical to SEQ ID NO: 186974

SEQ ID NO: 257758 - DNA, 843 bp, Klebsiella pneumoniae
atggctgaaaatacatcacagagaaacactccacgaactcagcgaaacgtgggcaataatcgcgctttgggcatggtcatcacaaaactcaaaccgctatccagcgtgttttatttgcatttccatgaaaagaaccgcgcccgccttcgccagttcaacgcgatctctaacgcaatttataatatctttcgcctggtcgagtcagacccgacgactggcacaaaagttaataagtggttgacaggcatctatactgaattgtcaggtaatgtaaacacctacaaagtgcagattgataaaagcctttcgaaaattccggtgcaggattcgtcgtttgacgggtacaactacgaggaatttgaaattcgctggaatcatccactgacctacaagttactggatattatctcaaccattaatgtcatgacgcgccaggcacaccagttgtggttattcggtgaaatcacccagcaggtgcatgaccgtattatcctgcagcttttaagctccctgcaggccgccatggattcaattaccaaaatacttgacgcggagaaccgtgcttccggtaaatacgatgcacttccattcatcaaaaacatcaaacgttttaaatctgttgagctgtatatcgccagcctcgaaaccaaagttccggataatccatcatccgaagccatcacgaagggtcctgaaccagaacggcctgatgaccagatgaattctggtgttgatgcaagcaaagctgcggtaaaaacggaacagactgaaaccgcgtcagtcaacccggaaaaggcggctggtaaaacaggaccttccgttgctcctgtcccggcacaataa

SEQ ID NO: 257759 - DNA, 1089 bp, Klebsiella pneumoniae
atggagcgaaaacaggtttcccgggcatcgttgctcagtatgaattcaactcaacccaaatatatatcacgcgccaataaggcgctgaaacagtacggcattgatgttgacgatgaggcccttccggaaatactgtcacggtatgcacagaaacttaccggtgatctttataaggtgtatgcccatgacaccattgagagtctggatgtgctggcccggacgctgtccgaattttttatcatacggtatgccgtcaccatcgtgacgcacgacgataaggaagtgtcttacaactggtcagtatcgcagggtcctttcaccgactggctcagtcagctgctggccgccagcatggctaagagccacagggttgacgtccagatagataccaatcaggaacgcatggcattcatccaagttaactcagagcggctgggatggtacctgttacccgcgtttgtcgatatctcaggattactttcccttttccttgacatgcctgaaaaggttgaatatcaggtgatgcgccgtaaacgaaacggaaaggtgcccgacatccaccagcatgaccttggcattttcgaagaggatgcccttatctccggcctgaaagaaaagttacttttatggagcgggaacctgtgcgatccatctgatgaatacacatctcttttcaaccgggtcattgacctttcaatcctgggcaaccgccaccagccatcgatgtaccgcaagagctgtattattcagtcggttctcgatgagttctccgcgtcggtgttgtccctccccgtccggtttaatggaaatgcattatgcgcagtgtggaccccctggtctgagccgtttagccagttctctcgtttacgtccagtagatgaagatacggtttatatgccctccccgggccaggtgcgctggaaaaatgcagacgtgcgccgaaaagtaactttttctctgatatccaggttgatcgcatcggatgaccttgcctgttcgggcattcttcatggctggaagaatcactacctcgacagagcaacgaacatccgtctggctaccatctggaccggactgttttccgattaa

SEQ ID NO: 257760 - DNA, 279 bp, Klebsiella pneumoniae
atgcctcaggcgtattcacttctgcaggatctgaatctccgtcactacctgccagtggtcaatgccgagtttgatatatgtgtcattcactgcggcaatcagtggtggcgcttcaggctggtggatgtgaaatctgatgaacatcagaaaaggatggtggcccggacggcataccggctaaaccagtcaatggggatcgcggagcaaatggtcaacatgatccacgcctggcagtcggtgcctcaccttaacccaccagcatctgactatataaattaa

SEQ ID NO: 257761 - DNA, 405 bp, Klebsiella pneumoniae; identical to SEQ ID NO: 186980

SEQ ID NO: 257762 - DNA, 375 bp, Klebsiella pneumoniae; identical to SEQ ID NO: 186981

SEQ ID NO: 257763 - DNA, 288 bp, Klebsiella pneumoniae
atgaatatcaaaattcaggaaccaccttctcgtactcaaacctttgtcatgagtacgctctacgtaattcgtgggcttgcggcaatgacagtatattttttcagaacgtttcctttagcattcttctatgtattgctggtggtcactttgttttgtgatatgaacaatataccgttgaaaggtcttatgcaggaggggatgctcattaagctatccgcctatgcattacaagcaaacgtgctctggcttggtgttaaggtgtcgatgaattcagacgaatttttctag

SEQ ID NO: 257764 - DNA, 216 bp, Klebsiella pneumoniae; identical to SEQ ID NO: 186983

SEQ ID NO: 257765 - DNA, 972 bp, Klebsiella pneumoniae; identical to SEQ ID NO: 186984

SEQ ID NO: 257766 - DNA, 261 bp, Klebsiella pneumoniae; identical to SEQ ID NO: 186985

SEQ ID NO: 257767 - DNA, 264 bp, Klebsiella pneumoniae
atgaaaatcaaaaccactgtagcagcattaagcatcctttccgttctgtctttcggcgccttcgccgctgactccattaacagcgaacaggctcaaggccgtcaggcaatcggcaccgtttccgtcggcgcggtaagttcttccccgatggatatgcacgaaatgctgaacaagaaagcgcaagaagaaggtgcttcctcttatcgcattatcgaagcacgtaccggtgaccactggcacgctacggctgaactgtataaataa

SEQ ID NO: 257768 - DNA, 267 bp, Klebsiella pneumoniae
atgaaaagcgcaattatcatcgcatccctgggtctggcttccgttctctctttcggcgcaaacgccgccgttaatcaagtgaacgctgaacaggcgcaaaatctgcagtccatgggcaccgtttccgtttctcaggtaggcagcgcgccgatggatatgcgccaggaactggcggctaaagctgaaaaagaaggcgccagcagctaccgtattattgaagcccgtaccggcgataactggcacgctacggctgagctgtacaaataa

SEQ ID NO: 257769 - DNA, 1968 bp, Klebsiella pneumoniae
atggggattttcaccatcgaaccccggcatctccgctttgccgttaaattagcctgtgcggtagtgctggcgttattcgtcggttttcactttcagctggaaacaccgcgctgggcggtgcttaccgcagccatcgtggccgccggcccggcgtttgccgccggcggagagccttactccggggctatccgctatcgcgggatgctgcgtattgtcggtacctttatcggttgtatcgccgcgctggcgattatcatcctgatgattcgcgccccgctgctgatggtgctggtctgctgcctgtgggcagggttctgtacctggatctcctcgctggtgcgggttgagaactcctatgcctggggcctggcgggctataccgcgcttatcattattatcactatccacgaagagccgatgctggcgccgcagttcgccgtcgaacggtgcagtgaaattgttgttggtatcgtcagcgccatcgtggccgacctgctattttcgccgcgttcgattaaaaaagagatcgaccttgagctggataacctgctgatcgatcaataccgcctgatgcagctttgcgtggcgtatgccgataaagatgaagtcgataaggcctggagcgcgctggttcgccgcaccaacggactggaagggatgcgcggaaacttaattatggagtcttcgcgctgggcaaaagtgaaccagcggctgaaggcgatcaataccctctctctgaccttaattacccaagcctgtgaaacctatttgattcagaatacccggcctgagatggtcaccgatgactaccgcgagctgttcgctgaaccggttgagaccgtgcaggatgtgcaccgccagttaaagcggatgcgccgctttttgacctggaagggagagcacaatacgccggtgacgatctacagctgggtcggggccgcgacgcgctatctgcttttgaagcggggcgtggtcggcaataccaaaatcagccgtattgaagcggaagtgctgcaaggcgaagtggtggtgaaggcggaatccgccgagcgacaccatgcgatggtcaacttttggcgtacgtctatctcctgtatcctcggtacgctgttctggctgtggaccggctggacttcagggagcggggcgatggtgatgatcgcggttgttacggccttagcgatgcgtttacctaatccgcgaatggtggctatcgatttcctctacggcacgctggcggcattaccgctgggggcgctgtttttcctcgtgattatgcccgcgacgcagcaaagtatgctgctgctgtgcatcagcctggcggtgatggcattttttatcggtatcgaggtgcaaaagcggcggctgggttcgctgggggcgctggccagcaccattaatattctggtgctggataatccgatgaagtttcaattcaaccaatttctggatagcgccttaggccagatcgtggggtgtttcctcgcgctgatggtgatcttactggttcgcgataactctcaggctcgcaccggtcgcgtgttgctcaaccagtttgtctcggcggcggtatcatcgctgaccaccaatacggcgcgacgcaaagaaaaccatttgccggccctgtatcgtcagctctttttgttgctgaataaattccccggcgatatcgcgcgctttcgtttggcgctgaccctgattattgcccatcagcgcctgcgcgacgcgccagtaccgataaatgacgacctgtcggtatttcaccggcagctgcgtcgtacggcggatcgcgtcatttccgccagcagcgatgataagcgccgctactattttgcccgcctgcttgatgagctggatatctaccagcaaaaattacagctctgggaagcctctccgcaggtgaccgagccggtgcgaaggctggtggagatgctgcataagtaccagcatgtattaaccaatagctag

SEQ ID NO: 257770 - DNA, 204 bp, Klebsiella pneumoniae
atgagtctgtttcctgtcattgtgattttcggcttgtcgtttccgccgatcttctttgagttgctattgtcgctagccatcttttggctggtgcaccgcctgctggttccgaccggcatctatgattttgtctggcatccggcactgtttaataccgcgctctattgctgcctgttttatctgatatcgcgtttgttcgtttga

SEQ ID NO: 257771 - DNA, 993 bp, Klebsiella pneumoniae
atgaagccaatttttagccgtggcccgtcgctacagattcgccttattctggcggttttggtggcgcttggcgtgataatcgccgacagccgcctgggtacgttcagccaaattcgaacgtacatggatactgccgtcagccctttctactttgtttctaatggtccacgggaattgctggatagcgtttcgcaaacgctggccacccgcgaccagctcgaactggaaaaccgcgcgttgcgccaggaactgttgctgaagaacagcgatctgctgatgctgggccagtacaagcaggagaacgcgcgtctgcgggaactgctgggctctccgctgcgtcaggacgagcaaaaaatggtgacccaggtcatctcaacggttaacgacccctatagcgatcaggtcgttatcgataaaggcagcgttaacggcgtttatgaaggccagccggtgatcagcgataaaggcgttgtgggtcaggtggtggcggtggcgaaactgaccagccgcgtgctgctgatttgcgatgccacgcatgcgttaccgattcaggtactgcgtaacgatattcgcgtgattgccgcaggcaacggctgtaccgacgatttgcagctggaacatctgccggccaataccgatattcgcgtcggcgacgtcctggtgacttcgggcctcggcggccgcttccctgaagggtatccggtaggggtggtttcgtccgttaagctggatacgcagcgcgcgtatacggtgattcaggcgcgtccgacagccggtctgcagcgcctgcgttacctgctgctgctatggggagccgatcgcaacggcgcgaatccgatgacgccggaagaggttcatcgcgtagcgaatgaacgcctgatgcagatgatgccgcaggttctgcctgcgccggatgcgatggggccgcagatgccggctccggcaaccgggttgacgccgccacagcagtctcagccagcgggggggcaatag

SEQ ID NO: 257772 - DNA, 1044 bp, Klebsiella pneumoniae
atgttaaaaaaatttcgtggcatgttttccaatgacctgtccattgacctgggtaccgcgaataccctgatttatgtaaaaggacaaggcatcgtattgaatgagccttccgttgtggccattcgtcaggatcgtgccggatcgccgaaaagcgtcgccgctgtgggtcatgaagcgaagcagatgcttgggcgtacaccgggcaacattgcagctattcgcccaatgaaagacggcgttatcgccgacttcttcgttaccgaaaaaatgctccagcactttattaaacaggtgcacagcaacagctttatgcgtccgagcccgcgcgtgctggtctgcgtaccggttggcgcgacccaggttgaacgtcgcgcgattcgcgaatccgcacagggcgctggcgcccgtgaagtcttcctgattgaagagccgatggcggctgcgatcggcgccggtctgccggtctccgaagcgacgggttcgatggttgtggatatcggcggcggtaccactgaagtggcggttatctctctgaacggtgtggtttactcctcctccgtccgtatcggcggcgaccgttttgacgaagccgtcattaattatgtccgtcgtaactatggctccctgatcggcgaagcgaccgcagaacgtattaagcacgagatcggttccgcttatccgggtgatgaagttcgcgaaatcgaagttcgcgggcgtaaccttgctgaaggcgtgccgcgcggctttacgctgaactctaacgaaatcctcgaagcgctgcaggagccgttgaccggcatcgtcagcgcggtgatggtcgcgctggaacagtgcccgccggaactggcttccgatatctccgaacgcggaatggttctgaccggcggtggcgcactgttgcgcaaccttgaccgtctgttaatggaagagacaggaatacctgtcgtagttgcagaagatccactgacctgcgtcgctcgtggcggcggcaaggcactggaaatgatcgatatgcacggcggcgacttgttcagcgaagagtag

SEQ ID NO: 257773 - DNA, 1452 bp, Klebsiella pneumoniae; identical to SEQ ID NO: 188768

SEQ ID NO: 257774 - DNA, 651 bp, Klebsiella pneumoniae
atgcctagaagaacgaaagaagatgcgctaaagacccggcagcttctgattgagtccgccattcagcagtttgccctacgcggcgtgaccagcaccaccttagccgatattgctgatgctgctggcgtcacgcgcggagcggtatactggcactttgcgagcaaagcggagctatttaatgaaatgtggcaacagcagctgccgctacgcgacctgcttcagcatgaatttaaccttaaagacgatcaggatccactcagcacgctacgagaaaaatttattattggtttacaatatatcgccaataatccccgtcagcgtgcgttgatgcaaattctgtatcagaaatgtgagttttccagcgacatgatgccggaagctgagattcgtaagagaattggatttagttatccgattattggcgggattttgcagctctgtattcgtaacggattattaccagcggaaacgaatgttgaagtttcattaattgttttacacagcgcgtttaccggtattattaaaaactggctggtggagccgggacaatttgatctgtatcgccaggcgcccgctttggttgataatattatgtcgatcctttgtgggactacacgacagctggcgacagtgagccattacaatcaatga

SEQ ID NO: 257775 - DNA, 222 bp, Klebsiella pneumoniae
atgaataaatttattatagtggcattgctggcaacgctgctcgccggctgtgcgcacgactctccgtgtgtgccggtttatgattctgaaggtagattagtccacaccaatacctgtatgaaaggaacgacccaggataactgggaaactgctggcgcgattgccggaggcgcagccgcgatagctggtctgacgctcggtatcgtggcattgacgcgttaa

SEQ ID NO: 257776 - DNA, 315 bp, Klebsiella pneumoniae
atgaaaaagataatgttgtgctgttccgcgggcatgtccaccagcctgctggtgaaaaaaatgatcgccgaagccgagcagcgcggtctaccggtggagatcaacgccttcggcgtcgcggaattcgatcggcaggtcggccattaccaggtggtcctgctggggccgcaggtgaaatacatgcagaaagatctgcaaaaacaggcggataaatacgggatccgcgtggaacccatcaacatgatggattacggcatgcaaaaaggcggcgccgtactggatttcgcgctttcccttatcgataacaaaaactaa

SEQ ID NO: 257777 - DNA, 1323 bp, Klebsiella pneumoniae
atgagctctctgtacgctaagctgatcgccgtgattgaacagaagatcacccctatggcgggggcgatcggccagcaaaaatacgttacctccatccgcgacggttttattaccgccctgccctttatgatcgtcggctcgtttttgctggtctttattttcccgcctttttctccggatacgacgtggggttttgcccgcgcctggctgcaattttccctcgatcatcgcgatgcgctgatgctgccatttaacttcagcatgggggtgatgacgctgtttatcgccgtcgggatcgccgccagcctggcgaaacaccacaatctggactcgctgaccgccgggatgctgtcgctgatgtcgtttctgctggtggccgcgccgctgaaggatggccagatctccaccgcctacttctcgggtcaggggatcttcaccgcgattctggtggcaatttactccaccgaactgtacgccttcctcaagcggcacaacattacgatccgtctgccgcctgaagttccggcgggcgtggcgcgctcgtttgaaattctgatcccggtgctggcgatcgtgctgacgctgcatccgctgaatctgtttatcgaagcgcagctgggaatgattatcccggaagcgatcatgtcgctggtgaaaccgctggtggcggcttccgataccctaccggcgattctgctgtcggtgctggtgtgccaggtgctgtggtttgccgggatccacggggcgctgatcgtcaccgggatcatgaatccattctggatggcgaacctgtcgatcaaccaggcggcgatggccgcaggcaccgcgatcccgcatatctacgtccagggcttctgggatcactacctgctgatcggcggcgtcggatccaccctgccgctggcgctgatgctgctgcgcagcaaggccgtgcatctgcgaacgattggccggatgggcgtggtgccgggcgtatttaacatcaacgagccgattctgtttggcgcgccgatcatcatgaacccgctgttcttcctgccgttcgtactggtgccgatgatcaacgcgaccctggcctactttgcgctgaagctggacctggtgagccgcgtggtgtcgatgacgccgtggacgacgcctgcccctatcggcgcctcatgggcggcgaactggagctttagcccggtgatcatgtgcctgatctgtatggcgacggcgatggtgatgtacctgccgttcctcaaagcctacgaaaaacagctgcttgagcaggagcacgctaacgcggccgcccaggccgaaagcgcgccgcagtccgcataa

SEQ ID NO: 257778 - DNA, 2370 bp, Klebsiella pneumoniae
atgtataactccactcaatcaacagcatggttcaagaaaagcctgctggtgacttctttgcttacagcaatttatcaaacttccgccggggcggctgataccaccgcgaaaaccaccagcagcgcatcttctgatgacagctcggaacggatgaccgttaccgcgccggcgccgttgctgaaagcgggcagcgaacattcgatcagcgctcaggagctgcaggataaaggggccaacgactttggctccatcatgcgctacgagccgctcattagcgccaccggcgccagcggcggttccggcaacggcaaaagcggcttcgaccgcggcggctataccggctacaacatacgcggcatggagagcaaccgtgtcgggatcgacgtcgacggcatcgcccagccgaatgccaccgggcgcagctacgccagccgcgcgggcctcaatacgttcggtatgggccgcgactacattgacccctacatgtacggcagcatcgatattcagtccggggcgacctcaaccgataccgccaacagcgccatcggcggcaacgtctctttccgtccgaagtccgcggatgactacctgcatccgggcaaaaccagcgccttcggctaccgcagcggctacgactcatccgatcgcagctggcacaacggcgtcaccgttgccggcggcgatgaaaccctgcgcgggatcttcgtctacagccgtcgcgacggccaggaaacggaaaacaacagcgggaccgttgattcatacccggcaaactggcactccaacgcctttatggcctcggggatctggcagccgaatgacgaacataagctcaccagcaccttcgattattaccataaaacgaaccacacgcattatgacgcctgggactccagcggcaacagcgttatcggcacgtcaaaccagaccagccagacccgccgctggggcctgagcctgaaagacgactggacgccgatgaacgactatatcgacagcgtatcgaccaaggtctactaccagcataccgaggcccatgattggacatatatgccggacagcgtcacccgcgcgatgcaaacggtgagctccgactacgataccgacacctggggcattcagagcgcgctggcgaaatcgataggccgccacgatttgagcgccggttttaacgccagcacgacgaaaacccagcgcccgttaacccagtcgccaaccccgagcgcctttagccagatcatgcagccggacgccgacagccgcggctatatcgtcgccggcttcctgcaggacaaaattaacttcgacctcgacgagcataactttgcggttatcccgggcattcgcgtgatgcatcagtcgaccaggccggagaacgtctccgatctggccaacaacagcagcgtgctgaccggttccgacgtgtcaaatctgtacggtaagaacgctgatacccaggcgctgccgtcgctggtcttgcagtacgatatcaccccgcgcctgatgacttatctgcagtatcagcgcggcgcgcagttcccgaacgccagccagctgtacggttcgtggaacctcggctccagctacgccggacgcgcccagtatgcgctgatcggcaacaccgatctgaaaaccgaaaccagcgataacgttgagtgggggatgaagggcgaagtggcggaaggcatcactatgcgcaccgcgctgttctacaacacctataaaaactttatcgcctatacccgctacacccgcgccaataatccggtgcagttcactaacgtaccgtcgaacatctacaccatttaccaggcggaaaaccgcgataaagcgtacatctacggcggcgaaatcagcgctaaattcaactttggcacctggtttgaagaggttaacggcctgagcgccaccctcgcctacggctatagcgaagggcaatcgaaatcgagctacagcggcgataagtacgtcgacctcgatagcgtcgcgccaatgaaggccattgtcggcgtggcgtgggacgatccggcaaaagtgtacggcaccgcgctgaccgccacctttgttaagggcaagcgcgccaccgccaccagccgtgaaagctataccaacaccggctccgcgattaccgattcgaccagcgaatatatgcgcgttccgggctacggcatgctggactggaccgcgtactggcaggtcgcgaagaacgtgcgcgtcaacggcggcgtatacaacattaccgatcgtaaatactgggattatctgagcagccgcaatatcgaaatgtccaccaatcaggacgccaacgaccgggcgctggcggtgatgcctggccgcacctggcagctgggcgttaacgtcgatttctga

SEQ ID NO: 257779 - DNA, 321 bp, Klebsiella pneumoniae
atgaagatttcattttcatcctgtaccccacattcaaatcaaaattctgtaaccgcagttgagagtttgcgctcattgatgagctcaatgggcatcaataaattctccggggtcgttgtaccagagcaggagtatattctttatgttttaaaagaacatggacctgaggggttgcttactcgggaattagcggacaggtgcgaaatgtcaatatataaagtcagacatttgctactgccgttggaaaagtatggtcaggtgaacagaataaaagttaataagcatcataaatggtatttttataataaaaatattgactaa

SEQ ID NO: 257780 - DNA, 741 bp, Klebsiella pneumoniae
atgcggttcgatatagagggatttattacatttgatactgaggaagcatccctggtcaatctgttgaccggtgattgtattgaactctctgcgacttccactcgcctcctaaccaatctgttacaataccgaggggatattatttctcgcgttgatatttttcagtcggtgtttgaaaaatatggcgccaggccctcaaatagcaatcttaatcaatacatctcaacgctgcggcgtagtcttgccgatctcggcattgagaaaaatgtgattattacggtaccgcgaatcggctttaagatttctgaggaagtcattatcaccagcgataatgattattcatcctccttcactctgccggttcttaccgccgaccttccccagcgaagtttactatggcagcaccgcaaagcggccattttttttatcctgccgttgataggttttctgctgcttttacctttttttatgtataaaaaacagcctactacgttagttttcacccaggataaatgtactatttatggctctggcgctcagcgcgcgcgcgaaatcctcagcaataaaaagctgttcccctctgggcttgattgttcgacgcctaagaaaatctaccttttcaaccgacaattaaatcagccacaaggcttaggtatttatatggatatattcatcctcaaatgtgatatgaaggaccagcagtgccacagttactactataaggaaataaaaaatgcgtaa

SEQ ID NO: 257781 - DNA, 489 bp, Klebsiella pneumoniae
atgcgtaaatacgctataatattcctcgccactgccctgacgctggtagtcgctgcgttcctctatatagatatccgcagccatgacaccttttcctgtaaatcgcagtacgacctcacagaggatataaatgagaatattctccgctcacagggtttgctatccgctcagcttgctaataaccgtcttttaatcagtcttgagggattgctcaccagcaatggcgataaatatattgtctcccgcaccattgctatcacattaaaaagaaccactgcgaccagtcatctcttttatatcattgattcgcaaatcactcgccatcacgctgacaatacgcctgaaaatatcgcccggcaaaatctctttggcaaccaaagtaatgatcgaatcatctatatcaatcacgttaatgatgatactattttattcggtaatcaaacgttcccacaatatggttgccagcgtcagaatacaatcattgattga

SEQ ID NO: 257782 - DNA, 1266 bp, Klebsiella pneumoniae
atggttgccagcgtcagaatacaatcattgattgagattcatctcattaattttaattatgctgatatcatgacgatacatttactaccgaccttaggcagcatcgcgaatatcattgatatgattaacccccggctcaatctgcaccatgtcagaacagcgtttattgcatcgcatctggctaagttagtcgatttttctgcggcccagcggcgtaaaaccattctggcggcgctcatccatgatgtcggaggattaaatgaaaaatcgcgtcttgaaccgcttaactatattgataacgaacataaccatcatgcgctcatcggcagcgaattacttagccgcattccgctgtttcgtccgctcaacaaaatcgttcgctatcaccatacccactggcgcaacggtctcgggcattatagtgaaggcgagcgggtgcccgaagagagccatttgttattctttgcggaccgactggatgttctgtattgccagcaccgtaccgaacatatcccattattaagcaaaaagctggtcgacatcgccgccgccggcgcccccattctctataagcaagagtatattcaggccttccgaatcctctccgccgatgaccatttctggtcggtcatggcgtccaccgactatcgcgattacattaaagcgatctccggcgtgcataacgacacactctctttgcacaaccttcgcgacattgccgagctggtctcttttattatcgatcagttcagccagcagacgccttggcactccgcggccgtcggccatattgccggttatctggcaacaaaaatggagatgagcgccacgcaagcgctaaaagtagagattggcggattactgcataatatttcctgtctggatcacagcccgccgccaaagcgcgtgggtttatcggataaagcccagcgttatttttatcccattgaaggtattgatgatatttctgagtggctggccatgcaaaatgatcccgcgtcggcgcaatggcataataaaactctgcaaccggaagccatgcttatcgcggtaagccgacgggtggtccatgcgctcaatgggccaaaagcggaagagaaatcgctggcgcagttaattaaaaataatccgggggaggaaattcccccgttgatgctggctctgattgcgcaatattcttcacagattattcagatccaccgtgctaccgcgggcgaaataaaaaagttagtgaatcgcattgcgcaactcactcactctgtttaa

SEQ ID NO: 257783 - DNA, 807 bp, Klebsiella pneumoniae
gtgaagcggctgcgctatacccttgcggacgcccggcagtgggcggcgttttccggcgacgataaccccattcacttcgacctcgcggcagcgcgcgcgatgggcgacggccggctgagcgtccacgggatgcgcgcgctgctcgacgtgaagcgcgacgtccagtcgcggctgacgaacccgctcaccggttctgaacgctacctgaaatgcgtggttcgcctgcgcaggccgctatggtgcgatagcgactggctgctcactcccggtgccgcgaaaaatcgcgtcttgtccgccgcgtcggtcagcagctcgcaggatgatgaagtctgtttgtcatgccagatgagcctcgccgccgggccggaatcgctaacgggaaaacagcccagcgaacttgcaccaaagacgctgcttgcgctgcaatcccatttcaatagcgcctggcccgacctggcgcagtggcagtttcttgacgcgctgctgttccgccagcttattagcgatcccgcgctgctgcgccaggcgaatatcgcgactctgctcggagcgggggaaacctcgttgcagcaaatttttacccgctatccggtgctgcaaacccaccaggaggtggtgtttgatgttcatctcgcgggcaaagtgacgccgatctggcccgaatcgctatcgctctggctgctgccctcgctggtggtcggccaggttgagcagggcgcgctggtgcgcatcgcggcggcggcgcagctggataacctgataatgaccaatgtggtcacgctcaaagttggcccaatgaccaattga

SEQ ID NO: 257784 - DNA, 549 bp, Klebsiella pneumoniae
atgcgtcaactcatcgcatcaatgatactcataggttcgctatccgcagctgctccggcgcatgccatcggagagctgatcggcggcgatttaaaattcaagggaaccgtcatttcccacggttgcagtatcgtgccttcgtcaaaaaacatcaccgtggattttggccagatttcaacccgcacgctttatgcggagggaaaatcgcagcccaaagcgtttgttattgaactccaggattgcagcaccgatgtttttaattccgtcaccgtgacctttagcgggacggaaaataccaatatgagcgaccgtctggcgattacgccggtcgcgcctcaaaccgccagcggtattggtataggttttgaagagagtaacggcacggcgattttgcttaatacgccgaccaccgccgtcgctatttccgatgccaacatgcagttaaattttaaagcttttgttgaaggggaaccggacgccttgagtaacaaaaccctggaaaccggcgccttccaggcaacagcgaattatacccttaattaccagtag

SEQ ID NO: 257785 - DNA, 2664 bp, Klebsiella pneumoniae
atgagcaactctttatctaatactgtcccccctgacctgtccgctcagccagaaaatccgggcgagtggccaaaaagtgatttcaattgcgcgacgattaaggcgcttatcgacgcttttcagcgctggctgggcgaggcttttgatagcggtattgccgcggaaagattgattgaagcacgtaccgaatttatcgatcagctgctccagcggctgtgggtcgagtacggtttcggttccattaacgacatcgcgctggtcgccgtcggcggttacggccgcggcgaactgcacccgctttctgatatcgatctgctgatattgagccgcaaaaagctccccgatgagcaggcgcaaaaagtcggcgagctgctgacgctgctgtgggatattaaactcgaagtcggccacagcgtgcgcaccctcgaagagtgcctgctggaggggctgtcggacctcagcgtcgccaccaatctgattgaatcgcgtctgcttattggcgacgtcgcgctgttccttgaactacaaaagcacatattcagcgacggcttctggccatcggaaaagttctttgcggcaaaagttgaagagcagaatgtacgccatcagcgctatcacgggaccagctacaacctggagccggacgtgaaaagcagcccgggcggcctgcgcgatatccacaccctacagtggatcgcgcgccgccatttcggcgccacctcgcttgatgaaatggtcggcttcggctttctgaccgaagccgaacgcaacgagcttaacgaatgcctgcatcagctctggcgcattcgctttgcgctacatcttgagctcaaccgctacgataatcgcctgctgttcgacaggcagttcagcgtcgcccgccgtctgcgctatgaaggcgaaagcaaccagccgattgagcatatgatgaaggatttcttccgcgtcacccgtcgggtgagcgagctgaaccaaatgctgatccaactgttcgaagaagcgattctcgcgctcaccgaggatgagaagccgcgaccgattgatgatgattttcaactgcgcggcacgctgatcgatctgcgcgatgacacgctgtttatccgtgaaccgcaggccattctgcgcatgttctatacgatggtgcgcaacagcagcatcaccggcatttactccaccacgcttcgccatctgcgccacgcccgccgtcatctgacgcagccgctttgctacattccggaagcgcggaccctgttcctcagtatgctgcgccatcagggcgcggtaagccgcgggctgctgccgatgcaccgccatagcgtgctgtgggcctatatgccgcaatggtcgcatattgtcggccagatgcagttcgatctgtttcacgcctataccgttgatgaacacaccatccgcgtgctgctgaagcttgagagcttcgccaaagaagagacccgtagccgccatccgctgtgcgtggaactgtggccgcgcctgacgcatccggagctgatccttatcgccgccctctttcacgatatcgccaaagggcgcggcggcgaccattcgattctcggcgcgcaggacgtactgaaattcgccgagcttcacggccttaactcgcgcgaaacccaactggtcgcctggctggtgcgccatcatttgctgatgtcggttaccgcccagcgtcgcgatattcaggatccggaagtgatcaagcagttcgccgaagaggtgcaaacggaaaatcgtctgcactatctggtctgtctgaccgtcgccgatatctgtgccaccaacgaaaacctgtggaacagctggaagcagagcctgctgcgcgagctctatttcgccaccgaaaaacagctgcgccgggggatgcaaaacacgccggatatgcgcgagcgggtgcgtcaccatcagctacaggcgctggcgctgctgcggatggaaaatatcaatgaacaggcgctgcaccaaatctggaaccgctgccgcgccaactactttgtgcgccatacgccaaaccagctcgcctggcatgcgcgcaatctactgaagcacgatctcagcaagccgatgatcctgctcagttcccacgccacgcgcggcggcaccgagatttttatctggagtccggaccgcccttacctctttgccgccgtttgcggcgagctggatcgccgcaatcttagcgttcacgatgcgcagatcttcaccacccgcgacggcatggcgatggatacctttatcgttcttgagccggacggcagcccgctttccgccgacaggcacgagatgatccgcgtgggcctggaacaaaccctcagccagcgcagctggcagccaccggcgccccgtcgtcaggcggcgaagctgaggcatttttccgtgccgacggaggtgaatttcctgccgacgcataccgaccggaaatcctttcttgagctgattgctctcgatcagccgggtctgttagcgcgcgtcggccaggtgtttgccgacctcggcatttcgctccacggggcgcgaattacgacaattggtgagcgagtagaagatttatttataatcgccaccgcagaccggcgcgcccttaataatgagctacagcaagaagtgcaacaacggttgacagaggccctcaatccaaacgataaagggtaa

SEQ ID NO: 257786 - DNA, 825 bp, Klebsiella pneumoniae
atgcagcaattacagaacgttattgagtccgcttttgagcgtcgcgccgacatcaccccggcaaacgtggataccgtgacccgcgaagcggttaaccaggtgatttctctgcttgattccggcgcgctgcgtgtcgctgaaaaaattgacggccagtgggtcacccatcagtggctgaagaaagcggttctgctctctttccgtattaacgataaccaggttatcgatggtgcggaaagccgctacttcgataaagtcccaatgaagttcgcggattatgatgaagcgcgtttccagaaagaagggttccgcgtcgttccgccagcggccgttcgtcagggggcgtttatcgctcgtaatacggttctgatgccgtcctatgtgaacatcggcgcctacgttgacgaaggctccatggtggatacctgggcgaccgtcggttcctgcgcgcagatcggcaaaaacgtccacctgtccggcggcgtcggtatcggtggcgtactggagccgctgcaggctaacccgaccattatcgaagataactgctttatcggcgcgcgttccgaagtcgttgagggcgttatcgtcgaagagggttccgttatctctatgggcgtgtacctcggccagagcaccaaaatctacgatcgcgaaaccggtgaagtgttctacggccgcgttccggcaggctccgtcgtcgtctccggcaacctgccgtcaaaagatggcaaatacagcctgtactgcgcggtcattgtcaaaaaagtcgatgccaaaacccgcggcaaggttggaatcaacgaacttctgcgtaccatcgactaa

SEQ ID NO: 257787 - DNA, 1512 bp, Klebsiella pneumoniae
atgaggtcgcggcgcatttttttgacgacggcgcttgtccggttggctagaatgcccttctttctatttgtattactcatcattgataatggcatgaaagcagaaaatccctcttcttcagcacatcagttcgtacgcgttcgccgcagcgatgccgtgcgtcggttgattcagcgtgataagacgccgctggcggtgttattaatggccgccgttgtcggaacgctggcggggttggtcggcgtcgcgtttgagaaaagcgtcaactgggtgcagaacctgcgtattggcgcgctggtagaggtggctgaccactggtttctggtgtggccgctggcctttatactctccgctttgctggcaatggtgggctatttcctcgtgcggcgttttgcgccggaagcgggcggctccgggatcccggaaattgaaggcgcgctggaagagctgcgtcccgttcgctggtggcgcgtgctgccggtgaagtttatcggcggcatgggtacgctgggcgcgggaatggtgctgggacgcgaagggccgatggtccagcttgggggcaaccttgggcgtatggtggtggacgtgttccgcatgcgtagcccggaagcgcgccatacgcttctggcgaccggcgccgcggcggggctctccgccgcctttaacgcgccgctcgccgggattctgtttattattgaagagatgcgcccgcagtttcgctacaacctgatctccattaaagccgtatttaccggcgtgattatggccaccatcgttttccgtatcttcaacggcgataaagcggttatcgaggttggtaagctcagcaatgcgccggtcaacaccctgtggttgtatttgatcctcgggatgatttttggctgcattggcccactgtttaatacgctggtgctgcgtacccaggacatgttccagcggatccacggcggcaatatcaaaaagtgggtgctgattggcggcctgatcggcggcagctgcggcgtactggggctgattcagccaacggcgtccggcggcgggtttaacctgatccctatcgccgcggcgggcaatttttccgttggcctgctactgtttatttttatcgcgcgggtgatcaccacgctgctctgcttctcttccggcgcgcccggcggtatctttgcgccgatgctggcgctggggacgctgctggggacggcatttggtatggcggcgaccccgctgtttccggcgtatcatctggatgcaggaacctttgccatcgccggtatgggcgcgctgctcgccgcctcggttcgcgcgccgttgaccggcatcgttctggtgctggagatgaccgataactatcagctcattttgccaatgattattacctgtctcggcgcaacactattggcacaattcctcggcggtaagcctttatactcgacaatcctgcagcgcaccctggcaaaacaaaaggcggagcaggaagccagggcgcagccggtcggcggggagaatacttga

SEQ ID NO: 257788 - DNA, 180 bp, Klebsiella pneumoniae
atgtttatgttgttaaaaaacataataatttcccttttgttacctgatgagcatgtaaaatgctggttaagaatgtcacggtttagtgctatcctgtatcgcctggacaatcagttccgtgtcccgaactattctgtcgatgaagccggtaacaatgtgatttgtatggtgaatttttaa

SEQ ID NO: 257789 - DNA, 525 bp, Klebsiella pneumoniae
gtgcttgttcgcccgcaagagtcgtacccgcagtccgagcccccggcggcggtaggaagaatggtgcagatcccctacgtgaccgtaccgctgtacgccgcgctgctgattgcgctcggatggttcggcggcgagcagtggcggaacaagcccgagccgcagccgatgaggcagtcggtagcccatgcggcgttagtcccgctgaatcaaccggcggtcaaagctgccgtggcgccggttaacgccgggcccgaaattcaggctgaaccggaaatagcgatagatgaagataacctgccgcctctgcgctacagcgcgcacgtctacgcttcactggcggataaacgcagcattgtattaaacggacagtcctggaaggagggcgactcgccgctggcgaacctggttatcgagcagattcagcaggacctcaccgtatttagcttcaacggtaaaacgtttaccctcgcggcgctggatgactggccgggcggggcgattgaggagagtccgcaggcagaataa

SEQ ID NO: 257790 - DNA, 840 bp, Klebsiella pneumoniae
atgcataattccgtgatgagattaacaataccaaataaaaaaataattaattacgcgcctcatattgtgacctccatcatattattttttatctgccagcagctcgcgcaattaacctggaaaataattctcccggtaaactttacggataacgcattgagctctgccgatatgacgtcgcccgcagccccctccgcggaaacggtgctgccgcgctttacgctgtttggccttacggagaaaacctccgcctccgcgcccggcggcaacctcgaccaggcgcccgtttcggcgctcaaactgcgcgttaccggcctgctcgccagcaccgacccgtcccgcgccatcgctatcatgatgaaagggaatcaacaggttagcctcggtattggcgataatacgccgggcggagaggcgaaaatcgtcgccatttcccccgaccgcctgattgttaattaccgcggcagaaatgaggctatcccgctgtttaacgacccgcccgccgtcggcaaaaatagcgccgcgccgccagcccgccacctggcgcaggagctccgggcgcagccgcaaaatattcttcattacctcaatatttcgccggtcatggttaacgacaaactcagcggatatcgcctgaacccgggcaaagacccggcgctatttcgccagtcgggtctccgggaaaacgatctggcgatagccctcaacggtctggatttacgcgataaagagcaggcccgccaggtattagcccagctgccggaattaactgaaataacccttaccgttgaacgcgacggccagaaaaacgatatttatctagccctgagggatgaataa

SEQ ID NO: 257791 - DNA, 204 bp, Klebsiella pneumoniae
atggcgctgtttcgttaccaggccctcgacgaacagggcaaaccccggcgcggcgtccagcaggcggactccgcccgccacgcgcgccagctgctgcgggaaaagggctggctggcgctggacatcgacccggcagccggcggcggcaggccatcgcgctttatgcgccgcaccagcgcccgcgatctcgccccagcagagtga

SEQ ID NO: 257792 - DNA, 900 bp, Klebsiella pneumoniae
gtgcgcggcaaagtgctggaaggccattcgctggcggaagcgatgcgcggctacccgggctgctttgacgcgctctactgcgcgatggtcgccgccggagaagcttcaggccacctcgacggcgtgctgaaccggctggcggactacaccgagcagcgccagcagctgcgcgcccgcctgctgcaggcgatgatttaccccatcgtgctgaccctggtggcggtcagcgtgatcgtcattctgctgtcgacggtggtgccgaaggtcgtcgagcagtttatccaccttaagcaggcgctgccgttttccacccgcctgctgatggcgatgagcgatatgctgcgcgccgccgggccgtggctgctgctggcgattttgctcctcattctcctgctgcgctacctgctgcggcagccggcaaagcggctggcctggcacaggctgctgctgcgcctgccgttaattggccgggtcgcgcgcagcgttaacagcgcccgctacgcccgcaccctgagcatcctcaacgccagcgccgttccgttgctgttggcgatgcgcatcagcgcggatgtgttgagcaacgcctgggcgaagcgccagctggaagccgccagcgacgcggtgcgcgaaggcgtcagcctgcatcgcgcgctcgaaatgacccagcttttcccgccgatgatgcgctacatggtcgccagcggcgaacggagcggcgagctcaacagcatgctggagcgcgcggcggacaaccaggaccgggatctcagcgcacaaattcagctggccctcagcctgtttgaacccctgctggtggtggcgatggccggcatggtgctgtttatcgtcctcgccatcctgcagccgatactgcagctcaataccttgatgagtatgtga

SEQ ID NO: 257793 - DNA, 513 bp, Klebsiella pneumoniae
gtgcgacagcgcggctttacgttgctggagatgatgctcattttgctgctgatgggggtcagcgcgggcatggtgctgctggctttccccgcctcgcgcgacgatagcgcggcgcagacgctggcgcgctttgaagcgcagctgcgctttgtccagcagcgcgggctgcaaaccggccagttctttggcgtctcggtgcacccagaccgctggcagtttctggttctggaggcccgcgatggcgccgatccggcccccgccgacgacggctggagcggctatcgctggctgccgctgcgcgccggacgcgtcgccacttcgggcagcatcgccgggggcaagctgaacctcgcttttgcgcagggcgaagcctggacgccgggcgacaatcccgatgtgctgatctttcccggcggcgagatgacgccgttccggctgaccctcggcgaggcgccgggtatcgcgtttaacgcccgcggcgaaagcctgcccgaaccgcaggaggcgcaatga

SEQ ID NO: 257794 - DNA, 597 bp, Klebsiella pneumoniae
atgatccggcgctcaagcggctttaccctcgtcgaaatgctgctggcgctggccattctcgccgcgctcagcgtcgccgcggtcacggtgctgcaaaacgtgatgcgcgccgatacgctcacccgcgataagagcgggcgcatgcaggcgttacagcaaacgttcagccagatggcggcggactttagccaaatcattccccgccgcagccgcgacagcgcaagcctgttttttgccgggcgctttcagctcggcagcgatgacggggccatcgcctttagccgcaacggctggcccaatcctttggggctcctgccgcgttcggaaattcagaacgtcagctaccgcctgcgcggcagccagctggaacgtctgaactacgaccagcaggacccgctgcccggtagccagccaacggtgactattgtgctgcgcgacgtgcgggcgtttggcctgcgtttttacgccagcggccgctggcaggacgaatggcagcaggcgcagacgctgccgcaggggctggaagtcaccctgacgctggagccgtacggcgagatccgccggctgtttctgcttacgccgggagacagccgatga

SEQ ID NO: 257795 - DNA, 1197 bp, Klebsiella pneumoniae
atgaataaccaccatacctcttccgccgccgtgctgattattcgcctcaatcccgatgccgcgacggcgatatggcggctggccgcgccgggcgacacggcgcagactggcgagtggcatcctgatgctggcgatccgacgctcagcctgctggcgcagcgccatccggcctgggtactggtgcccgccagcgattgcgcatttcatcgcgtcgctctgcccgccggggcgcgcagaagaccgcagcaggcgctggggtttttactcgaagaacagctggcgacggaggttgaggagagccactttgccttgctccaccagcacaaaaccgactgcgccgtggcggtggtcgggcgggaaaagatgcgcgcctggcaggcctggtgcgagagcctcgggctgagcgtactggccctgacgccggatgtcctggcgctgccgcacagtcccaccggctggagcgccgtacgctgcggcgagcagtggctgtttcgctgtgatacgtggggcggaatggcggtggaaaccgtatggctcgaccagctgctgacccactggcaagacctcgcgcccatcgcctgctactcgccgccgccggatatcgccgcgccgtggcagcctctcccggcgcaggatctgctgcagctggcggcggccaatcctgatgcgcgcagaatctgcttacgccagggcgattttgccgcaaaacgccgccggcagccgacgccacgacgctggcgcccggtaatcgtcgcggcgctggcgctactgctgctgtggagcagtaattgcctccacgatcatctcatgctgggacagcaggccgacgccgccgtgcaggccagccgtgatttttaccgccagtggttccaaacggaaaagaacgtcgtcaacccgcgcctgcaaatgcagcagcatctgcggcagatgaaaaacgcgggcgcccggccggcgcttatctcgcggctcggcgcgctgcagcaaatcatcgacgacacgccgggcatccgcctgcggacgttgagctttgacgccgcgcgcaacgcgctgcagctggagatatccgccgtttcctcgcaggccctggagcagttcagccagcgggcgcgggcgaggtttcgcgtgcagaccggcgagatgaagccgcgcgccgacggtattgaagggcgcctgacgctggaggggaacgatgcataa

SEQ ID NO: 257796 - DNA, 486 bp, Klebsiella pneumoniae
atgcataacctgctcgccttatggcaacagcgtacgcgccgcgaacggtgtctgctgctgggtatggccgtggtactgctcatcggcctggtctattacacgttatggcagccgtggcaaaaccgcgaggcgcagtggcggcaaacgctggccagggagcaggccagcctgcagtggatgcgccagcagacgccccttatccgtcagcttcgcaatcagaagccgcccaccgcgccggaagaaccctcgacggtgattatgcgcgaagccgcccgtcacggtctcaccatcgttcgcctgcagccgcagggctcccgcctgagccttaccgtgcagcccgccgatttccaggcgttgatggcatggctggacgcgctggggcaggcggggatgaccaccgccaccctggcggtgaccgccgtagcgcagcagcccggctgggtgaccgtcaatacgctggtgctggagcgcagcgatgaaaaatag

SEQ ID NO: 257797 - DNA, 759 bp, Klebsiella pneumoniae
atgaaaaatagactcactatcggcctgctgctggcggcgatctatctcttctggctgctgctcagcgcgccggcgagactgctggccctgacgctatcggacgacgcgcggctcgcgcaaacgtcgggcactctgtggcaaggagaggctcatcaggccagctggcgcggcgttgaattagcctatttacgctgggagtttggcttctcgacctggcttcccggctggcatatccgttttaacgatccctccggcctgcgcggccaggcctggctgcacggcctgaacgagtttgtggtgcgcgagggacggctcgtgattccggcccgtttaatcagccagcggctggcgctgggtatgccgctggaagcccgcggccagctggcgctgacgctgccggaggccagctttaacgccaacggctgccggcggatagccgcgagcgccgtgcagtggcaagatgcggcgctcagctcccccgccgggttgctcgaactggcccaggtcaacggcaaattaagctgtaccccggcgggtgcgctggctgtcgccctgacccaggactcccatcagcttagcctcgctggacagggcgttctgacgcccgacgggcgctatacgtttaacggtacgctgcaacctcgtcaggcggccccggcgctgctgacgctgctggtcgcgcaaaacggccgtaaagatgagcagggacgcataccgtggcggtggcaaggagagtggctatccgaggagaaaaaataa

SEQ ID NO: 257798 - DNA, 831 bp, Klebsiella pneumoniae
atggtcgaaaacatcgcgttattacccgagttcgccgcgcaatacccgtttctctggggcagctttttattcctgtccggactggcgttcggcagcttttttaacgtcgttatccaccgtctgccgctgatgatggagcaggcagagggaatcaatctctgttttcccgcgtcgttctgtccgcagtgccgtgagcccatcgcctggtgggacaatattccgctgctgggcttcctgtttcttaaggggcgttcgcgctgctgcgggcagccgatctcgcctcgctatcctctgatggagctggcgaccggcgcgctgtttgtgctggcgggatacctgatggcgccgggcgtgccgctgctgggcgggttgattttattatcgctgctgctgatcctcgccgccatcgacgcgcaaacgcagctgctgccggacgggctgacgctaccgctgatgtgggccgggctgttgttcaatcttagcgcgacttacgtgccgctggcggaggcggtcgtgggcgcgatggccgggtatttatcgctgtggtcggtgtactgggtattccgtctgctgagcggtaaagaggcgctgggctacggcgatttcaagctgctggcggcgctcggcgcgtggctcggctggcaggcgctgccgcagacgctgctgctggcttccgccagcggcctggtctggacgctgctgcagcgcctgataacccggcagtcgctccagcagcctttggccttcggaccctggctggcgctggcgggcggcggcatctttttgtggagccaaatttacccccccatcttcccggtggcgctgcgctga

SEQ ID NO: 257799 - DNA, 258 bp, Klebsiella pneumoniae
atggaatggtggattaagaaactacacgagaactcgacgtctacacctacccacgcggttctgcaaagcggccagttaacgatcattgccgaactcacgccctgcggccgacgtttacaggaaggcgataagctcacgccgttggctaacgcgttgtactgcatcaacggcgataagtcgatcacgattaaagtgctcaacgctacacattttagcgctgaacgctggggcgccatcgtgaatatcaccgcgcattaa

SEQ ID NO: 257800 - DNA, 945 bp, Klebsiella pneumoniae
atgttaatccgtaagttttattctgcttatccgcctaaagggcggatttttatcgccgcgctggtctgcgcgttctacggcgttaacgctgacgccaaaccggatatgagaccgttagggccgaatatcgccgaccgcggctcagcgtattatcacttcaacgttgcttatttcgattcgcttgacggcgaacggcattataaggtctggaccgcgataccgaacgcggcgccgccagcagaagggtatcccattctctacgctctggatggcaacgcggtgatggaccgggtgtccgactcgctgcttgcgcagcttacgcaaaaaacgccgcccgttattgtggccgtgggctatcaaacgacattgccctttgatcagaacgccagagcctatgactaccggccgaccgtcaaggagaattctgccgatagcgggcgggactcgcgcaaaagcggcggtagcgaggcatttcgccagctattacagaatactatcgtggaaaacgttgagcgcgggatgaagattgacccgcggcgacgggcgatctgggggcactcctacggcggattatttattattgattcctggctggcgtcatcccgcttccggatctatttttctgccagtccttccctgggacgaggcaatgcctcgctgttagataagatggctgaggcaaaagccgatgcgtttagccagaagtccctgtacctgatggaaggggcggttgcgacgcagcgggtctcttccgcaggggcagaagagacccggggcaacgtcctgcagacggtttctctgcttaagaaaaagggcgtggcggtcaactggtggccttatcccgggctgtctcatggggagatgtttaacgcctcgttgcaaagcgcgctgcttaaggtagcagacggtacgcttcgtcggcgaccggctccagccattcgttag

SEQ ID NO: 257801 - DNA, 921 bp, Klebsiella pneumoniae
atggatcgtttcgatgcgatgcgcgcctttgctcgcgtggtagaggcaggtagcttcacaaaggctgcccaaacgcttcatatgagcaaaaccacggtgacgcaactcattcagcagctagaagcgcgcctgcgcgtcaaattgctccatcgcaccacccgcaggctcggtgtgactcccgatggcgcggtctactacgagcgcgtcattcgcctgttggcggacatggaggatgctgagaacagcctgtccagtgcggcgatgacgcccaggggacggctacgggtggatgtgcccagtccactggcccgcctcatcctggtgccggcgctaccggttttccacgcacgttaccctgatatccagttcgacatgggcgtgagtgaccgggtggtggatctgatcggcgacaacgtggattgcgtcctgcgcggtggcgaaatcaacgaccagtccctgatcgcacgccatgtcggcgatttgcaaatcggcgtctacgtcgcccccagttacgtgaaacgccttggcgcccctgcgcacccgcgagagctggaaaacaccgaccatcacatagtgggattcttatcctcacgcaccagcaagattgatcctctggtattgcgcagtgagagtgaacatattgaaatcacgggcagttatgtacttgccgtggatgatggcaatgcttacctcgaagctggcttagccgggttaggcgtgattgcgctgccggtctatatggcggcagcgcatcaggctgctggctctttgattccgttatttacacaatggcgtatcagtccaatgcctctgcatctggcgttcccgccgaaccgccatgtcaacgccaaactgcgcgtttttattgattggatcgttgaattgatgcagcagcatgtccccaattccaactataagtaa

SEQ ID NO: 257802 - DNA, 390 bp, Klebsiella pneumoniae
atgacggcacgcgaagcagtttttccgtttggtcggcaggcgctctatgagcgcaatcgctattcaccggccatcaaatctaacggtttcttgttcgtttcggggcaggttggtagccgcgaggatggttcgcctgagcccgatctaaaagcgcaggtcaggctggcattcaataatcttaatgctgtcctcgcggctgcgggctgcacgtttggtgacgtggttgacgttaccctctttgtcgtcgatcccgagacaaacctcgacgctatctggagtatcctgccagaatattggggggaagcgccttaccctacgttgaccgggatcggcgtgacgtggctgtatggattcaagtttgagattaaggtgattgccaggctgccctaa

SEQ ID NO: 257803 - DNA, 366 bp, Klebsiella pneumoniae
atgccccttaacgcctcaaaaacagaaagtgagtaccattacaaaactcttctaagacagtcttaccgccactcgctcatactggtcaaacgcgcctcatggtttcataacgatgcggccaagcgatttcgctgtctcagcgaatttatgggccgcggcagcgttagcctgggggaagatgcggtcaatgacaaccctgatgcgccctgcagatacagcctgcaacatgtcgtccacacgtgtccgaactccgtgcctttcaaaaaggggtcctatgaatacccccatgagtgtctggttagactgcattggcgaccacagatcgacagtcagactgcccgcggccgcgtagccgacgacccatga

SEQ ID NO: 257804 - DNA, 1458 bp, Klebsiella pneumoniae
atgaacactgaggacgaacggatgtctccttgcactaaaaaagttattgccatgctttaccttgcagcaattttcttagtttatagcccaaccattatatttagttacgcattttcagacgattggtcgacactatccgatgttttttcagggaaaggttctccgtttcaatgggatatgcaatccggcagacccttgtatgccgttgccaggcgacttggctttacgctagttcacaatatcaatgaccttgcctatcttagattttttaccataataacggtatttgcgctttgctttttcctctttttatttatagaaaaaagaaacatattcgagcgtaacatcacaacaattaccctccctttattaataggcctgacgccggcaatacaggtatatagtgcatgggcgacatgtttcccgtttgtactctctatactccttgccggaacaagttacgctacattaaaacccgtaaacaagaacacgacaattataagatttgcagcatccatcattattctatggtttgcatttgctatatatcaaccaacggcgatggcatttttatttttcgtcatgcttgataactgcctgaaaaaagacaagccattttccatgaatattgttttaatcagtggcgctgttttatttatcggcatgcttggcagtctgctgttttcaaaatttgtacctgtatggttatatggcagttcaattgcacgtgccgagttaactaataatccacttgagaaattacaatggtttataaaagaaccattgattaacgccatcaacaactttaatataaccccaggccccttattcacaactctctcattaataatttgcgcaataggtttactttcaataataaaaggcaaatcagggcctatgaaagttctcatgttcattatcatggggattggtgcctactctccaaacttactagtcaaggaaaactgggctgcatataggtcgctgatagcactggaatttttcatatgcgctcttataattattggtgtagatgccttgacaagcaaactcaatatagcaaaaaaagcgctacccatattgacggtattcgcgatgatcgctgcatcatacaatatctttaatggtttcattatcccacaaaaatcggagttaaacgcattagcaagcgcgctttcctacaaggtgggaaaaacatttacgggggatgttctttttgacattcaagatcccgcctataatgcctttactaaaacacaacgttatgacgagtttggcaatatttcccttgcggccccctgggctatcaaggggatggcggagcaaatcttaatgagcaagtcaatgcatttcaggcttccagaaaatgttattctgacggcaaaggagcaatgcaccactgattgcatcattataaaaacgggcgatgccatgaggagttcaaccactcactattga

SEQ ID NO: 257805 - DNA, 993 bp, Klebsiella pneumoniae
atgaaagaaattaatataaacaacgcgaggagtcaaataccttcgttagcaatcgttgttccttgttataatgaaaaagacgccttcccatactgtctggaggggcttaccactgtattaaaaaacctcctggcaaaagaaaaaatcgctcgaaatagttatatcctctttgtcgatgatggcagtaaagacaacacctgggaacaaatcaaatccacatcacaggaaaagtcattcatccgcggcctgaaattatcaaggaaccggggccatcagatagccctgctggcggggttagcaaacgcggatacggacgttaccgtaagtatcgatgcagacttacaggatgatataggttgcattgagaaaatgatagacaaatataatgaagggtttgagattgtttatggcgtacgcgacaacaggagtagtgactcagtattcaaaagggcaacagccaataaattctattctctgatgtcagggctcggtgtcaatcaggttcctaaccatgcggactttaggcttcttagccgtaccgcactgacagcattaaaggattttaaagaacaaaatttatatttaagagggctaattccgctgttgggttataagtctagcagtgtttattatagcagagatgaaagggttgcaggcgaatcaaaataccccttgaaaaagatggtagcactggcgttagaaggaataacatctctgacaattaccccgttacgtatgatcgccgccgctggggttatcacatgccttctatcttcactagctgcaatctatgccttcattgagaagattttgggaaataccgttgcgggttggacatctgtaatgattgcgattttcttccttggcggtgtccagatgctttctttggggataattggcgaatacgttgggaaaatatatatggaatccaaaaatcggccaaaatattttatcgaagaggtagcaaagcacgaaatgagaggcgagcaatga

SEQ ID NO: 257806 - DNA, 381 bp, Klebsiella pneumoniae
atgaaaaataatattattcctaagctattgatgtcccttggggcactggtttatctgctggggatctggcgcacctgtccgttatttagcggcaagggctatttcctcggcgttctggtgatgggcatgttcgcgattttagcgcatcaacgcacgatgcgggagaaggcgccagacgatggttttgcttcgctatgtcgccttgtgctcctgctgtcggtcggtttactgatggtcggcgcctggttcgtacccgccggatgggatgagaagatcatctacgtggcggcctggtttgtgtgcttatacggcgtttccgcgatgcctcataaggcgctggccgcacagatggcgcagaaagattcctcagaacggccttaa

SEQ ID NO: 257807 - DNA, 993 bp, Klebsiella pneumoniae
atgaagataaagaacctttgcctaacgctctgcgcttcactcctcctcaccagcctgtcgggcattgctaaagaagttaaaattggcatggcgattgacgacctgcgtcttgaacgctggcaaaaagatcgcgatatttttgtcaacaaagctgaatcattaggtgcaaaagtattcgtccagtcagccaatggcaacgaagaaacgcaaatgtcgcaaatcgaaaatatgatcaaccgcggcgtcgacgttctggtgattattccctataacggccaggtgctgagcaatgtcataaaagaggccaaacaggagggaattaaagttctcgcctacgatcgtcttatcaataacgccgacattgatttttatatttcatttaataatgaaaaagtgggtgaaatgcaggcgcaaagtctggtcgataaagtgcctcagggtaactatttcttgatgggcggctcgccggtagacaataacgccaagcttttccgcgccggacaaatgaaagtcctcaagccttatgttgatgaagggaaaattaaaatcgtcggcgatcaatgggtcgacggatggttaccggaaaatgcgttgaaaattatggaaaatgccctgaccgccaacaacaacaaaattgatgcggtcgtcgcctccaacgacgccaccgccggcggcgccatccaggcattaagcgcccagggactcgcaggcaaagtcgctatatcaggacaggatgccgacctcgccggcgtgaagcgcattatcgccggcacccaaacgatgaccgtctataaacctatcaccacccttgccaccaccgcggctgaaatcgccgtcgaactgggcaacaacaagcagccgcaggccgactccacgctcaacaacgggctgaaagatgtcccgtcacggctgctgacccccattgaggtcaataaagacaacattgaccagacggtgatcaaggacggtttccacaaaaaaagcgagctgtaa

SEQ ID NO: 257808 - DNA, 465 bp, Klebsiella pneumoniae
atgatttttggtcatattgctcaacctaatccgtgtcgtctgcccgcggccattgagcgggcgcttgagttcctgcgcacgacggatttccacgcgctggcacccggcgtcgtggaaatcgacggccaaaacatcttcgcgcaggttatcgacttaaccactcgcgatgccgctgaaaatcgtccggaggtccaccgtcgctatctggatatccagtttctggcatcgggcgaagaaaaaatcggtatcgccattgataccggcaataatcaaatcagcgaatctttgttagaacagcgcgatattattttctatcacgacagcgaacatgaatcgttctttgaaatgacgccaggcaactatgcgatatttttcccacaagatgttcatcgtcctggatgtaataaaactgtagccacgccgatccgcaaaatagtcgttaaggtcgctatttcagttttataa

SEQ ID NO: 257809 - DNA, 804 bp, Klebsiella pneumoniae
atgcttgaattatccatgtcacttccgattaaggtgcagaacggcgggttgtttatttcccgcggcgtcggcagccatccggctcgtcagcttcactcctgggaaataatctttgtggaaaaagggatattaacgattcgcgaaaacaacaaagtttttagcgtgaatgccggggaaagtttgctgctctggccgcagcgattacatgtggggatcggactgtttccgtcagatttaaaattctactggctgcattttgaagtgacgtcgggtgagggtgatgcgctgctttctattccacaacatatgcgcgttaatgacccgcagtatattatttcactgttccgtcaattcttacgcgagcaggaaaatattcatcgtagcgtggcgctggagctgatcctgctgctgattttgcagcaaatttcggcggcagcaggcgaacagcccgccgacagtcccggcaacgcgctggcgtggagagcgcagcaaatcattcgtacccggtttcatttgcccctttccgcatccacgctggcgcaggagctgcactgcaacgcggattatctggggcgcgtttatcgccatgctttccgactgacgttaaccgaagcgctgcaccgtcagcgggtaagggcggcggaaaagctgcttatcagcgattccctgtcgcttaccgaggtggcgatgaaatgcgggtttaacgatgtcggctattttcgcaagattttccgcaagcacaccagcctgacgccggcggcgtggaagcgtcgttactgcaaggaacatattaattcggcgtag

SEQ ID NO: 257810 - DNA, 1401 bp, Klebsiella pneumoniae
atgacttcggctccgattactacaagcgatttagcacggcgcgtccaggacgacaaactatccctacgggaaaaaataggctacggacttggcgacgcgggcgggacggtgattacctgcctgatcatgaactttttgacttttttctataccgatgtcttcggcctgacgcccgcgctggtcggaaccctgtttctggccctgcgcgtttttgacgccgtttccgatcctatcatgggcgtgctggccgaccgtacccaaagccgctgggggcgctttcgtccctggcagctgtggattgccgtgccgatcggcgttatcggcgttctgacgtttaccgtgcccgatgccagcatgggggtaaaaatcgcctgggcgttcggcacctatctgctgctctcggtgagctacaccgcgattaacgtcccctactgcgcgctgatcaacaccatgaccacgcgccataccgaggttatctcatgtcaggcatggcgttttgtgctgtgcggcgtggcgagtttcttagtctccgttgggctgccgtggctggtgaaagcgctcggcaagggcgataccgcgcagggctatcagtacggcgtcgccgtactctgcgccatcgcggtggcgatgttcctgtgctgctttttctgggttcgcgaacgcgtctcgctggatgtgatgggaaaatttaccctgcgcgagcacatcgccggcctgcgcaataatgaccagctgctgctgatgctggtgatgtcgttcctgctgatcaacgtttttaatatccgcggcggcggctatatgtacttcatcacctacgtgctgggcggctccaccggctacacctcgctattcttcaccatggtgaccttcgcctcgattgcgggctccgcgatcatcaatatgctgtcgcgccgcttcgataccgtcaaactctactattacaccaacctggcgctggctgcgctggccgtcgcgatgtgctttttaccaaccggggcggcataccagaccctgtggctgatcgtcatcctcggcaacggcattattctcggcttcaccctgccgctgcacttttcgctgatggccttctccgacgactacggcgaatggaaaaccggggtgcgctcttccggtatgaacttcgcctttaacctgttctttatcaagctggcatgggcctccagcgccggcattatcagcgtcgtgtttatctacgtggcttaccagccgggcgtggaaaaccaaacggcctcatccctggcgggcatctcctcaatggagaccctgctgcccgccctgttccatctgctgctggccttcactattcgcgcctgcaagcttaacaatccgatgatggcgcgcattgccagcgacctgcgcacgcgtcacgttcagccttaa

SEQ ID NO: 257811 - DNA, 1962 bp, Klebsiella pneumoniae
atgcccgttatggaagtcgatctgcacaaactgaaaatcaacgatccgttcctcggccagtaccagcagctggtgcgcgatgtggtgatcccctaccagtgggatgcgcttaacgaccgcatcgaagaggcggatcctagccatgcaatagagaacttccgcatcgccgccgggcgacaggagggcgaattctacggcatggtctttcaggacagcgacgtggcgaaatggctggaggcggtggcctggtcgctgtgccagaagccggacgccgagctggaaaaaaccgccgacgaggtaattgaactggtcgcggccgcccagtgtgaagatggctatctgaatacatatttcacggtcaaagcgcccgaggagcgctggactaacctcgccgaatgccacgaactgtactgcgccggccatatgattgaagcgggcgtcgccttcttccaggccaccggcaagcgtcgtctgctggaagtcgtctgccgcctcgctgaccacatcgatagcgtgtttggccccggagagaaccagctgcacggctaccctggccatccggaaatcgagctggcgttaatgcgcctgtacgacgtcactcaggagccgcgctatatcgcgctggtgaagtacttcgttgaggcgcgcggcacgcagccgcatttttacgatatcgaatatgagaagcgcggcaaaacctcttactggaacacctacggtccggcgtggatggtgatggataagccctacagccaggcgcatcagccgatttccgaacagccggtcgccatcggccacgcggtgcgtttcgtctatctgatggccggcgttgcccacctcgcccgtttaagtcaggacgagggtaagcgccaggattgcctgcgcctgtggaaaaatatggcccagcgtcagctgtatatcaccggcggcatcggctcgcagagcagcggggaggccttcagcagcgactatgacctaccaaacgacacggtctatgccgaaagctgtgcttccattggcctgatgatgtttgcccgccggatgctggagatggaagccgacagccaatatgccgacgtgatggagcgcgcgctgtataacaccgtgctgggcggcatggcgctcgacggcaagcacttcttctacgtcaatccgctggaagtgcatccaaaatccttaaaattcaaccatatttacgatcacgttaagcccgtccgccagcgctggttcggctgcgcgtgctgcccgccgaatattgcccgcgtgctgacctcgctgggacactatatctacacgccgcacgacgatgccctgtacatcaacctgtatatcggcaatagcgcggagatcccggtgggcaatgaggcgctgcgcctgcgcatcagcggcaactatccgtggcaggaacaggtgcagatagtcatcgattcatcgtcacctgtgcatcataccctggccctgcgcctgccggactggtgcgataagccgcaggtgacgctcaacggcgcgccggttacgcaggacgtacgcaaagggtatctgtacatcagccatctctggcaggagggcgacacgctgctgttaaccctgccgatgccggtgcgccgcatttatggtaacccgctggtgcgccaccaggcaggccaggtcgccgtccagcgcggcccgctggtttactgcctggaacaggcggataacggcgagcaattgcataacctgcagctgccgcgcgacgcccgatttagcactgtagaaggcaaagggatttttgcccgcaagatacttctccaggcgccgggctataagcaaacggcggaagatgccgagcagcaggcgctgtggcgttacgatcgcgcgccgtccagccgtcagccgcacctgctgaccttcatcccgtggtttagctgggccaaccgcggcgaaggcgagatgcgtatctgggtgaacgaagcggaagcgtaa

SEQ ID NO: 257812 - DNA, 687 bp, Klebsiella pneumoniae
atgcagcttaaaccactcaccaaaggtcgttttcatagcatttggcaacaggatgatgcatttatcgagagaacgtttcgcgagctactctcagataagcagcttattgccgaaaatgagcatctttatcatcagggccaggttgttgaccgcttaatcatggtcgaatcgggcagaatatctctgtgttacagcgcggaaaacggccgtcgcttccagctgggtgcaatggaatgcgatgagcaactctttggtgaaatggagtttttcacaggctatcgctgtcagctggatatcgtagcggaggaaccacttaccgttgcggtatgcagctgcgagcggctcgaagaagcattgaatcaacatcctaaactggcgatattttttgccagcgccatggcggtagactaccaggatatgctggaaatcttcttgcatcgcatgctctaccccatcgttcataatgttgcctatgacctctaccggcagcacctgaacaaacagccaatggatggattcagtaagaattatcaggaagcggaaagattcggcaccaccgaccgcgtttatcgccgcgcggttaaagcgctgattgatgccggactggtagtacgaactaaacaaggcattgcaattcaggatcttgatgggttgcgaaagtttctcggcaacgatattgctgaatga

SEQ ID NO: 257813 - DNA, 936 bp, Klebsiella pneumoniae
atgtttaatgccaaaaaaacattattagcaatgataattagcgttggctgtcctcaggcaatagcagctgactatcgtgacggcaatatcagaaagaatgactttagctggatgcaaatgaatcttatgcagagcgtggatgctaaagtcccatacggaattcgcaacaatacttatcttgaacttgagtttggcgcgcgctcgggtattgtcgatctttacggctatgttgatatttttgacatctttgacagtaaacacgacgatcgccatggtggagataacttttttgctaagatatcgccgcgtttttcactggatgccattttcaacaaagatttatccgtcggcccattcaacgagttttatatcgcaacggtcaataacattggcgatcgcgaattatttgagcactatatagggcttggtacggatgtgaaagtcccgtggttcggcatggtagggatgaacgtctatgctcactatgtacgggaaaactatggcgccgaaaacgaaggtaagtgggacggatatatgttctccacgaactggtcaacccccttttaccagtttgccaatggtagccatttaaattaccaggggtatttcgattatcagtttgcggcgaataaaaatagcgatcggtcgctttacagtaacaatgcgattgaatggtataacggtatctactggcatacggaaaattatgccgtaggttacggcttgaaatatttccgcaatatggcgttgatgcaaaaccacggcggcgcaggccgtacaaccgggcttgggcactactttagtcgtaagcgtacagcgagaaccgtattgacggggatgtgttattcagttggcagtgtgatgcgccagggtagcagctcgctgacccggttgaccggccagtcagctatgacgtcaaggacatggcgaaggtag

SEQ ID NO: 257814 - DNA, 1164 bp, Klebsiella pneumoniae
atgaaaaataaactctcacttaccctaattagctttctggcgaactttattatggcggggtttgccagccagtttggcatgctgattgagcccattgcagagcattataatgcggatatcaacgcggttgcatctattttctctttactcaacggaggagccctggcagggacgatagcggcatttttccttattgaaaaaatcggcgtaaaacgcatgacgctgatgatctactccgaggttttcctttgcgcgctggcgatgcatgtaagcagtgaactgtggtctgttatggtggcgatgaccctggtggggctttgcggcggcattggcctgtgcgtagcgggtaccatcgtggtttccgtttggcaggaccgtatccagagcacgatgctggtggtccaggatgccaccttcaacgttgcgggcgtgatcttcccgctgatcaccacctttgccctgacgcacaacatgtcatggagctacagttacctgagcgtcggtatggtggcgcttgtcacgctggggattgtggctctgacccgcttcaatgcctgtgaagcggcgccctcttcgggaccctcagacgcggtaaaatctgaatggaaccctggaattatcagcggcgggattggcctgtttcttggcatgctggcgctttataccttcctgacttgggcgccgctgtttgtgaaaaacaaatttggcattccctttgaagaggctggaaacatcattactcaatattggggagctgcgctggtgggggcattagtttcaaccggtattgtcgcccgggtgaagatacactattttttgttgagcattattttactggcctgcgtcattacgacgattatcgtcactaaagaaacgctttctggcttagattacctggcttacagctatggctttgtatgtgcagcgctttacaactcgtttattgcctatggcgtatcctttgttaaacgcgccagcagtcaaaatgtatcttatatattaattagcggaagcgcgggcgccatgtttagcccggcgatcagcgcgttaatggaaaaaacgatgggcctgcaaaaaatcatgtatgcgatacctgttttatatttcattatttttgtcatgctggtggctacccttaaattaaaaagtaaagcagcacaataa

SEQ ID NO: 257815 - DNA, 708 bp, Klebsiella pneumoniae
atgactgcacatattaatgccaaatccggcgattttgcttcaactattattatgcctggcgatcccttgcgcgctaaatttatcgctgaaaattatctgctggactatcgggaagtgacgaacgttcgcaatatgctgggatacacaggttattatttcgggcagcctgtatcggtgatgggacatggaatgggaataccatcaatgacgctttatgctcatgaactggttaatgactttggcgttaagagaatcattcgcgtaggcagtctgggggcgactcagcagcatgttaaaatgcgcgatattatattggctgttgccgccgggacagattctatcaccaacttgaaacgcagttcaggttattcaatggcgacatccgctgattttaaactgttgcatcaggcatggttgattgcgcaaaaaagtggcattgatataaaagttggcaacgtctttagcggcgatctctattacgacccggatgaaaatctgatccctgcactggagaagtttggagtgctggggattgatatggaagttgccggtctttatggcttagctcatcagtttgcaattgaagctcttgccattttaacggtctccgatcattgcctcaccggagaagagaccacggcagaagagcgacagttaactttcaataatatgatcgagctggctctgaatacggcgattacagcttag

SEQ ID NO: 257816 - DNA, 216 bp, Klebsiella pneumoniae
atggagtggtatagtggcgcccctgatcttttggactgccgttacgcacagcgttgtcgtttcgccgtttatgcctcatgcgacgcatgtgatggcgtcgttccgcacgggttcttgccatggttcttcatcatattgagcgcggtcatcaaccgcgtggatatgaagaaagtcattttggcgttcaatggggcctcgctcaggatgcctcgttaa

SEQ ID NO: 257817 - DNA, 684 bp, Klebsiella pneumoniae
atggcccgcaatcatgttctcttcacttcactttcgcgccgtaaacgtaggagcgcgactctcaaaatcaaaaatcttatctacaaagagcgtgctgtctggggcggcgtcttctatgacgaatgcgaacatgatgcggcagttgccagcgggggctggacctggagcgatatagtttttctcggtcgtgacccagtcgttttctggaatgcggagatcatcacggcgaatgtggcttttagcgatgagatagaagaggttgctttcaatgaggcgctattgcggcttgacgctgccagccagcgtcaggcaatgcatctcgatttcataccagatattaatcgcgatggaaaaacgattagctatacatggggacgaaagcctcaacggaatgactcgcagcttgagggattatccataagtgattttgccgataaacgggcgcgagaaattgcgcgtactaatccaccgccagtttattgcggttaccgcatattgcctggctacgcagcaggaatcggcttgaaaatggtggttgacgctgaagtgctcagtcggagtgtaattgaaagcgctattgctgattttctcgctcgcggagaacaaaactggttttctgacgtgcctgcccttgtccactacattgacaatatctactgcaaaccgcttaacgaggcatcctga

SEQ ID NO: 257818 - DNA, 267 bp, Klebsiella pneumoniae
atggaaaaagagacagatcgacaaatcataaatttaattgttcatccaggtaaatgggtatctgaaaagcaactgattgctctgaaagggctcacttctgggatgctaaaaaacgcaagaaaactgagctttatggaggggcgagaatacaagcatgtctccgctggcggagagccttttgataacagccagtgcttttacaatattgacgcaattgacctatggatcgaacgccaatctaaggctcggcccagtagacgcaaatga

SEQ ID NO: 257819 - DNA, 351 bp, Klebsiella pneumoniae
atgctgaagatttgttgtgcgtttttttcgttgcttgttctgcttgcatcgaccagcgctttctcggctgcgcggtgtggtcagttcttttttactattgatgattcggggaagggcattgttaatggtgaaaaagtgacttcgcaaaaagttactttcctgaaaacccaaggggattggaacaacatcaaacttgatatgactctgatgcccgccagagacggcaatatgtacggctatgagttcattaagcagaacggtaaagcctttctaaacgtcgaactgatccgccgggttatggaagagccccgaattatcggaagcttcgactgtaaacgcgtaccggactaa

SEQ ID NO: 257820 - DNA, 180 bp, Klebsiella pneumoniae
atgtccagacaaaacgtaaaaccggtattactcagccatgagcagataaaggcgctgggtgaaatccgcgaacagcaccgtaaggcgtccagcgtgggcgtcgcaccaactatccacgagattgcccgcgggctgattgataaagcgctggaatctctgtctgacggggcgaaagcatga

SEQ ID NO: 257821 - DNA, 573 bp, Klebsiella pneumoniae
atgaataaacaatttaatccggaagcagcccccgggggcgtcattaccggatccgggctggtgggctttctttccgtagcggaaagcctcagccgcggtgattacgaccataaccagctcgagggaatgggtcttgcctgcgcagcgctggacggtgtggcccttacgtggttcgcggcagcaccggtacaacatgcctctttatggcaatgggtcgttgttgcggcatttgttgcagaacagcttaaaaataacggggatgtcgacgttattggcgaagatggcgccaaggttaaggctgctgtgtatgtcgggcaatatggcgctatgaccgtttatccggcagcggagcgttttgctctcgccagtcacgtcgaaggctacgcattgcagaaatacggcaccatagccggtatggatctggcaatccagtattaccagacgatggtcgaatggcgcgatggcacatactggctgtctgctcatggccgcgatgtgctgactgacctgcatgacaatctgctggccacgattcatcactgcggcgttcctgcgatgccgacggagcactaa

SEQ ID NO: 257822 - DNA, 222 bp, Klebsiella pneumoniae
atggtgaaaaacaattctggctcagctgccagcggttccgctcatcctgaaatcctccccggcgataaatgggcggataacggcggagtgcgggtaattatcgaaagctgccagttcaacagggttaaattttaccgcgatggttatcagtcgccgtgtatttaccccgagcagcgatttattaaagagttttcgccggtaaaaggaacgggccatgaataa

SEQ ID NO: 257823 - DNA, 195 bp, Klebsiella pneumoniae
atgaaaagagatattttcgaagtcattaccgatgccgagcatgcaatggggtatacccggcaggcgctggcggttcttgacctgtggatggatggcctgaacatagaagatgatgccgaagcgaaccgtgtcgcagctgttcatagccttgtatatgagtccctgacctggcttaaaaaaaacagccggcattaa

SEQ ID NO: 257824 - DNA, 264 bp, Klebsiella pneumoniae
atgaatattaacgctatataccgtcaccctgccgagcttgaggtcgaggcgatgctttcccgcatgcagccttatccggatgatttcacgctggcggagcgtacagcagaacgcatggcccgtgcccgtaacggactggctcacgttatgactgagctggcgccacgcctggacgatgaacaagccgctactgtgtattgctggctgaataaagttctttcgattgtcgatatagcccgaattgatgcggaggctgatgtatga

SEQ ID NO: 257825 - DNA, 318 bp, Klebsiella pneumoniae
atgagcctgtataacgatttggtgcgccacgagttcggcaaaggcgccaccgctgatgagctggtaagtatgcagaaccgcgcagaagaggccgtgagtgatttggtgttgggtattaccgccattggcagcctgatgttctgggcaacggacaatgacaactacaccgaggaagccgcaaggggcgacatgcgcaaaataggcgcaatgctgggtacggttggtgatgtggtgctggcgctgaacgatacagcagcgaacgcgggtttttctctatcgaacggcgagaaggaatcaaaatcgagggcgggaaaatga

SEQ ID NO: 257826 - DNA, 720 bp, Klebsiella pneumoniae
atgaaaatgaataatatgcccgctcatgggcagggcctgactcagcccgaagcaagccagacggaaattcttcttcagcacaaacaggagtcgcgtattgattcgcgggtaattgccgaacgggctggaatacagcatgaaagccttatcgcaacgattaaagcacatcaggaaagacttcgtgagttggggtcattaccgcgccagtcgctgaaagagttttccgatttgaaatcgggaaaccctaaaaacaaaggcggcaggcccgaaattagttatctgcttaacgagacgcaacttgactacctgttaaggattgttcgtgggcgtgatccagatcgcatgaaccagttcaagcttgacgtaaccaaagcattcgcccggcgtcgcgcagctgaacctatccgccgcgaatacctgcccggataccatgaaagccgcgacagccttaaggcgcttggcgcgcagcgtcaccactacatcaatctggcccgcgctgaaaatcgcgttgccggactgtcagatggcgagcggggtaccgccgacgaacagcagttaggtctgctggtggttatgcagaaaattgaacaggcggcctttgatgaagcggtacgcaatggtatgagtccgggcgatgccgtgcgcgaggtggcccgccgcatggctgcgttcgccagcctgatcacttcatcgcctgtgctggaggtgcgtcatgattag

SEQ ID NO: 257827 - DNA, 180 bp, Klebsiella pneumoniae
atgagtaacgataaatttttggagccagattggccagaaacgagcactaacattcctcatgactggatgaagtatgttagcgaggaagttagatctatctggggtggctttacagttagtcaacgtattgccttaggtcgatgctttgaagaaattgccagccttgaggagtgggattga

SEQ ID NO: 257828 - DNA, 516 bp, Klebsiella pneumoniae
atggataagttacatttttctagtctgcttgaaatgagagaaatgaataagcgtttcgtatcacttgcttttcataccgaccaactcagtgcggtacttgtaattcacatggtatgcgagaaaatattagaaacctggattgaggcaagtagtaataacaaacatttttttaataactcacttagtttatctttcaccaacaagcttataattgcaaaaaacttcaacttcccactcgaatgctttcaatttatgaaaatcctcaactcaatacgaaacaaattctcccatcggattgaaaagttagaaatatccgaatcagaactagaagatctttatatttcactgtcagatttcattgctagagaacctgataaagacccaaagaaatcttcaatcaaaaccaatgaaaacacatatgaatacaattatagcaacaacgtcaagctgttattgctattttcaagcatgtatctttctgtattgtcattcgcaggaatgcgaacaccatcttaa

SEQ ID NO: 257829 - DNA, 1506 bp, Klebsiella pneumoniae
  misc_feature (1003)..(1012): n is a, c, g, or t
atggtaaactacgcccccttttttccttgtggtgcgctccccgtggctcaaaacgctgtctatcttcctgaagaattcctcgctcaaatgcgtgcggccatgccgacgcatctctcttttgacgactttatcgccgcctgccagcgcccgctgcggcggagcattcgcgtcaatacgctgaaaatcacggtggctgattttttgcagctggtagccccctatcgctggcagctcacgccggttccgtggtgcgaagagggtttctggatcgagcgtgaagacgaagacgacctgccgctgggcagcacggccgagcatcttagcgggctgttttatatccaggaagccagctccatgctgccggtcgccgcgctgtttgccgatggtgaaacgccgcagcgggtgatggatgtcgccgccgcgccgggctctaaaaccacgcaaatcgccgcgcgcatgggcaatgaaggcggcattctggccaatgagtattccgccagccgggttaaagtcctgcacgccaatatcagccgctgcggaattagcaacgtggcgctgacccatttcgatggtcgggtattcggcgccgcgctgccggaatgctttgacgcgatcctgctcgacgccccctgctccggcgaaggggtagtacgtaaagaccccgatgcgctgaaaaactggtcaccggaaagcaacgcggagatcgcgctaacccagcgtgaacttatcgacagcgcgtttcacgcccttcgccccggcgggacgctggtttactccacctgcaccctgaaccggcaagaaaacgaagaggtggtcaacgggctgctagcgcgctatccgcaggcggtgcaagttctgccgctcggctcgctgttcccccaggccagcgaagcgctgaccgacgagggtttcctgcacgtctttccgcagatttttgactgcgaaggattcttcgtcgcccgcttacgcaaaaccgccgccatcgagccgctcccggcgccgnnnnnnnnnnactgcagaccgacggcgccgggctataaagtcaggaaattccccttcacgccgcttaaaacccgcgaatccgccgccgttattgccgccgccgccgccgtcggtctgcagtggagcgccgagcatacgctctggcagcgtgataaagagatctggctcttcccgcaggcgctcgaagcgctgttcggtaaagtgcgcttttcccgcatcgggatccggctcgcagaaacccacaacaaaggctaccgctggcagcacgaagcggtgattgcgcttgccgcgccggccgcgccctttgcgctgactcaggccgaagcggaagagtggtaccgcggtcgcgacgtctatccggaaacgctcccggagaaggatgatgcgattgtcacctatcagggcgcgccgctcgggctggcgaaaaaagtcgggtcgcgtttaaaaaacagctatccccgcgaactggtgcgcgacggtaagctttttagcaaaaaagcgtga

SEQ ID NO: 257830 - DNA, 654 bp, Klebsiella pneumoniae
atgtatcagcgcattaacggttccgcctggcgtaatatctggctggtgggcgacctgcacggctgtttcgcacgtctgatggcggcccttcgcgagcgcaggtttgacccttatcaggacctgcttctctcggtgggcgatctgatcgatcgtgggccacaaagcgcgcaatgcctggatttactgcgctatcgctgggtttgcgcggtgcgtggaaaccatgagcagatggcgctggaggcgcttgcgggcggcgacatgcggctctgggagatgaacggaggcggctggtatacgcaatccccgcagaaccagaggcggtgccttgcggagcttatcgcctcctgccgcgacctaccgctgattatcgaactccacagcggtgggcaggtgcacgtgattgcccatgctgattaccccgccgcggtatatcgctggcagcgcgccgtcgatgagcatcaggtgttgtggcgtcggcagcggcttaccgaccatttcgccgggcgacacggcgcgattgccggcgccgatcatttctggttcggccatacgccgctccaacggcgctacgacagcgataaccagcattatatcgatacaggggccgtatttggtggagagctaaccctggtggcgctacagctggcgggctaa

SEQ ID NO: 257831 - DNA, 765 bp, Klebsiella pneumoniae
atgattcgctgtagatttgcgccgtttatattcgctttatctcttccctcatcggttctggccgcaagctccgtcctggtatggcctatctttcaaactatcgaaagccatgagaaaggttctgaactgtggctggagaatcgcggcagttcgccggttaatttgcagctgcgcgtttttgcctgggatcaaaaagcgtcagcggacgtctacgccgaccagcgcgatgttgtcgccagccccccttttaccacggtagcgccggggcagcgccagctggtgcggctcatgcgcgtcgcccccatcgccaacggcaaagagcagtcctaccgcattgttatcgatgagatcccagccgcgcagccggtagcccagacggaacagaactctgcagggctgaaaatgcgcatgcgctatgtcctgccgctgtttacctatgggcaaggcctcgcgccgctaaagaacgcgggttcagtcgaatcggtaaggacgacgctgcgttggtcgctcgcgcagcaaaataaccgccagacgctgtgcatcgagaatagaggcagtcaacacgccaggctcagtacggtttactgggcgaacgcgagcggcaaaggccaaatttcccaggctaatggccttctcggctacgttctggcgcagaaaaaggcctgtttcccgagcggcggaaagtcttccgtgccatcaggcatgcatctgttcgcgaaattaacggataacggtcaggcggtggaaattccggcgaatcgttga

SEQ ID NO: 257832 - DNA, 2289 bp, Klebsiella pneumoniae
atggcgtcggtgacggcctgcgccgcgacctatgattcactgcccgcccccgcggcatcctacggcgaaaagcaggagtatgagctgtacctcagcttatcggtcaacggcaatatccttgccaacgccgttccggtaaaggtcaacgctggtcactactgggtcgcggccagcgttctaaggcaagcgcatattcctctgcaaacccacgatgcgctggtggatgtcacgacgctcccctcggttaaggtggaatacgaccagccggggcaagtgcttaagcttcaggttccagaccagtggctccccgaacagcgcatcggggagaccatgggacaacaataccaggccgcgatcggcagtccggggattttatttaactacgacgcttacagcctcttttcatccggcggcacgcaaaccaccagtaccttcaccgaaacgcgtctttttggtccgccgggcgtcctttccaataacgccgcgattcggcaaaactggtctgcaacgggctatcaacagcagggctatatgcgctacgacaccctgtggaaatacagcgatagcgagcagatgataagctaccaggccggcgacgtggtcagtaacgccctgacctggagcagttccgtgcgcatgggggggctacgcataagccgcaacttcagcgttcgcccggatctggtgacatatccgctgcttaacttatccggcagcgcggcggtcccttcaagcgtcgacctgtttattaacggttataaaaccagctcgtcgcaggttaatggcggcccctatacgctgaccaacgtgccgtggatcagcggcgccggcgaagcgacggtagtgaccaccgacgcccttggccgtcaggtctccaccagcgttcctttttatgtctccaataccctcctgcgggaaggcctgagcgattttgatttcacccttggcgccctgcgcaacaactacggcatcaagaatgccgattatggcgccggcgcggtgagcgcgatttatcgctatggattaacccactggcttacgctctcggcgcataccgaagaccgtcagggattaaccaatgccgggctaggcggcgatattggggtaggaaatctgggtaccctcagcctgtcgggcagcgccagccgcggcgaaggagacggaaaccagttcacctcgggttactcctactacggcaacagctggggagtgaactatcagcatatccgccgcagcgccagctacgacaacctcagcacctatggctctagcgccacgctcagccgccagtcagaccaggccacgctgagcctgagcccgtggggaagcgccctcggttcttttagcattggctactttgatatccaggccgaggatcgttcgcgcacccgcctgctgaacctctcctggagccgtagcctgtggctaagcagcagcctcaacctgagcgtaaaccgcgatctgcaggaaggtagctactccagcatgctgcagataatcatccctttcgattcgcaaagctctatgcagttaagcggccagcgcgccagctccggtcaatggggcgaaaatatcagcctcaaccgctccgccccggcagaaggcgggcttggctggaacctcgcccattcggtgggcggcgataattatagccaggcggatctcacctggatcaaccgcgtgtcaacgttgagcggaggctactacggctcgcgcaacgatcgtcacagctggtttgaagccacgggatcggtggtgctgatggataacagtctgttcttcgcccggcagattaacgacgcgtttatcgttgtctccaccggtaactacccgaatattgcggtgaactatgaaaaccgcaaagtcggcgtgacggataaaaacggccatttgctgatcccatgggcgacggcgtggtatccgggaaaaatcaccctcgatacgctgccattgccaacggacaccgaagcgctgacggtggagaagcgcatcgccgtgcgtgaaggcagcggcgcgctggttgaattcccggttaaccgcgtgcgttcggcaaccattgtcttcgtcgatgctcagggacagccgctaccggtcggtacgcccgtcgaggaagtgaacagcaaacagcgcggtctggtgggctacgacggcgtcgcctggttctcgcatctcacgcgcgacaatgaagtcatagtcaacgccggggcgtttccatgccgcgtgcgctttgcgctcccggaaaccacgccggttccgcaacggataggtccggttagctgtcatccataa

SEQ ID NO: 257833 - DNA, 681 bp, Klebsiella pneumoniae
atggctaactggcttaatcaactacagtctctgctgggtcagcaggggcggtcttcttcatctgacgatcaaccaagcggcaataatttactcctgccgggcgcgctcggcgggctggcaggtctgctggttgccagtaaatcatcgcgcaagctgttggccaaatacggcaccggcgcgctgctggtgggcggcggcgcggttgcgggcagcgtgttgtggaataaatatcagcagaagatgcgcgccagcgcgcagcagacatcggctgatgtcgcgcccgcacaggcgccatctcctgcaccggccgaactcgacgcccgcagcgaacggctgattatggcgctggtcttcgccgccaaaagcgatgggcatatcgacgaccgcgagcgggcaaatattgaagagcagctgcgcgcggcaaacgtcgacgtccagggccgggtgttaattgaccgggcgctggcgcagccccttgacccgcagagcctggcccacggcatcagcagcgagcaagaggcgcttgaagtttactatattagctgcgcggtcatcgatattgaccactttatggaacgcagctacctcaatgccctcggtgaagcgatgaagctaccgcaggacgtgcgcgaagagatagaacgggatatacaggcgcaaaaacaggccataacggcttaa

SEQ ID NO: 257834 - DNA, 870 bp, Klebsiella pneumoniae
atgaacatgctggaaaaaatccagtcccggctggaacaccttagcaaatctgaacgcaaagtggcggaagtcatccttgcaacccccgcccaggccatccattcaagtattgccgccctggcgctggaagccggcgtcagcgagcccacggttaaccgtttctgccgcagtctggaaacccgcggtttcccggattttaaactgcatctggcccaaagcctggcgcacggtaccctctatgttaaccgcaacgtcgatgaagacgacagcgtcgagtcctatacgggaaagatatttgaatccgccatggccagtttagatcaggtccatcattctctcgatatgtcggcgattaatcgggcggttgacctgctcacgcaggcgaagaaaatcgccttttttggcctcggctcttcggccgccgtcgcccacgacgcaatgaacaagtttttccgctttaatgtaccggtgatctattccgacgacatcgtcctgcaacgcatgagctgtatgaactgtaatgacgatgacgtagtggtgatcatctcgcacaccggcaggaccaaaagcctggtggagctggcgcagctggcccgtgaaaacgatgcgatggtgatcgccattacctcccccggtacgccgctttcccgtgaggcaacgctggctattaccctggatgtgccggaagataccgatatctatatgccgatggtttcccgcttagcgcagctaacggtgattgacgtactggcgaccggcttcaccctgcggcggggcgcaaaattcagagataacttgaagagggtcaaggaagcgctcaaggaatcgcggtttgataaagagctcagcgtacacagcaataaccaataa

SEQ ID NO: 257835 - DNA, 1146 bp, Klebsiella pneumoniae
atggcacataaaataaaagcgctggcgataacgatcggcgcagccctggcgttaacctcttttgcatcccaggcggaaattacgcttttaaaacaagatccgcaggcgggcgatccgttaagccggcttaacttcaccgtcggcgggagcatccgtccccagttcaatatgatgtccggcgacggagacaaaggctcttataaacgtaacggtttcgatggcggcacccgtttccgcttcgccgccgactactatctgttcgatgatattagctggatcagctactacgagctgggcgtcaatattccggcgcttttcgactgggataaccactatgccgaaggcgcgaataacaccagccgccgtatgctctataccggcctgaaaagcgatacctgggggacgttaacctacggtcagcagaacagcgtttattacgacgtggtcggggtaaaaaccgatatctgggattacgacatgataggccaggcgccgggtaacggcatcaacggtgactacgatggttcctatcgctcacgcaatatgctgaaatacaagaaaaccgttggcgatgtcgatctctacgcttcttacttattcgaagacagcgaatatctgccgggcaacggcctgcgctacaagcgtaaaggcggtggctccatcggcgccgattaccacattatgaaggatttgacctggggtgccgcgtggaactatacccgcgctgatatgcgtaacccctcgagttcagacagcaaatcatacgaccagaatatcgtcggtaccgccctaagctggacgccggataactggaccttctccttcggcggcggctggtatcagaacttcctgaccaccaaaaaaaccgatgttcataactacttcgcgggcgatgcctggggtattgagtactttgccggttataaattcccgattggtcagtatgcggtgaaatctattcagccgtactttatgggcgaccgcctgcagtacgtgaacggccgtaactatcagcggattgataacggcgtcggcgtgagcttccagctggattacggtttccgcgttgactacgaacacgtcttcacgtcaagcaccgacaacctgggcgatatgaacctggtgcgtctgcgctacgacttctaa

SEQ ID NO: 257836 - DNA, 804 bp, Klebsiella pneumoniae
atgcagattatccgtccgctgacaggcagcgttgatgcgccggaccatcgccagccgtggcgaaccggcggcctctggcagcgcactatcaacctctatgttgaaggcggcgcattgctgacgctgcatcgtcatgggcagggcatcagtcccggcggatgggtattacgtcatcgcgattttatccgcctgcatggggcgctgcgggcgggcgctctgcctgcggcgggcgaaaatggcattcaggttgatgaccttttgctgtcgccgccgcgcagacgctgctccctgcggccttgctatcagcccgctggcgctcgcttaccgaaagcgctggtggatcgcccggaagagaccgggctgttcgggccgctgtcgcaggcggttcatccaccactgcatcctgaattgcggcaattacgccactgttttgcctcagcgctgcgcgggaacgccgttgactggcggctgtggctgggaaaggggccgggcctgacgccgagcctggacgatatgctgatcggcatgatgctggcggcctggcgcgcggggcggatgtcgcgccacggcgggcaggctttctttcgcgcatccggggatctgcacgcggcgacgacccaggtgagcgtcaactatttacgctatgccagcgtggggcgcttcgcctcgccgctgctgcatttttctcacgcgcttcagcgcggacgacgtattgaacccgccatcgaagccctgctggcgatgggccacacctccggcgccgacaccctgctgggattctggctggcgcaacacattatctaa

SEQ ID NO: 257837 - DNA, 330 bp, Klebsiella pneumoniae
atgcaaaaatggagtcagcccctgatttggggaatggtcatcgccgtcatcggcccgattatggccagcttttttggtctggcgtttacctatcttggaacgctgagcgtagtctggttcgccattttattatggattctctatttttacgcgatttatctgctctgcacacggccgcacgatgagcgctttgtgcaggtatacatgctgattatgagtattcttatgctgccctgggggctggtgctgatttttacctttttcgccagcgcgaccgccgcccataaccgccgcgtttcatcgaataccgacgagacaaaagtcggctag

SEQ ID NO: 257838 - DNA, 213 bp, Klebsiella pneumoniae
atggcgaatttttctttaggcaaacacccgcacgttgagctttgcgacctgctgaagctggaaggctggaccgaaagcggcgcgcaggcgaaaatcgccattgccgacggtctggtcaaagtcgacggcgcggtcgaaacccgcaagcgttgcaaaatcgtcgccggtcaaacggtcagctttgaagggcagagcgttaccgttaccgagtaa

SEQ ID NO: 257839 - DNA, 183 bp, Klebsiella pneumoniae
atggcaactcgatatattggcattaaagaaatgtgcaagctgaccggaaagagtaagccaactctgtggaggatgtacgcgaagaggaaggaatttccggcaccagagcgaacgcccagcggaatttttctcggatggcccgagacggtttacgaagcctgggtgaacaaaacgaaaacctaa

SEQ ID NO: 257840 - DNA, 804 bp, Klebsiella pneumoniae
atgacaatccctgcatttggtcttgggaccttccgtctgaaagatgacgtggttattacatctgtaaaaacggcgcttgaactgggctatcgcaccattgataccgcgcaaatctatgataatgaagctgctgtgggtcaggcgattgcagaaagcggcgttgcgcgcaatgaactgttcatcaccaccaagatctggattgaaaatctcaacaaagagaagctgatcgccagcctgaaagagagcctgcagaagctgcgtactgactatgtcgatctgacgttaatccactggccgtcgccaaatgatgccgttgcggttgaagagtttatggccgcgctgctggaagcgaaaaaacaggggctgacctgtcagattggtatctctaacttcactattccgctgatggagcgcgcaattgctgccgttggcgcggagaacatcgcgaccaaccagattgaactctctccgtatctgcagaaccgtaaagtggttaattgggctcgtgaacacggtatccatatcacctcttacatgacgctggcctacggtaaggcgctgaaagatgaagcgatcgcacgtatcgcggcgaaacacgatgccacgccggcgcaggttatcctggcctgggcaatgggcgaaggttatgcggtaatcccgtcttcgactaagcgcgaaaacctggcaagcaatctcaaagctcaggatctgcagctggatgaagacgatcgccaggcgatcgccgcgctggacagcaacgatcgtctggttagcccggacggtctggcgcctgaatgggactaa

SEQ ID NO: 257841 - DNA, 903 bp, Klebsiella pneumoniae
atgagagctacctcagaagaaatcgccatttttgtcgccgtggttgaaagcggcagctttagtcgcgcagccgaacagctaggtcaggctaattccgccgtcagccgggcggtgaaaaagctggaatcaaagctcggcgtgagcctgcttaatcgtacgacccgtcagctaagcctgactgaagagggagagcgttatttccgtcgcatgcaggttgtgcttcaggagatggccgctgccgagaatgagcttctggagagccgtacgacgccaagaggtctgttacgggttgacgccgcaacgccggtgatactgcattttctgatgcctttgataagacccttccgcgagcgctacccggagatgaaccttacgctggtttcgtcagaaacctttatcaatctgatcgagcggaaagtcgacgtcgcgatccgcgccggtacgctgaccgactccagcctgcgcgccaggccattgttcaatagctaccgcaaaattatcgcttcaccggactatcttgctcgccatggaacgccgcaaagcgtcgctgagctaaaacatcatcagtgtctgggctttagcgaacccgtttcattgaatacatggccaatctcctgctgtgatggtcagctactggaaatcgaaagcgagatatcttccaatagcggagaaacgcttaagcagctgtgcctggccggtaacggaatcgcctgtctgtcggactatatggtggataaggagattgctgaaggggcgtttgtcgagctgctggctgacaaacggctgccgattgaaatgccgtttagcgcggtttactacagcgacagggccgtaagcacgcggatcagagcctttatcgactttcttagcgagcatgtaaaacagctcccgaaggagctgtaa

SEQ ID NO: 257842 - DNA, 807 bp, Klebsiella pneumoniae
atgcctaaattgcgaaagaatacctatgccatgcgctatgtcgccggacaacccgcggagagaatcttacctccggggtcgtttgctggcatgactccggcttttccggccggggtaccgttaagctcggatgagaaaatccgcgtgctggtgtggaacatcttcaagcaacagcgcgccgagtggaaatccgtgcttaataatttcggtaaagatgctcacctggtgttattgcaggaagcgcaaaccacgcctgagttagtgaaattcgccacctccaactatctggccgcggaccaggttccggctctggtgctcccgcagcatccttccggggtcatgacgttagcttccgcgcaccccatttactgctgccctctgcgcgaacgcgagcctatcctgcggctggcaaagtcagcgttggtcaccgtttacccgttaccggattcccgtctgctgatggtggtgaatatccacgcggtcaattttagtcttggcgttgatgtctacagcaaacagctgctgccgattggcgaccagattgcccatcacagcgggccggtgataatggcgggcgactttaacgcctggagccgtccgcgaatgaacgctttgtatcgctttgcgcgtgaaatgtcgctgcgcgaagtccgcttctctgacgatcagcgccgtcgcacttttggtcgtccgcttgattttgtgttttatcgggggttaagcgtgcacgacgcttccgtgctggtgacccgcgcctccgatcacaaccctctactagtcgaattcagtcccggcaagcctgattaa

SEQ ID NO: 257843 - DNA, 834 bp, Klebsiella pneumoniae
atggggcaggcctgcgtatgcatggtgctgcctttattactcaaactaccgaaggacaatgcaatgacaacacgctctcatcatgacaacgtcgaaaaacagtttggctcacaggccagcgcctacctgaccagcgccgtacacgcttccgggcgggatttacagcgcctggccgaacggctggcggacttcccgcaggcccacgtgctggatatgggatgcggcgccggacacgccagctttgcggcggcagggcaggttgcccaggtgacggcatatgatttatccagccagatgctggacgtggtggctcaggccgcaagggataaaggtttcaccaatatcgccactcagcagggctacgctgaatcattgcctttcgctgatgccagctttgatgtggcgatcagccgttattctgcgcatcactggcacgacgtcggccaggcattgcgcgaagtgaagcgggtgctgaagccgggtggggtgatgattattatggatgtgatgtcgcccggtcaccctgttcgcgacgtctggctgcaaaccgttgaagccctgcgcgatacttcccatgtccgcaactactccagcggcgagtggctggcaatggcgagcgaggccggtttggtgataaatcatctgctgaccgatcgcttgcctctggagttcagctcatgggtcgcgcggatgcggacgcctgcggcgctgacggaggcgattcgtttataccaggacagcgcatcagcggaggttaaggcctattttgccttgcagcaggacggttcgttcaccagcgatacgattatgtttgaggcccataaggcaatctaa

SEQ ID NO: 257844 - DNA, 1368 bp, Klebsiella pneumoniae
atgaaggcacgagcgattttactcgcctctgtcctgctggtggggtgccaggcgtctaagaacgatggcaccgtacaacagcacgcacagagcctttctgcagcgagtcaaggggaagcaagcaagttcacaagtcgagcgcgctggttagatgatggaaccttctacgcgcaagaccaggatctgtggacttcgataggcgacgagctaaagatgggaattccggaaaatgtccggattcgcgaacaaaaacagaagtacttaagaaataagagctatctccacgatgtaactttacgggcagagccgtatatgtactggatagccgggcaagttaagaaacgtaacatgccaatggaactggtattactacccatagtggagagcgcttttgacccgcacgcaacgtctggcgccaatgccgcaggcatctggcagatcattccgagcaccgggcgcaattatggtttgaaacagacccgcagttacgatgcgcgtcgtgacatcgttgcctcaactacggcagcgttaaacatgatgcaacgtctgaacaaaatgttcgacggcgactggttgttaaccgtcgcggcgtataacagcggcgaaggccgggtaatgaaggctatcaaagcgaacaaatcacggggtaaacccaccgatttctggtcgctgtcattaccgcaggaaaccaaaatatacgtaccaaaaatgctggccctgagcgatatactcaagaacagcaagcggtatggcgtaaggctgccgacggcagacgaaagccgtgccctggcgcgtgtacgcctcgatagtccggttgagatttcacaactggcggatatggcaggaatgcctgtcagcaagctgaaaacgttcaacgccggcgtgaaggggtcgactctgggtgcaaacggccccaattacgtcctggttccgcagaagcacgcggcgcagctgcgtgaatctttggcctctggcgatattgccgccgtacagccgactcagcttgcagacaacagaccgttgaccagccgcagctaccaggtgcgctccggtgataccctttccggcattgcatcgcgtctcggggtatcagcgaaagatctgcagcagtggaacggcattcgcggctctggcctgaaagtggggcagaatctggtgattggcgcaggcagcagcgcggaacgtctggcgaacaatagcgatagcattacctatcgcgtacgtaaaggcgactctctgtcgagcattgcgaaacgtcatggcgtgaacatccgcgatgtgatgcgctggaatagcgatactggcaacctcaagcccggcgatcagctaacgctgtatgtgaagaacagcgacagaccagaatcctga

SEQ ID NO: 257845 - DNA, 582 bp, Klebsiella pneumoniae
atgtaccaggatcttattcgtaacgaactgaatgaagccgctgaaacgctggctaactttctgcaggacgaagccaatattcatgcgattcagcgtgctgcggtgctgctggcggatagctttaaagctggcggcaaagtcctttcctgcggtaacggcggttcgcactgcgatgcgatgcattttgcggaagaactgaccgggcgctatcgtgaaaaccgcccaggctatccggcaattgcgatttcagacgtgagccatctctcttgcgtcagcaatgattttggctatgaatatgttttctctcgctacgtagaatcagtgggccgtacaggtgatgtattgctggggatctccacttccggtaactccggtaacgtaatcaaagcgatcgaagccgcccgcgctcaggggatgaaagtgattactctgaccgggaaagatggcggtaaaatggcgggatcggcggatgtcgaaattcgcgtaccgcattttggctacgccgaccgcattcaggaaattcatattaaagtgattcatatcctgattatgcttatcgaaaaagagatggttaaagcctga

SEQ ID NO: 257846 - DNA, 1239 bp, Klebsiella pneumoniae
atgggcttaaagcaactgtttgacaaacttgagccgcactttacgcacggcggcaagctggaaaaatactacccgttgttcgaagcgacggcgaccttgttttatacacccggtcaggtgacgcgcggagcggcgcacgtcagagacgccatcgaccttaagcggatgatgatactggtgtggttcgccgttttcccggcgatgttctggggaatgtataacgttggtctgcagaccataccggcgctggctaaattatatagcgctgaacagctgcagcaggtcatcgccgggaactggcactacagcattgcgcagtggttgggggtgaacttcacccctgacgccggttggctcagcatgatgaccctgggggcggtatttttcctgcctgtctacattaccgtatttcttgtcggcggattctgggaagtgctgtttgctatcgtgcgtaaacacgaggttaacgagggctttttcgttacctctattctgtttgcgctgatcgtaccgcccactttgccgctatggcaggccgcgtttgggatcaccttcggtgtcgtcatggccaaggagatttttggcggaaccgggcgaaactttctcaacccggcgctggcggggcgcgcgttcttattctttgcctggccggcgcaaatttccggcgacctggtgtggactgcggcggatggcttctccggcgcgacgccgctatcccagtgggccagcggcggcggtgaatcgctggtgaacgtcgctaccggtctgccggtaagctggatggatgccttcctcggcaagattccgggctcgattggcgaagtctcgacgctgatgattctgatcggcggggcaatcattatctttggtcgcgtggcctcatggcgcatcgtcgccggggttttcatcggtatggtggctaccgcgatgctgtttaatttcattggctctgataccaacccgatgtttgccatgccgtggtactggcatctggtgctaggcggtttcgccttcggcatgatgtttatggcgacggacccggtgtccgcgtcgtttacggataaaggtaaatggagctatggcctgctgatcggcgtgatgtgcgtcctgattcgcgtggtcaacccggcctatccggaagggatgatgctggcgatcctcttcgccaacctcttcgcgccgctgttcgattatctggtggtgcgggccaatattaagcggaggaagtcgcgtggctga

SEQ ID NO: 257847 - DNA, 858 bp, Klebsiella pneumoniae
atgaaatcaatacttactgcgcttggtttgcttattgccaccagcgcctgcgctgcgccgcagctcattgctcatcggggaggcaccggcgatgcgccggaaaacacccttccggcgataaaactggcgctggagaataaggccgaggcgatttggataacggtacaattaagccatgatggcgttccggtcttatatcgcccgagcgatttatccgccctgactgaccataccgggaaggtctcaagctttagcgctgccgaactggcccgcatggacgcgggatggaaatggggcggtgaaactcacccctggcgcggaaaaaatgccaccattccaacgctgcaatcagtgctggagcaatggccgcagaccttcttttacatcgatattaaatcgcctgatgccgacccggcaatgatggcttcgcgtcttagtgaagtattgcaaacaacccatagcctctcgcgcgtacgcgtttattccaccgaagaccgctatatcgcggcgctaccggaatctattccccatttcgtcagccggggcgaaacgcgaacgaagctggctaatatttcccttagccaccagtgccagccaaccacgcagccgggcgatgactactggtacggtctggagctgaaacgcaaggtagaaatcgtggagaagttcaccctcggcgaaggcgtgtcgccagccaccctcacctgggataaagaagccatggactgtttccgctctcagggcaaagcccatattgtcttcttcggcattaatagcgccgatgattttcgtaaggcaagcgagctgggagccgatggcgtgatggtagactcgccggcgaaagcgaaaacctggtaa

SEQ ID NO: 257848 - DNA, 492 bp, Klebsiella pneumoniae; identical to SEQ ID NO: 188685

SEQ ID NO: 257849 - DNA, 558 bp, Klebsiella pneumoniae
ttgggaagaaatgacctgcttattcgcaccttccttagcgctgaccgtaagcttagtatggataacgttgaatacggttctatttcgttcagtgcctacagccaactccggatgttagaaaaccgactcttttttgttatctcggaagctgaacgcggactacaccgcaatatatatattgccgataatctcaaagacgataacgacgagtttatcatcgataaactactgggctcgtctcaccaacaggagcaggaagctgttgatgtattcgaagtaaaactgcccaagtctctgtcagaaggcccactcccggtgctgaaatgtgatggggaaatatatcgaattcaccactggttcgatatctgtccacaagggtcggacggaaccatttcattgagcaatatcgaagcgccggtacatacggtcaccaggcacagttttgataataaagagttggcaatgatgtttatccttaaggaggacagttccgtaaggaaacatacgtccggtgataaattcaaaccgccagcaggaattaacgaaaggtggtattag

SEQ ID NO: 257850 - DNA, 360 bp, Klebsiella pneumoniae; identical to SEQ ID NO: 186899

SEQ ID NO: 257851 - DNA, 792 bp, Klebsiella pneumoniae; identical to SEQ ID NO: 186898

SEQ ID NO: 257852 - DNA, 348 bp, Klebsiella pneumoniae
atgaataacatgaaacatttaccactcaaagacacccttgttgtgggtattcccgcattgctgtttatggcgttgctttactcacttaaaagcaactttccagaggtagtcgagcttataggtactttagtcgtttttatcataacaccagccctggttgctctgttggcaataataagatggggagctttcatgttctttgccggagctctcgttacacaggtgcttaccgcttgtctggtttatcttgtttctacccgggacattagcgaatcactgggccttggagcgtgtgcaatcgtgatttacgtaattggtctgtcgaaatttgaagatatcaactcatag

SEQ ID NO: 257853 - DNA, 531 bp, Klebsiella pneumoniae; identical to SEQ ID NO: 186896

SEQ ID NO: 257854 - DNA, 204 bp, Klebsiella pneumoniae; identical to SEQ ID NO: 186895

SEQ ID NO: 257855 - DNA, 468 bp, Klebsiella pneumoniae
atgagcagcatgacagtttcattttatagtcagaaacactaccaaaactcaactgaagctatcaagtcaagggcgacggtatcaattgagatctgttgtaatcccagcctgaacaaacttatggctatctcagaggctatctgcacgtgcgcaggcattgagccatcggttggtatcattgtcgatgatgctctcacagaggacattagtgagggtgagagtatctgtgtggccttctataaccacaacaagtacaaaactgctgatgcggctagtcaagcagatgctatcaggcgcgtgaatctggatttttccttaactcttaatgatttgcacatgattattggtgctgtaagtcgatgtgccgctattgataatgtaatcggtattgcattccctacggcgacggttattgatattgggcattccgggcaatctatggacctgaaaagcatgctgcattcttaa

SEQ ID NO: 257856 - DNA, 384 bp, Klebsiella pneumoniae; identical to SEQ ID NO: 186893

SEQ ID NO: 257857 - DNA, 294 bp, Klebsiella pneumoniae; identical to SEQ ID NO: 186891

SEQ ID NO: 257858 - DNA, 582 bp, Klebsiella pneumoniae; identical to SEQ ID NO: 186890

SEQ ID NO: 257859 - DNA, 321 bp, Klebsiella pneumoniae; identical to SEQ ID NO: 186889

SEQ ID NO: 257860 - DNA, 315 bp, Klebsiella pneumoniae; identical to SEQ ID NO: 186888

SEQ ID NO: 257861 - DNA, 252 bp, Klebsiella pneumoniae; identical to SEQ ID NO: 186887

SEQ ID NO: 257862 - DNA, 216 bp, Klebsiella pneumoniae; identical to SEQ ID NO: 186886

SEQ ID NO: 257863 - DNA, 222 bp, Klebsiella pneumoniae; identical to SEQ ID NO: 186885

SEQ ID NO: 257864 - DNA, 396 bp, Klebsiella pneumoniae
atgaaatttgcgaagttctgtgaactggtgacaaccatatgggcaaacaaaatcaaccagcgccgcgatcctgaagtcacgatcctaatccactctccgggtagtatcggagcaacaccatcagtagaagtcgagtccattcaggctggattcgactgggatgccggtcaggtgttgatttacccggcacagcctttgaccacgctgacgccagaacaggtagcggacattaccacaagcgtgcgcaaaggccagtcctggcacgcctatgaggcttacaagaagcataaagccgcaatggaagccgccgcgattgagtatgcgaaggtagcagggcaacgtgatgaattactgacagccctggaagtactttctgctgcttgcgacaaccaatga

SEQ ID NO: 257865 - DNA, 1074 bp, Klebsiella pneumoniae; identical to SEQ ID NO: 186880

SEQ ID NO: 257866 - DNA, 213 bp, Klebsiella pneumoniae; identical to SEQ ID NO: 186879

SEQ ID NO: 257867 - DNA, 435 bp, Klebsiella pneumoniae; identical to SEQ ID NO: 186878

SEQ ID NO: 257868 - DNA, 285 bp, Klebsiella pneumoniae; identical to SEQ ID NO: 186877

SEQ ID NO: 257869 - DNA, 666 bp, Klebsiella pneumoniae
ttggatgccgtcagaaaaagtttctttcctggtgatatgcaattaaacgaactacagttacgccagatatccgcatgccctgggaacattgagttacaggattggttgaaaatacttgttgctgataatgcagtgctcgttcgttctttaacggtcatcgctaattcagatgagcatcatggtaagacgatggtctgtgattttgattcgttgatttctgtagctactgctggtctgaaagagcatgagcaactccttaaagggaacacttcacctgattgcgaacaacaagaaacaaacatccctatgttctacgtggatggagaggcggcaatacgtcttctcaaggggcatactcgttatgcagccatgacgactgagccaaagtctggtaagacgttgccgctttacataaacgctcaatctgcgtcagtcgcaccggcagaaacagagcgaaaaggtaaaaggctccgcgttgcagaagggaggtatgctgcttttttccctcaagagcggccactcgatggagcgcagatcatcgcatgggatgagaacggtaatttgttaggcattggttttgtacgagacacacgcgatacgggagttgctatcatcgtcaacggaaaaaaatacgactcaaaccatgtgattcactggtgtagttag

SEQ ID NO: 257870 - DNA, 522 bp, Klebsiella pneumoniae; identical to SEQ ID NO: 186874

SEQ ID NO: 257871 - DNA, 288 bp, Klebsiella pneumoniae; identical to SEQ ID NO: 186873

SEQ ID NO: 257872 - DNA, 321 bp, Klebsiella pneumoniae; identical to SEQ ID NO: 186872

SEQ ID NO: 257873 - DNA, 633 bp, Klebsiella pneumoniae; identical to SEQ ID NO: 186871

SEQ ID NO: 257874 - DNA, 429 bp, Klebsiella pneumoniae; identical to SEQ ID NO: 186869

SEQ ID NO: 257875 - DNA, 423 bp, Klebsiella pneumoniae; identical to SEQ ID NO: 188695

SEQ ID NO: 257876 - DNA, 516 bp, Klebsiella pneumoniae; identical to SEQ ID NO: 188694

SEQ ID NO: 257877 - DNA, 411 bp, Klebsiella pneumoniae; identical to SEQ ID NO: 188693

SEQ ID NO: 257878 - DNA, 489 bp, Klebsiella pneumoniae
atgaaacgagataatgcattgcccgctttagtaaaagcaaatgtggagaattacaggggcgcgattgccctttatctaaagcaaacagaagataacgcactggtatttatcatcggtgaagcaggcgcaggtaaatcttatctggcaaaactcgaattaccgaatgctttatatcccacacctcagcaatttgccgaatgtgatcatatctccacgatgttcacaggatttgacgtagtcattgatgacattctccggtttgactcagacaaagtcatagaatgtattcaggcggtccatgcttctgggcatagagtcatggtcaccgggcaaccggtcgaccttgaattgtgcacgggcctactgtcgcgtttaccagtgggttaccgcactatgttttcgacgctgatggggcatagcgatttgcaagagatgaaaggcaaagacaactccgtggaaccaccgaaaacaggtcccgttctgcactag

SEQ ID NO: 257879 - DNA, 735 bp, Klebsiella pneumoniae; identical to SEQ ID NO: 188691

SEQ ID NO: 257880 - DNA, 573 bp, Klebsiella pneumoniae
atgattttctacgataatgcatttcgtttacggataccgcacacgagtatttatcgaatccaccagcacctggatttcttcgttcaggagcggaagggggagaagctgccatattcttttaaaattcttcctggtaccgctaatgatgcacagttgcttgttcgcacagcatcacctcttggcctacccggtgaaaaaccgcgtgagcttacgctatccgagggggatgggatttcgttcatcacttccatggccattttccataaagccaatcagacagaaggtactggccgacgtcagtacgcaccttctgacgataaaaaacatgatctggccgttaacaaaataatcaatgccggtttcgagcccgaccatattgtcgtaggtggggctgaaattgttcacgttgggaagggcaattccggtcgtggctttacgctaccggtgttcacgatccagggtatggtcgttgtcagcaacaaacaggaagcagagaaagctattgtctttggcattggtcccaaacgagtctttggttgcggcttcatgcacctgacagggcagggactatga

SEQ ID NO: 257881 - DNA, 1881 bp, Klebsiella pneumoniae; identical to SEQ ID NO: 188689

SEQ ID NO: 257882 - DNA, 678 bp, Klebsiella pneumoniae; identical to SEQ ID NO: 188688

SEQ ID NO: 257883 - DNA, 1032 bp, Klebsiella pneumoniae; identical to SEQ ID NO: 188687

SEQ ID NO: 257884 - DNA, 417 bp, Klebsiella pneumoniae; identical to SEQ ID NO: 188686

SEQ ID NO: 257885 - DNA, 432 bp, Klebsiella pneumoniae
ttgcgcaggcaggttagtgccggtgttgacctctttatacatatccagcggcgcattctgcgaatagcgcaggttgtcctcggtataggtgttatagacgccgcgggcgagggccgcttcatcgccgccgccggtccacacgcgctggcctttcttgcccataataatcgccgtgccggtatcctggcaggtgggcagcacgcctttggcggcgatgtcagagttgcgcaggaactgcagcgccacatacttatcgttatcgctggcttcagggtcgagaaggatctgcgcgacctgtttctggtgggacacgcgcagcataaacgccgcatcgtggaaagcctgctgcgccagcagggtaagggcctgagggtctactttgaggatctcctggccttcgaattcggcgatggagacgtgctctttgcttag

SEQ ID NO: 257886 - DNA, 750 bp, Klebsiella pneumoniae
gtgggtggtggtcacgccgtagcgggcgaagaactgctgcatcgccagcggatcgcgatgggcctccggctcggccatcaccagctgcgcgccggcgataaacggccaccagaactcccagaccgatacatcaaagctgcacggcgttttctgcgccaccacatcatcggcggtgagcggatagtggtcctgcatccacagcaggcggttgacgatggcggtttgcccgaccatgacccctttcggtcgccccgtcgagccggaggtgaagatgatatacgcggtatgctccggctgcgagagcgccagcggcgcggcatccgccgccgccagcgggtgttgatagcacaggctttcgaggccggggatatcgctaaagcgcgcccgctgatcttcagaggtaatcagcagcgacggccgtgcgtcttccagcatcatccgcagacgatcgtcgggatagccggtatccagcggcagccaggcggcgccggcctcaacgatgccgtgcagcgccagggtcaggaataccgaacgcggcagcgccaccgccacgctatcgcccggcttgacgccccgcgcgcgaagctgttcagccagcgccaccacctgctggcgcatctcgcggtagctaaactgccagcggccgtccgccagcgccggggcatccggggttttcgccgcctgttccgccacccgcgcgctcagggtggtgagcggcagatcgacggcggtggcgttcacccgctgtag

SEQ ID NO: 257887 - DNA, 1215 bp, Klebsiella pneumoniae
atggttgcccagcgtctgtttatcgtaacgctgcttattggccagcacctccagcgacaggccgccggcttcatccgggaacagcgccagctccaggtcgttgaccggaccggtcgccagggtatgggtaatcgcctgtacgccatcgatatccagctgataatcaaaaactttaatattaagcaccgggccaaacagcggttcgtcgcccgccgccttgccactgtcgcggacaatctgttcggcgtcatagcgctgatggcggcgcattttcttcagctgtccggcaagacgcgcggccagctccgccagcgtttccccggcgtcaatggtgaccgccagcggcagaacgttgagcaccggaccggtggcggtgagcgccgcggagcccatacgacgcataaaaataaagcctgcggcatactccgttcggctgcacagccgtcccagccacagggcggtcagcgccagagccaggtccgcgcgctggcactgcggcgcgcttgccgccagccggctaaagacgccggcatccacctccagcttcatgcgccagatatcgctgctggtcgcccttcccgccagcggcgcatccgacagcgaggccggagacggcagcgcctgacgctgcgcctgccagaacgctttgtcgcgctgccaggcatcgctgccgtaatagcgctggtactcttccaccacttcggcaaagggcgtaaacggcgaggcgggcgtctcttcgccgcgctgccaggcgcgataaatcgcggcgatctggcgggtaatggccgggaagctgaagccatcgaccagcaaatggtggtaacgctgataccagtaccagcggttatcgcctacccgcagcagctgatggcagaccagcggattaccgccgtccacccgcagattctgcccgaggtcggcctgcatcctcgccagcgcggcggcgtgcgggtcgctcgccgcgcgcagatcctgatagtccggttcggcaaaaacgcggcgttcatcaacccactgccaggcttcgccgctatcttcacaaaagcgcatgctgagggtgtcggcctgagagagcccggtgataatcgcccgcccgagcaggactgggtcaatatcgccgcgcagctcaacatagtgggcgacgctccatgcgccgggcagcgtcgagaggcgctccgccatccagatccccggctgcgccgcaaccagcggtaa

SEQ ID NO: 257888 - DNA, 204 bp, Klebsiella pneumoniae
atgcaattcagtaatcccttcgacaatctacaagggcagttttacatcctgcgcaatgagcagcagcagtacagcctgtggccgcaccactgcgcgctgccgcaaggctggtcggtagagtgcccgccgcagtcgttagaggcgtgcaacgcctggctggcggcgaactggtctaccttgacccccgcccaccatgcgtcctga

SEQ ID NO: 257889 - DNA, 624 bp, Klebsiella pneumoniae
atgcacatccaacactcgatcattcaacttgccggtcactcgctgcagcgggtggatttcgacccgttgaccttccagcctgaagacctcctctggctcccgcatcatgcccggttaagcggctgcgtccgcaagcggcagtccgagcatctcgccgggcgtatcgccgcggtttacgcgctgcgggaagtgggcgaaaaaggcgtccctgccattggcgaccaacgccagcccctgtggccggccccgtggtacggcagcattagccacagcgaacgcagcgcgctggcggtggtctccgcccggccggtcggcgttgatatcgaacgagtcatggcgccttcgctggcggcggagctggaaagcagcatcatcaatagcgcggaaaaaaaacggctggacgccagcggcctgccgcctgaactggcgctgacgctggcgttttcggcgaaagaaagcgcgtttaaggccagccattcggctatccaggccaggatgggtttcagcgattttgaagtgacgtatataaaggaagaaaatctgcggcttcggctctccgccggggagtatcggctgcaatggattaaggccggtgaatacgtcatcacgatctgcgcgccgtaa

SEQ ID NO: 257890 - DNA, 1338 bp, Klebsiella pneumoniae
atgaagctggcactacagaacgaggtagcgataagcaatgatgaagttcggcagctggatcgcgcttatgtgtttcattcatggtcgatgcagggcaatttacatccgctggtgatcgccggggcaaaaggctgcgagctgtgggattacgaaggcaatacttacctcgatttcagcagccagctggtcaacgtcaacattggctaccagcaccctcgcgtactggcggcgatgaaggcccagctggaagcgctggtgactatcgctcccgccaccgccaacctcgcccgcggcgaagcggcgaagcggattgtcgagctggcgccggaaggctttagcaaagtgttcttcaccaacgccggcgccgacgccaatgagaacgccatccgtatggcgcggctctataccgggcgcgataaagtgctctccgcctatcgttcctatcacggcaataccggcagcgcgattgccgccaccggcgactggcggcgcgtaccgaacgagtattcgcgcggtcacgttcacttctttaacccctatctctaccgcagcgaatttaacgccacgacggaagaagaggagtgccagcgcgcgctggcccatctgcggcggatgattgaatgcgaaggcccgaacgcgattgccgcgattctgctggagtcgatcccggggaccgccgggattctggtgccgccggagggctatatgcagggcgtgcgggcgctggctgacgagttcggtattatattgatcctcgatgaagtgatggccggttttggccgcaccgggagctggtttgccttcgagcaggacggcgtggtgccggatctggtgacgttcgccaaaggggttaacgccggctacgtcccggccggcggcgtgctgatcagcgagccgatcgcccgctactttgatgaccatttctttgccggcggcctgacctattccggccatccgctggcgatggcggcgattgtcgccaccattgacgcgatgaaagaagagaaggtggtagagaacgcggcgaccatcggcaacggggtgctgcgtccggggctggaagcgctggcggagaagcacgcgattatcggcaacgtgcgcggccgcggtctgttccaggcgctggagctggttagcagccgcgaacgtaaaacgccgctgggcgctgccgatatggcggccattaaaggcgcgttgaccgaagccggcctgctggcgttcgtcgtggaaaatcgcattcacgtggtgccgccgtgcaccatcagcgccgaacaggtggcaaaagggctggcgatttttgatgcggtatttgcccgcttcgcgagcctggcgaagtaa

SEQ ID NO: 257891 - DNA, 765 bp, Klebsiella pneumoniae
atggcaacgagcaaagtggtgtttattaccggggcgacctcgggttttggggaagcggcggcgcaggtcttcgccgatgcgggctggtcgctggtgctgagcggacgccgttttgagcggctgaagacgttacaggataagctcgcctcgcaggtaccggtgcatattatcgaactcgacgtgcgcgatagcgattcggtcgccgcggccgtggcggccctgcccgctgatttcgccgacatcacgacattgattaacaacgccggactggcgctgtcgccgcagcccgcgcagaaagtggatctggacgactggaaaacgatgatcgacaccaacgtcaccgggctggtcaacgtgacccacgcgctgctgccgacgctgattaaccacggcgcgggggcgagcatcatcaatatcggctctatcgccgggcagtggccctatcccggcagccacgtctacggcgccagcaaggctttcgtgaagcagtttagctataacctgcgctgcgatctgctcgggaccggggtgcgcgtgaccgatctcgcgccggggattgccgagacggaatttaccctggtgcgcaccaaaggcgaccaggcggcgtcggacaacctgtatcgcggcaccacgccgctgagcgcgcgggatattgccgaacagatgttttacatcgccacgctgccggatcatatgaatatcaaccgggtcgaggtgatgccggtgcgccaggcctggcagccgttcgccatcgatcgggattaa

SEQ ID NO: 257892 - DNA, 762 bp, Klebsiella pneumoniae
atgtctgataccactgcagtaagcgtcaaaaacgtctctaaacagtttgataacgttgaagttcttcgtgatatcaacctgacggtagagaaggggaccgtggtgagcattctcggctcgtcggggtcgggtaaatcgacgctgctgcgctgcatgaactggctggaacagccggatcgcggcgagatccgcatcagcggccagcggctgggtattgatgagcataatggccgggcgatgtcccaccgccagctgtcgaaaatccgcgagcgggttggcatggtgttccagagctttaacctgtggccgcacctgacggtgcagcagaacgtcagcgaagcgctgctgcacgtgaaggggatgaagcgtgatgaagcgaaagccatcgccatgcagcagctggagaaagtggggatggcgcataaagccgacgtttatccgattacgctctctggcggacagaagcagcgggtggcgattgcccgttcgctggcgatgtcgccggaggtcattctgtttgatgagccgacctcggcgctggaccccgagctggtcaacgaggtgctgggcgtgatgaaggcgctggccgccgagggctacacgatggtggtggtgactcatgagatggattttgcgcgccaggtctcggatgaggtggtgtttctcgaaaaagggttgttgattgagaaagcgccgccggagaagttttttagcaacccggattccgagcgcgtcaggcagtttttgcagagcagccggtaa

SEQ ID NO: 257893 - DNA, 666 bp, Klebsiella pneumoniae
atgaatcagtgggccgttatctggtcggtgcgcgacagctttattgccggtttactcgccacccttgagctttttattaccgcggccatcgccggattaattatcggtgtggtcctgtgctatttaaccgaatatcaaaagaaaacccttaaccggcttattattgcctttgttagcttaatgcgggcgattccttttttgattcttgcctatttgctctattacgggctaccgcaagttggtattagtatggaaccctggaccgcaggcctaatcgccttagttatctaccacggcgcctatttttttgagattttacgcagccagcgtcgggtattttccggtggctatatcgaggccgcggtggcgcagggattttcgcgctacaaaatattccgccgcattattctgcccaatattctctcttcagcgctaccgctgatgggcaaccagctgattatctgcctgaaagataccgcgtttctcagcattatcaccgtccaggagataaccgctgcggctaacagcgtgcaggccacttattttatcccgtttaacgcctttatcgtcgcgattgggctctactgggcgatcagcatcctgctggagctgctgattaagcgtctgagcgcctggggagtcagaagaggaatgagtcatgtctga

SEQ ID NO: 257894 - DNA, 642 bp, Klebsiella pneumoniae
atggatgcaatttcctggcagttactgattgaaggcgcatggacgaccctctggatttcggccatcgccattgcttttggcgtggcgatcggtctgctgattgccctggtgcgcatgttgcgtatcccggttatcgatcagctgctggtggtctatatcagccttgcccgcgcgacgccgctggtcacgctggtgctgttcctgtttctttctctgccgaccgtcgggatcaacctcgataaaaacgtcgcggcgattgtggcgctgacgctcaatacctcggcctttaacgccgaaatctggcgcaacgcctttcgcaccttcccccgcgaacagcgggaagcggcggagtcggtaggaatgcgtcgctgggcctacttccgctatatcatgctgccgcagatgtggattgaaagcctgcccgcgctggttaacgagatgtcgttcctgatcaagggtagcccggccattgcggtgattggcgtggtggatttgacgcgcgtcactaaccgaatttcctcggtcacctatgaacctctttcgccaattctggcggcgggtctactgtacgtggtgattattggcctgctgctgaaactgcaggggatggccgagcgtaaagcgaaacgtctggcgcgataa

SEQ ID NO: 257895 - DNA, 852 bp, Klebsiella pneumoniae
atgaacaaatcattaggttcaatttgtctgggcgccatcatggcgatggccttttcttatcacgcagcagccgcagatcttccggaaatagaaaaatccggcaccctgaaagtcgcgaccgaagatgattacgcgccttttaactttatgaataacggccaggcggatggctttaacaaagatatgctcgatgaattacgtaaatacacgaaattcaacgttgaccagagcattctgccgtggaccggattattggcggcggtttccaccgggcaatacgatatggcgttaaccggcgcggtgattaccgacgaccgtctcaaggtttttgatttcacgccgccgtgggcgtcagcgcagcactattttgttaaacgcgcgggcgataactccctgaacaccattgccgaactgagcgggaaaaaagtgggcgtccaggcgggcagcgcgctgctggcgcggctgccggaactgaaagcgatgctggagaaaaccggcggcaagctggggccggtggtggagtatccctcctatcctgaagcctacgccgaccttgccaacaaacggctggattacgtgattaacgtggttatctcagtcaacgatctggcgaaggccaaaccgaaggtgttcgccaaggggctggcggtatccggcccgggctatatggcgtggccgatcccgaaaaactcgccgcagctgctggcctatatgaccaaatttatgaaccacatgaaggagaccggcaagctcgcggaactacagaaaaagtggtttggcgaaacctatgacgatcttccgaacgtgccaatcaccagcccggaacagttccataaattagccggtctgtaa

SEQ ID NO: 257896 - DNA, 642 bp, Klebsiella pneumoniae
atgcagcagctctacatttatattctgatcgccagtttgaccattgccagtcccggacccggagtattactgacgctgaccaacacgctgaattacaatctgcgtaatgcgatggcggggatcatcggcgtggcggttggaatgggggtcatctcgattattgccgccagcagcgttggcgtgctgattaccacttctcagctgacgctgttgatcgtcaagggggtcggggcggcctatctgatctatctgggcataaaactctatcgctcggtgccccgcgtactgaatcaacctctctcgtcttcagaggatgtgataccttccgccagctaccggtttcgtcaggggttgctggtgtcgctatttaatcccaaacccattgtgttttttatggcgctgttcccccagtttattcatccccagcagccctttattccgcagttcagcgtgctgtcgataaccttctgtattctggttgttgtcattcattcactctacggccttttcgcacacagcgtaaaaacgaaaatgtcgtccgggaatgcctttgttaagttgaataaaaccggtggcatcgtctttatgtgttttgccgtcggtctgattgtttccgccgttcacccttatttgtcatcatga

SEQ ID NO: 257897 - DNA, 549 bp, Klebsiella pneumoniae
atgcgcctgatggaaggccagcaggcggtgaaactcacggcggcgcaggccgaacagctccagccgctgctgctgaaaaatattgacgagcgcggcaaaggcacggtcagccgcgactgggtcggtcgcgacgcgggcaaaatcgccgcggcgattggtctgcaggtgccggcgcaaacccgcctgctgtttgtggaaacgcccgccagccatccgtttgctgttactgaactgatgatgccggtgctgccggtggtgcgggtggcgaacgttgaagaggccatcgccctggcggtgcaactggaaggcggctgccaccacaccgcggcgatgcactcgcgcaacatcgacaacatgaaccagatggcgaacgccatcgacaccagcatcttcgtcaaaaatggaccgtgcatcgccgggcttgggctgggcggcgagggctggaccaccatgaccatcaccaccccaaccggggaaggggtgaccagcgcgcggaccttcgttcgtctgcgccgctgcgtgctggtggatgcgtttcgaatcgtataa

SEQ ID NO: 257898 - DNA, 840 bp, Klebsiella pneumoniae
atggcgcacgacgaacaacgctggctttcgccgagactacaaaaagccgctgccctgtgtaaccaggcgcccgccgccagcgagtcgccgctgtggctgggcatcgatttgggcacctgcgacgtggtgtcgatggtggttgaccgtgacggccagccggttgcggtatgccttgactgggccgacgtcgtgcgcgacggcatcgtctgggatttttttggcgccgtcaccctcgtgcgccgacatcttgcgactctcgagcagcagctgggctgccgcttcacccatgcggcgacctcgtttccgcccggcaccgatccgcgcatttcgatcaatgtcctggagtccgccgggctggagatcagtcatgtgctggatgagcctaccgcggtggccgatctgctgcagctcgataacgccggggtggtggatatcggcggcggcaccaccgggatcgccatcgttaaacagggcagggtgacgtattcggcggatgaagccaccggcggccaccatatctccctgactctggccgggaatcgcggcatcgggcttgaggaggcggagcagtacaagcgcagccacgccggggagatctggccggtggttaagccggtgtacgagaagatggccgaaattgtcgcccgacatattgccggacaagggattgtcgatttgtggctggcaggcggcgcctgtatgcagccgggcgtgcatgagctgtttcgtcagcgcttcccggcattaccggtgcatttgccgcagcacagcctgtttatgaccccgctggcaatcgccaacagcgggagggaaaaagcggaggggatgtatgcaagctga

SEQ ID NO: 257899 - DNA, 783 bp, Klebsiella pneumoniae
atggcgcaaaataaggtcattttagaggtacaggacgtgaccatgcagttcggcggcctgcgggccatcgacagcgtcagtttccacgtcgacgaggcggaaatttttggcctgattggccctaacggcgcgggcaaaaccacgatgtttaacgtgattaccgccaactataaaccgaccagcggcagcgtaaccctggcgggaaaatcgctaaaagggctgaagccgaaccgggtggtcaacgccgggatcgcccgcacctttcagaatatccgcctgtttaactcgatgacggtattagaaaacgtgatggtcggcctcgacagcgccagccgctattcgctgctggaagcggcgctgcatattggccgctacttccccgccgagcgggcggcaaagaccaaagcgatggcgattctggacgatatcggcatcgcccatttcgccgacgtgcaggccaccaacctcagctacggcaaccagcgcaaggtggagatcgcccgcgcgctggcgacgtcgccaaaattactgctgctcgacgaacccgccgccggaatgaacccgaaagaaacggaagatctggcggatctgatcttccgcatgcgcaacgactaccggctcagcgtgctgctgatcgagcacgatatgccgttcgtcaacaagctgtgcgagcgggtgatggtgctggagtacggcaaaccgctgttcagcggcctgatgtccgaagccattcaggatccggacgtgatttccgcctacctgggggacgttcgttatgcttag

SEQ ID NO: 257900 - DNA, 696 bp, Klebsiella pneumoniae
atgcttagcgcgcgcgagttaaaagtgttttacggcgtgattcaggggctgaaaggggtggatattgatattcacgaccgggaaatcgtgaccttaattggcagtaacggcgcgggaaaaacctccaccctcaacgggatcgtcaacctggtgcgttccaccgggcgggtcaattttctcaacgaggatatttcccgcagccagacgcatcagattgtgcgtaaggggctggcgctggtgcccgaggggcgacgcatcttcaccaacctgaccatcgaagaaaacctgcgcatgggggcctacaacaacctcgccggctttccccgcctgtgcgatcgcatgtacagtctgtttccccggctgaaagagcggcgtacccagatggcggggaccatgagcggcggcgagcagcagatgctggcgatcgccagagcgttgatgagcgagccggtactgctgatgctcgatgagccaagcctcggactggcgccgaaaattgtcggtgagctgttcgcaacgattaagcagctgcgggaggagaatattaccgtgctgctggtggagcaaaacgccacggcggcgttgaccatcgccgatcgcgcctatgtgctggagaatgggaagattatgctctctggcccggcggcggaggtgctggcgaatccggagattaagcggatgtatcttgggggataa

SEQ ID NO: 257901 - DNA, 810 bp, Klebsiella pneumoniae
atgcgcattgcaaaaacaaaaatcgcgctggcgctgggcatgctggtgctcgccgcgcaggctcaggccgatcaattagccgatatcaaagccgccggggtggtcaaagtcgccaccttcgacgccaacccgccgttcggctcggtagacccaaaaacgcataaaatcgtcggctacgacgtggacttcgccgaagcgctggcgaaatctctcggcgttaagctggagctggtcgccaccaacccggccaaccgtattccgctgctgcagtccggtaaggccgacctgatcgtcgccgatatcaccatcaccccggagcgcgcccaggtgattgatttctcaacgccttacttcgtgaccggccagcagttcctcgtcccggcgaaatccccggataagcttgatgattacagcaaagcgcgcatcggcgcggtaaaaggcactaccggcgaacaggcgctgcatcagcgtttcccgcaatcgcgcgtactctcttatgacgacattccgctggcgctgaccgccctgcgcaacggcaacgtgcaggccattacccaggacagcaccatcctcgccggactgctggcggaagcgcccgacaaggccaacttcaaaatcatccccgacctgctgagtaaagaagagattggcgtcggcgtgaagaaaggcgaaccggccctgctgaaagcggtaaatgacgagctggtcaagctggaaaaatccggtgaagcggcaaaaatttacgacgtctggtttggcccgagcaccaaaaccccgcagccgcgcgcctttactatcgaagctaaataa

SEQ ID NO: 257902 - DNA, 684 bp, Klebsiella pneumoniae
atgaacgctaatctggcggtgatcgttgataacctcgattatctgctgtggggacggctggcggacggtattcccggcggcgtggtgctgacgctgctgatggcgatcggcgccgccgcgctggctttgccgggcggggtcctgctggcggggatcgcctggcgctacgacgggatcgtgcggcggctgctcttcctgtgggcggaggttattcgcggcatcccgctgatcttcgtgattttctggctgtggtatctgctgcccatgctcaccggcagcgatctgccgggcgcggtcaccgtcacggtggcgctggcgtggtttaccgccgcgtcggtgatgcattcggtgctggcgggcctgcaatcgcttcccggcgggcaatacgaagcggcgctgacccagggttttacccctggacagacgctgcgcctgatcctgctgccgcaggccctgcgtaacgttcagccctcgctggtaggaatattgatcggcctgctcaaagacacgtcgctggcgtttatcgtcaacgtaccggaattgaccaccgttgccggccaggtcaataaccgagtgcagatataccctctggcgatatttgtctttaccggcgcggtttattatctactgtgctgcggcctgagcctgctggcgaaccgtcgctatgccggtcgtgcggcttag

SEQ ID NO: 257903 - DNA, 1644 bp, Klebsiella pneumoniae
atgaaagctaaatggctggcatgtttagtcatgttaacggcggcgctgtgcgtgacgcgggtcaacgctgcggtaaacaaaaccacctggcccgatgcggcggccatgcagtttgtttttgtggaaaacaactcggacgataacttcttcgtcacccccggcggcgcgctggacccgcggatgaccggggctaaccgctggaccgggctgaaatataacggctcgggcaccatttatcagcagagcctcggctatatcgacaatggctataacaccggcctgtacgctaactggttcttcgatatgtggctggataactcgccggcttcccatcctttgaccggcctgcgctgcatcaactggtatgcgggctgcgatatggcgaccagcctgatccagccgcaaaccagcgatgccagcggcttctacggcgcaacggtaacacccggcgggcaaaagtggatgcacggcatgatgtccgactctttctaccagtatctgcagcagatgtcggtgggcagcagcttctcaatgaccatcaactcctgcatgacgtcggtgagctatgacgccagcagcggcgcacgctgcaaagaccaggcctcaggttactggtacgtacgtaatgtcacccatactaaagcggccaatctgcggttaattaatacccatgcgctggcggaagtctttatcaacagcgacggggttccgacgctgggtgaaggcaacgccgactgccgcacgcagacgattggcacgcgttccggtctgagctgcaaaatggtgaactacaatttgcagcataatggcctgagtaatacctcaattcatattttcccggcgatcagcaactcggcgctggcttccgcggtgggaagctacgatatgcagttcagcctcgacggtaactcatggaagccagtaagcggcatcgctcagtactatacgtttaacgagatgaaatcatcagattcagtgtatgttttcttctcaagcaacttttttaagcagatggtgacgctgggcatcagcgacgtgaacactaaggacctgtttaatttccgtttctataacaccacctcgccggagtcagggtggtatgagttttcgacgtccaacacgctgatcattaaaccgcgtgacttcagcatcagcattatttccgatgagtatatctcaacgccgacgcgtgagggctacgtgggtagcggcgaaccgtcgctggacttcggctatattgtcaccaccagcggtaagaccgccgccgatgaagtgcttatcaaagtgaagggaccaacgcaggcgatcggcggacgttcatactgtattttcacttcaccggacggtacgtcgagagtgccgttcccggcgaccctggcgtttaccacccagaccggggctatcaaaacgtatgacgccggatgtgatgatacctggcatgatatgaccgatgccctgtggttaaccacgccgtggacggatatttccggcgacgttgggcagatggacaaaacgacggtgaagttttccattccgatggataacccgatatcgttgcgcacggtggaagataacggctggtttggtgaagtgagtgcttcaggagaaattcatgttcaggcgacgtggcgtaacattaactaa

SEQ ID NO: 257904 - DNA, 246 bp, Klebsiella pneumoniae
atgcggatttggtcgatacagtttatcgcgcccccatgcgtccgcgcgaaggggctgcacgggaagcgttcgaccgcaaaggccgtactcactacctgcgccgccggcttcaaaccctacctgcgtttatccgcaagcgattctctctgcgtctggaatccctcgaacgccgggatccgaaagaggccgtgcgctggctgcttggcacatttgagcgccatgtattacgccgcgtcgatgcggtaa

SEQ ID NO: 257905 - DNA, 366 bp, Klebsiella pneumoniae
atgaacaaggcatttcaatatttcctccatgcactcagaagcgcaataccggcgcttggatacgactacccattcgaccgccagtggagcgccacgctcgatcaaattcttgagggcggccaactgatatctagtgacgactgcacagcactgttcatttttgagcatcaggagtgggaggtgtgggtgggaaacccttggtatgcgtacgcctacctgcggagaaggaatggcgagtacctcgacggacaccttcgagccagaccgagatttaaaacaatgcttcaacttcatgaggttgttcaaggaagcactccaccaaagcaaaggtggaaagatttctataaccaggtgattaacaaatga

SEQ ID NO: 257906 - DNA, 195 bp, Klebsiella pneumoniae
atgaaccgatcacctgaatacgcccagggtgcagtggcggcactgagggaagcaaaggccgtcagcattaaaaacgcggtagcggtaggaactcttgagagcgcagccattggccgactgatgatccagttggctctactgaccttcgatccgcttatcgccaaatacatcgctatggaggtgaatcgtgattaa

SEQ ID NO: 257907 - DNA, 225 bp, Klebsiella pneumoniae
atggggattaagtcaatcaagctggatggtggaataagcgatccggaatttgtggaaataagcaccaacgcacggaaatgcgaacgcgctcacctgctgggcctgctgcgtatttatgtaggacagctgaaaaaggaaagcgccaccccggaagagatttattcatcaatcgaacagtgggccgatgcccgcgaaatttcaatcagtgagggtaacaagcaatga

SEQ ID NO: 257908 - DNA, 684 bp, Klebsiella pneumoniae
atgaatgtaaaaattcaaaaaattaatataattcaaataaatatatacaatttcaatacatttcctgatgaccgaattagaggactaatcagtgagctcaacgttcactatgagaaaataaataactaccttgaggcgaaggtttcgggggaagcactaaatgtagaagttattaactccctagcaaagttaaaggaaattgacaggcttgcgccattactaattgatagaaatcgtcattttaatgactttaagttgggtgtggatctactaaactctgttattgcacttctcggaacagatgctgggcatcaaagcactaaaagtaatcttttgactttaggccgctctcttctcggtaagctttacagtatttcttatgacgagctgcttgattctgctttacgatatcagtggttaaaaagtaaaaatttggttaaaagccacaacatcactctctggagaactaataatggcaactataattcagctagaattaagtttgagccttcagattttgagctaaatgattattttactagaaatcaacaaagaatttttgagtatatggtttttgaaatgactccagacaaacaagaaagcgatccattttcaaatttgcagaatgttgatttctatcattatcatacgttattaagccagtttgaaaaaaaacaagtgtag

SEQ ID NO: 257909 - DNA, 1563 bp, Klebsiella pneumoniae
atgtctgtcgtggaaatgtcgtatggccgcgccctgtggcgcaactttcttggtcagtccccggactggtacaaactcactctcatcattttcttaatcgttaatccgctggtcttttatcttcatccgtttattgccgggtggctgctggttatcgaatttattttcaccctggcgatggcgctcaaatgttatccgctgctgccgggcggtctgctggcgatcgaagcggtgtttatcgggatgaccacgcccgggcatatccgggcggaagttgccgctaaccttgaagtcctgctgctgctgatgtttatggtggcggggatctatttcatgaagcagctgctgctgttcatcttcacccgtttgctgctcggcatccgcagcaagatgctgctgtcgctggcgttttgcgtcgcttccgcctttctttccgcatttcttgacgcgctgaccgttgtcgcggtcgtgattagcgtcgccgtgggtttctacggtatttatcacaaagtcgcttcggcgcggccggacgatgacgatatgctcgacgacagccatatcgagcagcactatcgcgatgtcctggagcagtttcgcggcttcttgcgcagcctgatgatgcacgccggggtcggcaccgcgctcggcggcgtgatgacgatggttggcgaaccgcagaacctgattatcgccaaagccgcgggctggcacttcggcgaattcttcatgcgcatgctgccggtaagcttgccggtgctggtctgcggcctgctcacctgcctgctgctggagaaattccgcctgtttggctacggcgaaccgctgccgccaaccgtgcgtaaagtgctgcaggattttgacgatcgtagccgtcagagccgcagccgacaggatcgcctgcgtcttatcgcccaggggattatcggcgtttggctaatcatcgccctggcgctgcaccttgcggaagtcggtctgattggcctgtcggtcatcattctggcgaccacgttttccggggtcaccgatgaacacgccatcggcaaagcgtttaccgaagcgctgccgtttaccgcgctgctgacggtctttttcgccgttgtggcggtgattatcgatcagcacctgtttgcgccggtgatcgaattcgttctccaggcctcgccgcacgcccagctgtcgctgttttacctgtttaacggcctgctgtcgtcgatttcggataacgtcttcgtcggcaccgtctatatcaacgaggtcaagtccgctctggagcagggaaccatcagtttgccgcagttcgagctgctggcggtggcgatcaataccggcaccaacttgccatcggtcgccacgccgaacggccaggccgcgtttctgttcctgctgacttccgcgctggctccgctgattcgcctctcctatggccggatggtgtggatggcgctgccgtataccctcgtcctgaccctcgtcggcctggcctgcgtcgagtttaccctgatgccggctacccagtggatgctggagcacggttggctggtgacgccgcagctgctgaaataa

SEQ ID NO: 257910 - DNA, 270 bp, Klebsiella pneumoniae
atggcattactcgacttttttctctcgcggaaaaagaacacggccaacattgcgaaagagcgcctgcaaatcatcgtcgcggagcgccgtcgcggcgacgcggagccgcactatcttccgcagctgcgtaaagacattcttgaagtgatttgcaaatatgtgcaaatcgacccggaaatggtcagcgtgcagcttgagcagagagacggtgatatttcgattctggagctgaacgtgaccctgccggaaactgaagagtcgaaatcctga

SEQ ID NO: 257911 - DNA, 348 bp, Klebsiella pneumoniae
gtgatcaacggcaactaccatcccagctccggctatgagatgttcgccgccctctgcgcgcgtctgggtcggccgccaaaggcgctgtttaccgccgcctgcgggctgctggaaggggtgctgcgctatatgagccagcaccatttgctcgattcagacatccacctggcgagctttgacgatcactatctctacgattcgctgtcgctgcgtatcgataccgtccagcaggacaaccgccagctggcctggcactgctacgatttgataagccagctgattgacggcaacacgcccgagccgctacagcgctacctgccggcgacgctgcagtttcggcatcggtga

SEQ ID NO: 257912 - DNA, 729 bp, Klebsiella pneumoniae
  misc_feature (710)..(719): n is a, c, g, or t
atgaaaaccaaacgcgtaaccattaaagatatcgccgaactggcgggcgtttccaaagcgaccgccagcctggtgctcaacgggcgtggcaaagagctgcgcgtggcgcaggaaacgcgcgagcgcgtgctggcgattgcccgcgagcagcactatcagccgagcattcacgcccgctccctgcgcgataaccgcagccacaccatcggcctggtggtgccggagatcaccaactacggctttgcggtcttttcccatgagctggagatgctgtgccgcgaggcgggcgtccaactgctgatctcctgtaccgacgaaaaccccggtcaggagagcatggtggtcaataacatgattgcccgtcaggtcgacgggttgatcgtcgcctcctgtatgcacgccgatgccgactatctcaagctcagcgaacagctgccggtggtgctgtttgaccgctacccgaatgaaagcgccctgccgctggtgatgaccgattcaattaccccgacggcggagctgattgcccgcatcgcgcctcagcatcgcgatgagttctggtttttaggcggccagccgcgcctgtcgccctcccgcgatcgtctggccgggtttacgcaaggtctggcccaggcgggtattgaattgcgcccggagtgggtgatcaacggcaactaccatcccagctccggctatgagatgttcgccgcccnnnnnnnnnngagtgggtga

SEQ ID NO: 257913 - DNA, 471 bp, Klebsiella pneumoniae
atgaaaaagattctttcactggcgattattttatcttgtgcgttgacttccgtctcctgggcggatggtcctggcggcaacaaccacggtcagcagcaggtctggcagcaagacgccgggcgcggcggcccgaacggtaaccgtcagcaggggccgcaggctaacaaccatcagggcaacggcgataaccgtggcccggcgcatggtgacaaggggccgcagggtaaccctcatcaggcgcgtcatgagcaggaccactttgcgtggaacgggcattatttccgcaaaggtcatccggcgccggaacgttttcgcggcaatgattaccggataaacgactggaacgatcgcggattaccggcaccgccgcgcgggcagcactggtcctatattgatggcaactatgtgctaattgccgccgcgaccgggattattacgtcgatcctgattaacggcgcgctgagtcactaa

SEQ ID NO: 257914 - DNA, 213 bp, Klebsiella pneumoniae; identical to SEQ ID NO: 188401

SEQ ID NO: 257915 - DNA, 984 bp, Klebsiella pneumoniae
gtggacgccattaagggatcggaactgaacgtgccggatgccgtttttgcatgggtgttcgacgggcagggcggcgtaaagccgttggtcgatagtgacaccattgataaagagcatccttgctggctgcatctcaactatacccatgttgatagcgcggaatggctggcatcaacgccgctgctgcccaataacgtgcgcgatgcgctggccggcgagagcactcgcccgcgagtgacgagaattggcgatggggcattaatcacgctgcgctgtattaacggcagtaccgatgagcgcccggaccagctggtcgcgatgcgtctttatatggacgagcgtttgattgtctccacccggcagcgcaaagtcctggcgctggatgatgtgctcggcgatttgcgtgagggcaacggcccgattgacggcggcggctggctggtggatgtttgcgatgcgctaaccgatcacgccagcgagtttatcgagcagcttcacgaccggattatcgatctggaagatgatttattggatcagcaggtcccaccgcgcggtttcctcgcgctgttacgtaaacagcttatcgtcatgcgccgctatatggcgccgcagcgtgatgtgtatgcaaggcttgccagcgagcgtctgccgtggatgacggacgaccatcggcgacggatgcaggatattgccgaacgtctggggcgaggtctggatgagattgatagctgcatcgcccgcacggcgattatgagcgatgaaatcgcgcaaattatgcaggagtcgctatcacgtagaacctatacgatgtcgctgatggccatggtttttctacccagcacttttttaaccggactctttggcgtcaacctcggcggcattcccggcaatagctggcatatgggtttttctattttctgcataatgttagtcgttctcattgggggtgttacatggtggttgcatcgtagtaaatggttgtaa

SEQ ID NO: 257916 - DNA, 609 bp, Klebsiella pneumoniae
atgttgaatatcgtcattaaaaataataatcagttttttaatttaggattgcactttatattacagggcctcttcccggagtacgcattatctacgcaatgtgccacatcgcttaatgaacggatcgtgcaggatgctgatgtggtcgtgctggatttatgccgcggagcagaattcgtatgtcatcccgagttgttaaatcggaaaccgggattgctgattggtttggttgccaggcgaaaccgacggggaagagccgctttgccgctctgtctgaaagagatcgtctttgttgggcgcgatgagaaaatctctcaggttatggcgaaaattaaactctcatggattctgcccccaccgtcagcggaagaaaaatcggtgttgcgatgcgagcgttgcccgcagaggaaactatccccacagcagcgaattatcgcggcggcaatctatcaggggttaacggtgaacgcgattgcccgaaaactttcgctttgcaataaaacggtttttgcacacaagcgccagattatgtctaaatttcatctacgcaacgatttagacctgctgctattgctgcgctatctgaatagcgctaaaggtcacggttaa

SEQ ID NO: 257917 - DNA, 1266 bp, Klebsiella pneumoniae
atgtttgccctggtcgatgtgaattcattttatgccagctgtgaaacggcctttcgccctgatttacgcgggcgtccggtggtggtgttgagcaacaacgatggctgcgtcatcgccaggaatcacgaggctaaacggctggagattccaatgggcgcaccctatttcaaagtgaaatcacagtttgagcgccatcaggtggcggtgtttagcagcaactatgccctatatggcgatatgtcccgtcgggtcatgacaattctcgaagagctggcccccgcggtttatcaatattctattgatgaagcgttcgtgaatttgaccgggatccatcgttctgaggagcttgagtcatttggtcgccatgtgcgtagtacattactccagtgtaccggcctgacggtgggggtggggatcgggccgacgaaaacgctggctaagctggctaattatgcggccaaaaggtggccaaaattcgagggcgtggtcgatctctcctcaccggtcaggcagaaaaagctgctggagaaggtggtcgtcggcgaggtctggggagtagggcgccgcatcgcgaaaaagctcaatgagatggggatcaacacggcgcttcagctggccgagacgcccgcttcgcttatcagaaaacatttcagcgtcgtgatggagcgcaccgtgcgggagctgagaggcgagccctgccttgagcaggaagagtatatgccgactaaacagcaaattatctgctcgcgttcattcagtcagaaggtgagcgaatacgagtcgatgcgcgaagccgtatgcagccatgcggtccgtgccgccgagaagctgcgcgcggagcatcagttctgccgctatgtttccgtttttgtgaagaccagtccgtttgcgggtcatgaagtctattacggcaatgatgccggcacggaaatccacatcccgacccaggatagccgggatatcatcgcggcggcgctaaaatgcctggacgccatctggcgagagggataccgatatcaaaagtgcggcgtgatgctgggcgatttctttagccagggggtggcgcagttaggcctgtttgacgactatcggccgcgcgcgaatagcgaacggctgatgacggttcttgattctgttaaccgacgtgaaaaaggccggctctggtttgccgggcaggggatagagcgcagctgggagatgaagcggcagatgctgtcgccagcctacaccacccggctcagcgatttgctgcgggtgaaactgtag

SEQ ID NO: 257918 - DNA, 195 bp, Klebsiella pneumoniae
atgtattacacgttaggagacaaaactctccacttttatcgctatcagtgccgcttttatgtcgctcattgggacggagggcacgtgatgacggagaagttcaagccgtttattgcctcaatcaccgagaaaaccggcattgaggcaaagaacgttgaggcggcggcgcgggactacttcaataacgtcgactga

SEQ ID NO: 257919 - DNA, 192 bp, Klebsiella pneumoniae
atgggaacagttaaagccagcaatctggaacaggcaaagcagcttctgcagtccggcgacgccattaaactcgaactggatttcgagctcgactctgatgaattttttaattttgctatcgagtactgtacgaatggagcgaagcttacgcgagccggcgatcgcttcctgatttcacgtaaaaaaaagtag

SEQ ID NO: 257920 - DNA, 303 bp, Klebsiella pneumoniae
gtgaaaaaactattaatatgctgtttgtttggcgaaacggcagggattattgctcgtagaatgcaaaaaattgctgacgatcggcaactggatttattaatcagcgccgttggggttgaaaacttctttagcgtcgctccggcttatgatgccgtgctggttgccccgcatatccagtataagatcgagcaattcactcgcgcaccgcatgcaccacaagacattgccgttattgaaagcttgccctatgcctcatttgatggtgagaagatccttaacttcgccctgaatacgctgttgtaa

SEQ ID NO: 257921 - DNA, 582 bp, Klebsiella pneumoniae
atgaaaaagacgcttattacgttaattattgctcatgcttttacggcgacggccgcttttgctgctgcggagacaggaacctggtacgcgggatctaaatttggctggtcgcactacggcgattccagcaccgatcggcaagtcgatgtcgaccgcgataacgtcggcggcggtgtgtttaccggctatcagattaacccctggctggcggttgaaggtggctatgactatttaggcaatatgggcatcaatggtcgccatggcgcatccggttcgcaaatgaaaagtcaggggctacagctttcgttgaaggccagctatagcctgaccagcgactgggatctttacggccgggcagggctgatgggctatcgcgcggaatccgatgtgaatggaaaaaatcgatttgataccggcgtgcgcccggtactggctttcggtaccgaatatgcctttaatgacagatggtcgggacgtctggagtaccagtgggtcaacaatgtgggtaacgaaaatcaaattggcgtgagcagcgacgttagctccatgatggcgggcatcagttaccgttttgggcaataa

SEQ ID NO: 257922 - DNA, 630 bp, Klebsiella pneumoniae
atgcatatcctaccgcccgtccgcccggaagagagtatccagcgtttaacggcgctcctgacgccaatagccgaaaaaatgatcgtcgtgccgcgaaaacgtatgacctggacgcataaaaatcaaccgcagctgtaccttttcctcaacggagagctttctatcctcagagcctcggacggtctgctgattgtcacggtttaccacccgcatctgtttggtattgccgagatgatccagccggtacgcggccatcagctgcgggcggaaaccgagtcgacaatactgcgcgttgatgcgcaaaaggcgatggaaacctttcgccagcatggcgtctgggaagatgtcgcctcattgttgtcgtaccacacggcttatcttttctatcgtgatgcattagtcgtccagcagcggacctacgccgttattcgcaaccatttgcaggagatggggcagcttcccgaagagacgcggatgcgcatatctattctggattatattcaggagcgtacccacttatcacgtagcagtgtattaaacgtattatcggcgttaaaaagtggtaactatattacgtttaaacgcggggggtatttgattggcgtgaataaattacccgagcggttttaa

SEQ ID NO: 257923 - DNA, 906 bp, Klebsiella pneumoniae
atggataagctggaatcaatgcaggtctatatgtgtgtggtggatacgcatagtttcgccagagcggcggaggcgcttgggctgccgcgctctacggtgtcgcgggtgattaagacgcttgaagcatacctggggattcagcttttacagcgtacgacccgcaagcttagcgttacgcctgacggccgccactattatgccgagtgcaaaaggcttctggctgagatcgccacgctggagtcctctttccccgggcggtccgcgcagcccagaggccgtttcaaagtcggcatgccgcagtcccttgcgcggcagagtattatccccaggctcccggcctttctgcagcagcatcctggtctggagctgatactttgctcaagcgatagcgtggaggacatcattcaggaagggtatgactgcgcgatccgcgcgggcaggatcgacgattcaacgaccctggttgcccggccgctcgccaacttttcatggcgggttctggcctctccggcctatattgccgcttatggtcagccggaaacgctcgatgatctggaaaggcatcgcgctgttggctatctggatcaccgcaccggcagaaccatcgagtggtttttcacgcttgctgaggaggattacgcgatccgcatgaaagagaccctggtcgtcgatgatacggacgcctacatacaggccgcaatacaaggacttgggttaatccgcgtcgccagctatctggccaggccgtacctgcgcagcggcgagctggttgcctgtctggataacgtctcttgtgctttaccgctttcgctggtttatccgcaaaacaggtaccttcctcctgcggttcgcgcgttttatgcctggagcaaagtggttttgcagcaggcggccgaggaggcctaa

SEQ ID NO: 257924 - DNA, 930 bp, Klebsiella pneumoniae
atggaagagcataatgtcgctacagatgaaaaagtattagtgctgggagcgggacaactcgggaccgccgtgctcgactcgctggtgccggcggtcattcaacggaatggcgctgtcagcgttatcgtgtcgcccggctcgtgggatgcgcggggaaaactgcgctccacggctcatcaaaaactggccgacaggggggcggaatttatcgccgtcgacgttgcatccagtacgccagcctcgctaaaagacctctttgcgaattttgctaccatcatcaactgtatgggatttgtcgctggggcgggtacgcagataaaaattacccaggcggcgctggaggccagggtgaaacgctattttccctggcagtttggggtgaattacgatgcggtcggaaaaggtagcggccaacccgtgtgggacgagcagtatgacgtcagaacgttattacgcgctcagaccgccacggaatgggtgattatttcaaccggcatgtttaccagttttcttttcgagccggcgttcgatgtggtcaatttatcccaaaataccctcaatgcgctcgggggatgggatacgcaaatcaccgtgacgtcacctgcggatattggccgcctgaccaccgccatttatttgtttgaaccccgattaatcaatgaagtggtctttgtcgccggggaaacgacctcttatggaaaactggcggacaccgttgagcgcgtaacaaagcgaacctttacccggcaggtatttaccctgcccacgctactggaacagctgcgtatgaagccagacgatcggatgcttcgctatcgcgtcgccttcgcacgcggagatgggatgtggtggccgatgagtgaaacctggaatgtacaaaataatattccaacccaggatattgaatcctggcttagaagcgttatttaa

SEQ ID NO: 257925 - DNA, 912 bp, Klebsiella pneumoniae
atgcaaataaatctctttgaatcgattcgcatttttattgaaattgtcgaggcgggcagttttactcaggcggcggagaacctgcagattcatcgtcccgccgttacgaaagccttgcagctgcttgagcagcactgcggcacgcgtttgctgcagcgaacaacgcgtcgtattaacctgacgcctgacggggaagcgttttaccgtcagagcaaacctttgctctcccaggcggatgcgttgctggaatcgtttagtacagaccgggtattgcacggccagctgcgagtcgacatgcctgtcgcttttgcgacgttattggtcgttccccatctgcctgatttttatcgtcagcatcctggcgtcgaaatcatcctcagtagctcagaccgtcgtcaggatatgctgcgcgatgggcttgactgcctgctgcgggtgggagaactggacgacggggactatatcgcccgcaagttgggcagcatcaaaatgacgacctgcgccagcccggcctatattgcgagccacggcgcgccgcaaacgctggaggatttgcaggatcatcaggctatcaactgggttaacagcagcagccggcaaattatgccgtggacctttgcgacgccagaaggtatcgccgaaatgacgcttcccggtaagctggtcatcgataactctgaaacctatttatcggcaggcctggcggggctgggattagtccaggggatgaacctttttttacagccttatctcgaccgcggccttttggtggaagtcttacccgacaatccctcccccgatcgcaaactgtcactcttgtacccacaccgccatctctcacgcaaagtgcgggcgtttaccgagtggctagagagcttattacaaaaggcgcgatgcgacgttaaacagtaa

SEQ ID NO: 257926 - DNA, 1188 bp, Klebsiella pneumoniae
atgtccacactgagccgtactaccccccccacgccagcgcacgcccactggggcggcgtatttgccatgacgctgtgcgtttttgtcctcatcgcttccgaatttatgccggtcagcctgctgacgccgattgccagagatttaaacgtcaccgaggggctggcaggccagggcattgcgatttccggcgccctggcggtcatgaccagcctgactatcgccaaccttgccgggagcctgaatcgtaaatatctcctgctggggctgacggttctgatggcggcgtcgggtttgattgtcgcgctggcgtccagctatgcggtttatatggcgggaagggccctgattggtatcgtcatcggtggattctggtcgatgtcggcggccaccgccatcaggctggtgccgcagcgccaggttccccgcgcgctggcgattttcaacggcggtaacgcgctggcgaccgtcgtggcggcgccgctgggcagctacctggggtcaaccgtcggctggcgcggtgcctttttatgcctggcgccgctggcgatagccgccttcatctggcagtgcgtcagcctgcccgcgatggcaagcgataacgcgagccggccgcgcggctccgcgcttcgcctgttcagaacgcccatcatcgctatcggcctgctggcctgcggactcttctttatggggcagtttaccctctttacctacgtgcggccgtttctggaaacggtaaccggcgtcagcgcctctggcctgtccctgattttgctcgcgataggcatcgcgggttttatcggcaccctgggcgtttcaccactcctcaccgcccgattttatcagaccttaatcacccttcccttactgatggccgcgattgccggaacgttgctgctggcaggacaccacgcctgggccgtagccattctgttaagcctgtggggaatgctggcgacggcggcgccaaccggctggtggacgtggatagcgcggacgctgcccgacgacgcggaagcgggtggcggattgatggtcgccgtgattcagctgtcgattgcgctgggttcgacggcaggaggcgtggtatttgaccgcatggggtggcaaagtgcttttggattaagtggaatattgctgcttgccgcggtcggaataacggcgctcaccggccgccaggcgaggaagtag

SEQ ID NO: 257927 - DNA, 345 bp, Klebsiella pneumoniae
atgaatctcaatcggtgttgttatttgctcctgatcgctgcggcgctcggcagcatttttacgtcctggccctttgctatttggctcctgctggtcaacgtcctgacgctggcgatttacggcgtggataaaatggcggcgcgcagggcctggcgcagggtaccggagtccacgttgctggtgtttgggttcgtgggcggctgggctggcgcgatagcgggtcagcagctgttccgccacaaaacgcaaaagcagccgttcaggacctggttcatcatcagcgcgatcgccagtctcgcagggatggcagcgatttatgagttctctcctttttcttttcactaa

SEQ ID NO: 257928 - DNA, 435 bp, Klebsiella pneumoniae
atgagtccttcgccctccgttctcagtcgttttactgagtactacgccatgctggatactcagccgccctcggcgctggccgcgctctatcatgcgaatgccgtactgatcgatccatttggccagcatcgggggctgtccgcgatccaggggtatttttcccatctgttagccaacgtggcgcggtgccgtttcgacatcgatacgccggtctgcaacgctcagcggtttgccgtcgcctggaccatgcactggtcgcatccgcgcctggccggcgggaaggcgttagaacttgcgggctgctcgatggttacggttgaagaggagcggattattcaccagcgcgactactacgacgccggggagatgctgtacgaacatcttcccctgctgggctgggcggtacgcggcgtcaagcggagggtgcggacatga

SEQ ID NO: 257929 - DNA, 720 bp, Klebsiella pneumoniae
atgatgacggtgcttatcaccggcgccagctccgggattggcgccggactcgccaaatccttcgccgcggacggccaccccgtcatcgcctgcggtcgcgatccgtcgcgtctggcggcgctacagcggcacagccccaacatcagcctccgctcatttgatatgacggacagggaggcctgtcgccaggcgctcgcggagtgccgggccgatctgatcattctctgcgccgggacctgcgaatacctcgaccacggaacggtagatgccgcgctggtggaacggacgatcgccaccaactttctcgggccggtgaactgcctggaggcgcttcagccgcagctgtctgtcggcaatcgcgtggtgctggtaagttcaatggcgcactggctgccctttcctcgcgccgaggcgtatggcgcctccaaagcggcgttaacctggtttgccaacagcctgcgcctggactgggagccgaaaggcattgccatcacggtggtctcgccgggattcgtcgataccccgctgacgcgcaaaaacgatttttccatgcccggccaggtgagcgtggagcacgcggtaaaggcgattcgccgcggtctggcgaaaggtaaaaatcatatcgtcttcccgacaggctttggcatgctcctgcgcctgctggcagggcttcccgaaggtctgcaacgcctactgttgcgcaggatggtacgctcatga

SEQ ID NO: 257930 - DNA, 486 bp, Klebsiella pneumoniae
atgaatcgcccggcgtcgctcctgctgacggccatcgcgttcgacctctactggacgctggtggtgctgtttcgcgagcgcggtctgttcatctggctggcgctggcaatcctctgctggctacggctaccgccagaataccgtgcgtctgcgctgctgctggccgccgcgggctgcgggctggatacgatctgggcgctatcggggctggtcgattttaacggcgataccctgctgcccctgtggatggccgcgctgtggctgatgttcgccgtcgtctggatccgcctgatctgtgccgcgacgttgccaggatggctgctggccctggcggcggcctttggcggcccgacggcatacctgctcggcgcctatctgggagcgatgactttgctggcgccgacggcggctgtcttcggcgcgatggcctgcggctggctggcaatgatgctcgtgttccatatggtgatggggaggcggcaatga

SEQ ID NO: 257931 - DNA, 456 bp, Klebsiella pneumoniae
atgatgaataatttacagcgtttcgaaagtctcggtgataattgtgagtttgctttctttctaagagagtcaggttatgatgaaggcagcttatttcgttggactttaataaaaaactatcatgctcttctaaaattaatcgaatctgattttgctgatttgtatgtttatgaaaacctgacgccctcctggcaggatatggtgcttgatcagcggcatgatatttgtttccatactgaaatgtatagcgataataaagatgatggctgggtctggcgttataccgaacaggaaaatgatcttatctattccagggaaatggataagattcattacttgataaataaatttaagaacagccttgctgatgagaataaaatttttgtcgtaaaaagcaatggcaataatcttgatgatatagtattcgctttagggaaggtgcgaacaagttcctga

SEQ ID NO: 257932 - DNA, 588 bp, Klebsiella pneumoniae
atgcatgcattaatcgtggtttctcatcctcttaatacttctctgactcacagcgttgcggcggcgattgcgcagggggttgccgaatccggctcgcatcacagcgctgaaattgccgatttaacccgggaaggctttagcccggtttttgccgaaccggatattgccgcctttcggcaaaccggcgctacgccgtccgatgcgatcgctgaacaggccagaatcgataacgccgacgcgctggtgctggtgtttcccatttactggtggtcgatgccggggctgctgaaaggctggattgatcgggtgttttcaaacggctgggcctatgaggaaaccgccgacggcaacgtagtgaagaagctgggacgcctgcgggtacatctggtggcattaggcgcagccagtcaacaaacgtatgacaagcacgggtttaccgatgcttttaatgcgcaaattgtccacggcatttttgattactgcggggctacggtcgccagttcacagatgttgctattgccggacctgcaaacgacggaagcgcatctggaggcggggcgccagctaggaaggaagatgtttggctga

SEQ ID NO: 257933 - DNA, 759 bp, Klebsiella pneumoniae
atgagtcatccgttactggcggtcaataatctgacccacctctacgcgccgggcaaaggcttcagcgacgtctcgtttgaactgtggccgggagaggtgctgggtatcgtcggcgagtccggctccgggaaaaccacccttctacaggcgatttccgcccgcctgacgccgcagcagggcgacgtgcgctatcagaaccgttcgctgtacgcgatgagcgaagcggatcgccgccgcctgctgcgcaccgaatggggcgtggtgcaccagcatccgatggacggactgcgccgccaggtgtcggcgggggggaatatcggcgagcgcctgatggcgaccggcgcgcggcactacggtgatattcgcgccaccgccgagcagtggttgcaggaggtggagatcccgccttcgcgcattgacgacctgcccaccactttttccggcggtatgcagcagcgtctacaaatcgcccgcaatctggtgacccagccgaagctggtgtttatggatgaacccaccggcgggctggacgtgtcggtgcaggcgcgcctgctcgatctgctgcgcggcctggtggtggagctaaacctggcggtggtgattgtgacccacgacctcggcgtcgcccgccttctggctaaccgtctgctggtgatgaaacaaggacaggtggtggaaagcggcttaaccgaccgggtgctcgacgatccccatcacccctacacccagctgctggtgtcgtcggtgttgcagaactga

SEQ ID NO: 257934 - DNA, 693 bp, Klebsiella pneumoniae
atgaacgccatccgcgttgaaaacatccataaaacctttgttctgcaccagcagcacggcgtccgtctgccggtcctcgccgacgcctcgctgaccgtgaacgccggtgaatgcgtggtgctgcacggccactccggcagcggcaaatcgaccctgctgcgttcgctgtacgccaactatctccccgatagcggccacattcatattcgccacggcgacgaatgggtcgacctggtcaccgccacgccgcgtaaagtgctggaagtacgcaaaactaccatcggctgggtcagccagtttctgcgggtgatcccgcgtatctccgccctcgacgtggtgatgcaaccgctgttcgaactgggcgcctcgcgcgaagagagcgccgcgaaagccgcccgcctgctaacgcgcctgaacgtccccgaacgcctgtggcacctcgccccctcaaccttttccggcggcgaacagcagcgggtcaacattgcccgcggcttcgcggtcgactacccgattttgcttctcgacgaacccaccgcctcgctggacgctaacaacagcgccgcggtggtggcgttgattcacgaagccaaagcccgcggcgcgggatcgtcggtattttccacgacgaggccacgcgcaaccaggtcgccgaccgcctgcacccgatggggatttcagcatgattattaa

SEQ ID NO: 257935 - DNA, 1062 bp, Klebsiella pneumoniae
atgattattaataacgtaaagctggtcctcgaagacgaggtggttaacggttcgctggaagttcacgacggcagaatctcagcctttgccgaaagccagagccggctggcggaggcggttgacggcgaaggcggctggctgctgccggggcttatcgagctgcataccgacaacctggacaagtttttcaccccgcgacccaaggtggactggcccgcccactcggcgatgagcagccacgacgcgctgatggtcgccagcggcatcaccaccgtgctcgatgccgtggctattggcgatgtgcgcgacgccgaacaccgactgcatctgcgctgcgaactgccgcatcacaccaccctgccgctgtttgagaagctggtaggccgcgagccggtgagcatggtctctctgatggatcactcccccggccagcgccagtacgccgacctcagcaaatatcgcgactactatcagggcaaataccatctgaacaacgaacagatggacaacttcgaacaggagcagatggcgctggcggcagcctggtcgcagcccaaccggcagcgcatcgccgctatctgccgcgagcgcaatatcgcgctggccagccacgatgacgccacctgcgaacatgtgctcgaatcacgccaacttggcagcaccatcgccgaatttcccaccacccttgctgccgcggaggcgtcgcgccggcacggcatgaacgttctgatgggcgcgccaaatatcgtgcgcggcggttcccactcgggcaacgtcgccgctcaccagctggcggccagtggcctactggatattctctcctccgactattatcccgccagcctgctggatgccgctttccgcatcgccgacgacgggggcaacgcctttaccctcgcgcaggccattcgcctggtaagcaaaaacccggcgcaggcgctggggctgcatgaccgcggggtgattgccgaaggtaaacgggcggatctggtgctggcgcaccgtcgcggcgagcatatccatattgatcgcgtctggcggcaaggcaagagggtcttctga

SEQ ID NO: 257936 - DNA, 333 bp, Klebsiella pneumoniae
atgaaacgttactctactgctttgcttttctgcgctctttccttcgccagccagctggcgcacgccgatattattgacgacgcgatcggcaatattcagcaggccattaatgacgcttatcaacccaacggcagccgttccgatgacgatgattatgatgatggacgctatcagggcagccgtcagcaaaacgccgatcgccagcggcagtatgacgatcaacggcgacagctggaagatcgtcgccgcgaacttgatgagcgtcagcgccagctggaccgggaccgccgtcagctggaaagcgaccagcgcaggctggatgatgattattga

SEQ ID NO: 257937 - DNA, 1986 bp, Klebsiella pneumoniae
atgaataacttgcagttattccgtttgaacaggacttttattgccattgctgtcgcaacagggttattagttaacacctcttttgcgagcgagaccgcccagccagccacgcaatatacgcagcaaattaaccagcaatatacccagtcgctaccctttaacgaccgtcaggactttgatgatgcgcagcggggatttatcgccccgcttctcaatcaaggtattctgaaaaatgctgatgggaaaacctattatcggggggaggattataaattcgatatcaatgcgccagcccccgacacggtgaaccccagcctgtggcggcagtcgcaaatcaacggtatttccggcctgtttaaagtcaccgaacgcatgtatcaggtccgcggccaggatatttccaatattacctttattgaaggcgatacgggtatcatcgttgttgatccccttgtcagcccggaggccgcaaaatccagcctcgacctctactatcagcatcgcccgcaaaaacctattgttgccgtcatctatacccatagccacaccgatcactatggcggcgtcaaaggtatcgtcagcgaagaggatgttaaaacaggcaaagtgcaggttattgctccagccgggtttatggaagaagccatcagcgaaaacgtgctggccgggaatattatgaaccgccgggttctctactcttatggtctgttgctaccccataacgctcagggcaatatcggcaacggtctgggcgtcaccatcagcgcgggcaacccaacgatcatcgccccgaccaaatcgataaccaaaaccggtgaaaaactgaatatcgatggcctggaatttgactttttaatggcgccgggcagcgaggcgccatcagaaatgcacttctatatcccggcgcttaaagcattatgtaccgcagaaaataccacccatacgctgcataacttctacaccctgcgcggcgctaaaacgcgcgataccagtaaatggaccgattacctgaatgaaacgctcgatatgtggggcagtcaggctgaagtgctgtttatgccgcatacctggccggtctggggtaaccagcacattaacgactatatcggcaaatatcgcgacaccatcaagtatatccatgaccagacgctccatctggctaatcagggctatacgatgaacgaaatcggcaacatgattaagttgcccccagcgctggagaataactgggccagccgcggctactatggttccgtaagccacaacgcccgcgcggtttataacttctatctcggttactttgacggcaacccggccaacctcaacccctacggccaggtcgatatgggtaaacgctacgtcgaagcgctgggcggcgcaaaacaggcaattgagctggcgcaaaaagcttatgacaagggcgactatcgctggacgtcagaactgctcaagcaggtgattgccgccgaaccgcaaaaccaggcggcaaaagatctgcaagcgaattcctttgagcaattgggttatcaggcggagtccgcaacctggcgcggtttctacttaaccggcgcgaaagagctgcgcgaaggcgtgcataaactcacccacaatacctcaaattcacccgacaccatcaagggtatgacggtcgaaatgctgtttgattacatggcagtccgtctggatagcgagaaagcggcaggcaaaaatatcagcctgaatttcaatcttgatcgaggcgaaaccctgaatctgacgctgaacaatagcgtgctcaactatcgccaggcttctcagcagaagcccgatgcatccttcactatcagccgtgctgacctgcacgacgtgttgaccggccaggccaaaatggccgatctgctgaaaacagggaaagccaaagtcaccggcgaagcggcaaagctggatgaaatcttttccacgctcgatcaatttgaactgtgggtgaatatcgttacgcctaattaa

SEQ ID NO: 257938 - DNA, 276 bp, Klebsiella pneumoniae
atgcaaacggttaaatccagtattgtgatgcagctaaaaaatatatgctggctcactccggccgcattgttgacgggatgtacattatctccggcaattccggtcattggcgcctattatcctggatggctcttctgcattattgccggagtcatccttacgctcatcacgcggcgggttattctgctcaaatataaaatgccagcgcttgcaggcgttatttataccgccctctttgctctctactccatgctgttctggctggtatttttctaa

SEQ ID NO: 257939 - DNA, 1032 bp, Klebsiella pneumoniae
atggaaagttcgtcgaaaaaaattcctcgcaataaattaccggctctgcttctggtactactggccgtcgtcgttttactcgttgtcatctggcgactggatagcgcgcccgctactaacgacgcctacgcttcagcggatacgattgatgtggttccggaagtcagcggccgcattgtcgaactggcggttagcgataaccagcaggtcaagcagggcgatctgctgtttcgcatcgatccccgaacctatgaaatgaacctggcgaaggccgaagcttctcttgccgcgctggataaacagattatgctcacccagcgcagcgtagacgcgcaaaaatatggcgctgactccgttcaggcgacggtcgccaaagcccgcgcggcggctaaacaggccagcgataccctgcgccgcaccgagccgttgctcaaggaaggttttgtttccgcagaggatgtcgatcgcgccagaacggcgcagcgcgccgccgcagccgaccttaatgcggtattgctccaggcgcaacaggccgccagcgcggtcagcggcatcgatgcgctggttgcccagcgagtcgccgttgaagcagatatcgcgctcactaaactacatcttgaaatggccacggttcgcgcaccgttcgatggacgggtggtcgcattaaaaacctccatcggccagtttgcctccgctatgcgtccgctctttaccctgattgatacccgccactggtacgtcatcgccaacttccgcgaaacggagttgaaaaacatccacaccggtacacccgcgactattcgtctgatgagcgacagcggcaaaaccttcgccggtaaagtcgattccgtcggctacggcgtactgcctgacgacggcggtctggtgctgggcggtctgccgcgggtttcccgttcgattaactgggttcgcgtggcccagcgcttcccggtaaaaatcatggtggataaacccgacgcagagatgttccgcatcggcgcatcggcggtcgccactctcgagccgcaatga

SEQ ID NO: 257940 - DNA, 2046 bp, Klebsiella pneumoniae
atgatgaacgcgcttaattacctgccgctgccgctggtcaaagcgctggctttttttcgcgaggaattaagcgaagagcgccccggcagagtgccgcaaaccatgcagctttgggttggctgcctgctggtggtgctgatctcaatgaccttcgagatcccctttctggcgctttcgctggcggtgctgttttacggcatccagtccaatgctttctataccaaattcgtggcgatcctgttcgtggtggccacggcgatggagatcggcagcttatttctgatctacaaatggtcttatagctatccgctcgtgcggctgatcgtcgctggcgtaattttgctgggctgtatgtttatgatgcgcgcccatcgcctggggctggtcttcttcgccgtggcgattgtttcaatctacgggcaatctttccccggaatgctcgattaccccgaagtcgtcgttcgtctgacgctatggtgtatcgtcgtgggactctacccgacgctgctgatggtactgatcggcgtcctgtggtttcccgcccgcgcggcggatcagatgcgcgcagccctgtgcgcgcggcttgatgacgccgccagccgcctgacgcaatccgccgaaccgctacctgaaaagcgcattgaacaggaagcgttagcgctgcaaaaactgaacgtcttctgtatggccgatgatgccgactggcgagcaagaagcgcatggtggcaaacctgcgtcacgacggtgacctacctttacgccacgctgaaccgctacgacgccgccgcctttgccaaaaatcagacaatcgattctctacggcaaaagctgcaaagcgaaatcgccgccctgaaaaacgccattagcgacggggagacctggcatagcgagtggcaactgagcgctgaagagaccgctgcggcacgcgaatgcgggctggagaatgcctgtcagattctgcgacagctgggtcaaatggacccggacacgccgcccacgcctgcaaccaaaccaccctccatggcgccggatgctttcactaatccgaactatattcgttacgccctgaaaacgctgctggcgtgcatgatctgctacgtcttttattccggcgtcgattgggaagggattcacacctgcatgctgacctgcatcatcgtcgctaaccccaatctcggctcgtcgtatcagaaaatgaccctgcgcttcggcggcgcattctgcggcgcgatcctcgctctgctgatgaccatttttgtgatgccctggctggataatatcgtcgaactgctgctggtgctggcgccggtttttcttatcgcgtcatggatcgccaccggctcagaacgttcttcatacatcggtacgcaaatggtggtcaccttcgcgctggcgacgctggaaaatgccttcggtccgatttacgacctggcggaaatccgcgatcgcgccttcggtattatgattggcatcgtcgtttcagcggtgctttacacctttatctggccggaaagcgaagcgaaaacgctgccgcaaaagctggcgggcgcgctgggtctgcttggcaaattgctccgcgttccgcgccagcaggaagccgccgcgcagcgaacctatctgcaactgcgcgtcggcgttcatgcggcgttgaatagctgcgaagagatctgcgagcgggtggcgctggagcgccagcttgacgatgaccagcgtctgctgctggtgaaacgtagccaggcggttattcagcaggggcgcgaaatcctctacgcctgggatgccgcctggaatgacgcccaggcgctggataattcgctattgcaggagcgggccgggcgttttgccgatgccctggaaaaatacgccgccgggctggccgccgcagccagcacgcccccggtcatcgagcttatcgacaccgccatttcacccacgctatatcaacaggagcaacgcgtcatgcagcaaatggcccgtttaccggactggactcgcccggcgctgacgccagccgaagagcaagtgcaaggagccgctcaactatga

SEQ ID NO: 257941 - DNA, 1464 bp, Klebsiella pneumoniae
atgacccgtaacctttcacgcttactactctgcggcctgctcggtagcgctacggcgctttccggctgcgcgctggtgcgcaaagattccacgccgcatcaacagctgcagccagagcagattaagctggccagcgatatccatctcgccagccagggatggccgcaggcgcagtggtggcgtcagttcaatgacccgcagctggacgccttaattcagcgctcgctttccgggtcacacacgcttgccgaagcgaaactgcgtgaagaaaaagcgcaatcgcaggccgatctgctggaagccggtacgcagcttcaggttgccgccatggggatgctcaaccgccagcgcgtttcgaccaatggtttccttggcccgttcgccgaccaatccgacagtcggctcatgccgatggacggcccctactataccgagggcaccgttgggctgctcgccggtctggatctggatctatggggcgtccaccgttctgccgttgctgcggctatcggcgcgcaaaacgccgtcgtcgccgagacagccaccgtagagctggcgatctccaccggcgtcgctcagctttactacagcatgcaggccagctatcagatgctcgacctgttgcaacaaacccgcgaagtcattgagtatgcggtagaagcgcaccagagtaaggttgcccatggcctggaggcgcaggtgccttatcacggcgcccgagcgcaggtgctggcggtcgataaacagatcgccgcggtaaaagggcagatcgtcgaaactcgtgaaactctgcgcgccctgatcggcgcgggggctggcgatctccctgcgatcaagcccgtatctctgccgcgggtgcaaaccggtattccagccacgctctcctacgatttgctggcccgacgtccggatctacaggctatgcgctggtatgtccaggcttcgctgaatcaggtgaacgccgcgcgcgccctgttctacccgagctttgatatcaaagcgttcttcggcgtcgattccattcacctggataaactgttcgaaaaccgcagcaagcagatcaactttattcctggcctgacgctgccgctgtttgatggcggacgcctgaatgcgaacctcgagagcacccgtgcctccagcaacatgctgattgagcgctataaccagtcggtgctcgacgccgtgcgcgatgtcgctatcaacggcacgcgcctgcaaacgctgaacgatgagcgcacaatgcaggctgagcgggtcagcgctttccgctacacccaggccgccgccgaagcggcctataaacgcgggcttagcagccgtttgctggcgaccgaagccagactgccggtgctggcggaagagatgtcgttactgatactcgattcccggcgcgtagttcagagtattcaactgatcaaaacgctgggcggcggctaccaggcgccggtagccaaaaaataa

SEQ ID NO: 257942 - DNA, 420 bp, Klebsiella pneumoniae
atgaaaaaagtcgtcacggtttgcccgtattgcgcatcaggttgcaaaattaacctggtggtcgataacggcaaaatcgtccgggctgaggcggcacaggggaaaaccaaccagggtaccctgtgtctgaaaggctattatggctgggactttattaacgatacccagatcctgaccccgcgcctaaaaacccccatgatccgtcgccagcgtggcggcaaactggaatccgtctcctgggatgaggcgctcgactacgtcgccactcgtctcagcgccattaaagagaagtatggcccggacgcgattcagactaccggttcgtcccgtgggacgggtaatgaaaccaactatgtgatgcaaaaattcgcgcgcgccgttattggtaccaataacgttgactgctgcgctcgcgtctga

SEQ ID NO: 257943 - DNA, 522 bp, Klebsiella pneumoniae
atggccattattctcggcattgacccggggtcgcgcgtcactggttatggcgtcatccgccaggttggacgccagctcagctatctgggcagcggctgtattcgcacgaaagtggatgatttaccgtctcgcctgaagctcatctatgcgggcgtcacggaaattattacccagttccaaccggactatttcgccatcgaacaagtgtttatggccaagaacgccgactcggcgctgaagctcggccaggcgcgcggcgtggcgattgtcgcggcgacgaatcaggacctgccggtctttgagtacgccgccaggcaggtaaagcagaccgttgtcggcatcggcagcgcggaaaagagccaggtgcagcatatggtgcgcaccttgctcaagctgccggccaacccgcaggcggatgcggcggatgctttagccatcgccatcacccactgccacgtcagccagaacgccgcccagatcagcgaaagccgcctgaatctggcgcgtggacgcttacgataa

SEQ ID NO: 257944 - DNA, 741 bp, Klebsiella pneumoniae
atggcaggtcatagtaaatgggccaacaccaagcaccgcaaagcggcacaggatgccaagcgcggtaagatctttacgaaaattattcgcgagctggtcaccgccgcgcgtctgggcggcggcgatgcgggatctaacccgcgtctgcgcgcggcaatcgacaaagcgctgagcaacaacatgacccgcgacaccctgaaccgcgctattgcccgcggcgtgggcggcgatgatgatgcgaacatggaaaccatcatctatgaaggttacggtcctggcggcacggcggtgatggttgaatgtctgtccgacaaccgtaaccgtaccgttgcggaagtccgtcatgccttcaccaaaaccggcggtaacctggggaccgacggttccgtttcctacctgttcagcaaaaaaggcgttatctccttcgagaaaggcgacgaagatgcgatcatggaagcggcgctggaagcgggcgcggaagacgttgtgacctatgacgacggcgcgattgacgtttataccgcgtgggaagagatgggcgcggtacgcgatgcgctggaagccgccggcctgaaagcggacgccgctgaagtctcgatgatcccgtctaccaaagcggacatggacgcggaaactgcgccgaaactgctgcgtctgatcgatatgctggaagattgcgacgacgtgcaggaagtttatcacaacggcgagatctctgatgaggtcgccgcaacgctctaa

SEQ ID NO: 257945 - DNA, 486 bp, Klebsiella pneumoniae
atgtttgaagacgacggtgaaggcggcctgaccgcgatgcaccatccgttcacctcgccgaaagatatgtccgctgccgagctgaaggccgcgccggaagacgcggtggccaacgcctacgatatggtcatcaatggctatgaagtcggcggcggttcggtacgtattcacagcggtgaaatgcagcagaccgtgttcggcattctcggcattaacgagcaagagcagcgcgagaagtttggcttcctgctggacgcgctgaaatacggtactccgccgcacgcgggcctggctttcggtcttgaccgtttgaccatgctgctgaccggtaccgataatatccgtgacgttatcgccttcccgaaaaccaccgccgccgcttgcctgatgaccgaagcgccaagcttcgctaacccggcatcgctgagcgagctgggtattcaggtggtggcgaaagaggcaaaagagtctctggagaataagtaa

SEQ ID NO: 257946 - DNA, 1332 bp, Klebsiella pneumoniae
  misc_feature (1317)..(1326): n is a, c, g, or t
atgcgtacagaatattgcgggcagcttcgtctgtcccacgtagggcagcaagtgactctgtgtggttgggtcaaccgtcgtcgtgatcttggtagccttatctttatcgatatgcgtgaccgcgaaggcatcgtgcaggtgtttttcgatccggatcgcgccgacgcattaaagctggcctctgaactgcgtaatgagttctgcatccaggtcaccggcaccgtgcgtgcgcgtgacgaaaaaaacgtgaatagcgatatggccaccggcgccatcgaagtgctggcatccgacctgaccattatcaaccgcgctgaagcgctgccgctggactccaaccacgtcaacaccgaagaagcgcgtctgaaataccgctacctggacctgcgtcgtccggaaatggcgcagcgcctgaaaacccgtgcgaagattaccagcctcgtccgccgttttatggacgaccacggcttcctcgatatcgaaacgccgatgctgaccaaagctaccccggaaggcgcgcgcgactatctggtgccttctcgtgtgcataaaggcaaattctacgcgctgccgcagtctccccagctgttcaaacagctgctgatgatgtccggttttgaccgctactatcagattgttaaatgtttccgcgacgaagacctgcgcgccgaccgccagccggaattcacccagatcgacgtcgagacctcctttatgaccgccgagcaggtgcgtgaagtgatggaagcgctggtgcgtaatctgtggcaggaagtgaagggcgtggatctgggcgatttcccgatcatgaccttcgccgaagccgagcgccgctacggttccgataaaccagacctgcgtaacccgatggagctggtggacgttgccgatctggtcaaagcggtggaattcgccgtcttcgcaggtccagctaacgacgccaaaggccgcgtagccgcgctgcgcgtaccgggcggcgctgcgctgacccgtaagcaaatcgacgagtacggtaagtttgtccagatctacggcgcaaaaggcctggcctatattaaagtcaccgagcgggcgaaaggccttgaaggcatcaacagcccggtagctaaattccttaacgccgacatcgttgaagcgatccttgagcgcaccggcgcgcaggatggcgacatgatcttcttcggcgcggataacaaaaaggttgtcgccgacgcgctcggcgcgctgcgtctgaagctgggcaaagacctgaacctgaccgacgaaaacaaatgggcgccgctgtgggttatcgacttcccgatgtttgaagacgannnnnnnnnnacctga

SEQ ID NO: 257947 - DNA, 726 bp, Klebsiella pneumoniae
atggctaccaatgcaaaacccgtctacaaacgtattctgcttaagttaagtggcgaagctctgcaaggttcagaaggcttcggtattgatgcgagcatacttgaccgcatggctcaggaaatcaaagaactggttgagctgggtattcaggttggcgtagtgattggtggcggtaacctgttccgtggagctggtctggcgaaagcgggtatgaaccgcgttgtgggcgaccacatgggcatgctggcaacggtcatgaacggccttgcaatgcgtgattctctccatcgcgcctatgtgaacgcccgcctgatgtcagcgattccgctgaatggcgtgtgcgataactatagctgggcggaagctatcagcctgctgcgtaacaaccgcgtggtcattctttccgcgggtaccggtaacccattctttactaccgattctgctgcctgcctgcgcggtattgaaattgaagccgacgtagtactgaaagcaaccaaagttgacggtgtatttaccgccgacccggccaaagatccttccgcgaccatgtacgatcagctgacctacaccgaagtgctggataaagagctgaaagtgatggatcttgcggcctttaccctggcgcgtgaccacaaactgccgattcgcgtattcaatatgaataagcctggcgcgctgcgtcgcgtggtgatgggtgaaaaagaaggcacattaattactgagtaa

SEQ ID NO: 257948 - DNA, 3483 bp, Klebsiella pneumoniae
atggctgaaccacgtttcgtacacctgcgggtgcacagcgactattccatgatcgatggtctggcgaaaaccggaccgttggtaaaaaaggcggccgcgctcggcatgcctgcgctggcgatcaccgattttaccaacctttgcggactggtgaagttctacggagcgggacacggcgccggaattaaacccatcgtaggggccgatttccacgtccagagcgatctgcttggcgatgaactgagccagctgacggtactggccgctaacaacgctggctatcagaatctgacgctgctgatctccaaagcttatcagcgcggctacggcgcggcgggcccgattatcgatcgcgactggctgatcgaattaaaagaagggctgattttgctctccggcgggcgtatgggcgacgtgggtcgtagcctgctgcgcggcaacatggcgctggtggatcagtgcgttgatttttatgaacaacatttccctgactgctattttcttgagctgattcgcaccggccgtcaggatgaagagccctatctgcatgcggcggtggggctggcggaaacccggggcttaccggtggtggcgaccaacgatgttcgcttccttgagccgggtgacttcgacgcccatgaaatccgcgtggctatccatgacggttttaccctcgacgatcctaagcgcccgcgcaactactcgccgcagcagtatatgcgcagcgaagaggaaatgtgcgagctcttttccgatattcccgaagcgctgcaaaacaccgtggagatcgccaaacgctgtaacgtgaccgtgcgccttggtgagtacttcctgccgcagttcccgaccggggatatgaccaccgaagattatctggtcaagaaatccaaagagggtctggaagagcgcctggaattcctgttccccgatccggatgagcggacgaaacgccgccctgaatatgatgaacgcctggacattgagctgcaggtaattaaccagatggggttccctggctacttcctgatcgttatggaatttatccagtggtcgaaggataacggcgtgccggtagggccgggacgtggctccggcgccggatcgctggtcgcctatgcgctgaaaattaccgacctcgatccgctggagttcgacctgctgttcgaacgtttccttaacccggaacgtgtctccatgcccgacttcgacgttgacttctgtatggagaagcgtgaccaggtgattgaacacgtcgcggacatgtacggtcgcgatgcggtatcgcagattattaccttcggtaccatggcggcgaaagcggttatccgcgacgttggccgtgtgctgggccatccgtacggctttgtggaccgcatttccaagctggtgccgcctgacccgggtatgacgctggcgaaagcgtttgaagccgagccgcagctgccggaaatttatgaggcggacgaagaggttaaagcgctgatcgacatggcgcgtaagctcgaaggggtcacccgtaacgccggtaaacatgcgggtggggtggtgatcgcgccaactaaaattaccgattttgccccgctttactgcgacgaagcgggccagcatccggttacccagtttgataaaaacgacgttgaatatgccgggctggtgaagttcgacttcctcggcctgcgtacgctcaccatcattaactgggcgctggagatgatcaacgcccgccgcgagaagaacggcgaggggccgctggatatcgccgcgatcccgctcgacgataaaaaaagcttcgatatgctgcagcgttcggaaaccaccgccgttttccagcttgaatcgcgcggtatgaaggatctgatcaagcgtctgcagcccgactgcttcgaagatatgatcgcgctggtggccctgttccgtccggggccgctgcagtcggggatggtggataactttatcgaccgtaagcacggtcgcgaagagatatcgtatccggacgtgcagtggcagcacgaatgcctgaaaccggtactggagccaacttatggcatcatcctgtaccaggaacaggtcatgcagattgcccaggagctttccggctataccctcggcggcgcggatatgctgcgtcgtgcgatgggtaagaaaaagccggaggagatggctaagcagcgcggcacctttgaagaaggggcgaggaagcgcggtgtagacggtgagctggcgatcaaaatctttgacctggtggagaaattcgccggttatggctttaacaaatcgcactccgccgcttatgctttagtgtcctatcagacgctgtggctaaaggcgcactatccggccgaatttatggcagcggtgatgaccgcggatatggataacaccgagaaagtcgtcggtctggtggatgagtgctggcggatggggctgaaaatcctgccgccggatattaactccggcctgtatcatttccacgttaacgacgatggcgaaatcgtttatggtatcggcgcgatcaaaggcgtcggcgaaggcccgatagaagcgatcattgaagcccgtaatcagggcggctatttccgcgaactgtttgatctctgcgcgcgaacggatattaaaaagctcaaccgccgggtgctggaaaaactgattatgtccggggcgttcgaccgcctcgggccacatcgcgcggcgttaatgaattcactgggcgatgcgctgaaggccgccgatcagcacgccaaagccgaagccatcggccaggcggatatgttcggcgtgctggcggaagagccggagcaaatcgagcagtcctacgccaactgtcaaccgtggccggaacaggtggtgctggatggcgaaagggagaccctggggctgtatctgaccgggcacccgattaaccagtatttgaaagagatcgagcgctacgttggcggcgtacgactcaaagacatgcatccgaccgatcgtggtaaagtgaccacggcggccgggctcgttattgccgcgcgggtcatggtcaccaagcgcggcaatcgtatcggcatctgtacgctggatgaccgttccgggcgtctggaggtgatgttgttcaccgacgccctggataaataccagcaattgctggaaaaagaccgcatacttatcgtcagcggacaggtcagctttgatgacttcagcggggggcttaaaatgaccgcccgtgaagtcatggacattgacgaagcccgggaaaaatatgctcgcgggcttgctatctcgctgacggacaggcaaattgatgaccagcttttaaaccgactccgtcagtctctggaaccccaccgttcgggaactattccagtacacctctattatcagagggcggatgcacgcgcgcggttgcgttttggcgcaacatggcgcgtctctccgagcgatcgtttacttaacgatctgcgtggcctgatcggctcggagcaggtggaactggagtttgactaa

SEQ ID NO: 257949 - DNA, 2172 bp, Klebsiella pneumoniae
atgctttccttaggtaaattccaggaggaaagcgtgaatatcattgcgatcatgggtccccacggcgtctattataaagacgaaccgatcaaagaactggaagccgccctgcaacggcaaggcttccagaccatctggccgcaaaatagcgccgatcttttgcaatttatcgagcataatccgcggatctgtggggttattttcgactgggatgaatacagcgttgacctgtgcagcgatattaatcgcttaaatgaatacctgccactctacgcatttatcaacgcccattcgacgatggacgtcagcagtcaggacctgcgcatgacgctatggttctttgaatacgcgctggggctggcggaagagatcgctacccgcatcggtcaatacacccgcgaatacctcgacaacattaccccgccgtttaccaaagccttgttcaactatgtgcaggaaggaaaatataccttctgtacccccgggcatatgggcggctcggcttaccaaaaaagcccggtaggctgtctgttttacgatttctttggcgggaataccttaaaggccgacgtctccatatccgtgacggaactggggtcgctgctcgatcatagtggcccgcacctggaagctgaagagtatattgcccgagccttcggcgccgaacagagctatatggtgaccaacgggacctcgacgtcgaataaaattgtcgggatgtattccgccccggcgggcagcaccctgcttatcgatcgcaactgccataaatcgttggctcatttactgatgatgagcgatgtggtgccgctgtggctcaaaccgacgcgcaatgcgctggggatccttggcggcatacctaagcgcgaatttacccgcgatagtattcagcaaaaggtgaatacgacaggcggcgccgggtggcccgtgcatgcggtgatcaccaactccacctatgacgggctgctgtataacaccacctggatcaaagagaccctcgacgtaccgtcaatccactttgattccgcctgggtgccctacacccattttcatccgatctatcagggcaaaagcgggatgagcggcgatcgcattccggggaaagtgatctttgaaacgcagtcgacgcataaaatgctggccgcgctatcgcaggcttcgctgattcatattaaaggcagctacgatgaagacaccttcaatgaagcctttatgatgcatacctcgacttctccgagctacccgatcgttgcctccattgaaacggctgccgcgatgctgcgcggcaattccggtaggcggctgattcagcgttcgattgaacgggcgctggattttcggaaagaagtgcagcggttacgcgaagagtctgacggctggttctttgatatctggcagccggaagaggtgggggaagcacagtgctggccggtgtcccccggtgaacaatggcatggctttcaggatgccgatgacgaccatatgttcctcgatccggtgaaagtaaccattctgacgcccggtatggacgaacagggcaacatggatagcgaaggcattccggccgcgctggtggcgaagtttctggatgagcgcggcgtggtggttgagaaaaccgggccctacaatctgctgttccttttcagtatcggcattgataaaacccgagcgatggggctgctgcgcgggttaaccgaattcaaacgctcttacgatctcaatttacgggtgaaaaacatgctgccggatctgtacgctgaagatcctgatttttaccgcaacatgcgcattcaggatctggcgcagggtatccatcgcctgattcgccagcaccagctctcgcagctgatgctgagcgcctttgacgttctgccggagatgaaaatgacgccgcatcaggcctggcagcggcagattaaaggcgaagtggaaaccatcgaactggagaatctggtcgggcgtatttcagcgaatatgatcttaccgtatccgccgggcgtgccgctgctgatgcccggtgagatgatcgtcgaggagagccgggcggtgctcaattttctattaatgttgtgctccatcggccgccactatccaggcttcgaaaccgatatccacggcgcgaaacgcgatgaagatggcgtgtactgggttcgagtcttaaaaaatgactaa

SEQ ID NO: 257950 - DNA, 1308 bp, Klebsiella pneumoniae
atgatgatgatcccagatattgcgcaaacgctccgaccgcatcgccagtttttagtggcctttagcggcggcctggattcgagcgtgctcttatatcgcctggttcgctggcgcgaacaggatcccaccgttcagctgcgggcgatgcatattcaccacgggctcagcgtgaacgctgacgattgggtggcgcactgccggctaatctgtcagcagtggcaggtgccgcttttggttgaacgggtggtcctcgccgatgaggggctggggattgaggcccatgcgcgtcaagcgcgctatcaggctttccgttcagcgttgctgcctggcgaagcgctggtgaccgcgcagcatcttgacgatcagtgtgaaacattcctgctggcgcttaagcgggggagcggtcccaccgggctctcggcaatggcctgcgagtccgattttgccggaacgaaactgctgcgtccgctgcttaacgaaagtcgcgactctctgcaccgttgggcgatagcccatcagctcagctggattgaagacgaaagtaaccaggacgacgcctacgatcgcaattttctccgcctgcggattgttccgctgcttaacgcccgctggccgcactttgccgaggccgtggcgcgcagcgccagcctgtgcggcgaacaggaacgactgttggatgaaatgctggcggcggagctggcaacgctggtggctgaggatggcgcgttggctatcgaaccgttgacggccatgagcgctccgcgtcgggccgcgctgctgcgccgctggctggctggattcaatgcgccaatgccttcgcgcgaggtgccggagcgtatctggcgtgaagtggcgatggcgcgcgaggatgcttttccctgcctgcggcttgggcaatttaccgtccgtcgcttccagcagcggctgtactgggtgaaatatctccccggccagagtgaaacggtactggcgtggcccgatatcgctaagccgctgccgttacccggcggcctgggtgaactgaggttcctgcccggcggcccgttacgcggcccgcgccaggacgaagcggtaaccattcgctttcgcgctagcggtcatctgcatatcgtcggtcgccacggtggccgtaagctgaagaaaatctggcaggagctgaacgttgctccctggcggcgcgataccacgccgctgctgttttacggcgaaacgctaatcgccgcagccgatggtctgtttattaccgtcgatgggaaagttcaggaaggtgaaggcgtgcagttgatatggatgaaaacgggcggctga

SEQ ID NO: 257951 - DNA, 852 bp, Klebsiella pneumoniae
atgaaaaagttacttttcaatttactcattttgattgcattactaaactcgtcatattcattctcgaatggtcaatacaatgcagatgctgctgcattaacccgttcagcatctgataacggtcttgctctgaatcagtcgacacgtggtttggtaaacaagctaggggcctaccaggcgaaggatgcaatctacttgcctactggtggacttttcttatttgaagatcaacgaagtggtttgacgattgttacaacaacaggtcgttactcattttccgaaggtaaagcctatgacgtaatccgcaagactcagattcagacaattgctgatatcaggaaaagttactttttaccgatgagtgaagcaccgttcagaactgaggattcctttaccatacagtttgggaacccctcactaaaacgtcaggcagtgatatttattacactggactgtgcggattgtgttgctttcctcggaaaaatgaatgaaataaaaaaagatgtgcgttttgacattgtaattctaccgagtccaggaggggctgcaaagagagtcaagcagatgtggtgttctgttaaagccggtaaagtaactaattacgatatactacagtcattattaggtaaaacaaacgatattaatactcgtcttattccacatgaaagcctgactgactgctctgtagaaccgatcataacaggtttatatcttgcatctatttataacgttcaaggcacaccgtctgttgttcgcgaagatgggcttttaggaaatgggatacccacagactttaaagcctggttgaaagtgaatttacaacctttgctgcaaaacccatttgataaataa

SEQ ID NO: 257952 - DNA, 471 bp, Klebsiella pneumoniae
atgaccatgactgaacagaataataaagatgaacataatgacgcggactttgataaagatgtcaaagagaaaaaaaatctgacattttctgtatcatacgcttttgcagaaaagtcgctaaaatttttcattctggctgcaattatttctggaattgttgtatttctctggaaacaaatagatggcagatttagcctatttaatgagcccgtaaaaatcgctgtgctgaaccctacagcactaaatgaacaatatctaaaagcacataacggcaataataacgattatataccctatatccgtaagctaatggcgctttaccgtgccagagacgtacttgtccttgatatgaattacgtgataacccgaccgtcatctgtaagtgaaatttcttacattagcgacacagacgttgagagtgaactcgctgaatatggaataaacccgaaaatgtttgaggaaaagcagtaa

SEQ ID NO: 257953 - DNA, 1368 bp, Klebsiella pneumoniae
atgaaaacattgaagctgaaggaattgtgggcagaaaataaagccattcgtatggcatttttgctcatcgtcgcatttgctgctcttgtgatggtgaccctcacactaatggggggggatgactcaagcaagaaaacgaaaaaaataaagccggttactaatctgcttgatacatcttcggttgaaaatatggatgaagaagggcagaagcgttttttgcagacagtacagatgcaaaaccgtaaagaccaacaaagtatgttggaccaggtaaagcagatggaaaaatacaaatctgagaattctggtgagattaatgagcttagaggccagattaagcagttaactcaacagatttcagatatgcagaatggtaaaggtccggcaagcaaccgcagcctcgacagtcgtggcattcaacaacctactgacagccaacagcccaattctgcataccaacttaatggtaatgctgcaggtaatcgcaatcaggaaatacctgttgctggtgggatatcccctcaacgaaatcaactggttcgcaccattacaagcaacagcattaccacggccaataatggtgtactggaagtaacacctattgttgaaaagaacattacaaatgctaaccaaaagagaatagttaaatcaggttcacctgcgttagctggtgatggaactaaacccatagatagcaacgcaaaacactcaagacgttcagacgatcagtatttgccagcaacgtcacagttgtatggagtcttgattactggtgttgaggcccctacatctctgtcgtcgcaagaagaaccacttggagtgacgttcagggtaaaacgtgatgtgttcctgcctaacaactacagaatggatttgcgtgactgcaaccttttaggcacagcccggggggatatggcttcggagcgagtctatatcagaacgacgaaccttagttgcgtgaactctaaaggaaaaagctttgatattaaactggaagcatacgccgtcagtgagatcgatggtaaagcaggaatcaaaggcacacttatttccagaaatggtaatgcaatcatggggagtgctcttgccggtggtttaagcgcgcttgctcaaggtttgagcccaagtaaggttagtcaactaaatatcgaccccaactcacaagctcaatatcagggaccaaatattggtgcgttaagtgcggtcggtgcgagcggtgctgtatcaggtggactgaataaaatggtcgattggtacactcatatcatggatcagcaatggccggttgttgaactttccccaggaatcaacgctacttttgttgttcttagcggcgcgtccattccaacaaacttagcggcgaaatga

SEQ ID NO: 257954 - DNA, 519 bp, Klebsiella pneumoniae
atgattgataagaaaagttacttttctaagttcaaattggccattttgtttagtgttggtttgggtgtgggtttttacatcgctaacattgaaaatgaacgctctcagtttgtacaaattgtgccctctgaatacaaatcgttcgaattccaaaaagctgattatgatgctttcaaagtatatgacatagacaatttgctctctgatgagattgacgatcgtgatgctcatttaatatcagggcaaaaaatacccactgagagcgatatcagccatttcgaaccagaaactcatgagcagattaaggagatatctcaaactgcactggagagcgaaaatcagttctatgagcatcttgaaaacaacacattcaaaaatttacgggctgagcctccttactctgttccgcaaatagatgaaaaggtcagatcattgagggtaaagagatttttacctcccggtaataaaggtcaacgtaatgaaaacattgaagctgaaggaattgtgggcagaaaataa

SEQ ID NO: 257955 - DNA, 864 bp, Klebsiella pneumoniae
atgaacgaaaagaaaaagtcacttttagattacgtcacgagcttcttctcgtttaaacctaagaagctggttgctgacaatgtagtagatgaagagaaagatgatggaagacgtcaaaagaacgaaagctatagtactgataaaatacaacgcaggaaaagcatactcaatgtttctgaggaactgaatttacctaagaaaggtaaaaaaacaggtgcagaactgacatattcccagttaattcaacgggacaagaaactaatattaaacaaccgtttgttgactgttattgctggacttcttgttgttaaagtggtgtttttttctacgacggaagtgattgccatacccccagatatgaccgaagaagtttctgtagcaggtgccaaggctagcgagtcctataaaacacaatggggtctgtttatcgccaccactcttggaaacattaacccaaaaaatgtcacattcgtaacgaactatattttaaaaatgtttccggctgcaaaacaatcagatttagaagctgagcttaagaaagcatctgatttgatgcttgcaagaaaagttgaccaaacttttattccggaagatgtcaactttttgcctggtgacaatgtgctgtatgtttggggcacccgtaaaaccaaatttctcaacgtatcagataaggaacaatctgagcgttggacgtatgagatggtattaagtgttaaaagtggtcgcccaagaatcctgtacctgaaccaatactccggcacacctaatatcaagaaagtaaccgttaatgggaaggtattggaaacagagttcaccgaaaataccgacatgatccagccacaagatgaagcagaagcccaataa

SEQ ID NO: 257956 - DNA, 369 bp, Klebsiella pneumoniae
atgatcaacaaatccatggctatggccccgaaagcagtttctttcacactgtccgaaggtatgcgtaatctgcttagcaataaaatgttccaggtatttatcgcactgatgtgtgcagctctgttctcatcaatcgcgctggctggcggtgatgacggtgctctgggtgaaatttggacccagttgtctgaagcactgagcggagcgcctggtaaagcgttggcagcatgtatgctgatctctgctttctatttctctatcggtcgtccgaacccgggccttgctctcgtttccttcctgatgatgatgattttggctaacggcgaaaagatcatcactggtttccttgatgcaggtgtagcactgtaa

SEQ ID NO: 257957 - DNA, 315 bp, Klebsiella pneumoniae
atgaaaacgaggttacttgaagttgcgggtttaaatctaaaaatatcgctttataacaatgtgttagttctgagttgcaatattgacggacattgtaactatgaaacccgccgcattattagcaactctattctctctgaatcagagatttttgaaaagatggactcggaatgggtctttaaaattttttccaaaaatataaaacatatcatcaatgtattaaattccaacgtcagcatcatacctttggtaaatcatcaggtatcttctaggaacgaaatgacagatacaatgtcatgtctaaagctcaattga

SEQ ID NO: 257958 - DNA, 708 bp, Klebsiella pneumoniae
atgtgggtaacgacagataacattttcatcgtagataatcagcctaactctgatggtcacatgtatatacatcgcccatgtcccaactgtttagggtctggtatcaattgtcaggtctgctctggaatcgggtcattaccaccggctcttgaaaaagtttatcccgtttatgaatgggctgcactacacgggctgaagctacctttcaatcaatcagtagagcagacttgcttgaaaaaacatctggttgaacggttggcattcgtggagcaagataaaggtgacttttattcatctatctatgcatcacttaacaaaagtaactttcctacaagactccaatatcgttatattttgcctgctgccgacaaaacaaaaccatctggcggtcggttagttatgccttttaatgcaaaacttggggtaactatttctgtgactcttttcgtgaagcatattgacgtttttacgaggaaattctcaacagagaaattttcatcactccttatggaaacccctgaacaccggcattttattctatatgacacctacccttcgcagtataaaataggtgatgtcatcgatgccaagatctatacaaccaaaaggctttggatcaataacatgagtattttacaagtaaaattactctctatttctgatgttaaaagctcctcatctgtaaatcagtcagataatgcttattaa

SEQ ID NO: 257959 - DNA, 768 bp, Klebsiella pneumoniae
atgaatagtcataaaaatcttcaagaaatcgaggtgttgcaggtatttttcaagaaataccataaggcttccctaagtttggatcattcaaagatagagatagcgtcctgcgacatcagcgcacttttggttaacggtaagaaatgctctcgccctgattcgataaaattatcaggccctatcatgcatacacgatttcaacctctgtggttagctatcttgcttgacttgaacgtaaggaaaaatgttgagttagatgtgtttgactttaattttgtagttgtggaactgattgaaaagtcagaacgtgtttgccaggccattggattacgagcaatcaaatattcactttccgatgtctcatattttctattgctcttgattgagttcaggttagaaattgttctcaacaattgtgttcggaccatagctatgtttacagaggtaagacatgagtttgaaacaagcacaatcagcaaagggtatatagcaatcaaccctcgcgctgcctcgcaactacatgtactaagcaacagaacagccattgtcttatcaaccttgtttttctcaaaacggactagtctttacaccctgttgcaaaagttacttttgaaaaaagaaggtttgattctcgctgatattgcaccggcaacattatcagatttgaaactactgaatcaccatggcgttatatcttacacaagaaccagaaaaagcattgaaattcatggtgttagtgttttcattgaggggttaaaccttatgtga

SEQ ID NO: 257960 - DNA, 1191 bp, Klebsiella pneumoniae
atgaataacaaccaacaatctgcatccttttttatcacaacagaacgccacggccgtcaggtcagaaatttacgggaatttagtgatgccaacccggatatctgccataaggctgtgaatggacagccttacatgattgatccgagggcattggagctcgtacctaactggaactgcagggagatgggattgggggaagaatattacaagcttccaaaacctgcggcgcacattcagaaccttaaaaacgcattcatcaacggtgcagatatcgaccctatcactgtcgtcattgttgacggtcggcctcgtgtacgtcagggaaactgccgtacccgtgcagctttacttgctctcaaggaaacaggtcttcctatacttattcggttacgtgaattcctaggtgatgatattgagcaggaatggcactctttggatggtgcaaaagcccttcttttatgccccgtaggtcgcggaattgcctatagtcgtttggttaatgaagcaggaatgtccgtggagcaagtttccaaacgtgaaaacatttcagatatggccgtacgtcaactcatttcattggcaacaatcaatgatgagctcaaagtactaattagccaggatgtgatttcgtatactttgtgtctggaattgatccgtgatcttggcgaaaacgaagcccttgaaaaaatacgttcagaccttaatgacaagattaaggttctctcacctgatttatcaggagttggttcacttccacttaatgtaactgacatcattaaagcaaccacgggtacacgtaaagcagtccggattacaaaatcttcgattggcattcagccgatcccacgaaaactatctcaaaacctggcggccagtatcaaagaggtttcaaacagattacgagcctcccttcctacggagattgatcttgaacaaattggtcaaaatgaaaaaataaatattgaggtcgacaggcattttgttgagcttattttgcaggcttatgcctctattcgtgatcatgaaaccaagcttgagcgcaaaaccacaaagggtaaactttcacagtctactcaatctacagctgatgacaccaatataacaccggcctccaatgctcctttgaatgaaccaccttcgaacaatcagaataacgaattttcgttactgaatttgcattctgctgtatga

SEQ ID NO: 257961 - DNA, 129 bp, Klebsiella pneumoniae
atgtcagatttaaaagatatcgagatggaggggatacctccgtttcctgaaaatggtgaacctttagcagtcacggttcttccggtaatcatgaataattttcctattgctaatccagaagagaattaa

SEQ ID NO: 257962 - DNA, 2439 bp, Klebsiella pneumoniae
atgagttttccacaattcttacatcattctgctttagctatgaccgtctctattgccgcaagcatgctatccattgcgaatgcccgggtatacgagtataagttcacagatatccatggggctcaaaaaagtgtctctgaaagtgcgccgtatcttaatccgcatggaagttttaatgtcctcctcattggtggcttagaccaacaaattcgcatatcagtttttcgagatacggataccaatgctgtctttagcacaacaaccggcatcattactgttgatgatcgaattgcctcctcaagcggcaattatttttacgggaagacagtcactattcctcctatcagtgatggacgttacaccataaaatctgacattttggattcaaaatcgtccgttgtttcaacaacaagtcatcttgttgtaatcgacactgtaggacctacgtcagataacttttcagtaccctggataccaggatacaacatggtggtaaccgggcagcgttgggagctaggacaaggacaggaagctgccatcaatcttgcaattaagaatatcaatgatctatctggttttgataaagctatagttcaaattataaaacctgatggttctacacaatcaagttatgcaatgacgtatgatgaaggttctaaagcagctacagcccctataaccaaaggtggaggggcaatagccaaagctacttggatgcctgtttctgatgctgatgtagagtatcgctttagagcatttctctatgataaagcgggaaatttcactcaggtacccgatcagacatttctttttgattcttcggccggagaatatgaactatttgcagttgctgatcctaattcaacaacaagtgtagttccaggtattgctactggttatattaaatatactgctggcatgactgttaataccaatcctgtcactcttgtctataaaatacccaaacataattatagagcgtataataaagctggtttatctttcggttcgctgcttactgaagttaatggttacgtttatattaaacaatccacgccggttggaacgtcatttactatacataacggttaccagtatggaggtggtaactcttcttataacattaagttgagttcaacggctccaaaatctccttctattaaatcctacgcaactactttttctacaattggaagtttttccgctggtacaatgaaattcaccaataaggatttacctggtgaatatcaaagtgctactgtcatcgttgatccaagagattatgtgcagtcgttttataatattactcaaggttatgaagtttgcaccattccccaaggtgaaatttcttgtacgggaccattttcatattctataaataaaggtaatgggtacttagctcactattttattgttcgaaatcccgataagacactttcatcaaatcaatttgaaattcgtagtatttggaatacagatttaattccaaaaatcacgggctacgattataaagaagaaaataagtctgtgcttgtttatgtttctcagcctggaaatggtagctggcgtgatgttttaatgctctcaaaggtagagatactcgatacaatttctaatgcagtacttcttactggtacaaaagttgccatgtcgggcgaagagtatacctatgcatttgatttatcaggcatacccgaaggtagctataaccttgcgtttagtgctactgatactttcaataatacatctcaacttccgttccaatctcttgttgttgacaatactcccccttcaatttctttttcttatgaaggaaagccacttcttactgaaagcactgtatatggacttgagaacatatctatctctgtaatagatgcgcttagtagctcggaaatatatcagatggttcttcagggtggacctacctctgatgatgtagaattgggtttcgtgaaaaattctgatggtactttcacgccattatatcctcgcttattcccatctctagatgcgaacactgataaatatacacttctagtgaaagctaaagacagtgcaggaaatgtgagtactaactctatccgctttgcatattaccctaaaaacctgattgttttggatcagttaaacacccttgcagtcaataaagccctttctttatctacgggagaaccattggcggtgttaaaggccagtcaattgagaagaaatgatggatctttagcaaaaggtattcagacggctcttgttacagtacgctctgatgcttctttccctctaagtattataggtaacatcgttaaccctggagaaactaaagaaatacaaattgatttgggcacagttggaaatgatgtcgtaattccaatatttcctggtacaaatggtattgttggctctgctggttttattgttgagttcccacaattgaaataa

SEQ ID NO: 257963 - DNA, 534 bp, Klebsiella pneumoniae
atgggtatgaaataccttgaaatcatggagaataaaaagttcaaaaccaatgatgaacttgcttcctatcttaacattggcattgaatcgataagaaaaagaattcaggccgctaaagtagacaaagaacttattagaattttccccgattgtgaagggatacctaatacttactatagtaaattggctaaaattgaaaaaaccgccaaaaataatagtatccctcttacggaactcacatccgaagttggggcagaagacaataaaataaacaacattaatgatattgaggaagttcagaagtctatattaacaggtttgctttcagtgcttagtatactttgtaatgatgcacaaaaaccttctaaatggacagtgtcagatattgcagaatttgatgataaggatacttacgctaggattaagaaaagtactgacggtcaaaaggtgagttttgagtttaagcgtataaatcaatcaacaataaatgagatagaacgtttaattaaagtcagtattaacaaagcaaaatag

SEQ ID NO: 257964 - DNA, 1011 bp, Klebsiella pneumoniae
atggaagacttatatttgctgtttgctaaagacagaaatggcatgttatacgatacccaccatgcacggttaacctctgacattaccttttattgcacacaatgcggaagtcgcatttactaccaaaatgaaattgaaactgataacttcaaacagagacatttttttaagcacgttatggcggatgaaaaagatataagcatatgcgaagttaactatctcaatgaagcgattaaagatatagcccatagcattctatgtagtgaatctagcatttttgttagtccaatttttactaagggcgtaattcaagctccagataagatattcgcccctcataatgtcattatctcacatgatgatctcatcggttcccaaagcgtggatttcaaatggacaagttctaaggggaaatgtatggggttagttttcgttgaccacaatgaggtaattgaaaacaaaatgtatgacgtcaacgattccaaggcattcattgcagaaataaacttggcaatacttaaaagtcacctacgttccatgatcaaatcaaatcatggggtagatgctggtttaatcaaagcaataaaaaaattattattgaataaaaacacacatagccggtggattagttggaacgggaaaaaatcaaatttaagaatatctccagcatactttactaccttcaacaactacggatatgacagttataaaagcgtagtttctttggaatacttgtttcataatgaaaatgaatatattaacaataatacaaagtcaactttgaggctaacaggaagaaagtttgattttcaggttaaagaaataatttatcagttcagcctagaacgaggaagttgctcagatacgttttatgtcgtcatctatgagaaagaatgcgttttacttgattatatacttaattcagttccagttaatgacgatacatacaaccagattaaaaagttgtgcataaaacttattcgtatatatgaatctgccatgcgtggttaa

SEQ ID NO: 257965 - DNA, 354 bp, Klebsiella pneumoniae; identical to SEQ ID NO: 186995

SEQ ID NO: 257966 - DNA, 2652 bp, Klebsiella pneumoniae
atggacgatctgctgatctttggcggtgttattttattctgcgggctggtggttgcgccgatcgtcgcgattgtcgccctcaggcgcagcgcggcggtccgttttgagctggcggctttgcgacgtcgggttgaggagcttgagcgacgcggcgccgaacaggcgcctgcggcagaggccaccgccgtcgcgccgacgacgcctgaggccgctatcgcggctgacgcgatgatggcggagcccagtgagcctcggccggagccggtggctgaagccatcgatccgtggcgcgcgcagccaacgccgcagccagagccaacggcaaaatctgcccccgaaagcgaaccgccttccgcgtttggcggaataatatcgtcactggtagcctggtttatgcagggcaacccgctggcgaagctcgggatcctgctgctgtttcttggcctctcctttctgctgcgctataccgtggaacacgctctgttccccctcgaattacgtctggtcgcggcggcgctgttcgcggtcgtcctgctggctgtcggatggcgattgcggcataagcaaccggtgtacgccctgatcttgcagggtggggcaacgggcgcgctctatctcacggtttttggcgcctttcgcctgtggcagatgctgccgatgaccctggcgtttgcgctgctggtggcgatctgcgcggcgagcgtaggactggcgattgtgcaaaaggcgctcagcctggccatgctggcgagcctcggcggttatcttgcgccgctgctgctctctaccggcggcggcagccatgtggcgctgttctccttctatcttctgctgtcggtcggcattcttgccatcagcatccgccagcactggcgcgagcttaatctgcttggtctgctgtttacctttggcatcggcggcctgtgggggctgaatgagtatcggccagcgttttacctgagctgccagctgtttttaatcgccaatacgcttatttttggcgtattgagcgtggcgctgtcgctgcgggcgcaggaaaaaggtcgtcagattattgacggcgtgctgctgtttgcgccaccgctggtcggctttggtatgcagtacgccattacccggcacatggcatacgggccggcgctcagcgcgctgggctacggcggtttctatctggccctggcctggttggcgctgcgtcgctacccctctttagggaagccgctggtgctggcggcgctggcgctcggcggtgcctttaccacgctggccatcccgctggcgctgtcggctcgctggaccgcgatggcctggtcgctggaaggtcttggcatcctctggctgggggtgcaacagcagcagcgacgcatgagctacagcggtacggcgttactggtactggcggttggcagcgcgctatgggcgcaggcgaatggcgctacgccgctctctttgctgctgattttcgccgtactcagcctgagctggctgacggccgcatggctgtggcgaaccgtccaggtgcagggcagttgggggctgcttatcggcggcctgttgttctggatggtggcgcttgtcggcgcatcgcagctggcgttgagtaaagacgcgcagattgtctttggcgtgctggcggcgctggcggcatcggtgtggtgctggcgcgcggccgccgcgcgtttggcctggcaagagctggatgcgagcaaatggctgctgtggccaatgatgctgatggtgctgttttaccagctctcccagcagcagattttcgctgctggctggcaaaatctggcctggtgcgcggcgctacccgcggcggcggccctgctctggcgtgatgggcattcactgccgccacgcctgaataagctggcccacctgtcgctgttgtggatgattttgctggcgctggcaatggagctgttttggtttacccaggatttgccgtggggcatgtcggcctgggcgagcggattaatgatggcggcgggcgggatgctgattttcctcgtctcggaagccgttcatcggcaagtatggccattccgggtatggcctgcgctgtatgcttctcaggcgatgataccggtggcggtggcgctgggatgcctgttaatgctgacgaatgtgcaggatggcacggtctacggtcagacctattttccgctgattaacccgctggaagagggcgccgctttcgcgctgcttgggctgacgatattttatcgcgtttcgcggcgttattttccgctgcagctatcggtatgccgtccctggcccatcgttgctctgctggcgctcggcttctggtggctgaatggcctgctgctgcgcgccctggcctggtacggcgaggtggcctggagtatcacgccgctgtggcattcgcgtttaattcagaccactttcgctctggtctggacgctggtggcgctgacggtcatgctgcgcgcgacgcggcgactttcccgccgcgaatggctatgcggcgcggcgttgttaggcattgttattgtgaaactcatgctggtggatagcgcaggcggcggcgggctggcgcgggctgttgcgtttatcggcgtggcgattttggtgttgatcgtcgggtatttttccccgttgccgcccaaagcaggagaaaagaaatga

SEQ ID NO: 257967 - DNA, 1395 bp, Klebsiella pneumoniae
atgaaatggatgaaagcggtgttatgcggcgtgctgttgggcgcggcggggacggcagccagtagcgatgaggcgcgagaacagcctctggactacaggcagggcctgatgctggaaaccagcggcgcgtcaccctggtaccgcgttgagctgccgccgacgatatatcaggggacggcctggcctgatttgcgcgatgtgcgggtattcaaccatcagggagagaccgtaccgttcgctcttcaggcgcagaaggtccagccagcgatgcctgagacgatggcgctacgtctattccctctgcagatgtcgctggttccgccgcgggaggagagtcgtcgcggcgtagagtcgctgcttctgcgctcaaccacggggatcgaaattcgcctggaaacagaggatgtaaaggcgctcgggcagagctatttactgacgctgccggtggataagacggacgctttcgcgctggctcaactgcggctgaactgggaatcgttggcggctaactggcaggggaaagcgtcgctgtattccagccgcgatttgaagtactggcatccggttcaggaggatgcgcccctcatggatctggcgcgcgataacgatcgtttgaaaatggacaccattagcgccagcctgaccctctcggcgcaaggtaatcgttacctgctgctgatcctcgatgcgcaaagcaaggcgccggcgttaaatagcgtgacggccctggcggaacgcagagaaccggagtctacgcgcattgagcttaatgctcaggcgcacagggtttcagatgaggaggccgtttggcgctgggcccggcctcagccgctgacttcgctcagaatatcgttggcaggcgaaggggttctaccggtcgagctcgcctggcgcagcggcgaaaatgagccctggcagccgctgacgaaaaccgtgctgtatcagctggacggcaagcgttcggacgatattcctctgtcaggtcaaccggttgaagcggttcgcatcaagacgattaatgcccgcttatcggcgtcgctgccggcgataagcggggcgcgcgataaataccaactggtctttaatacccagggaaaagggccctatatgctggcctggggaaaccgggcggcgcaaaaggcggatgtcgccctggacatgctgatcccgccgtcgctgcgtaagacgcaggcggtgaacgatctccctctggcggtcgcgcaagaagacgtcacgctgggcggcgaagcgcggttgacggcgacgacggctaccgagcagcagagcagctggaaaacgctgctggtatggggagcgctgatatttggcgtcgttgtgctggcgctgatggcgtggcgcatctggcgtgaagtgaaaaaaagcggcggcgtataa

SEQ ID NO: 257968 - DNA, 378 bp, Klebsiella pneumoniae
atgaacaatgtcattaactggtttgagatcccggttgtggagatggatcgtgccgtggcgttttacgagctggtgatgcaggtgacgctgcgtcgggaaaaaatggattgcatcgagatggccgttttcccgtatgaggacccggctcccggcggcgcgctggcaaagctcgacggggttaagccttccgatcagggatgtattatctatctgcatactgacaatctggcggccgcgctcgaacgcgtgaactcggcgggcggaagctgcgtttttggcccgcttgagctgacggacgatatcggcacgattgccctgtttatcgatagcgagggtaaccggattggtctgcatcaacctaagaacctgacccattaa

SEQ ID NO: 257969 - DNA, 516 bp, Klebsiella pneumoniae
gtgctgtcgattcccctgctgctgccggacggcaacgtcttcccggcgcgctatgagctggtgttcctcgccgccggggtgattctgttctcgctgttcgtcggcgtgattgtgctgccgattctgctgcggcatatcgagtcgagcgatcatgtccagcagcgcaaagaggagcgtctggcgcgggcggcaaccgcggatgtggcgattgtcgcgattcagaaaatggaagagcgcctggctgcggataccaaagagaatatcgataatcagctgctgaccgaggtcagttccagggtcattggtaacctgcgtcgtcgcgccgatgggcgcaacgatgttgaaacctcgatgctggaagagagcctcgaacgccggttccgtctggcggcgctgcgctcagaacgcggggagctgtaccacctgcgcgctacccggcagatcagtaacgagacgctgcaaaagctgctgcacgacctcgacctgctggaagccctgttaatcgaagatcgctaa

SEQ ID NO: 257970 - DNA, 888 bp, Klebsiella pneumoniae
atgtctataaaaatgaagcaaatacaggcatttatcatggtatcctcagagggtaacctcactcttgcggcaagcaaacttggaataacgcaatctggcctgagccgactgttatccggccttgagtcagatttgaatgccacgctatttgaacggcataagcatggggtctcactgagcgagctgggcacggcctttttacctcatgccattaccttaatgaacaccgagcgaaaagcgcgccaggaactggatcttattaatggttcagggaaaggaatagtcagagccggctgcgtatccagttttctatccagccattttatcgagaaagtaaacaacttccatcaggcctttcctgatatttatattaagatccaggatcgcatagattcagagctttttaaatcattattaactcatgacatcgatatcgccatatgcggcccgttgccgcataatgataaaatcatcgagcgtggaaaaataaacttcacggatagcatacagattatttcgcgtagcaaccatccgttacagggcaaaaaaaacttgaaattacaggatactgaagaatattcgtggattatgccgccaaacgatagtacccctatgcagatattaaccgaagtctatcatgataataacatgacgccgccaaaaccgattatcgaatgctcttcatcatccgcgataaaatccctcatatgcaacagtgatttattaacctcgatgccagccccgatatatcacctcgaacttaccgccggcctaattaaaccgctagcaattgaaaataccattttcataagagatttctttatttatactcattttggcattctttctgaaacctctaaaaaattcatccagtttctaaaaagataa

SEQ ID NO: 257971 - DNA, 939 bp, Klebsiella pneumoniae; identical to SEQ ID NO: 188663

SEQ ID NO: 257972 - DNA, 1710 bp, Klebsiella pneumoniae
atgcaattaattaatatatctgccgcggaaatgatattatatcgtttgcaggcgcttggcgttgaattcatctttatcaattcaggaacggattatccgccgatggttgaggcctactctcgcttaaaaagcgaagggtgtttggttcctgaatttgttgtttgcccgcatgaaaacgccgcgattggcatggcccatggatactatctggcaaccggtaaagtgcaagctgtgatggtgcatacgaatgtcgggttggctaatgccgcatgcgggattattaatcttgccaatagtaatataccggtaatcatttttggcgggcgcacgcccatcagtgaacattctcatttcggctgccggaatacgcctatcggctatggccaggaaatgcgcgatcaggccgcgctggttcgtgaatcggttaaatgggattttgaattgcgttatgccgatcaggccggggaacatgtcgatcgcgcctgggcgattgcgaactctttgcccaaaggaccggtttatttaagcttgccacgcgagcctttgtgcgaaacttttgccaccgactcggccgccctgaactgccggccctcccagcagccgataagtttttccccggctccggactcgctgtcaatggctgccacgctgattgccaacgccaggcacccggttatcttctcgcaaagaggcgcaaggacccggcaagccttcgacctgattagcaccttcgtcgaacagtgggcgattccggtggtggaatattgggggaccgaggtgaccatttccgctgcccatccgatgtatgccggcaatgagccagcttactggttgtcaaaagcggatgtggtcatcgtcattgactcgcaggcgccctggatgattgagagtatgaacgttaatccggactgcaaggttattcaaattggtccagacccgctcttctcacgctacccggttcgcgggtatcaatctgatgttaacctggccggtgaaacggatacgatattcaaattactggataatgcattaaaaccttatctggcggagaaaagcgcgagcgtcgaggagcgctatttccatgtcgctgcgcataataaaaaagaaagaaccacaagagataatgttgttgattccgcaaacgcagggcctatcggcaagccatggttaagctattgtctgggagcgctggctaataaatacaacggtaaaatcacatctgaattaaccacattaccgcagttcgccaacttcattcagccggaaagctattatcaggaagcgctctccggcggactgggtgaagcattccctatcgccctgggattacagctagccaatcgcgatgaattagtgatcgccgccgttggcgatggttcttatctgttttccaatcccgcggtatgccatcacattgccgaggtaatgaagcttcccgtgctggttgtcgttggcaataacgccggatggggcgcggtggccggtggaacgctggcgctatatccggacggctatgcggcgaaaatggataaggttccggcgacatcatttacgttatcgcccgatctggcggctatcgctgcatcaagccgcgcggtcgctatgaaggtagatcgcgctgaggacttactcgataccctggaggaagccgtcaatattattcgtactcagaagcgttcggtgctggttgacgtcattctcgggaaataa

SEQ ID NO: 257973 - DNA, 1128 bp, Klebsiella pneumoniae
atgaccgagcattgcgctttaccgggatcgtttaaggctgccgttgtccgtcagccgggcggcccttttgaactggaaaccgtccagttaaattcgcttcagcctcatgaggtcgttgttcgtatcgtggcgacggggatgtgccataccgatatggttgcccgcgatcggctctatccgatcccgcagcctatcgtgctgggccatgaaggggcaggagtggtggaggccgtcggggcggaagtacaaaaagtggtccccggcgatcatgtcgtactgacgtttttatcctgcggcgcttgccgtccttgtcttgagggcgtgccggccagttgtcaaaactttaatgccctgaatttttccggccagcgtagtgatggcagccatgcgctatgccaccacggcaaccaaacgctgcacgatcgctttttcggccagtcatctttcgccgcgttctccgtggtcgatcagcgtaatcttgttaaggttcgcccggatgcgccgctggagctgcttgggccgttgggttgcggtatccagaccggcgccggagcggtgttgaatgcattaaaagtagcagccggaagctcttttgccgcctttggcggcggaacggtgggattaagcggcgtcatggctgcctacgtcgccggggcaacaactatcatcgtcattgacgtggttgaggagcgcctggcattagcgcgtgagctgggtgcaacgcatgtgattaacagtaagaaagaagatcccgttgcagctatccggcatatcactggcgatggcgttgactttagcctggagtctaccgggcggcctgagattgtccgcgccgccgttgaggcgctacgcccacgtggtatgtgcggtattgtcggcgcctcaaaaaccgggaccacgttcgcgctggatatgaatgatgtgatgcaaaactgcaaggtattgcgcggcatcgttgagggcgacagcatcccggatatatttatcccgcagctggttgagctgtatgtgcaagggcgtttccccattgataagctgatacgtttttatcccttcgaggagattaaccaggctgctcacgatagcgagtgtgggaaaaccattaaacccgttattcgaatcggataa

SEQ ID NO: 257974 - DNA, 897 bp, Klebsiella pneumoniae
atggatattcgaacgctgcgctattttgtcgaggtcgttcgccagcaaagctttacccgcgcggcggaaaaactattcgtcacgcaacccaccatcagcaaaatgctaaaaaatctggaagatgagctgagctgcaccctgctgatccgcgacgggcgcaggctgctgctgaccgataccggaagggtggttttcgagcgcgggcaggctattcttggcgaatttcatcagctggagtcggagctaagcgatataaatcatctgcataaaggcgtgctgcgcctcggcatcccaccgatggtcgggatgctgatggctgaaccaattagccgctttcgccagcgctatgcgggcgtcgaactgaaaatcgccgaatttggcgggctgaccgtgcagcaagcggtaagcaacggcgagctggatttagccatgacggcgctcccggttgacgaggccagcggcctgaccacgctatctctgttcagccatccgctctgcgtgctgacgccgaggacggcgcagtgggaaagcattgcgtcattgtcgccagaagcgctcgccgcgtatccgctggtgatttacaacgaggatttcgccctcagccagcagctgatgcggctatttgctcaacatgacgtcaagccgcgcatcgccgtgcgcagcggacagtgggattttctggccgccatggtgcagacagggattggcgttgcgattttgccggaaccgatttgccagcgtctcgacccgcggagcttttgctggatcccattacagagcgagctgcgctgggagctgggaatgatttggcgggaaggcgtgtatatgtcgcacagcgcgcgggcgtggctggaatgtagtaaggcattttggttgagcgacgatatcgctggatag

SEQ ID NO: 257975 - DNA, 690 bp, Klebsiella pneumoniae
atgagtgattttcagctaagcgtcctgtgtcttctggtcacgctaggcctctatttttccaacaagcggctttatcgtcgcttccataaactgcccttgatgccgctagtttttaccccgattctgctggtcatattgctgattttcggtcatatctcttatcaatgctatatgggagaggcccactggctgctgtggcttctggggccggcgacgatcgcttttgccgtaccggtgtatgacaatctggcgatcattaagcgccactggatgtcgctgactgccggagtgacgaccgcatcggttgtcgcggtcaccagttcggtgtggctggcgcgactgtttaccttgcccgatgagatccagcgcagcctggcggtacgttcggttaccacgcccttcgcgctggcggcagccaaaccgctgggcggccagcctgatttagtcgctctgtttgtcgtggttaccggggtatttggcatggcggtgggcgatgtgctgtttctgcgtctttctatccgcgaggggatggccaaaggggcagggtttggcgcggcatcgcacggcgctggtaccgcgcgttcttatgaactggggccgcaggagggtgtcatcgccagcctggtgatgatgctttccggggtagtcatggtgctggcggcgccgttggtacgctgggcgctgttctga

SEQ ID NO: 257976 - DNA, 537 bp, Klebsiella pneumoniae; identical to SEQ ID NO: 188660

SEQ ID NO: 257977 - DNA, 687 bp, Klebsiella pneumoniae
atgaacagattattatgctttgtcttattttttttctgcatttcagtatcgcaggcgagcgtggtcgttggcggtacgcgagttattttcgatggaacaaaaaagaccacgacggtatctgttcaaaataaagataatgtaacaaatatagtgcaatcctggatctctatcgttgatgatacctcacctgcgaaagattcatttattactaccccccctctgttcagattgaaagcgggcgagcaggggtttgttcgcattctccgctcgggtaaacccctgccggaagatcgggaatctatgttttggctcaacgttaaagggattccggccatggacaacgaaccagacaaaaacatggtgcaatttgcaattaattcccggattaagcttatttatcggcccgctgccctaaaaaacgcgattccggaaaatttctctgaaaaactgcggtggtccagtgaaggaagagaaatcaaagtgaaaaataactctccattatatatgaatttctccgcaatttatattaatggcaaggcgctacctgaggcgtggtttgtcgctccttattcaacaataaaaataccggtagcaagtgcaacttcgtctgggaaaagagaagtcacatggagtgtgatcaatgattatggtatgtcagggccgaaatatacggccatcatccaataa

SEQ ID NO: 257978 - DNA, 2592 bp, Klebsiella pneumoniae
atgattatggtatgtcagggccgaaatatacggccatcatccaataacgtaagatggaatcatgcattttcattgaaaagcagctatgtcgccatcctctgctgtcttggcgcacttccgttatcgacttccgctggggaatattttaatccccacttacttgaagtcaatgaaaccggcgcatcagtcgtagatttatcctatatttcccaggcaagcgtgcctcccggtaaatataacctcgatgtctatattaacgaaaaatttattacctctgaatctatcgtttttaagccgaaaaatgaaggtgatggcgcttctgctcagccttgtatcagcgtagcgcacctaaaagattggtcgattaaagttgaagactaccctgcgctcacggtggcgggctctgaatgcgcaaaattgtctgcgatcccgggatgggagacctcggtcttgcttccacgccagcgaatcgattttacattaccgcaggtcgccctgcggcaccgtccgcagggttacgtcccggaaagcctgtggcagcagggtatcactgccgggctgctaaattacaacatttccgggcaaaaaaccgatccgcggcacggtggtgaatcgacatccagccagtttgtcagcttgcaaccggggctgaacgtagggccgtggcgtttacgtaattacagtacccttaatcataatgaggacggcaaccagtgggactccgtctatagctatatttctcgcgatatccacgccctgaaaggccaactgatattagggcagacttatacttcatcaggcatctttgacagcattagcttcagcggtttgcagttgaactctgataaagagatgctgccggacagcatgaatggttttgctcccgtgataaaagggatcgcccgtactacggcggacgttacggtctatcagaacggatacagcatctataaaaccacggtctctcctggagcattcgagataaacgacctttaccccaccgggagcgcgggcgatctctttgttaaggtgaaagaatctgatggtagtgaacagagctttgttgtgccttttgcctcgctggcgattctgcagcgagaggggcaggtagaatatgctttcagcagcgggaaaactcgctccggaagctcaggcggaaaagaattcaatttcctacagtctaccgtcgcctggggggcattgagcaacgtcacgctgtacggtggttttcagcagctggaagataaatatagcaatgcgctgctgggggccgggtttaatctgggttctgtcggcgcgctctcatttgatgcttcccagtcctgggctgagataaaagaaaacccggaagcggataaaacctcttccagcgaggggcagtcttaccgcgtgcggtttagtaaagactttccattaacgggaaccaacttttccgtcgcagggtatcgctattcaacgcatggttattactctttgcagaatttcatcgataacgccacagctaatagcagctgttgttcatcaaacgggcggacgaaaaatcgctttgacgcctcggcctcgcagattctctcaggctttggttcactctccctgtcgctggtaagcgagtcttactgggatgattcacgtatggagtcactgggtgtcagttacagcaatacccttgggcaggtgtcatatttcatcaactactcctataaccgaaatgtgcaaagctccagccagaacagcgacagttcgccatccagcgataatattatctcgctcacggtgagcgtaccgtttggcgcgaatacctcagccaactacaacatgaacagcagccggatgggggacactacccacagccttggtttgagcggcgcggcttttgcggaccgatctctgaactggaatgtgcaggaagggtacaacgccagcgacaagagcacctcaggcaacgtcaacctgaactaccaggggtctaaaggcgaggtggccgccggatatggctatgacagctatagctctcactataattactcgctgcgcggcgggatgctcgcgcactccggtggaataacgctatcccgttatcttggagagagcgtggcgctgattgaagcccccggcgtcagcgatgtggcggtacgcggccagaccaacgtcatgaccgattccgccggatacgctgtcgtgccttttgtccggccctatcacgaaaatagtctctcccttgatgagcagcaggtctcaggagcggaaattgataacatcgtcagaacggtggtaccgacgcgtaacgctatcgtcaaggttaaatatgatacctggattggctataaggcaatgatgaccctgcgctttggtaacaaagaagtgccttttggcgcgatcgtttcactgagtgatgaaagccaggatgctaaagagagcagaagcgctattgtgggtgatgccgggcaggtttatctgacgggtctaccagaaaaaggccgcatgttggtgaaatggggcgatgaacagaattcccaatgccgttttaattatgatttttcaggcaataaatcaaccgacgatattattttttatcaggcgaactgtcgatga

SEQ ID NO: 257979 - DNA, 594 bp, Klebsiella pneumoniae
atgaatagacaccctattttaacggtgggaatgaagtacgcttcacgggcgaggaatatcgctcttttggtattatgctgtactattcagctcttcgtgagcgctgcggcctgggcctatgatgccaatagcaccgtgaattttaatgttaccggcacgatagaagaaccctcctgtgaggtgtcgataaaaccgtctgaaaatatcgacttaggtacggtatcttatcaacatatgaccggaaaagcgggcgctaatagcgaaaacgtccctgtttatcttcagtttgaaaattgcgctcaaggtacagcctcggtcactattaccttcagcggctcggggtatgatagtacttattcaatgatatataaaaatgcccagaccgatagtagcggagcgaaaggcgttggtttacagctatttagcctcaaggattcaaagtctctggggccaggtgatcaatatatctacacattcagtgacggcgagggcggtcacacttttgacatgattgccagaatgtataccccctatggccagataactgccgggggcgtaatttatgccgcgacatttaatgtgtcttacaaataa

SEQ ID NO: 257980 - DNA, 1104 bp, Klebsiella pneumoniae
atgtttaagactattttattactactggcgttaggcttccctatttatggctggtcatgcgatacgggcactaattatggcgatgtgtcgatgacgaatctacctgaaaaaatattgattaatgcgggaagctactcggcaggaacgattctttatgattcagggcaaataacgcgttcgcaaaccagcgtgcttaactgtcaagggaatatatacgctcaatttgcatggtcttccgggaatatcgtctcatctgttagcgatggaatatattcgactaacgtaccaggtatcggtctgcgggtaaaagtgtggttaaatattaccggggaatataatggcgattctgatgattttaatgccgattatagccaacattatatcggtgatgcagacatgtatttgggaaaaccaactggatttcttgatagttgggccagcacaaattatacgccaaaatatcagctgcagctggttgctactggcggagcgatagccagcaatagcgccctgacactgaaggatcccgtctcatcggtttcgattagagatgacaataagttgatggttatttcccaactgcacgtgagcggtacgacaaaaatccagctgacgccgatgggctgtacagcgagcacaaccgcgctgaattttccgatgggctcagttaactcgaacgcgtttaatctctccgctaaggctggttttgcccagcaaacgcttaccctgagctgtgagccaggaaccaacgtgacgatgcgtattacggcgacagaagcggaaggtgataaccctgatcataccgtgattgcgttaacgcctggcgacaatgtcgcgaccggcgtgggggtgcagttgaatatcaacggcgcgccgctatccgtaaacaattctacatacagggtcttcgatgccgtcaacagaacgacggtgacgaatcccggcgcagaggctggttatacgatattcgccgatcctgctaacaccggtggagctgcggcatcgaaccagctggtattttcgactaactattataaaaccggctctgaaataacaccgggaacggccaatgccagcggaacgataacctttagctataattag

SEQ ID NO: 257981 - DNA, 1959 bp, Klebsiella pneumoniae
atgagccaaatacataaacaccctattcccgctactattgcggaacgttgcctgattaacccggaacagtaccaggcgcagtatcagcagtccgtcaccgaccctgatgccttctggggcgagcagggcaaaatccttgactggatgaaaccctacacgcgcgtgaaaaacacctcattcgcgccgggcaatatttcgattaaatggtacgaagacggcacgctgaacctcgccgctaactgcctcgatcgccatctggcggagcgcggcgaccagacggccatcgtctgggagggcgatgacgccagccagagcaaaaacatcacttatcgcgagctacaccgcgatgtctgccgctttgccaacgtcctgctcgatctcggcattaaaaagggcgatgttgtcgctatctatatgccgatggtgccggaagcggcggtggccatgctggcctgcgcccgcatcggcgctatccattcggtgattttcggcggcttctcgccggaagcggtcgccggacgtattatcgattcaaactcccgcctggtgatcaccgctgatgaagggctgcgcgccggtcgcgcgatcccgctgaagaagaacgtcgatgacgcgctgaagaatccgaacgtcaaaagtatcgaaaatgtggtggtgctcaagcgtaccggcggcaaaatcgactggcaggaagggcgcgacctgtggtggagcgatctgattgagaaagccagcgcggaacaccagcctgaagagatgaacgccgaagatccgctgttcatcctgtatacctccggttccaccggtaagccaaaaggcgtgctgcacaccactggcggctacctggtctatgcggcctcgacttttaaatacgtgttcgactaccatccgggcgacatctactggtgtaccgccgacgtcggctgggtcaccggtcacagctacctgctgtatggcccgctggcctgcggcgcgacgacgctgatgttcgaaggcgtaccgaactggccgaccccggcgcgcatgtgccaggtggtggataagcatcaggtcaacattctttataccgcccctacggcgatccgcgcgctgatggcggaaggcgataaggctatcgaaggtaccgaccgctcttccctgcgcatactcggctccgtcggcgaaccgattaacccggaagcctgggagtggtactggaagaaaatcggcaacgagaagtgcccggtgatggatacctggtggcagaccgaaaccggcggctttatgatcaccccgctgcccggcgccatcgagctaaaagccggctccgccacgcgtcccttcttcggcgtccagccggtgctggtagataatgaaggcacgccgctggaaggtgcgaccgagggcaacctggcgatcgcggactcctggccgggtcaggcgcgcacgctttttggcgaccacgaacgcttcgagcagacctatttttccacttttaaaaatatgtacttcagcggcgacggcgcgcgccgtgacgaagatggctactactggatcaccggtcgcgtcgatgacgtgctgaacgtttccggccaccgtctgggtaccgccgaaattgaatcggcgctggtgtcgcatccgaaaatcgccgaagcggcggtggtcggcattccgcataacattaagggccaggccatctatgcctacgtgaccctcaaccatggcgaagaaccgacgccggagctctacgccgaggtacgcaactgggtacgtaaagagatcggaccgctggcgacgccggacgtgctgcactggaccgattccttaccgaaaacccgttcgggcaaaattatgcgccgtattctgcgcaaaattgccgcgggcgataccagtaatctcggcgatacctcaacgcttgccgatccgggcgtggtggaaaaactgctcgaagagaagcaggccatcgcgatgccatcgtaa

SEQ ID NO: 257982 - DNA, 927 bp, Klebsiella pneumoniae
atgcatacgcctgactgttgggtagcatacctctcgagacctggtatgatgtgtttacaagacttcaatttccccgggatgctacagggctcaacacgttcagagcttgtcttaccgcagcatactcaggtattcacaggatgcagaataattatgaagtacttaattgaaaacaaactgatttataatgctgagtctggtgagcttattcgtattgatattggcgtaacggataagcaccaattaacgaaaacggccaatcatattctggccatactgattgaatcccacggtgagattgttcctcggcaaagcctgttagagagggtgtgggagtctcgtgggctcgaagcttcaaattcatctttaaaccaatatattagtattctcagaaagaaactatcatccctgacgggaacagagaatattattttgacaaatccaggcgttggcttttatctgtctgcagatatcaaaattaaactatgtaatgaagtcagcaacgggctatctcctccacggcgaacccgttaccactggtttagttatctgatacgtggaggtattttagcactaatccccagccttttttttattttgcttgctaaatatgaagttgttgttccatctattcgtttgaaagagtccgacaatctgactcgtatcggcaactgtcaattaaaatcgtctgttcccatccccgagagaatgcaggaaaaagttcttaatctaatggagatgcatcatcctgggctgcttgaacactgtcaaagtagtccggccagactaatcgtttatgtccaaagaagtgtccttcatggtaaatctggcgccgtttttacatcattttgccctgtgaatagcataagccataagacgctctattgtcataatttttacgctaatcagtggaggcagcatgactaa

SEQ ID NO: 257983 - DNA, 492 bp, Klebsiella pneumoniae; identical to SEQ ID NO: 189875

SEQ ID NO: 257984 - DNA, 828 bp, Klebsiella pneumoniae
atgcgcaattcatcttttgtcacccgccagattggcgattttcaggtgactgcccttagcgacggcagcatggccgccggcctggcgctgctgtccggcatcgatagcggcgatgccgcacaaatccagcgcgatgcgggcgtcatcgaccccggcactattgacattaatagctatcttatccgcggccggggaagaacgattctgatcgacgcggggacgggaggcggcgtgctggaaaccagtctgcgggcggcgggaagtgcgccagacgacgttgataccgtcctgctgacccacgctcacccggatcatatcggcggcctgctggatgccaacagcgcgccgcgctatcccaacgctcgtcttcatctgcatcctctggaagcggagtactggcaggatgacgtcatgttaagacgggctaatgagcgcgggcagcgaaacttcgctctcgcccgccgcaccctggacgcgtggtcccggcgcctcgggtttctggaggatcgcgaagtcgtcgcgggtatccatccggtctggttacccggacatacgccgggccatagcgggtttcgcattgacgccgccgggcaaagcctgctgatttggggcgatatcgtccactttccgcatattcaggccgcgcgacccgccgccgctatcgcttttgattgcgatcccgtacaggccagagcgacgcgggaagcgattctcgcccaggccgccagcgaaaacctgctgattgccggtatgcatcttggcggatcggggtttgcccatatcgtaccgacttcgtgcggctatcgtatcgatgattctcagcagtag

SEQ ID NO: 257985 - DNA, 543 bp, Klebsiella pneumoniae; identical to SEQ ID NO: 188418

SEQ ID NO: 257986 - DNA, 876 bp, Klebsiella pneumoniae
gtgcgaaaaaaactccccagcagcgcctctttgcaggcttttgaggctgccgccaggcacggtaactttgcccgcgcggcggaagaactgtcgcttaccgaaggggcgatcagtcggcaaatcgcccgtctggaatcgctgttgaactgcaggctgtttgagcggacggggagccgggtacggctgaatcctaacggcgcgcgctatgcgcaccatgtgcgcgaaacgctggagcgccttgaacgggacactcaatatctgatgggggccgcggacggcagccgaagcctggaaatcgccgcgccgccgaccttcgccagccgctggctcattccccggctgggggattttcagcaccggcatccggatatcacgctgaatatcgcggtcagaaccgacccgtttatcctcaccggcagcggttttgacgcggcgcttcactttgaacaccccgcctgggccggaatgcgtatgcagtttctgtttgaagagaggctggtaccggtatgccacgccgggctactcacggaagaagatctcgtcagccaactgaacgcgctgccgcgaattcatcgacggcagaatcccgacgcctggcagcgctatgctgaagagtgcgggatcgcgctggataatccggcgcagggggggcgctacgatctgcatgagatggcgatagccgccgcgctggccgggcagggcgttgcgctggtgccccatgtgtacgtcgaaaacgcgatcgaaaacgggctactggctgcgccctggccgcaggcccgcagcctgagcaagcgcttttgcctggtgaagccgctggaaaacggcgtcaacgagtcggcgctacgggcgttcgagcagtggctgttgacgcaataa

SEQ ID NO: 257987 - DNA, 1578 bp, Klebsiella pneumoniae
gtgatatcatcgcgcctttcccgtttcgtcctggggctcttttttatgcaacaacctgttgttcgcgttggagaatggctggttactccctctgttaaccaaattagccgcaaggggcgtcagctaactctcgaaccgcgcttaatcgatcttctggttttctttgcccgtcatcctggggaagtactcagccgggatgagctcatcgataatgtctggacccgcaacgttgtcaccagccatgtcgtcacgcaaagcgtctctgagctacgtaagtcgctgaaagatggcgacgacggcagccttgaatatatcgcgaccgtacccaagcgaggctataagctaacggtgccggtgatctggtgtacggaagagggggaagaactgacgccggttatcccggcagaaacgccgacggtcgccgtggacgcgccatcggtttcctcgcagcctgaggcggctgcgccagagatggcgccggtggtaaagccggaaaaacgcaagcggctgagtacgtttatcgtctggggcctgtttctgctggccctcgcgagctgcgtggcgctggtggcgttatcgaccctcgagtcgcgcccgccggtcacgaaaacgcggctgctgctcaacccgcgcgatgttgatattcacctgctcagcggcagcgcctgcaacaactggtcatcgcagcactcctatgccattggtctcgggagcctgattaccacctcgctgaacaccttctccacctttatggtgcacgataaaaccaactacaacatcaatgagccgagcagctccggtaaaaccctgaccattgagttcgtcaaccagcggcactaccgcgcgcagcagtgctttatgtcggtgaaggtggtggataacgccgacggttcgaccatgatggataagcgttactttgtcaccagcgacaaccagctgtcgattcagaacgacctgctgagcagtctgtctgaggcgctgaagcagccgtggccggcgcggatgcaggagatgttaaagcaatatcagccgtcgcaaagtatcgcgcttacccatttctatcaggcgcatcagctattaatgaatggagacgtcgattcactcggaaaagccagtagcctgcttgccgacgtgaataaacagtcgccggactttacctatgcctgggcggaaaaagcgctggtggacgtattacgccattctcagcagccgctggatgataaacagcttgccgatctttacagcgaaataacccgggtgggtaatatgccggggattaaagacatggcaatattttatcagattaaaacggtagatatgctgggcaaaggcaaagtcgatgaagcctacagcgcgattaataccggcattgatctggaaatgtcgtggatgaattatgtgctgctgggtaaggtctacgaaatgaaagggcagaaccgggaagctgccgatgcttacctgacggcgtttaatttacgtccgggtgagaatacattttactggattgaaaacgcggtatttcagacctcggtgacccgcgtggttccgtatctcgataacttcctcgcttcagaataa

SEQ ID NO: 257988 - DNA, 1485 bp, Klebsiella pneumoniae
atgaaaacaccctcacagccgcgcgcgatctattacatcgttgcgatccaaatctgggaatatttcagcttttacggcatgcgtgccttactcatcctctatctcacccatcagctcggctttgatgacagccacgccatcagtctgttcagcgcctacgcctccctggtgtacgtcactcctattctcggcggctggcttgccgaccgcctgctcggcaaccgcacggcggtcattgccggcgcgctattaatgacgcttggccacgtagtgctgggcgtcgaatccgattccacctggagcctgtacctcgcgctggcgatcattatctgcggctacggtctgttcaaatccaacatcagctgtctgctgggcgagctctacgccgttgacgaccctcgccgcgacggcggtttctcgctgctgtacgccgccgggaacgtcggctccatcgccgcgcctatcgcctgcgggctggcggcgcagtggtacggctggcatatcggctttgcgctggcgggtatcggcatgtttgtcggcctgatgattttcttaagcggcagccgctacttccgccacgcgcgcggcgtcgataaacaggcgctgcgggcggtgaaatttgtgctgccgacctggggctggctggtggtgatgctctgcgttgcgccggtgtttttcacgctgctgctggagaataactggtccggctacctgctggcgatcgtctgcgtattcgccgcccagatggtggcgcgcattatggtcaaatccccggagcatcgccgcgcgctgtggcaaatcgttctgctgatgctgaccgggaccctgttctgggtactggcgcagcagggcggcagttcgatcagcctgttcatcgaccactttgttaaccgccgcctgctgaatattgaggtgccgaccgcgctgttccagtcggttaacgccgtggcggtgatggcggcgggcgtcgtgctggcgtggctgatgcggccggagggcgcgacccgctcggcgctgcgcgtatggctgaagttcgcctttggcctggtgctgatgggctgcggctttatgctgctggcgcttaacgcgcgccacggcgcggcacagggacaggcatcgatgggcatgatggtggccggcctggcgctgatgggtttcgccgagctgtttatcgacccggtggcgatggcgcagatcacccgcctcaatatgcccggcgtcaccggggtactgaccgggatttatatgctggcgaccggcgcggtagccaactggctggcgggcgtggtggcgcagcagactaccgagtcgcaaatcagcgatacggcgattgccgcgtatcagcacttctttgcccagatgggcgaatggacgctgggctgcgtggcggtcattgtcgttgtcgccttcgccgccgcgttcagcgtcggcaaacgccgcgcggccgccggtgaacttcccggcgtcaacgcccaggatctgtag

SEQ ID NO: 257989 - DNA, 1518 bp, Klebsiella pneumoniae
atgtctgaacaacaagcacaaggtgccgatgaggcaattgaccttaataatgaactgaaaacccgtcgtgaaaaactggccgcgctgcgcgagcagggcgtggcgttcccgaacgactttcgccgtgaccatacttccgaccagctccatgctgaatacgatagtagggaaaacgacgagctcacctctctgaacgtcgaggtctccgtggctggccgcatgatgacccgccgtattatgggtaaagcctccttcgtcaccttacaggacgtgggcggacgcattcagctgtacgtcgcccgcgacgatctggcggaaggtgtctacaacgagcagtttaagaaatgggatctcggcgacatcatcgccgcccgcggtaagctgttcaaaacccagaccggcgaactctccattcactgcaccgagctgcgtctgctgaccaaagcgttgcgcccgctgccggacaagtttcacggcctgcaggatcaggaagcgcgctatcgccagcgctatctggatctgatctccaacgaagagtcgcgccacaccttcaaggtgcgttcgcagatcctggcgaccatgcgtcagttcatggtcgcgcgcggctttatggaagtcgaaacgccgatgatgcaggtgatccccggcggcgcctccgcgcgtccgtttatcacccatcacaacgcgctcgatctggatatgtatctgcgcatcgcgccggagctgtacctgaaacggctggtggtcggcggcttcgaacgggtgttcgaaatcaaccgtaacttccgtaacgaaggtatctccgtgcgccataacccagagttcaccatgatggaactctatatggcgtatgcggattacaaagatctgatcgaactgaccgaatccctgttccgcacgctggcgcagaccgtactgggtaaaaccgaagtgccgtatggcgaccaggtgttcgatttcggtaagccgtttgaaaaactgaccatgcgcgaagcgatcaagaaataccgtcctgaaaccgagatggcggagctggataacttcgatgcggcgaaagcgctggcggaatccatcggcattcacgttgagaagagctggggtctggggcgtatcgtcaccgaaattttcgacgaagtggcggaagcgcatctgatccagccgacctttatcaccgagtatccggcggaagtatcgccgctggcgcgccgtaacgacgtgaacccggaaattaccgaccgcttcgaattcttcatcggcggacgtgaaatcggtaatggctttagcgagctgaacgacgcggaagaccaggcccagcgttttcaggatcaggtcaacgccaaagcggcgggggatgatgaagcgatgttctacgacgaagactacgtcaccgcgctggagtacggcttgccgccgaccgccggtctgggcatcggtatcgaccgtatggtgatgctgttcactaacagccacaccatccgcgatgttatcctgtttccggcaatgcgtccgcagaaataa

SEQ ID NO: 257990 - DNA, 414 bp, Klebsiella pneumoniae
atgaaaaaaataaaattaattgttggcggcgtgatctgtgcaagttatttattaacgtcagtattatcaatggcaagtgataatataaacagcaataccattcattttgataaaggcagcaacggcacgataataaaaagtaccgtgaccggcgacgatgttaatgactatacgctggaggcgaaagccggccagatgatgcatatcggtatgaacagccagtggccgcatcccttttttaatgtgattaccccggataatcacgcgatttttaacggttctatgagcggcgatatttttgaacagcgtctgggtgtcagcgggaaatatacggtgcgggtatatcagatgggcggcgcgcgtgatgaagggaaaaccagcgcctacgcgctgacgtttaaaattaccgactaa

SEQ ID NO: 257991 - DNA, 876 bp, Klebsiella pneumoniae
atgttgaaaagttcgtggcgtaaaagcgccctgatggccgccgccgccgttccgctgctgctggcgagcggttcattatgggccagtgccgatgctatccagcaaaagctggctgatttagaaaaacggtccggtggccggctgggcgtggcgctgattaacacggcggatgattcgcaaaccctttatcgcggcgacgaacgttttgccatgtgcagcaccggtaaagtgatggccgccgccgcggtgttaaagcagagcgaaagccatcccgatgtggtgaataaaaggctggagattaaaaaatcggatttagtggtctggagcccgattaccgaaaaacatctgcaaagcggaatgaccctggcggaactcagcgcggcggcgctgcagtacagcgacaataccgcgatgaataagatgattagctaccttggcggaccggaaaaggtgaccgcattcgcccagagcatcggggacgttacttttcgtctcgatcgtacggagccggcgctgaacagcgcgatacccggcgataagcgcgataccaccaccccgttggcgatggccgaaagcctgcgcaagctgacgctgggcaatgcgctgggcgaacagcagcgcgcccagttagtgacgtggctaaaaggcaataccaccggcgggcaaagcattcgcgcaggcctgcccgcaagctgggcggtcggggataaaaccggcgccggagattacggcaccaccaacgatatcgcggtgatctggccggaaaatcatgccccgctggtgttagtgacctattttacccagccgcagcaggatgcgaaaagccgcaaagaggtgttagccgcggcggcgaaaatcgtgaccgaagggctgtag

SEQ ID NO: 257992 - DNA, 357 bp, Klebsiella pneumoniae
atgttcctcgccaatatcctgtgggcggtggcctacgacacccagtatgcgatggtcgatcgcgatgatgacgtcaaaatcggtatcaaatcgacggcgatcctgtttggcgacaacgatcgcttaatcattggtatcttacaggtggcggtactgggcctgatggccgcggtgggctggctgagcgggctgggctgggagtattactggtcgttgtttatcgccgcggcgctgttcgcctggcagcagaagctaatatttaaacgcgaacgcgatgcctgctttaaggcgtttatgaacaataactacgttgggctggtgctgtttcttggcctggcgatgggatatatgcagtag

SEQ ID NO: 257993 - DNA, 714 bp, Klebsiella pneumoniae
atgcgcaagatcaccctggcctttggggccatctgcttactgttcacgctaaatagctctgtcgttgctcgcgcctccacaccgcagccgctgtggacgggcaccaatatggcgaaactcgccgaacaggcgccaatacattgggtttccgtggctcagattgaaaatagcctgctgggacgccaaccgatggcggtcggctttgatattgatgataccgtcctgttctccagtccgggcttctggcgcgggcagaaaacctattcacccggcagcgatgactacctgaaaaatccgcagttctgggaaaaaatgaacaacggctgggatgaattcagcatgccgaaagaggtggcgcgccagctgattgcgatgcatgtgaagcgcggcgatagcatctattttgtcaccggacgcagccagaccaaaaccgaaacggtatcaaaaaccctgcaagacgattttctcatcccggcagcgaacatgaatccggttatttttgccggcgataagcctggtcagaacaccaaaacgcagtggctgcaggagaagggcattaaagttttctacggcgattcggataacgatatttctgccgcccgtgaggttggcgcacgcgggatccgcgtcctgcgggcatccaactcttcctataagccgctgccgacggcgggcgctcagggagaagaggtgattgtgaattcagaatattaa

SEQ ID NO: 257994 - DNA, 231 bp, Klebsiella pneumoniae
atgtatttacagcctggagtttatcgcctgcccctcgccgcggcgctgtttttgatgaccgcctgcagttgggttgatagctacagcagcacggcatatcagcagctgctgatgctggtgctggaagaacttatctgcagttcatcagcgatgcagcggccgcgccggtcgaccgacaatgactcaggcaagaagatcgccagattcgtcagcaagttagcctggcgttaa

SEQ ID NO: 257995 - DNA, 528 bp, Klebsiella pneumoniae
atggccagcagaggcgtaaacaaggtgattctcgtcggtaatctgggccaggacccggaagtacgctacatgccgagtggtggcgcagttgccaacattacgctggctacttccgaatcctggcgtgataaagcgaccggtgagatgaaagagcagaccgaatggcaccgcgttgtgctgttcggcaaactggcggaagtggccggcgagtatctgcgtaaaggttctcaggtctacattgaaggccagctgcgtacgcgtaaatggactgaccaatccggtcaggaaaaatacaccaccgaagttgtggttaacgttggcggcacgatgcaaatgctcggcggtcgtcagcagggcgcaggcgccccggcaggcggcggtcagcagcagggcggttggggtcagcctcagcagccgcagggcggaaaccagttcagcggcggcgcgcagtctcgtccgcagcagcaggctccggcagccccttccaatgagccgccgatggactttgacgacgatatcccgttctaa

SEQ ID NO: 257996 - DNA, 1563 bp, Klebsiella pneumoniae
atgaacacttcatcgttctatcgataccttgtcggcgggctcgcatgctttgccgccctgctatgcttcacctccgtttacgccgccgctgagaacaaactgtcagagccagaggaacgagaggccctgaaggtcgacgttgacgatatgctacagccctggaagggagatttacccggaatgctcgaccggcgaactattcgcgtattaaccaccttcagcaaaacctttttctttattaacaaaggcactcagcgtggcgccactcacgatatttttatggagtttgaacgtagccttaaccaaagcctggcgaaggagaaaaagcttaaacatcgtcatcttaaggtccgtatcatctttgtgccagttgcccgcgaccagctcatcagcgcgcttaacgccggtaaaggggatattatcgccgccaacctgacgattacccccgctcgccagcaggagatgacctttaccgcgccgatatactctcacgttcaggagctgctcctttccggcccgggttcccccaaagtggaaaatctgcagcagctttccggtaaaacggtctttgtgcgcacctcatcaagctattacgagagccttgttgcgctcaacgcgcgctttgcgcagcaatctttgccccccatcaccctcacaccggcgcccgaagcgctggaggatgaagatctgatagagatgctcagcgcgggcctgattcccttgaccgtcgtcgaccgccacaaggcactgttctggaagcaggtcttccccagcattcaggttcatcaaaacatcattctgcgcaacgaaggcaatatcggctgggcggtacgcaacaacagcccgcagctgctggccttgcttaatgaattcatcaacaaaaatcgtcagggcagcaagctgggtaatacgattctgctgcgctacctgaaggatgcccgatatgttaaaaacgcagcagcgcaaaaagagcggcgtaaatttctgaccatggtggagatcttccgcaaatatggcgatcgctacgacgttgactggctgctgatggcggcgcagggctatcaggagtcgcggcttaatcagtctgtacgtagccacgtcggcgcaattggcgttatgcaggtaatgccgggcaccggcagggagctgaacgtcggcgatattaaactgctcgaccccaatattcatgccggggtgaaatatatgcgctggatgatagaccgctactatggcgatgaaccgatgacccagcttgataaggcgcttttctcgttcgcctcctataacgcgggccccgcgcgcattgcccggctacgggcagataccaaaaggcgcggttttgatccaaacgtctggtttggcaacgtggaatatctggccgccgagaagatcggttccgagaccgttagctatgtcagcaatatctataaatattacatcgcttaccggctgattgtggatgaaatggcgcgcaagcagctggcgacagcggccgccaaaaatccggtcatgccgcccgcgacagctacgccagccgctgcggccacgcccgcttcacggtga

SEQ ID NO: 257997 - DNA, 2262 bp, Klebsiella pneumoniae
atgaaatacgattcacactactcgctggccgtactaatcccgatggtcatctggggagggacgctgccggttcaggccgctgatggcagcatgccagacgatacgaagatatctgaaacggctgcggtaaatgacgatgaaacgatggtggtcaccgcggcggcgcagacgctgcaagcccccggcgtatcgaccatcaccgctgaggagatccgtaaacatccgcccgcgcgtgatgtctccgagctgattcgtacccagcccggcgtcaacctcaccggtaactccaccagcggccagcgcggtaataaccgccaggtcgatattcgcggcatgggaccggagaacaccctgattctggtggatggtaaaccggtgaccagtcgtaattccgtgcgctatggctggcgcggcgaccgcgatacgcgcggtgataccagctgggtaccggcggaaatgatcgatcatatcgacgtgattcgcggccctgcggcggcccgctacggtaacggcgcgatgggcggggtggtgaatatcgtcacaaaaccggccaccagcgagtggcatgggtcctggaatacctatatgaacgcacctcagcatcgtaaagagggcgcgacgaagcggacaaacttcagcctcaatggtccgctatcggatgaggtcagctttaatttatggggaaacctgagcaaaacgcaggccgatgcccaggatatcaacgctggccacgaagcggcgcgaaccggtagctatgcgggatcgtatcctgcagggcgcgaaggcgtggtgaataaagatatccacggtaagctgcgctgggaatttgcgccgatgcaggcgctggagtttgaaaccggctacagtcgccagggcaacctgtatgcaggcgacacgcagaataccaacaccagcacgctggtgaaaagtctgtacgggaaagagaccaaccgcctctatcgccagacgtatggcgtcacgtggaccggcggctgggataacggcgtgaccagcaatacctgggcgcagtatgagcacacccgtaactcgcgtatgaacgagggactggctggcggaacggaagggatcttctccagcagcgaattctccgatatcgacctgtcggatgtgctgctgcacagcgaggtgaatattccgtttaccctgggattcgaacagaatctgacgctgggtaccgagtggaaccagcagcggatgaaagatggcgtgtcgaccacccagtctctctcttatggctccattgacggtatgtcggcaaccggacgcagcccctattccagcgccgagattttctcgctgtttaccgaagacaatatcgcgctgaccgagagcactatgctgacgccggccctgcgcttcgaccatcacagcatcgtcggcaataactggagcccctcgctgaatctctcgcaggggctgtcggatgactggacgctgaagcttggcatcgcccgcgcgtataaagcgccgaacctttaccagctcaacccgaactatattctctacagcaacggccagggctgttatgccagcagctcagcctgttacctgatggggaacagcgatctgaaggcggaaaccagcgtcaataaagagattggccttgagtataagcacaacggctatcaggcggggctgacctggttccgtaacgactaccataacaagattgagtcgggctactcggcggtggggacggccagcaatggcaccaccaatatttaccaatgggaaaacgtaccgaaggcgctggttgaagggctggaaggttcgctgaatctcccggtaagtgaaacggtcaactggagcaacaacctgacgtggatgctgcagagtaagaacaagaccaccggcgatcgcctgtcggtgatcccgcagtttacgctgaactcgaccgtcagctggcaggtacgcgacgatctttcgttgcagagcactttcacctggtacggccgtcagaaacctaaacgtttcaactataaaggcgaggcggtatccggcagcgaattaaatgaagtgagcccgtacagcattgtcgggctcagcgcgacctgggatgtgaataaaaacctgagcctgaccagcggagtggataacctgttcgatattcgtcactaccgtgccggtaatgcgcagacaacggggaattcgacgaccggcgcttatctgtatggcgcaggggcggagacctataatgaatcgggccggacgttttatatcagcgtgaatacgcatttctga

SEQ ID NO: 257998 - DNA, 345 bp, Klebsiella pneumoniae
atgccacgaaatgaaattcagcgttcagtgctgagcgagctggtgcgctggataaaaaacaaccttgagaagaagctcaccatgcgggcgctgagcctcttttccggctattccgaatggcacctatttcgcctgtttcgtcactattttaatatgtcgccaatggcctatatccgccagcagcggatgcaattagcccttgatttattaaaggttaaaccggcttttcgcatcgttgatatttgtattctggcgggctatgaagatatcagcgcctttaaccgcacctttaaaaggtactatatgatgacgccagcccagctgcgcaaaatcctgaatatatga

SEQ ID NO: 257999 - DNA, 822 bp, Klebsiella pneumoniae
gtggatacggaattgctgaagactttccttgaggtgagcagaactcgccactttggccgagccgcagaggcgctttatctgacgcagtcagcagttagctttcgtattcgtcagctggagaaccagctgggggtgaacctttttacccgtcatcgtaataatatccgtctgacttcagccggagagaaactgctgccctacgccgaaaccctgatgaatacctggcaagctgcgcgcaaggaggtcgcgaatgcttcccgacataatgaattttcgatcggtgccagcgcttctctctgggaatgtctgcttaacggatggctgggcaagctctatacggagccctataacctccagtttgaggcgcggattgcgcagcgccaatcgctggtcaaacagctgcatgaacgccagcttgatctcttgatcacgacagaatcgccgaagatggatgaactaagcagccagttactgggtaattttacattagcgctttattgttcatcaccggctaagtacacgaatgaattgaattatttacgcctggaatgggggccggattttcaacaaaatgaagccggattgatcggaaatgatgatattcctctgctgaccaccagttctgccgaattagcgtaccagcaactcagcgcccttaagggctgtacatggttgcccgtgctctgggcgcaggagaaaaataacctgcatacggtgaccgacagtgcgacgctttcaagacccctctatgcaatttggctacaaaacagcgacaaacaagcgcagattcgtgagatcctgaagcacaatatattgggatag

SEQ ID NO: 258000 - DNA, 963 bp, Klebsiella pneumoniae
gtgacaataacagctgacctgctgtcgccgcggcggccgatcgtggttatcggcgccgcttttggcgacatgattctccatctcgatgcgctgccgcatagcggtagcgatgtttctgcccgcgatggcggacggcagattggcggctgcgcgtttaatgtcgcccgcgcgctctcgcgccttgaactccctttgataaacgcgataccggtgggcaatggcgagtgggggcaggccgttgcacagaaaatggcgctggaaaacctacccgtcctcttgcgccaccccacccacgataacggctggtgtctggcactcgtcgaggcgaacaaagagcggacgtttatcaccattgagggctgcgagcagcactggaacaacgagctgctggcacaaattccgcagccgaaggacgccataatttatgtctctggctacgagctggccagcgaagcgctgcgccagtggattctggaccttacggaagataaaacgctgtttgtcgattttggcccgcgtctgaacgatctggatattcactttatccaggcgctgctaggcaaagctcctgtgctcactctgaatcgcgatgaactcagcgtgctgtgcgcacgtttatacgatttggatagcgctacccttgacgccgcttcacggctcgccagcgactggcatttacgggcgatctgtcggttcgataaagatggcgcgtgggtggttgaacctgacgcacaaccgcagcatattcctgcctgccgcgtgaaggtctacgatacgattgccgctggagacagccactgcgccggtacgatcgccgggctggcctgcgggatggatctgcgccaggccgcgctgctgggcaatgaagtagcggctattgtcgtcacccggccgggtgcagacggtgctccgggtcgcgaagagctacgtcagttccagattcagcagcaaaacggccgctag

SEQ ID NO: 258001 - DNA, 402 bp, Klebsiella pneumoniae
atgttatgctatggaaaagaattatttacaggtctggaggtaatttatatgacgccaaaagaaatactttgccaatgggttgacgcatttaataatgcagatgtagaaattatttcagaattatatgatgataatgcaataaaccatcaggtagccaatgagccagttattgggaaagaggctataaagaaaatgtttgaacaagatttttctattccagaaatggtttgtatcgttgaaaacattttcgaagatggacaatggacaattttagagtggcgtgccccatcaggtttaagaggttgcggtttttttcaaatagtaaataataaaattatatttcaaagaggctattgggataagctatctttcttaaaactgcacaatttacctattgaataa

SEQ ID NO: 258002 - DNA, 420 bp, Klebsiella pneumoniae
atgtttgataatgacatcgaggaatgtcatgcaacatttaaggcctcggaaagtatgagcccaactgacagggtcaggctgtatatcaaaacgctgttacctgatgcgccatcagcgcactggctgctctaccttgaactctggccgatggccgcgcgcgacgatgattatgctaatttggttcataatcaatcactgcaatggatcaatatactcgaagaaatcatcggctccggaattaatgagggcgagttttcctcgataaacgcttcggtatccgccagacaaataaatgcattaatagatggatactcaagtttgctgatcctcgattattcaaaagaaaaaagaaccacttttcttaatgaaatatatgagatttcttttaaaatccttggcaaacccttccgaagcacatga

SEQ ID NO: 258003 - DNA, 783 bp, Klebsiella pneumoniae
atgccaatttttttccaggaaactcagttgaagagagcaaatataattacccttgctctggcttttactttctctattttttccacaccaaccttagcaaatgcctcaccatcaaaaacttatcgtatcgctgtttataggggagacaccgggtgcgcggggtgttcagaaatggtggtgaaatcgctcgtcggtactggcctgccgctgaacatcgcttatgtgggtgaaaaagaaacgctgaaagtgaatgagcaaacgcttaaaaaattcgatatctacattcaacccggcggcggtcaggatatacccggttcttatgacgtcattggtgatgatggcgctgaggctatccgtcaatttgtgaaaagcggcaaagattttattggcatttgcatgggggcgtatcttgccgataaagactggattgggctcattgatgcaccccttgagtcagaagtgggaagacctggttcacgcgcctatgatgagggggattacaccttgcaagtgaaatggaataataaacaggaacctttttactatcaggatggcccctatctgaataacacaacctcaaacgctgggttccaggcgatagcttattacgacaatggggatgtcgctatcgccagatataaatatggggaagggcatgtcatattatcaggccctcaccctgaagccgatgagacatggatagatgcccgagttgcgggtaacaccacagcggaaagtaaaatgaaacgcattttaagctatctggacataaacaagcgctaa

SEQ ID NO: 258004 - DNA, 1023 bp, Klebsiella pneumoniae
atgaagaaaatcgacatcagtggttccccgtttgagattggcctgcgccttggcgagcttggccgtgaagcatggcatcagaaactgaggctcacgtcattgtggcaaacggtgatggccctgcaggcatcccctgagacccggttaatgcgcgccgaggtgcagcggcattacccgcacatctggcaggagttggaggggttggcgcaggggctggaggccactgttgatcaggtctttgcctggaactgccgtggcgatctggtgcgctcaacgtcggatggctgtacgacggtggccggggtaaacgccgcaggcgagcggattatcgcgcacaatgaagacggttttcctcagttacgggatgaatgcttgctggctaccattactccgagtcgcggactgagctttacgagttttgcctatccggggtcgatttgcggccacacctttgcggtgaatgaaaaaggtatcgttaacacggtgaataacatccgtgcagtgcatcgtccgcagggattaccgcgtcagatcctggctcgcgcctctctgaatgcgaacaccctcgacgaggcaatcactatacttaccggccagccgcgatccggggcgtttcaccatacgctcgggcaactgggcgatgcgcggctgttcagcgttgaggccaccggtcaaggctgttccgttctacccctgacgacggtaaccgggcatgccaaccatctggtgcatgcggcactggctggcgttgagcagatcgttaccgacagctcagcgtcgcggcagttacgcctcgtgcagtggcgggaaacacaacctccgtttgacgccgcggcggcaaaagccattctctcagatacccatgacgccaaactgccaatttaccggctggctgccgacgatccggatgaggagaacaccctcgccacggcagtcttcaccctcgatgccaaccacgtcaggtggcaaattttcgacattaaccgcgacgatgttaaatttcagggagaagtgcgtgggtga

SEQ ID NO: 258005 - DNA, 858 bp, Klebsiella pneumoniae
atgaatcttcgtgaaaatattgtgagccaattcagcctgctgtcgcccgaactccagcgcgcggcggaattttccctgcaaaatgccaatcaactggtggtgcaatcaatgcgcgccttcgccgcggaagccggcgttaagcctgccacgctgctacgcctggcgcagcgtctgggctataacggttggcgggagctgaaaagtgcatttatcgacgatctcggcttaggaaatgatacatatgtatctaaggctgaaaaattgatcgcgaaaggaacgcagcccgcgctgtacgaagaggtgttcctcgcgcatcaggccaatctggcattcactcaggcagagaatcaacacgctatgcagcaagcggttaggttgctggatgaagcgaagcaggtctatatttgcggcttccgcgccagctttcctatcgcctggtcgttgttttatgtctatcgattgttcaatcgccaggtgtcgctgattgacgggctggcaagcaatatcgaagtcttcacccgtgagatcaacgcggaagactgcctgctattgaccagcttttctccctattcccgcgaatctctcgacgttctcaatgctgccaggcaggccggggcacggattatcgccatcaccgactcaccggtttcgccgctggcgcaaacggcggactgcacgctgctgttttccctcagcagcccgtcttttttcccttcgatagtgtccggtatgggcgtcgccgagtgtttgctggcgatgctggttgcccgccacggtagggaggcggtgaataaaattgagagcgcagaacgttatctgcaacgctccggggcgtatgtgatgcccgataaatcctga

SEQ ID NO: 258006 - DNA, 444 bp, Klebsiella pneumoniae
atgcgtttcagtaccatgcccgacagtgaaattatttctgaactgtgccgaagaattaaagaaacgcgtatacaactggggctatcacagattgagcttgccgaacgcgcgcaggtcggcgcggcaaccattaaacgcgttgaactaggtgagtccgtcactctcagtacgctgattggtattttgcgcggcctcgaccgactacatcaactggagtcgattttattcgattcacatatgcgcacctttaaagcgcagatcaattccggggccccttcccgtatccgcattcggaaaaaaacgcatcagccaaaagagaagcaggccgccgcgacgcagaccagcgagtcaaacgccaccattaacgaatggtacacctcatcggcttctaacagcgtggtatggtctttccagccgcctgacggagagaaaaaaaagccctaa

SEQ ID NO: 258007 - DNA, 534 bp, Klebsiella pneumoniae
atgatttcatctgaacatgcgctagtgattattgatatgcaggaggggcttttccgcggtccggcttctcctcattccgctgatgccgttctgacaaatattcttctgctcatcgctaaagccaggcagtcacaggtaccgatcttttttattcgccacgtcggacccgacggctcccccttctctgcgagcagcccgttaaccaggctgatagccgagctggatgtggacgttgaacgggatatcgtcttaaccaaaacgtatcccagctgctttcgcgacaccgaattacagcgccagcttacgcagagaggcgtaaagcagctggtgattgccgggatgaaaacagagttttgcgtcgataccacctgccgggcagcgccggagctgggattcacggccgtgctgatttccgatgcgcataccacaatcgataatcctcatttatccgccaaggacatcattggccatcacaaccgaacgctggcgggcccgtttgtcgcgctttcaaccgcagccgactggcgcttttga

SEQ ID NO: 258008 - DNA, 561 bp, Klebsiella pneumoniae
atgaaatatcagaacctcttgcaaagcgtgttgttaaacgacccgatgagaatgaacgcgctgtacgccgtgcaggcgctggaactcaacgatggctggattggcgccggctttgtcagagatgcggtctgggatcatctgcacggctacgggcaaaggccagtttcgggtgatgtggatgttgtctggttcgacgcgaaaagcgcgacttccgcctgtgatagcgcgctggaagagaggcttagccagcaaaactccgtttttaactggtcggtgaaaaatcaggccagaatgcatcaacgcaacggacatcaaccttatcgttcaacggagaatgcgctgctgtactggcctgaaaccgcgacggctatcgcggtaagattgggagcaacagatcatgttgaggttatcgcgccctacgggctggacgatctctttgagctccgtctgcggccaacgccggtatttgcgcagcataagctggctattttcagccagcgcgtcgcggaaaaacggtggctacagcgttatcccggcctgcggcttctcgtcccgacataa

SEQ ID NO: 258009 - DNA, 645 bp, Klebsiella pneumoniae
atggaagcgtttagcgaacgcctgctgcgcgagcatcagccggtgtggcaggcgatgcagcggcaccgttttgtggttgatatcgaagaggatcggctggcgcctgccgtcttcaaccgctatctggtatttgagggcaactttgtcgcgacggcaatcgcgatttttgccctcggggtcagcaaagcgccgggtattcatcagcagcgctggctgattggcgtgctgaatgctctggttgacacccagatcgcgtggtttgaacaggtgttgtcagagcggcgggtcgatcccgctgcgtacccggacgatctgcccggcgtgcggcgctttcgcgacggcatgctgcgaaccgcccgggagggcagctacgagcagatcgtgacgatgatgttcggtgcggaatggatgtactacgtctggtgccggggggtaagcgagcatcgccagagcgacgcggacgtccggcgctgggtggagatgcacgccgaggacgaattttatcagcaggcgctctggctgaagaacgaactcgatcgctgcgccatgacgctgagtgaaagcgaaaagcaggcgctgtcggcgctttacggcgatgtgctgcagtgggaaattgatttccatcacgccgcgtacgaagcgtag

SEQ ID NO: 258010 - DNA, 363 bp, Klebsiella pneumoniae
atgtcccgtaaaaccgcgtttaatggctccgccgccggccgacgccgcgcgcagcgcgcccacttacaaaatccgcaaaccctcagttccgatctcatccaccggcccacgccttcccgcgctcagattcaggcaaagggaggacaccacacgcccagccgtattgaagatgccttgccgattaaatttgttgcgcaggatattttctggcagcgcgaggaatataaacgacagattgtgcgagcgaccgttatttatcagcacgcgtttgcacacgattatagagaaccaggcagctatatctgtcagagggcaatttatgcgcttggtttgcaaagaagaaagaaagtaacggcgaggtaa

SEQ ID NO: 258011 - DNA, 393 bp, Klebsiella pneumoniae
atgtccgatcctgtttccggtacgtcgataattgttgcgggtggattaatgggcgccggtatgtttggcctggtgacaggtattgattatggggttgtatttggcgcgtttgctggcgcggtattttatgttgcgacggcggttaatatgacgcgttttagactggtggcctattttatgacttctttcattgttggtgtcctgggcgccgggctaattgggacaaagctggctatctggacaggatatagtgatagaccgttagatgcgttaggtgccgtactgatatcggcgctgattattaagatactgacctttctgaataatcaggatctcagcgacctgtataaaatactcacccgcaacaatagtgggcgcccgaatggaaaatga

SEQ ID NO: 258012 - DNA, 543 bp, Klebsiella pneumoniae
atgaataaagatgagatttttaatgccattctggaaaaggagggcggttatgtaaatcatcctgatgataaaggtgggccgacaaactgggggattacccaagtcaccgcgcgggctcatggttatgatggcgatatgcaaaaactgacgcgccagcaggcgctggatattctcaacgctgactactggattgcgccccggttcgatcatgttgctgaaatatctaccgcgatcgctgaaaaactgtgtgatgccggggtcaatatggggcctgttctacccggtaaatggcttcaacgctggttaaatgcgtttaatcatcgtggggcactttatccggatcttatgaccgatggtgtaatggggcccagaactttaactgccttgagccattatcttattcgcagaggaaacgaaggggagcttgtactgttacgggcattaaactgtagtcaagggcagtattatctggagctggctgaaagaaatgatgccaatgaatcgtttatctatggctggttgcgaacgcgagtatctatgtag

SEQ ID NO: 258013 - DNA, 1179 bp, Klebsiella pneumoniae
atggttgaccaaaaaagtaatgcgcaagttttaaatggcgttaacgacgatatttcagaaatgaaatcattgaccacattgcgtaaacgtgtggtgacagatggtgaagtcgtttctaaatcgcagaacgcgttccgcctggcaggtagcaaaacgggagtcgtcttgcgcaatgacgggaatgattttcacaccctcgtcacccctgaagggcaggcgcaagacgggcaatggaatacccttcgcccattatcctttaacctcaaaaccgggcgcgttgctcttcgtaatggcgtggatatttcaggtggggctatggtttctcacaatgcgggagtttttaccacattgaccgggccagatgcgcttattaacggtcaaacctatgactctgcccctatgtataccgatttcaagactggcagcgtcgttacaagaatgcttatgggggctcgggttaacgccggtcatgatgattacggattactttcataccgtgactggcatggaaagtggaatgagcttcgcgtccgtcctaacaatgaacttgatgcgggtcagtatgttaaacgcaattcagacggatggtttgtcgcgaaaggttatcgccagatagataacaacgcagccagaataacgaacggtttatgcattcagggggcaggagatttatccgcagacctctatcactcggaacgtattggccagcatcattttctcggcctacatgtggccaacggtggcgcgcagggctggtacgagttccgtaatgatggtcatgcctatactaatggcgcctggcacagcagttctgacgcacgcatgaaaacccaggttgaaaaaatcgataatgcgtttgaaaaactgaatcgcatcagtggttacacctacctgaagcagggggttagcgaagctggcgttatcgcgcaagaggtggaggctgttctacctcaaaccgtctctcggactgaagtgattttaaacgatggccgtgtgctgaaggatgccctcagcctaaatattaacggggtagtagcacttcttattgaggctctgaaggaagaacgtcaggctcgtctggaagacaaagctctgatgctgcaagaacaggaatcgcgaacagatattgaccagcgtctggccgatctggagctccgcgacggacaggagacagaatga

SEQ ID NO: 258014 - DNA, 1860 bp, Klebsiella pneumoniae
atgatggctgaaaatcaaccggcaccgctaacaccagctcctccaggaatggtttccctcggcgttaatgccgacggtgaagaggtgatgaccgtgattggcggggatggcggcgcaggcttttctggcgggcacgcaaatattgttcctggtagcggcagtatactggctgaccagcgcaagaagacgctttcccgtcttcaggctgaatgctcggcggccattgaagccaccgcaaaatggtcaaccgaaaatctggaaaaaacgatggcggcgcaggcggaaagaatccgtgccgctacggcagctcagcagtcagcaaaggcatcccttgacagactcatgcagcagttgaaagacgtgacggacaaagctcttcaaaaagccaggtccgggccgagcgtcaccgaccttgcacatcagaacaaccaggaacttgcggcgcttggggagcaaattggccgtcaaaaagcactgaacgaagccagaaaaaaggcggagagggaagctaaaaaggctgaggaaacttatcaggccgcactgctggcgcaggaagaagcgcagcgccagcaggcagaagttgagcgggaactcaaggaagccagggcgcatgaggccgctgcaaaagcaaaggctgaagctgacagggttgcggcggagaaagaggaagctgaacgactgaaggctgaggaggcgcaaaaggctctttttgcgaaggtgggtattcagggcaccccggtttacacccaggagatggtaaaagctgtctccgttctgatgttaaaaccgggggtaatattgctaaaccgggcgccgggaatgatacagatggccgccgtggcggtacgggcaccggctgcccttcccggtgtagccagtgccgttataacggctaccgctgaattctccggctggatttcatcagccctctggcggggtgttgtgggcgtggcaggagccgccactgccacaacggctggtgccatggtagctgctgcatcgacgatattcttctcgccccgtgccggtggcggtaacgacagtaaggttcccgggcgtgatattgagataatggccgcccaggcccgcctgtttacagctggtaaactgatcatcgatccggggatgaaaagcgttgacctgccggtgcgtggatttatcaccatggaaatggatgggcgccagtctctgaaactggtgaaaactggcacaggcggcatatctgccactgtaccggtactgagtggcgtacgcgacaaggcctccggacttgataaaatcatggtaccggcggtggacggggctccgtcactgagcattctgatcaaccctgtaccatttggtcccgctgcgccatcccataccggcaacagcacgccagtgccagtgacgccggttcacaccggcacggaagtaaaacaggcggacagtattgtcaccacctcactgccagtagccgatgttccgccgctgcaggacttcatctactggcaacctgatgcgacaggaaccggcgttgagccgatttatgttatgttaagtagcctgccaaaatcagttaatcataagcacaagcattatccccctaaaggtgtatcctggaaggatattgttaatgcaacagctaatggagggagtgctaaattcaaaccagatgttaatattgctgaaatcgatatcgacgcatggaaaaatgggcaaatgacagccaaacacccaacatggaaggtgaaaaaatatgttcatgtaattggtgcttatgctggaaaagaaacccagtgggttgttgttaaagagtctcagggggttgttcactctcatccaatatcggagcaaaaagccaaggagtacatgaaatga

SEQ ID NO: 258015 - DNA, 300 bp, Klebsiella pneumoniae; identical to SEQ ID NO: 188398

SEQ ID NO: 258016 - DNA, 324 bp, Klebsiella pneumoniae
atgagaatacgactgataaccacgacgctggcgctggtgctgttcagcgctcaggcgctggccctgaccctcaatgaagctcgccagcaggggcgggtcggcgaaaccctcaatggctatcttgaaccgctgcgtcaagataaagaaacccttgaactggtgaagcagatcaacgccgcccgcagcgacagctatcagcaactggcggatgacaataatctaccggtggatcaggtggcgaaaatggccgggcagaagctggtcgccagggcgcagccgggcgagtacgtgaagggccttaacggcaaatggctgaaaaaatag

SEQ ID NO: 258017 - DNA, 1284 bp, Klebsiella pneumoniae
atgcttactgaaaataaaaacatatcttccacctttggcgtttattctgaggtcggtaaattaaggaaagtcatggtatgttcacccgggatggcgcatgaacgccttaccccgggcaactgcgacagaatgttgttcgacgatgtgctgtgggtggcaaacgccaagcgcgatcatttcgattttatgaataaaatgcgcgagcgcgacgttgaagttgttgagtttcatcacctgctggaggagacggtaaacaatcctctggcgcgtaaatggatcctggatttacaaattgtagcggatgaagtgcccctgggcctgatagacgaaacgcgagattttctcgataatattcccgcccgcgaactcgcgcagactctccttggcggtctttcaacgctggaactgctacacgcctcaggcggaaaatacgataaagaagagtgcagacttcttcacgccgctatcgcgcagagtcagtacctgcttcctcctttacctaacgcgctttacactcgtgataccacctgctggatcaatggcggcgtcactctgaatcccctctactggccagcccgccatgaagagacggtgcttgctgcttccgtttataagttccatccggatttcgctggcaaggttaacgtgtggtacggcgatccaacgatccaccacggtacggctactcttgaaggaggtgacgtcatgccgatcggtaataatacagtgttaattggcatgagcgagcgcacctcttaccaggcgatagcgcagcttgctcaagcgctctttgcggatcagcattcgggtattgagagggtgatgattgccgccatgccgaagcagcgagccgcgatgcatcttgataccgtctttaccttttgcgaccgggacctcgtcacgctttatccacctattgttaatcaaattaaaacattttcattgcgccctgatgaaagatcgccctacggaatacgcttaaccaaggatgaagataattttgtagacgcggtagccagcgcgcttaatctcaaaaaattaagagtcgtggaaacagccggtaatgactacgacatggagcgtcagcagtgggatagcggtgcgaatatggttgcgctggaacctggtgttgtcgtggcctatgaccgcaataccaagaccaacgcacaactccgtaaaagcgggattgaggtgataaccattgttggtagcgagttaggtcgcggtcgcggtggtggtcactgcatgacctgtccgattatccgggactcagttgattattaa

SEQ ID NO: 258018 - DNA, 1344 bp, Klebsiella pneumoniae
atgttaaccctcgccctggtctttcagactctggcgacaagaaaaccacatctgaattcgggtatatttatttacgctcaagatggcttcggtaattaccttgggtttacttctgcgctcggtttttgggcggggacctgtatcggcaacgtatcttattttgtgctgataaaatcaaccctcggcacattttcccctatctttggtgatggcaatactttatacgcgattatcactgcctctattgttctgtggtgtttccatattctggtattacggggcgtaaaagaagctgcaattattaatacggtggtcacctgggccaaaattattccgataggtgtctttattgtcgttcttatgttcgcgttcaacgctgacattttcaccgttaacttctgggggggacccgacatcagggatattgactcccataccctgtctgaagggtaccatgaccttgtgcactatatcgccgcgcctgacaatgagcacgagtccttattttcgcaggtccgcaataccatgctggtgacggtattcgtctttctcgggatagagggagcgagcgtgtattcccgcctggcgaaaaaacgtagccatatcggtaccgccacggtgttcggttttatcggtgtcctgtgcattctgtgtctggttactctcctctcatatggggtacttttacgaccggagcttgccgcgcttcgtcaaccctcgatggcgggggtactggagacaattgtcggtcgtccggggatgatatttatcagtattgctctggtcatatcggttttaggcgcctatctctcctggtcattactggcagcagaagtgttatacagcgctgcaaaatctggattgatgccaaaaatattggctaaagagaacgctaatcgagttccttataaagccgtgtggttgaccaacatatttattcaggtctttttaatcatcacgttgttcaccgactacgcctttcagctagcgttggagttaaccagctcgctgacgttaattccttatttccttgtcagcgcatatgctttaaagcttgcgttaaccggggaatcctactccggctctggaacagagataaggaagggactgatattgtccgctatcgccctaatttattcactgatgatgatttatgctggcggcgtaaaatatcttttactttctaccattatttacggcccgggaaccattctttactacctcgcaaggaaagaaatttcgtcaaaagtttttacccgacgtgaacgcctgctgtttgtcctgctgatggccggagccatcatcggtatctatgctatcgcaactgggctcatccatatttaa

SEQ ID NO: 258019 - DNA, 279 bp, Klebsiella pneumoniae
atgctgtttattatagcctggcttatcgccatgggcaccagtgaactgttgttgtggtcttatggctaccttcaccttatttctccagtactatatatttcactatgtgttatgtttatctatcaacgtagaaaaatccataaaaataaagatctcaacttctatgagaaaaaaatagagtctatgcgaatgggcataatgtttgtcctgtctatgctggtgatgttagccatcactgtcaatattcgtttttttacgcttatttataccgggctttga

SEQ ID NO: 258020 - DNA, 123 bp, Klebsiella pneumoniae; identical to SEQ ID NO: 195941

SEQ ID NO: 258021 - DNA, 732 bp, Klebsiella pneumoniae
atggcccggtcttatgaagaacagacccgcatcgacctggcggcgacctttcgtatcatcgcccatctcggaatgcacgaggcggtggccaaccactttagcgcggccctctcggcggacggcaaaaaattcctgctgaatccgaaatggaaacacttttcgcgcctccgcgccagcgacctgctgctgctggacgccgatgatgaagcctgcgcccggcgatctgacgtcgacgccacggcgtgggcgattcacgggcaaatccaccagcgcctgccggaggtgcgggtggtgctgcacctgcatccggtgtataccaccagcgtcgcttgcctcgagaagccgcatatcccgccgatcgatcagaatacggcgcgctattttaatcggctggccgtcgatacgttatacggcggtatggcggataccacggcggaaggcgcgcgtctggcggcactgctggccgataagcgccggctgctgatgggcaatcacggggtgctggtgaccgcgccgtcgattggcgaggctttcgatgatatctggaccctggagcgcgcctgtcagattctggtgaccgcctggtcaacggggcagccgctgaaggtgctctccgctgcggtagcggagaaaaccgcgcaggattgggaggggatcgccgacttttcgcgccagcattttgaagagatgaagcagatgatgatcgacgccgatccgtcattgctggactga

SEQ ID NO: 258022 - DNA, 1710 bp, Klebsiella pneumoniae
atgaacgggaaaatagctaaaaatttcaattcggtatcgctggcagcagtgtttgtgctggcgctatcgccggacgcctttgcggaaaaagatgcgctgataagcgtcacgacgagttcaagcagcgacgcttcaggccctgcatttttaaattacgctaaagagcagcaggcgcaggaaagtcgtgagcctgttaagcccgtggaggaaaaaagcaataaaacaaaaacaaccaataaaaaaagcattcagagtaccaatgatatctcccgccaggctgcaataatttctcaaaaagataaactcatccgccagcttcgacagcagctggaagctaaacctgtgacgattaatgccgcagcagataaccaaaaagagctgactgataaaattcagctgcttgagaaaaaattagcggctgctgtagccgaaaaacaacgattaatagataaagagctaacggccgcagctgaaataaaacagagcgtgggccagcgtaacgcctccgaaaataaaatagtgcagcaagaaaaaaggctattattagtagaatccgcaaaacaaaaagccgagctgcagctgactgaggcaaccgctgaaaaacaggcactgataaagaaactcgccgcggcggaaacggaaaagcaagatacggcctccaggctcacggctgctgcatcagacaaacaagcgctcattagcaagctcgctgccgctgagtcagctcaggggcaaatgcgcgcaaaactcaccgcggctgacgccgcccggcaggcgctacaaacgaagctggaggcggctgaaacagaccataaagtcgtgctcgcgaagctcgccgcctatgaaacgaaagaaaaggatttaacgacaaaactggcggctgcaggggtagaaaaacaggcgctcacggctaaactggattcctttatcatcagcaagcagcagtcatcccttcaggaggatgccgccgataaagataaagcccaactgcaagccagcgcagatgaaattacccgactaaaaaccatgttagctgatgccgaagctaaaaaaccagcggctatcgaccttgcgaaagcgcccctgcagcaggcttacgctattggcgtatcgatgggcgctgaagtgctacagctcttatccacccgggattcccagggcgtaaaaatgagcaaagataccgtactgcaggggatccaggattctttttccggaaatatcgcccttgatgagaaagcgcgcaataaagctttgttcgatgtatctaaaaaagtctttcagaacctgaagaagatcgaacagcaaacgcttagcgaaggaaagaaatatcagcaaaagttcgcgcagcaaaaaggagtggtattgaaagatggcgtttacagtcgcatagattatgccggtaagggcaagattctcgatagcgacatcgttaccgtcaccatcaaagaaacgcttactgacggaaccgtcattaacgatatggaggcggagggtaaagtgtggtctcagtccctgaaatcttatcctccactgttccttgggcccataaagcggctgggaaatcacggcgctattacggtcgtgatccctcccgagctcgcctacggcagcgaaggcaaaccgcctaaaatcccgccgggagcgaccatggtctattcgctcagaatcgttgacgccactgcagcacaaccgcaggctaaaaaaccctga

SEQ ID NO: 258023 - DNA, 480 bp, Klebsiella pneumoniae
atgacgctcgtctatatcgcgattggcagcaatctggcctctccgctggagcaggtcaacgctgccgttaacgcgctggcggacatacccgatagccgggtaataagcgtttcctctttctaccgcacgccgcccctggggccgcaggatcagcctgactacctcaacgtcgccgtcgcgctggaaaccgcgctgaccgcagaagcgctgctcaaccacacccagcgtattgaactgcagcagggccgcacgcgtaaagccgaacgctggggaccgcgcacgctggacctcgacatcatgctgtttggcgatgacgtgattaacagcccgcgcctgaccgtaccgcactacgatatgaaaaaccgcggttttatgctgtggccgctgtttgaaatcgcccccgagcagcgtttccccgacggtacggcattacgggctgttctggcaaatctcggcgcagaaaaacccgccctctggtaa

SEQ ID NO: 258024 - DNA, 420 bp, Klebsiella pneumoniae; identical to SEQ ID NO: 188412

SEQ ID NO: 258025 - DNA, 2049 bp, Klebsiella pneumoniae
atgagtcgcaaatcattagccctgctggagccgacgctggtgcgccaggcgctgctggacgccgtgaaaaaactgagccctgccgtacagtggcgtaacccagtgatgtttatcgtctggatcggcagcctgctgaccaccctgctcgctatcgccatggccagcgggcatatcgccggcagcgccggttttaccgccgccattagtctctggctgtggttcactgtcctgttcgccaatttcgccgaagcgatggccgaaggccgcagtaaagcgcaggccaacagcttgaagggcgtcaaaaaaaccgcctttgcccgtaagctgcgcgcgccgcagcacgatgcgcaaattgaccacgtgcccgctgaagatctgcgtaaaggcgacgtggtgctggtcgaagcgggagatattatcccctgcgacggcgaggttatcgaaggcggcgcgtccgtggatgaaagcgccattaccggcgaatccgcgccggttatccgcgaatccggcggcgacttcgcctcggtgaccggagggacgcgtattctctccgactggctggtgatccgctgcagcgtcaacccgggcgaaaccttccttgaccggatgatcgccatggttgaaggcgcccagcggcgcaagacgccgaacgaaatcgccctgacgatcctgcttatcgccctgaccctggtgttcctgctggccaccgccaccatctggcccttctccgcctggagcggtaacgcggtcagcgtgacggtgctggtggcgctgctggtgtgcctgatcccgaccactatcggcggcctgctgtcggctatcggcgtcgccgggatgagccgcatgctcggcgcgaacgtgattgccaccagcggacgcgcggttgaagcggcgggcgatgtcgacgttctactgctggataaaaccggcaccattaccctcggcaaccgccaggcttcagcgttcctgcccgcgcagggcgtggaagagaaaacccttgccgatgccgcccagctctcttcgctggccgacgaaacgccggaaggccgcagcatcgtggtgctggcaaagcagcgctttaatctgcgcgagcgcgatctgcaatcgctgcacgccaccttcgtgccctttaccgcccagacccggatgagcgggattaacatcgaccagcggatgatccgtaaaggttccgtggatgccattcgccgccacgttgaggctaacggcggccacttcccggccgatgtcgataaacaggttgaagacgtggcgcgtcttggcgccacgccgctggtggtcgccgaaggcgagcgggtgctggggattatttcgctgaaagatatcgtcaaaggcggcatcaaagagcgttttgcccagctgcgtaaaatggggattaaaacggtgatgatcaccggcgataaccgcctgaccgccgccgctatcgccgcggaagcgggcgtggacgactttctcgccgaagcgacgccggaagccaagctggcgttaatccgccagtatcagtcggaaggacggctggtggcgatgaccggcgacggtaccaacgacgccccggcgctggcgcaggccgacgtcgcggtggcgatgaactccggtacccaggcggcgaaagaggcgggtaacatggtggacctcgactccaaccccaccaaactgatcgaggtcgtgcacatcggtaaacagatgctgatgacccgcggttcattaaccaccttcagtatcgccaatgacgtggcgaagtactttgccatcattccggccgcctttgccgcggtctatccgccgctggcgatgcttaacgtgatgcatctgcactcgccctcttcggcgatcctgagcgcggtgatttttaatgcgctgattatcatcttcctgatcccgctggcgctgaagggggtgagctataagccgctgacggcctcggcgatgctgcgccgcaacctgtgggtctatggcctgggcggactgctggtgccgtttatcggtatcaaagcgatcgacctgttactgaccctgaccgggctgatgtga

SEQ ID NO: 258026 - DNA, 1494 bp, Klebsiella pneumoniae
atgtgtataagagacaggtttaacgcgctgggactggcggcgctgttcgcgctgctgacgttccagggctcgctgccgctcaacccgcagcatctgcccggcctgtcgtgggacctggcgctgaatacggcggtgagctttgtcagcaacaccaactggcaggcctatgccggtgaaaccaccatgagtagtcttagccagatggccgggctggcggtgcaaaacttcctctccgccgccaccggcatcgcggtgatctttgccctcacccgcgcctatgcccgacagaaagtcagcaccctgggcaacgcctgggtcgacctgacccgcatcaccctctggctgctgctgccgatttcgctgctcatcgcgctgttctttattcagcagggcgtaccgcagagcttttcccccaatcagggatttacctcgcttgaaggggtacgccagatgctgccgatggggccggtggcctcgcaggaagcgataaaaatgctggggaccaacggcggcggcttctttaacgccaactcggcgcatccgtttgaaaaccccaccgcgctgaccaacctggtgcagatgctggctatctttctcatcccggcggcgctgtgcttcgccttcggcgaggtggtgggcgaccgccgtcagggacgcgcgattctgtgggcgatgacgctgatcttcatcgtctgcgtggcggtagtgatgtgggcggagacccgcggcaacccgcatctgctgagccttggcgccgatagtagcctgaatatggaaggcaaagagagccggttcggcattctcgccagcagcctgttcgccgtggtcaccaccgccgcgtcatgcggcgcggtcaacgccatgcatgactcctttaccgcgctgggcgggatggtgccgatgtggctgatgcagataggcgaagtggtcttcggcggcgtgggctctggcctgtacggcatgctgctgttcgtcatgctggcggtcttcatcgccgggctgatgattggccgcacaccggaatacctcggcaaaaagatcgacgtgcgcgaaatgaaaatgatcgcgctggcgatcctcgtgaccccaacgctggtgctgctcggtacggcgctggcaatgatgaccgaggccgggcgcgcgggcatgttcaaccccggaccgcacggcttcagcgaagtgctgtacgccgtcacctccgcggccaacaacaacggcagcgcctttggcggcctgagcgcggcgacgccgttctggaacctgctgctggcgttctgcatgctggttggccgcttcgcggtgattatcccggtgctggccattgccggttcgctggtgaccaagaaaattcagcccgccggcagcggcacgctcgccacccacgacgcgctgtttatcggcctgctgatcggcaccgtactgctggtgggcgccctgacctttattcccgcgctggcgctcggcccgctggcggaacacttttccttactttaa

SEQ ID NO: 258027 - DNA, 780 bp, Klebsiella pneumoniae
gtggccggttttttcccacagcacacggtccatcataaacgggcctttaacttcctgatactggtactctttcagcttagaacgcacaaaagtttccagttcgcggaagatagtccatccgtcattatgccagaacaccatacccggcgcctcttcctgcatatgatacaggtcgagctgcttaccgattttacggtgatcgcgcttagcggcttcttccaggcgctgcagataggcattcagcgctttcttatctgcccaggcggtaccgtagatgcgctgcagcattttattgttgctatcgccgcgccagtaggcgccagcggtcttcatcagtttgaagtgatggcagaaacgcatattcggcacatgcggcccacggcacatgtcgacatattcttcgtgatgatacaagccaggcttgtcatcatgagcaatgttttcatcaagaatagagactttatagctctcgccacgcttcacaaaggtttcacgcgcttcgtgccagctgactttcttcttaataacgtcgtagtttttctcggcgagctcatgcatacgtttttcgagcgcgtcgatatcttcctgggtcagggtatggtccagatcgacatcgtagtagaaaccattgtcgacaaccgggccgatcgccattttggtatttggccacagctgtttaatcgcatgccccaaaaggtgcgcgcaggagtgacgaataatctcaagaccatcttcatctttcgcggtgatgatagagagcgttgcgtcgttttcaattaa

SEQ ID NO: 258028 - DNA, 1461 bp, Klebsiella pneumoniae
atgacaaccttttacacggtggtgaactggctggttatacttggttactggctacttatcgccggtgtaacattacggatattaatgaaaagacgcgcggtcccgtcagcgatggcctggctgcttgtcatttatattcttccgctggtgggaattatcgcctatctctcgttcggcgaactgcatctgggtaaacgccgcgccgagcgcgcgcgggccatgtggccctcgacggccaagtggttaaaagatctcaaagcctgcaagcatatctttgccgatgataatagcccggtcgccgaatcgttgttcaaactctgcgaacgccgtcagggaattggcggcgtcaaaggaaaccagctccagctgctcaccgagtccgatgacgtcatgcaagcgctcatccgcgatatccagctcgcccggcacaatattgagatggtgttctatatctggcagcctggcggcatggccgaccaggtcgccgaatcattaatggcggcggccagacgcggtgtacattgccggctgatgctcgactccgccgggagcgtggcctttttccgcagcccctgggctgcgatgatgcgtaatgccggcattgaagtcgtcgaagcgctgaaggtcaacctgatgcgcgtcttcctgcgccgtatggacctgcgtcagcaccgtaaaatggtcatgatcgataactatattgcctatactggcagtatgaatctggttgatccgcgtttctttaagcaggactccggcgttggccagtggatcgatctgatggcgcgaatggaagggcctgtagcgacagccatgggcattgtctactcctgcgactgggagattgaaaccggtaaacgtattttaccgccgccgccggacgcgaacattatgccgttcgaagaggccagcgggcacacgattcacactatcgcctcgggcccgggctttccggaagatttgatccatcaggctctgctcactgccgcctacgcggccaaagagcatttgatcatgacgactccctactttgtgcccagtgacgatcttctgcatgccatctgcaccgccgcccagcgcggcgtcgatgtcagcatcatcctgccgcgcaagaacgactcgctgctggtgggctgggccagccgcgccttctttaccgaactgctggctgccggggtgaagatctaccagtttgaaggcggcctgctgcataccaagagcgtgctggttgacggcgagctcagcctggtgggcaccgttaacctcgacatgcgcagcctgtggttgaacttcgagattacgctggtgattgacgatgccggatttggcagcgatctggccgcggtgcaggatgattatatctcccgctcgcgcctgctggacgccaggctatggttaaaacgtccgctgtggcagcggatcgccgagcgactgttttacttcttcagtccgttgctgtaa

SEQ ID NO: 258029 - DNA, 837 bp, Klebsiella pneumoniae
gtggcttttcatattcatgccgctcgtctgcggctgtatcatttactcttcgatcaaaaccgtcgctccggccggcattttgagggattctgcggcctctttgcgctgcttagcgtgctggtgatatttatcgagtccggattgggaacgcaatatcatctgacggtagatgaatggcatgtctttgtctggcttgagcttattgtcaccgcggtttttacctgcgagtatattctgcgcattatcagttggccgaatccgctaaagtatattttcagcttttggggaattattgatcttgccactatcttaccgctctacgtaatgtggctatggcctgagatcagtattgagtacgtgttcgcctggcgggccatgcgcgcgattcgcgctctgcgtattcttaaactgctgcgttttatgccgtcgctgaatattttctggaccgccatcgtcagcgctcgccaccagttgatcctgttctactcttttattgccatcgtgatggtgatttttggcgccctgatgtatctggttgaggggccgcgatatgggtttactacgctgaatgcgtcggtttactgggcgattgtgacgataaccacggtgggatatggcgacatcacgccgcatacgccgctcgggcgaattctggcctccatccttatcttaatcggctactcaattattgcgattcccaccggcttaattaccacccatatgaccacgacctttcagaatcgccgtactcagcgcatatgttcgaattgtcagcatgcaaatcatgaaaaagacgcccgctactgcaacgcctgcggcagtaaactacccgaataa

SEQ ID NO: 258030 - DNA, 1005 bp, Klebsiella pneumoniae
atgaacgccgtaacggaacaaagaaaagtcctgctcgaaatcgccgatctgaaagtgcactttgatattaaagacggtaaacagtggttctggcagccgtcgaaaacgctgaaagcggtggatggcgtaacgctgcgtctgtatgaaggtgaaaccctgggcgtggtcggcgagtccggatgcggaaaatcgaccttcgcgcgcgcgatcattggtctggtcaaagccaccgacggtaaagtcgcctggctaggtaaagatttgctgggaatgaaggccgacgaatggcgcgacgtgcgcagcgatattcagatgatctttcaggatccgctggcgtcgctaaacccgcgcatgactatcggggaaattatcgccgagccgctgcgtacctatcatccgaaaatgccgcgtcaggaagttcgcgatcgcgttaaggcgatgatgatgaaagtggggctgctgccgaacctgattaaccgctacccgcatgagttctccggcggccagtgtcagcgcatcggtattgcccgtgcgctcattcttgagccgaagctcattatttgcgatgagccggtttcggcgctggatgtgtcgattcaggcgcaggtagtgaatctgctgcagcagctgcagcgtgaaatgggactatcgctgatttttatcgcccacgatctggcggtggtgaagcatatttctgaccgcgtactggtgatgtatctcgggcatgccgtggaactgggcacctacgatgaggtgtaccataatccgctgcatccttataccaaagcgctgatgtcggcggtgccggtgccggaccccgataaagagaagaataaaactatccaactgctggagggggaattgccatcgccgattaacccgccgtcgggatgcgtatttcgcacgcggtgcccgattgccgggccggagtgcgctaagacgcgaccggtgctggagggcagtttccgacacgcggtttcctgcctgaaggtagacccgttataa

SEQ ID NO: 258031 - DNA, 909 bp, Klebsiella pneumoniae
atgatgttaagtaagaaaaacaacgaggcgctggaaaacttcagtgaaaagctggaagtcgagggacgcagcctctggcaggacgctcgccgccgctttatgcataaccgcgctgccgtcgccagcctgattgtgctggtgattattgcgctgtttgtcaccatcgcgccgatggtatcgcagttttcctattacgataccgattggggcatgatgtccagcgcgcccgatacggagtccgggcactactttggtaccgactcttccggccgcgacctgctggtgcgggtggcgattggcgggcgtatctcattaatggtcggcgtagccgctgcgctggtggcggtgattctgggaacgctttacgggtcgctttccggctatcttggcggcaaagtggattcggtaatgatgcgtctgctggaaatcctcaactccttcccgtttatgttctttgtcatcctgctggtgaccttttttggtcagaatatcctgctgattttcgttgccatcgggatggtttcctggctggatatggcgcgtatcgttcgcggccagaccctgagcctgaagcgtaaagagtttattgaagctgcgcaggttggcggtgtttcaacgggcaatatcgttatccgccatatcgtgcctaacgtgcttggcgtggtcgtggtgtatgcctcactgctggtgccgagcatgattttgttcgaatccttcctgagcttcctcggcctgggtacccaggagccgttaagcagctggggcgcgctgctcagcgatggcgccaactcgatggaagtttcgccgtggctactgctgtttcctgccggtttcctggtggtaacgctgttttgttttaactttatcggcgatggcctgcgtgatgccctcgacccgaaagaccgctaa

SEQ ID NO: 258032 - DNA, 2568 bp, Klebsiella pneumoniae
  misc_feature (2495)..(2502): n is a, c, g, or t
atggctgttactaatgtcgctgaacttaacgcactcgtagagcgcgtaaaaaaagcccagcgtgaatatgccagtttcactcaagaacaagtcgacaaaatcttccgcgccgccgctctggccgctgctgatgctcgaatccctctcgcgaagatggccgttgccgaatccggcatgggtatcgtcgaagataaagtgatcaaaaaccactttgcttctgaatacatctataacgcctataaagatgaaaagacctgcggtgtcctgtctgaagatgacaccttcggtactatcaccatcgctgaaccgattggtattatctgcggtatcgtcccaaccactaacccgacttcaactgcgatctttaaatctctgatcagcctgaagacgcgtaacgccatcatcttctctccgcatccgcgtgctaaagatgcaaccaataaagctgctgacatcgtcctgcaggctgcgatcgctgccggcgcgccgaaagatctgattggttggattgaccagccttccgtagaactgtcgaacgcgctgatgcaccacccggatatcaacctgatcctcgcgaccggcggtccaggcatggttaaagcggcgtacagttccggtaaacctgccatcggcgttggcgcgggtaacaccccggttgtcatcgacgaaacggctgatatcaagcgtgctgtcgcttccgtactgatgtcaaaaaccttcgataacggcgttatttgtgcttctgagcagtccgttgtggttgttgattctgtatatgatgccgttcgcgaacgtttctccagccacggcggctatctgctgcagggccaggaactgaaggctgtgcagaacatcatcctgaaaaacggcgcgctgaacgccgcgatcgttggtcaaccagcgtataaaatcgctgagctggctggcttcaccgtccctgtttccaccaaaattctgattggtgaagttaccgacgttgatgaaagcgaaccgtttgcccacgaaaaactgtctccgacgctggcgatgtatcgtgcgaagaatttcgaagacgcagttgataaagctgaaaaactggtagcaatgggcggcatcggccacacctcctgcctgtataccgaccaggacaaccagccagaacgcgttgcttacttcggccagttgatgaaaaccgcgcgtatcctgatcaacaccccggcttctcagggtggtatcggtgacctgtataacttcaaactcgcaccttccctgactctgggttgtggttcatggggtggtaactccatctcggaaaacgttggtcctaagcacctgatcaacaagaaaaccgttgctaagcgagctgaaaacatgttgtggcacaaacttccgaaatctatctacttccgtcgtggctcactgccaatcgcgctggatgaagtgattactgatggtcacaaacgcgcgctgatcgtgaccgaccgcttcctgttcaacaacggctatgcagaccagatcacttctgtgctgaaagccgctggcgtagaaacggaagttttctttgaagttgaagctgacccgaccctgaccatcgtacgtaaaggcgctgagctggccaactccttcaaaccagacgtgattatcgcgctgggcggcggctccccgatggatgctgcgaaaattatgtgggtcatgtacgaacatccggaaacccacttcgaagaactggcgctgcgctttatggatatccgtaaacgtatctacaagttcccgaaaatgggcgtcaaagcgaagatggtggcgatcaccacgacttccggcaccggttctgaagttacgccgttcgccgtggttaccgatgacgcaaccggtcagaaatatccgctggcagactatgcgctgactccggacatggcgattgttgacgccaacctggttatggaaatgccgaagtcactgtgtgctttcggtggtctggatgccgtgacgcatgccctggaagcttacgtttccgtactggcttccgagttctctgacggtcaggctctgcaggcgcttaagctgctgaaagaaaacctgccggcgtcctaccatgaagggtctaaaaacccggtagcgcgtgagcgtgtacacagtgctgcgaccatcgccggtatcgcgtttgcgaacgccttcctgggcgtatgtcactcaatggcgcacaaactgggctctcagttccacattcctcacggtctggcgaacgccctgttgatcagcaacgtgattcgttataacgctaacgacaacccgaccaaacagacggccttcagccagtacgaccgtccgcaggctcgtcgtcgctacgctgaaatcgctgaccatctgggtctgactgctccgggtgaccgcaccgcagcgaaaatcgaaaaactgcttggctggttggacgaaattaaagctgaactgggtattcctaagtctatccgcgaagctggcgtgcaggaagctgacttcctggcccacgttgataagcnnnnnnnnttgataagctgtctgaagacgcttttgacgaccagtgcaccggcgcaaacccgcgctacccgctga

SEQ ID NO: 258033 - DNA, 528 bp, Klebsiella pneumoniae
atgcgcacgctggtttataccgcggagattgatgaccgctttggttcggggaaagtgagttcaaggattggcctctcatcgcccgcgcggttgtataatactcagacggcgttatttgcagacattgcggcagaacataagcgtcagccgattcactgcgtattagttgatgagagccagttcctgacccgtgagcaggtacgcgacctgtctgaggtggtggaccagcttgatattccggtgttgtgttatgggttgcgaacagattttcgcggcgaactttttacgggcagccaatatttgctggcgtggtccgataagctggttgaattaaaaactatctgtttctgcggtcgtaaggcgagtatggttttgcgcctcgatcaggaagggcgcccgtacaatgaaggggaacaggtcgtgattggcggtaatgaacgttatgtctcggtatgccgtaagcattataaagaggcgctgagcgaaggttctctgaccgctgtacagaacaaacagcacatttgctaa

SEQ ID NO: 258034 - DNA, 162 bp, Klebsiella pneumoniae
gtgggcaagaagaaaaccaaaaaagtggcgctagcagtgccgcagccgcaaccagaaaccatgacaacggtgggttttggttatgaagagatgttaagcgagctggaggcgatcgtcgcagaagcggagatacggctccaggatgaagaaagcgttgcctga

SEQ ID NO: 258035 - DNA, 300 bp, Klebsiella pneumoniae; identical to SEQ ID NO: 188485

SEQ ID NO: 258036 - DNA, 609 bp, Klebsiella pneumoniae
atgacgctgttttctggtcctactgacatctatagccatcaggtccgcatcgtgctggccgaaaaaggtgttagttttgagatagagcacgtggagaaggacaacccgcctcaggatctgattgacctcaacccgaatcaaagcgtaccgacgcttgtggatcgtgagctcactctgtgggaatctcgcatcattatggaatatctggatgagcgtttcccgcatccgccgctaatgccggtttacccggtggcgcgtggggaaagccgtctgtatatgcagcgtatcgaaaaggactggtattcgttgatgaataccattcagaccggtaccgctgcgcaggctgatactgcgcgtaagcagctgcgtgaagaactgcaggcgattgcgccagttttcacccagaagccctacttcctgagcgatgagttcagcctggtggactgctacctggcaccactgctgtggcgtctgccggttctcggcgtagagctggtcggcgctggcgcgaaagagcttaaaggctatatgactcgcgtatttgagcgcgactctttcctcgcttctttaactgaagccgaacgtgaaatgcgtctcggtcggggctaa

SEQ ID NO: 258037 - DNA, 210 bp, Klebsiella pneumoniae; identical to SEQ ID NO: 202791

SEQ ID NO: 258038 - DNA, 216 bp, Klebsiella pneumoniae
atgctgataaatctctgccagcctaatattgacagcgggtttattagcgcattttttgtgatcaatatctcttttataaaatgggatcgtcttaacagttacgtttttattttcttttatatcattaggttacttgaggagataatttcgccggcgggctgccccttttcatctttaagcccagcgataatgaaaaagcagaaatgtgataaatag

SEQ ID NO: 258039 - DNA, 849 bp, Klebsiella pneumoniae
atgttcatgagtctgtataacttcaacgctattctgaaaattgcgcaggaaagaaattttaaggccattggttcatttaatttgcactgtattgaaatgctgccagcattttttaaagcggcgcaacaaagccatagcccgttaatgattcaaatctctaccgggacggcggaatatcttggctaccggttactggtggatgcggttcgttcattagcggaaagtgaaaacgtgccgacctgcctgcatctggatcactgctctgatattagcgccatcgaaacggccatggatgccggatttacatcagtgatgtacgacggctcccatctggatttggaagagaatatcggcaatacccgcatcgtggtggagatggcgcgcccgcggaatatcacggtagaaggcgaactgggggcgatcggcggatcggaagacggcaaagccgtggccgcggaggatatctgcttcaccacggtggaggacgccaaacgctttgtggaggagacccgggtggatatgctggcagtctccgtgggcacggtgcacggcctgtataccggtaaggcgcaaatccagcaccagcggctaaaagagattagcgccgcgaccggcgtgccgttagtgctgcacggcggtaccggcgtcagcgatgaagatatgcgcctggccgtcactgaaggcattaataaggtgaacgtcggcactgaaatgaacgtccagtgggtcgatcgctgtaaaaccacctttgaaaaaggcaaagtgaacgacagcgtacgcaaatttttaattccggcgaataacgcggtcacccatgtattaatggaaaaaatcgcgctgtttaaataa

SEQ ID NO: 258040 - DNA, 270 bp, Klebsiella pneumoniae
atgtttgaatctttgaaaacgttgtggaaaaaagagaatcaaccaccgcaggattatgacgaacagtcccgtcagctggccggggaaatagccagactggaagcggaactacagggcaacccggctaatggcgaaatacagaaagccttaatgctgatgtataaccgggcgctggcggtgtatgccaaaagtaagagtcatcggcaggagatagatgcgctctttgtgcgtattgatgagttacgcaatgtaattcgccgcaatatttag

SEQ ID NO: 258041 - DNA, 555 bp, Klebsiella pneumoniae
atgaacagacatctcacacccggctgcaaaacggtgattttaattaacggcattcccgcctcgggcaaaagcaccgtcacccggcagctatcggcaaccttcaatctgccgcagctgactatcgacggtattaaagagccgtttatggcgtgctttagcgaaatcgacagatctttcaaccggcagctgggctgcgccgcttatgaagtcatctggtcgatcgtcggccacgctccggcaggctgtatctggttaatcgacgcctggtttggttttcagccgcgcgaaacgttgcagcggcagctgcagcaggcgggcgttgaaaaggttctggagatctggaaccgcatctcgcccgagcttgcggtgtcgcgctatgccagccggttgcaggatcgcaggccggggcacccgggcgaagagtatctcccggagctggctcagctggcgcagcgggcggaacccatgcggctggggccggtgtttaccgtcgatcagcaaaaaccgctggagatggcgcctgttatccgttggctcgaagtacaaatgcagtaa

SEQ ID NO: 258042 - DNA, 951 bp, Klebsiella pneumoniae
atgcagggtaaggtatgtgtatttggttcgttcaacgttgacattgtggcgaaggtggaacgcttcccgcgaggcggtgaatcgctaatggcgctgggtagcagcctgggaccgggagggaaaggtgcaaaccaggcaacggccgccagtaaagccggtgctcaggtgcattttgttgccaaggtgggtaaagatcagttcagtcatttagcagcagatcatttaactcgctctgcaattcactcttacacgctttatcagtcagagagtgaaccaaccggtaatgcgattatttatgtttctcaggaaaacggcgaaaatatgattgctatttattccggggcaaatactactattacctatagtgaaattcagaaaattattccggaattatcttcatcagatgttttattggttcagctggaaaataatttcgatgctactcattcactaatcaagatagcgcatgagctgggtaagcaagttattcttaatcccgccccctattctgctgaaattatccccagcatcccctttgtagatgtcattacgccgaatgaaacggaagcatctttattatcgggaatcgacattagcgattttgatacggcaaaagaagcggcgctacgtatcgccagactcggcgctaaaaaagtgctgattacgatggggtcgcgcggtgcgctgctgctggataaccgccagttcagtcatatacgcgctttcccagccgtcaccgtggataccaccggtgccggcgatgctttcaacggtgcgctggccgcatcgcttgccgccggaaatagtctggtgcaggccgctacctgggcctccgccttcgcctctctggccgtggagctggaaggggcatccaatatgcctgaatttgaacaggcaaacgcacgactccgtacctctgaactcaggaaaaaacaatatgaaaacgattaa

SEQ ID NO: 258043 - DNA, 924 bp, Klebsiella pneumoniae
atgaaaacgattaacggtattgtcccagtaatgctgacgccatttgccgctgacgaacggatagattatccggcgctggcgaaattaatcgactggtatctggagaagggcgttgatgcgctgtttgccgtctgtcaatcaagcgaaatgcagttcctttccttagaagaacgcgttgagctggcgcgttttgtggtacagcgcgttaacggccgcattcccgttatcgcttctggccatatcagtgatgatattgaagtgcaaaaagccgagctgctggcgatggcgcagaccggtattgatgccctggtgctggtgactaaccatctcgatccgcgtaatgaggggagcgacgttttctatgcagtgctgaatacgttgctggaaacgctgccagcctcgctaccgctcggcctttacgagtgtccggcgccttatcgccgattgcttaccgatgatgaatttacatggtgcgccaatagcgggcgcttcgttgtgctgaaggatgtgagctgcgatctaccgaccgttgaacgtcgcgtacgtctggcgcagggcacgccgctcaacgtcattaacgccaacgcggcgattgcctggccagcgattttggcgggctcacagggctttagcggtgtgtttaccaactttcaccctgaactatatagctggctgtggcgagaggggaaaaaccaacgcgcactggccgatgaactggcgattttcctctctctgggggcggtgagcgaaacgctgggctatccgaaaaacgccaaaatctaccatcagcgtctggggactttcgacagtatcacctgccgggttaataaagatgatgtgctgaataagtactgggggctgacggtgattctcgaccagattcgcgccggaaccgaacagtggcgtcagcgtatcgtgggctaa

SEQ ID NO: 258044 - DNA, 492 bp, Klebsiella pneumoniae
atgatcgtaaccagtctgaaggcatggcccgcacagtcgatggcttatcatccggttattcgccaggcgctggcttttcttgcagagcaagattttcaggatttcacgctgggaaaaatcgacctgatccctgaccgactcttttgcctgctacaggagatggatagcatgccttttgccgaggctcgtccggaatcgcaccgtcagtttatcgatattcagtacctgatttcaggccatgagcgtatgggcgtcagccgcgtggaaagcggtctgcataccgttgtggatgatcgaacgccgcagcaggacatcatgttctggcgggtagaagaagcagagacgcaggtaacgttaacccccggtatgttcgcgattttcttcccggaagatattcatcgcccctgctgccatcctctgggcggtggtgttagccatctgcgcaaagcggtcatcaaaatcgatcgcgcattactggaggtatcggcatga

SEQ ID NO: 258045 - DNA, 1278 bp, Klebsiella pneumoniae
atgagcaccgtgaatcagacttcctcggcggtaatcgagccgccgaaactctctcgccggcgctgggggattattttgattttgctgctggctgcggtggtgaactatcttgaccgcgccaacctgagtattgctaataccaccatttcgaaggagtttggtttctccggaaccgaaatgggtctgctgctatcggcgtttctctggccttatgcgctggcaaacctgccggccggctggctggtcgaccgtttcggcccaaagaagatgttcaccggcgcgctgacactatggtctgccgtgacctttctgatgggatttgtgaatacctatagtttcttctacggcctgcgggtgctgctgggggtggcagagtcgccgttctttacctctggtatcaagatcacccaaagctggttttcggataaagagcgcggcctgccgacatcgatcatcaatacgggttcgcaaatcgctaacgccatcgcgccgccgctgctgacgcttctgctgctgtgggttggctggcgcgggatgtttatcgccgtgggtctgctgggtataccgttgattctggcgtggctgaagttttatcgcgatccggatgcgcgggaagcgatgctgatccacaccggtaaggtggtgatggctgaggccgataagccacaggttagctggggcgagctgtttcgcaataaaacgacctggttcatgatctccggcaacttctgcatcatgtttactatctgggtttatctgacgtggctgccgggttatctggaaacgtcgctgggattcagcctgaagcagacgggctttattgcctcgattccattctttgccggtattcttggcgtcctttgcggcgggatgctctctgaccgtctggtgcgtagagggattaatgcggtaacggcgcggaaggtgcctattgtggtgggggcggcaatggcggcctgttttgtgatgccaattccgtttgtcagcaacagcggtaccgcgattacgctactgacgctgggctatttctgctcgcaaatgccgtccggggttatttgggcgctggcggcggatatggcgcccaaagagcaggtcgcttctctcggtgcgatccagaactttggcggttttctcggtgcagcgctggcgccggtgatcacggggattatccttgatgctaccggtcagttcaccaatgtctttattctcggcggctgcctgctgttccttggcgcctgtctctatggcttctttgtgcgtaaaccgctggcgcagtag

SEQ ID NO: 258046 - DNA, 528 bp, Klebsiella pneumoniae
  misc_feature (445)..(454): n is a, c, g, or t
atgtctgattcgattttacgcctgcaaagcgcagtggccgacgtggtgatcaaaacccatccgttcgccgaaattatctactgggggccgcatttaagccacttttcgccgcaggatgccgccagcatcgcccgcccggtggccaacggtcgcctcgacgtcgattccccggtgaccttgatggccgaactggggcacggtctgtttggcgcgccgggcattgagggccaccgtcaggggctggatgcctcaccgatgttcaccaccaccgaggtggtgcaggacgggcagaaggttactctcttcagcgaagacgcgcaggctggcctgcggttatgcagtgaaatccagcttgatagcagcggcgtactgagcgtgcgccatggcttaaccaacctgcgcccgcagccgtggcaggtggatcgcctggcggtcacgctgccgnnnnnnnnnnccggcgcccgcagccgtggcaggtggatcgcctggccgtcacgctgccggtcgccgaacgcgcccgcgaagtga

SEQ ID NO: 258047 - DNA, 1005 bp, Klebsiella pneumoniae
atgagcaaaataatgatgtctgaagagatgaaaagcgccccggccgcgccgtcgccgctgcgtcgtctgctgtgctgggaagggtttctgctggcggtgaccctcgcggtattcgtggttaacgccctggcgtcgccctacttccttaatatctggaacctgtcggacgccacgtttaacttcaccgaaaaagcgatcatcgtgctgccgatggcgatgttgattatcgccagagagatcgacctttcggtggcgtcgacgatggcgctgagctcaacggcaatgggcttctgcgcggcggcgggtatggatacgccgctgctggtggccgtcgggctgggcgtggggctgctgtgcggcctgttcaacggtatcctggtgacgcgctttaacctgtcgtcgatcgtcatcaccatcggcaccatgagcctgtatcgcgggataacctacattctgctcggcgacaaggcgctcaaccactacccggagagcttcgcctggttcggccagggctacgtatggggggcgctctcttttgagttcgcgctgtttatcctcctcgccgccgcctttaccttcctgctgcataaaaccaactttggccgccggacctacgccatcggcaataacccgaccggggcctggttctccggcatcaacgttaagcgccacaatctgatgctgttcgcgctggtcgggctgatggccgggctggcggcggtactgctgacctcgaggctcggcagcacgcgtccgacgctggcgatgggctgggagctggcggtcgtcaccatggcggtgctcggcggcgtcaatattctcggcggctccggcagcatggtgggggtgattatcgccgccttcctgatggggctggtgacgtttggcctgagcctgctcaacgtgccggggatcgtgatgtcgatcatcatcggcgcgatgctgatcgtggtgatctcgctgccgattattacccggcggatgatgcagcgaagacgaatttaa

SEQ ID NO: 258048 - DNA, 228 bp, Klebsiella pneumoniae
atgggcgggaccggacgggtgctcggctgcctgtgcggcgcgctgttcctcggcgttatcaataacgcgctgccggtgattggcatttcgccgttctggcaaatggccatttccggcgcggtgatcgtgattgcggtgctgcttaacgagcgcagcaataagacccacgggcggttaatcctgcgcaacgcggcgctggcgcggcagaaacaggcggtgaaatcatga

SEQ ID NO: 258049 - DNA, 630 bp, Klebsiella pneumoniae
atgacagaacgcctttattacaccagcgacgccactgaatgcctggcgcgagtcgtcaactgcctgagcgaagccgatggccgctatgccattgagctggaccgtacgctatttcacccgcagggcggcggtcagccggcggatcgcggctggattgccgatctggcggtcgaaggcgtggtttcgcgcggcgatagcgtagcgcatatcgtttcacagccgctgccgtcaggcgaggtcacgatccgtatcgatgcggaaagccgacggcttcacgcgcgcctgcactccgccgggcacgtgcttgcccaggccggcgagcagtcaggctggcagccgatgaaaggacatcactggccgggagaaagccgtatcatttttgccgccggggctaacggcgggctgcccgaagccagcgcgctgctggaaaaagtcgccgcctggcaggcaggaaatttaccgcgtcaggtcgcttttgccgatggcctgcgccagattgggttcggcgatatgcagagctatccctgcggcggtacgcacgttgccagcctgtccgagctggggaaaatcgtcattagccaggtgaagatgaaaaaaggccaaattattgtcagctacaccgtggaataa

SEQ ID NO: 258050 - DNA, 363 bp, Klebsiella pneumoniae
atgacgaatggacaagcgtattttaacggatggaaaaagggcctcgattttagcggagtggccagcaggcaggagttttggtcttttttgctcatcaacctgttgattcttgccctgccgctggcgacctggtttttggcgatgcagcataactctcagtacggcgttttcatttttttcgctgcaccgctcagcggtcttctttcgctgccgatgattgttccgctgctggccgttggctgccgcaggatgcacgatatcggtcgttcaggatggtggttcgccctgtgccttattattccatggtttttgatcgtcgcgctatggctgtgctgcctgaagccggctgcatcttctcgctga

SEQ ID NO: 258051 - DNA, 2292 bp, Klebsiella pneumoniae
atgattaaattatatgaccatggagtctatatctcgcatcagcatggtattatttgtgctgataatcgttcagccgcggtagaggagaaggaggaggcgcgcaagagaacgatctcatggtcgattctctccgcccataatacgtcaggggatgatcataagttaaaaattaaatttgattcaatggcttcccacgatattacttttgtgggcatcatccagaccgctaaggcatcaggcatggagcgttttccattgccatatgttttaacgaattgtcataactccctttgcgccgtcggcgggacgatcaatagcgatgaccatatatttggcttgtcatcagcgaaaaagtacggcggcatttatgtcccgccccatatttccgttattcatcaatatatgcgtgagatgatggccggcggcgggaaaatgatcctgggctcagacagccatacccgctatggcgctttgggaacgatggcggttggcgaggggggcggagaattagttaagcagctgctcggtgagacctgggatattgattatccagaggtagttgcggtgtatctgacgggtaaaccctctcccggcgttggccctcaggatattgccctggcgatcattggcgcggtgtttgagcgcggttacgtgaaaaataaaattatggagtttgttggcccgggcgtggcgacgatgtctaccgacttcagaaatagcgtggatgtgatgacaacggagaccacgtgtttatcctctatctggcaaaccgatgaagagaccaaacactacttacgcattcatggcagggagcaggactattgtccgctctcggcaaaagagatggcttactatgatggctgcatagaagtggacttaagtagcatcaagccgatgatcgccttgccctttcatcccgccaacgtatatgaaattgatacgcttaatgacaatttgcaggatattttgcatgaggtcgaaacggcggccgataaaatttcccagggacgcgcagcgctcaccctgcgggataaaatcgaaaatggcaaactgcggattcagcagggaattatcgccggttgcgccggcggaaattatgttaacgtggtcgaagcggcgcatgccttaaaaaaccgctcctgtggtgacaacgctttctctctgtcgatatatccctcttcccaaccggtattaatggacctgactaaaaaaggcatgaccagcgcgctgttgagcgccggcgcgattatgcgcaccgcattttgtggaccctgttttggcgcaggcgatacgcccatgcataacggattaagcattcgccacacgacgcgtaattttccaaaccgggaagggtcaaaaccggggaatgggcaaatgtcggctgtcgcgctgatggatgcccgctccattgcggcgacggcagccaatgggggcgtgctgacatcggcttgcgaactcgattgctgggaaaacattccgcagtatgaatttgatgcttcgccttataaaaatcgcgtttatcaaggctttattaagggggcgacgcaacaatcgctgatttatggtccgaatattaaagactggccggagatgagtgcgctaacggaaaatattctgttaaacgtgacctcaaagataatggatccggtgaccaccaccgatgaacttattccatcaggagaaacctcttcattccgctccaatcctttagggctggccgagtttaccctttcacgacgcgacccgggctacgttggccgcagtaagaagattgccgctctggaaacacggcggatgacaggcgacaacccttgtcgtctggagccggagcttgaggcggttttttcccggatccgacagctgccgggacaggaaaatgtcaccctcgagcagacggagataggcagtatggtgtatgcggtaaaacccggcgatggttccgcgcgcgagcaggccgccagctgccagagagtcctcggcggcctggcgaatattgcccagcagtatgcgaccaagcgctatcgttcaaacgttatcaactgggggatgctgccgctgcagatggaggcgctgccggaatttgaagtgggcgacttcatctatatcccgggaatcaagtccgctttggaaacccatctgagtcaaattaccgccttcgtgattagccctcagcatcccgttaaagagatctcgctttatatggagggattaaccgcatcagagcgggagattattaaagcggggagcttaattaattataataaattacgcttaacaacccaccaacattaa

SEQ ID NO: 258052 - DNA, 1056 bp, Klebsiella pneumoniae
atgaagagcattccctgtgtattaatgcgtggtgggacatcgaaaggcgcctttcttttagcagatgatttacccaaggatattcagaaacgtgatgactgcttattagccatcatgggttcgggtcatgagctggaaattgacggcattggcggagggagcccacaaaccagtaaggtggcgattatcagtcaatcgcttagcgaagaagcggatatcgattatctgtttgttcaggtcatcgttaatgaacggcgggtggatacaacgccaaactgcggcaatatgctgtgtgcggtaggcgggtttgcgattgaacatgggttagttgaggcggcgtctccggttacgcgagtgcgtataagaaacgtgaacaccaatacttttattgacgctgacgttcaaacacctgacggcaaggttatctatgaaggggatagccaaatcgatggcgttccggggcgcgccgcgccggttgcattgacttttttgaatgcggcgggggccaaatccggacgccttttcccgacgggtaatcgtatggacgtattcgatgatgtacgagtgacctgtattgatatggcgatgcccatggtggtgatcccggctcagagtctgggcaaaaccggatatgaatctgcgagtgaattagatcgggatagcgggttattaaaatcgcttgaatctattcgtatccaggccggtaaggcgatggggtttggggatgtaacgaatatggttatcccaaaaccggttctgatttctcctgcattaagcggcggaagtataaacgtacgctattttatgccgcataattgccataaatcgctggcgattaccggtgctatcggtctggcaagcgcatgtattattccgaaaaccattgctaatgaactgacgaagctatcaggcgacggaatcattaaagtcgaacaccccagcggcggtattgaagtcgacttaagccagacgactgaacgcccagaagatatccgggcttcggttattcgtactgcgcggaagatcctttcaggaacggtttacattcccgaataa

SEQ ID NO: 258053 - DNA, 210 bp, Klebsiella pneumoniae; identical to SEQ ID NO: 176969

SEQ ID NO: 258054 - DNA, 900 bp, Klebsiella pneumoniae
atgtcgcatatcaactacaatcacctgtactacttctggcacgtctacaaagaaggctccgttgtcggcgccgcggaagcgctgttcctgacgccgcagaccattaccgggcaaattaaagccctggaagagcgcctgcaggggaagctgttcaagcgcaaaggaagagggctggagcccagcgaactcggcgagcttgtgttccgctacgcggatcgtatgtttacgctaagccaggaaatgctcgacatcgttaactatcgtaaagagtcgaatctgctgtttgatgttggcgtcgcggacgcgctgtcgaaacggttggtcagcggtgtactggatgccgccgtcgtcgataacgaacagatccatttacgctgtttcgagtcgacccacgaaatgctgcttgagcagctaagccagcataagctcgatatgatcatctccgactgccccatcgactccactcagcaggaagggctattttcggtaaaaatcggcgagtgcagcgtgagcttctggtgcatgaatccgccgccggaaaaacccttcccgggctgcctggaagaacgtcgtctgctgatccccggccgtcgttccatgttagggcgcaagctgctcaactggtttaactcgcaggggctgcaggtggaaattctgggcgagtttgacgatgcggcgttgatgaaggccttcggcgcggcgcacaatgcgattttcgttgcgccgacgctatatgcgcatgatttctatagcgatgaatcgatagttgagatcgggcgcatggacaacgtcatggaagagtatcacgccatctttgcggaacgaatgatccagcatccggcggtgcagcggatttgtaaccgtgactattcggcgctttttacgccacctcaggcgtag

SEQ ID NO: 258055 - DNA, 477 bp, Klebsiella pneumoniae
atgattcagcacccggctcagccagcggccgtagacggcaatcacccgctcaaaaaagcgttcgctggcgcgcgagaagcggttctgcttgcgcagcgattcatggctgagcatgcgggcgcacatcatcggcgtcagggtcagcgacaccaccgcggaaatcagaatcgccaccgccagggtgatggcgaactcgcggaacagacgacccacgatatcgcccataaacagcagcgggatcagcaccgcaatcagcgagaaggtcaacgagataatggtaaagccaatctctccggcccctttcagggcggcggccagcggcttttcgcctttctcgatatagcgcgagatgttttcgatcaccacgatggcgtcatcgaccacaaagccggtggcgatggtcagggccatcagcgtcaggttgttaatcgagaaatcgagaaacaccattaccgcaaaggtgccgaccagcgatag

SEQ ID NO: 258056 - DNA, 1119 bp, Klebsiella pneumoniae
atgaaaattaaacactatacattacctgaacatgcactcggtgggcagcggcaattaagccattttcatttcggcgcgcccggcacaggagagaaggtctatctgcaggcggggctgcacgccgatgaaattccgggcatgctggttctgcattatcttaaaagattactcagtcaggcggaacggcgcggcgagctgcgcggcgaaatcattctcgtgccggtggccaacccgccggggctggcccaggtgctgctcagcggcggcataggtcgtttcgatctggcaagcgggcgtaattttaaccgcgacttccccgatctggctgccctggcgcagccctatctgcgtgcgccatcgcccggctcgcgccgcgagtacctgcagcaggtgcgcgcggcgatgcgggaggcgctggcggcgctgcccgtggtcagcgaagttcaggccctgcgccatcatctgctgggcctcgcctgcgatgccgatttggtactcgatctgcactgcgatgaccaggcgattttgcatctctacgctgacccggcctggcaacgcgaggcgaaagttctggcggctttcctcggtattggcgccgtgctgctgtcgcaggagagcggcggtcattcgtttgatgaggcctgcggcctgccgtggcagcgcctggcggcgcgtgattcatcgcgctcgcagcagcagcccggctgtatggcggtgaccgtcgaactgcgcggccagcaggaggtggatcacgccaccgcctgcgacgatgccgaacgtctttatcgctatctgcagtaccgcggcgtactggccggcgcgaagcctgagattccgcagcaggaaacggtaatgctgccgtttgccgccggggagattgttaccgccccggcgaccggcatcctggtgctgttaaaacagcccggcgagtgggtcagcgccgacgatgtggtcgcggaaatcatcgatccgctgaccgatatggtcaaagcggtgcgcccgacatcgggcgggctgatttatgccagccgtcgggcgccgtttgtcaccctgggggccgaagtaatgaaaatcgccggcgagcggccgttcagcggcggaggcgggctggcgctgtaa

SEQ ID NO: 258057 - DNA, 933 bp, Klebsiella pneumoniae
atgtataccatcagcgaaggttacgccccgtttcggcgctatcaaacctggtttcgcgtttgcggcgatatcgatagcgggctcacgccgctggtcatcgcccacggcgggccggggtgcacgcatgattatgttgatgcgttccgcgatatcgccctcagcgggcgggcggtgatccactacgatcagttaggcaacggacgctcaacccatctcccgcagcagcccgccgatttctggcaaccggcgctgttcctcgacgaactggccaacctgctgcagcatctcaatattgccgatcattacgccctgctcggccaatcgtggggaggtatgctcggcgcggagcacgccgtgacgcggccaaaggggttaaaggcgctgattatcgccaactccccggcgtcgatggcgctgtggctacagggagcggccaggctgcgggcgcagttgcccgccgacgtccagcagacgctgctggcccatgaggcggcgggaacgctggacagcgcggaatataaggcggcaagccaggtattttatcaacgccacgtctgtcgcctcgatccctggccggcggaagtgcggcgcaccttcgacgccatggatgccgacccgacggtttatcacgccatgaatggccccaccgaattccacgtcatcggcagcatgaaagcgtggacgattatcgaccgcctcgcgcgcattgacgttccggtcctgctgatttccgggcgctacgatgaagccaccccggaggtggtacaaccctttatggaccacatccccgacgcgcggtgggtcattttcgaagcctcaagccatatgccgcacgtcgaagagcgcgagctgtgcatgaagacggtaaacgactttttaagccgcgcgataaacgaaaagccgcttacagcgccagcccgcctccgccgctga

SEQ ID NO: 258058 - DNA, 753 bp, Klebsiella pneumoniae
atgcgactggaatttgaacgccccggcagcgcgcgggcggctagcctggatgaggcattcagcggactttttcaggccacccggaagttaggatttgacgcggtcatttacgactacacgccggtcccgcgttctctggaaggggagctgattacgccttcgctgctgaaaacgtgcaatgtgccggaagatatgcgccagctatggtgcgagcgcggatattaccagcttgatccggtgcagcactgcgcgctcgaaagctgcgcgccttttgtctggtcctatcaacgaccggacaacagcatgctgcgcgggaggctgaacaatcacgccaccgcggtcaccgactatatgcgcgaacataatatgccctgcggggcgacggttcccctgcatctccccaacggcagtttcgtcactctcaccggcatccataccggccagcgtcaggaacgggaaatcagcgccaccctggcgcagctgatgctgctcgcccaccagtttcaggagtcggcgtttccgctgtttgacagcaccctgcttacctgccgccatgtgaagctaagcaaccgcgagcgcgaatgcctggcgtggtccgccgaaggacttaccgctaaagagatcgcccgcaagctgcaccgctcggtggcgacggtgacgctgcatcttaataccgcggccaaaaagctcggcgccagcaaccgcgtacaggcggtagtccgcgccctgcactaccgcctgctcgacagctaa

SEQ ID NO: 258059 - DNA, 900 bp, Klebsiella pneumoniae
atgtggagcgaaatagcgcccgatcagtaccataacattgcggtggagggatataacgtcgtggcctatcagtttggcgacggcgaggagaccgttctctgcctcaacggcgggccggggctgccctgcgattatctgcgcgaagcccactcctgcctgaagcagcacggttatcgggtgatcgcttttgaccagctgggtaccggcaagtccgaccggccggatgatgccagcctgtggacgatggcacgctacgtgcgtgaagtggagaccgtgcgtcaggcgctggggctcggtcaggtgcatctgcttggtcactcatggggcggatggctggcgattgaagtggcgttgcaccatcctggcgcaattcgctcgctgattctggaaaacaccgtcgccgatatgccgcatctggtgcaggagctgaaccgtctgcgcggggcgctggggccagaaaccgtcgcgatgatgcagcgctacgaagcgctcggctggttggatcatccggcctatcaggcggcgattactctgctgaattatcgccacgtgtgccgtctcgacgtctggccggagccggttacccgctcgctcggcgactggaatatggggccgtataccaccatgcaggggccgaacgaattcctctataccggcaatttaaaaaactggaaccgcagcgctgagctggcgtcaatccgcgcgccctgtctgatcaccagcggccagcacgatgagctgacgcccgcctgcgccctgaaaatgaagcagggcctggcgaacgccgaaatagccatttttgccaacagcagccatatgccgttttacgaagagccgcaggcttactacccggtgctgctcgattttctggcgcgccagcgcgacgcgggaggctgttga

SEQ ID NO: 258060 - DNA, 939 bp, Klebsiella pneumoniae
atgcaccgttaccgctttctgcttcttcgcccgctacagctgctgccggttctgctgggtatcagcctgatcaccttcatgatggtgcgcgccatccccggcgatccggcgcgtattctgctcggggtgcgcagcacgccggcggcgctggcccgcatccgcgcgcagtttggcctcgacgaaccgccgtgggttcagtacggctattttctgcgcaatctgctgcagggcgagctgggtaagtcaattgtttaccgggtcgataccctgaagctgattgcttcgcgtctggaaccgacgctgtggctggtgctcggcagcgttctgctggcgatagcgttgacggtaccgctggcggcgatggccgcacgccagcgcgggcgcctcgccgatcggctgattcgtctgtttacgaccgccgggctcgggtttccggcgttctggctcggcatcatgttgattctgctgttcagtatcgcgctcggctggtttccggtctccggctacggcagcgattttgtagaccagctgcaccatatggttctgccgtgcctgaccgtggcgctggcgctgtcggcggtattgattcgcaacctgcgcgccagcctgctgatggagatgaatagcgactatgtggtggcggcccgggcgcggggacagcaggaaagacgtatcttctggcggcacgtgctgccgaactctctggtgccgaccatcaatctgctggcggtgaatattggctggctcatcggcagtacggtggttatcgaaagcgtgtttgccatccccggcctcggacagctgttggttaaggcgatttttagccgcgactacatggtggtgcagggcgtggtgatggtctttgcccttgctaccgtagcggtcagcctgctggcggatattctgaccgtggccctcgacccgaggataaaactatga

SEQ ID NO: 258061 - DNA, 846 bp, Klebsiella pneumoniae
atgaaggcgatagcgacgttttcccgtctgcgtcagcgggctatcccgcgtcagcaggcgctctacgccgggctggcgatcgtcggactatggctgctggtcgcctgtctggcgccgtggatcgcgccgttcgatccgattgcccaggacgcctcttccagcctgctgccgccgggcggcgcgcatctcttcggtaccgacaactttggccgcgacgttttttcccgcgtgctgtggggcgcgcgggtcgatctccaaatctgcctgctgggggtgctgttcccctttacgctcggtaccgcgctgggggcgcttgccggctattctggcggcgtggtcgatgcgctggtgatgcgggttattgatatcgtgctggcctttccgtttctggtgctgatgctggcaatcatcgccattctcgggccgggactgagcagcttttacatcgccatggcgatggtgggctgggtctcctacgcccggctggtacgcgctcaggtactgacgctgaaacagcgcgattttattctggcggcccgcagtctgggctacggccatccgcggattttgttccgtcatctgctgccgaacgcgctaaccggagcgatcgttttttcgatgtccgactgcgtactggtgctgctgaacggagccgcggtaagctatctcgggctcggcgtgcagccgccaaccgccgaatggggcgttatggtggccgaagggcagagctttatcactaccgcgtggtggataaccacctttccagggctcgccatcgtgctgctggcgatgggctttagcctgctggccgatgggctcggtgacaagttaggaggacggggatga

SEQ ID NO: 258062 - DNA, 981 bp, Klebsiella pneumoniae
atgagtttgctgaaggtgaatcgcctggcggtcacgggcggcgaggatatcgcgctggtcgataacgtctcattcacgcttgaagccggggagatgctggggctggttggcgaaagcgggtcgggaaaaaccgtgacctgccgggcgctgatgcgcctgctgccgggggacggactgcggattagcggcggtgaggttgtgctcgacggccgggatatcttacccctcagcgaagggcaaatgtcggcggtgcgcgggcgggaaatcggtatgattttccagaacccgaccagccatctcaatccggtgatgaccattggggagcagatcgcggaaagccggcgccttcattttgcggcaaaccgccgtcaggcgcgggaagatgcgctggccctgctgcgccaggtcggcatcccggacccgcagaatcggctcaatagctatccgcacgaattttccggcggtatgcgccagcgggcgatgatcgccgtcgcccttgcgccggaaccgcggctgctgattgccgacgaaccgacgaccgcgctggacgtcaccgtgcagatgcagattttgcgcctgctcagcgacctgcgtgccgagctggggctggcggtcattatgatcacccacgatctcggggtggtggcgcaaacctgcgaccggatcgcggtgatgtacggcggcaggctctgcgaggtgggcgacaaacgcgaagtgctcgccgggccgctgcacccctatacccgcggtcttattgattgtcagccggccagcgaaggcggacgggggaggctgacaatcatcgacggccagccgccgagcgccgaccactttccatcaggctgtcgctttcatccgcgctgccgccgcgccgatgaggcgtgcctgcagcagccgccgctgcattacgggcaggatcgccatagccacgcggtggcttgtcatcaccgcttacccacgctgacccgacaggagggataa

SEQ ID NO: 258063 - DNA, 1035 bp, Klebsiella pneumoniae
atggctaacgctcactggccgctgcttgaggccgataatctttgcgtcaccttcccggtgtcgggcggtctttggcagccgaagcgggtcgtgcacgcggtgaaccaggtcacgatgcagatctttcccggcgaaacgctcggtctggtcggcgaatccggcagcggcaagagcacgcttggccgagcgttgttacagcttgaacgggtagccgatggcgaggtgcggttcgaggggcagcgtattacccatggcttaaccagcgatatcgcccgtctgcgccagcaaagcgcgatgattttccaggatccctttgcctcgttgaacccgcggcagagcgtgggagagagcatcgccgaggtgctgcgcgtgcatcaaaaagtgccccgcgggcaggaggcgctgcgggtagcggaactgctcaccctggtgggcctgcgcccgcagcaggccagcgcgaaaccggcccagcttagcggcggccagtgccagcgcgtcggtattgccagagcgctggccatggagccgcggctgatcgtggccgatgagtgcgtcgcggcgctggacgtctctattcagggacagatcgtcaacctgctgatggatctgcgggagaagatggggctggcgattctgtttatcgctcacgatctggcgattgtgcggcggctctgcgatcgggtggcggtaatgtaccttgggcggattgtggaagaggggccggcagaggcggtcttcacccgtccgctgcatccctataccgccgcgctggtctcggcgatcccggaaatcgacccggataaacccctaccgaaaaatttgctggggggcgagccacccagtcccgttgccgttccacaaggctgtgcatttcatccgcgctgcccttatgcgcaggtgcagtgccgcaccggcgcaccaccaccaacccggcagattgccgatcgcgcttatgcctgcgtgctcaacctcgcgggcgatgagaccgtttttcctttaacagggggatcttttgatgaagcacaggcaagttaa

SEQ ID NO: 258064 - DNA, 1515 bp, Klebsiella pneumoniae
atgaagcacaggcaagttaaattactggcggcgagcgtttttctggcgcttagcgtggtgagcgaaatggcccaggcggcgggggtattgaccattggccgccgggaggacagcaccacgtttgacccgataaaatcggcgcaaaatgcggataactgggtcttttccaacgtctttgacccgctggtgcgggtggataagagcgggacgaagctggagccgggcgtggctgagagctggacgatttctccggatggcaaggtctacacttttaaaattcgcgacacgaccttctctgacggcacaccgctaaccgccagcgatgcggcgtttagcttgatgcgtatccgcgatgatgaaggctcgctgtggcgcgactcctatagcattattgccaaagcggaagccccggacccgcgcacgctggtagtgacgctgaaatcgccgtcagcgccgttcttgtcgcagctggccctgccgaacgcctcggtgatttcgcagaaggcgatgaaagcggaaggcgaagaggcgtttgccgaaaaacccgtgggctccggcgcgtttagcgtgaaagagtggctgcgcggggaaaagatcgtgctggtgaagaacccgcacttctggcaggcgaaaaacgtcagcctcgatggcgtggagtggttaaccattccggacgataatacccgcatgctgaaggtgcaggccggcgagctcgacgccgcgctgaccgtgcctttctcgcgcattgcatcgttacaaaaggatgccaatctgaaggtggaactggacccctccacgcgcgaggaccatctgctgatcaaccattctcacggcgcgctgggcaaggtggaggtgcgccaggcgctggacttcgcgattgataaagacgcaatcgtgaagaccgtgacctttggctacggccaggtggccaactcctatattcccgccggggcgctttaccactaccaggataatcttcgtcggccatacgatccgcaaaaggccaaagcgatgctgatagcggcgggcgctgccgatctgaagctgaactacgtggtcaacgccggggatgaagtcgatgagcagattgccattttgctgcaacagcagctggcgaaagccggggtgacggtgaatttgcaaaaagtcgacccgagccagagctgggatatgctggtggccggagagtacgatatttcggtgatgtactggaccaacgatattcttgaccccgatcagaaaaccaccttcgtgctgggtcacgatgccaatatgaactatatgacccgctatcataacgagcaggtaaaagcgctggtggctgccgcgcgcgtcgaaatggacggtaaaaagcgcgagcagatgtatatcgacctgcaaaaaatggccaaggccgacgtgaactgggtcgatctgtattacagcccgtaccgcaacgtcagccgcaaaaatatcgacggtttttatcagaatccgctgggacgtttcttcctggaggataccgtaaaacgctaa

SEQ ID NO: 258065 - DNA, 618 bp, Klebsiella pneumoniae
atgaaaaaagtaaacatcgccatcaacaccagaaatacctttctcagagaatcattggtttccgtcgtcaatgagctcatcagccgcagcgggaatcttaaagtcgctttttcttataagcataatgattttttagataaagatatcatcatcgctgaagttctccccggcgagatctatctgtgcaataccagcataaagaaccgtaaaaaaaacagttcggtgattatcctgcacagctatgacaagttgccggaaaaagagctgatcgttaactgtctcaagggcgttatctttgtttctatcaaatcggtcaatatcgatgagatgttcgaaattattgcccaggagctaaaaaggagcgaaattctccccgacgcgcagagcagcaactccacgctcgtttgcacccattgcccgcataaaatgctctccaaatcgcaggctgccgtcgccaccggcatcatcgatggctttgatatcattaaaatttccgccctcaacaaagtcacccccaaaaccatcacctggcacaaaagcaaaatcatggaaaaataccgtcttaataacaatcatgacttttttcagttcattaacttgttaaaagagcgctggtaa

SEQ ID NO: 258066 - DNA, 1323 bp, Klebsiella pneumoniae
atggagctcagtcgcaggcagttctttcgcatctgcgcgggtggtatggcagggacgaccgtagcatcgcttggttttcttccctcgttttccgctcacgcagagacgcgtcaatataaactcttaaaagctaaagaaacccgtaataactgcacctactgttcagtcggctgcgggatcctcatgtacagcttcggagataacgccaaaaacgtgcgtgaacgcatttatcacgtcgaaggcgatcccgatcatcccgtgagccgcggatcgctgtgcccaaaaggcgcaggcgtactggactatattcacagcgataaccgtttacgctatccggagtaccgcgcgccgggctcggacaagtggacgcgtatgagctgggatgaggccatcgatcgtatcgcgcgattgatgaaagatgatcgcgacgccaactttatcgaaaagaatgcccagggcgtcaccgtcaaccgctggacctcaaccagcatgctgtgctcttcggcggcgagcaatgaaaccgggatccttgacggtaaatttacccgcgcgctggggatggtatcgattgactgccaggcgcgcctttgccatggcccgacggtatcggcgctggcgccaacctttggtcgtggggcgatgaccaacaactgggtggatattaaaaacgccaacgtggtgctgattatgggcggcaacgcggcggaagcgcatccggtagggttcaaatgggttatcgaagccaaaattaaaaataatgcgacggtgatcgtcgttgatccgcgctttaaccgcagcgcggcggtggctgacctgtacgcgcccattcgcgccggctccgacagcgctttcctgctcggcgcgatccgctatcttatcgaacacgatcggatacagcatgagtacgtgcgtcactacaccaacgccagcatgatcgtgcgggaagattatgatttcgacgaggggctgtttagcggttttgatccgcagaagcgtcagtacgataaaaccagctggaactatgaactcgacgcgaacggcttcgccaggcgcgatgatacgtggaaccatccgcgctgcgtctggaatctattgaagcagcacgttgagcgctatacgccagagctggtcaaccgcctgtgcggcacatcgttacacgattttcagcgcatttgcgaactgttagccagcaccagcgctgcgaatcgaaccgcgacaatcctgtatgccctcggctggacccaccacaccaccggagcgcagaccatccgcgcggctgcagctgctgctgggcattatcggcatggccggcggcggcgttaa

SEQ ID NO: 258067 - DNA, 1740 bp, Klebsiella pneumoniae
atggccggcggcggcgttaacgcgctgcgcgggcactccaatattcagggctataccgacctggggctgctttcgactaatctgccgggatatatgccgctaccgtcggaaaaacaggttgattatcagagctatatttcacaaatcacccccgcggcgctgggcgtgaacgaagtgaactactggcaaaatacgccgaagtttttcgtcagcatgatgaaaagcttctggggcgatgccgcaaccgcggaaaacagctggggctatgactggctgccgaaatgggatcgtttatacgatgtcatgacccaggccgagctaatggcccagggcaaaatcaacggctacgtggtacagggatttaacccgctggcggcgttcccggataaaaacaaatccgcccgcgcgctggcgaagctcaaatatctggtggtgatcgatccgctggtgaccgagtcgtcgaatttctggcagaaccacggcgaaatgaacgacgtgcgtcctgcagatatccagaccgaagtcttccgcctgccgtcctcctgcttcgccgaagagaacggttcgatcgccaactcgggccgctggctacagtggcactgggcggcggccgaaccgccgggcgaagcgctccacgatggcaaaattctcggacgcctgtttatgcgcctgcgcgatctgtatcggcaagagggcggcgcaaacccggcgccggtgctgaatatgtcctgggattatcacgatcccctcgacccgcagccggaagaggtcgccagggaggccaacggcaaggtgctgcgcgatatcgttgacgagcagggccgggtagttgtcaaaaaaggccagcagctgagcagcttcgcgcagctaaaagatgacggttcaaccagcagctactgctgggtttactgcggctgctggaccgagcagggcaatcagatggcgaaccgcgataatagcgacccgtatggtttaggctgtacgcccggctgggcatggtcctggccggcgaaccgccgcatcctctacaaccgcgcctccgcggacccggcgggtaaaccctgggatccgcagcgctcgctgctgaactgggacggcaaacgctggaccggtatggacgtcgccgactatagccaggcggcgccgaacaccaacgtcgggccgtttatcatgaatccggaaggcgtggcgcgcctgttctcgctggacaaactaaacgatggcccgttcccggaacactatgagcctgtcgaatcgccgattggcaccaacccgctgcacccgaaggtggtctccagcccggtagcgcgcatctatcacgatgacctggcgaatatgggcaaagcggatgagttcccctacgtggcgacaacctactcgatcaccgaactgttccgtcactggaccaagcatgcgcggctgaacgccatcgttcagcccgagcagtttgttgaaattggcgaggcgttggcgaaggagaagggcatcgtcgcgggggacacggtaaaagtgatgtcgaagcgcgggtttattaaagccaaagcggtagtgactaagcgaatacaggcgctgactattgatggccgtacggtgaataccatcggtattccgtgccactggggttttgagggggcgacgcggaaaggattcctggccaatacgctgacgccatcggtgggggacgcgaactcgcagacgcctgaatataaagctttcctcgtgaacgtggaaaaggcgtaa

SEQ ID NO: 258068 - DNA, 693 bp, Klebsiella pneumoniae
gtggcgcaaaagagcaaagatgcagtattggattatttcagggcgctggcagaggttttttctcgggcaacagggctggtggcaacggtgattgatgtgaaagacaatcgattgcctgattgctatggtagcgtcaatttcctggtcttaccgctgattcagggcgataagttattcggctatattatatgcgaccatcataaatcgaccgataatcatcatcgggcggcggcaataagattacttaattttatcattaataatatttctgcggctgcagaggaaaaagaagagggctcgaaaacatcgctggagaaaagggggttttattattcgcaaaaatctccgcatgaaataaaattaatatcggcgctacgctatattgatgagaatttatatggcgagttgtctctggagtctgttgcctcccacgtttgtctgagtgcgaattattttagccggttttttaaaaaacgccagggagtgaattttaaagtttgggttaatcagcgaaaaatgcagcgggccggggaactgctcgccgatccgaggtattcgatagatagcgtagcgcgtaagcttcagttcgcgcaaaccagctatttttgccgggtgtttcgcgcggctcaccgcaccagcccgcaactgttccgcgatcggcgtctctcggcggcttctccgcaggccgattag

SEQ ID NO: 258069 - DNA, 2331 bp, Klebsiella pneumoniae
atgacggagtattcgcaggcgggcgatatgatggtcgtctctgccgccggcagtaccaccaaccagttgatcagctggctgaagctcagccagaccgatcgcctctctgcgcatcaggtgcaacaatcgctccgtcgttatcagatggatctcatttctggactgctgtcgccagacgctgccgatacgctgatcgccacgtttattcaggatcttgagcgtcttgccgggctgctggatggcggcgtcactgacgcggtatatgccgaagtcgtcggtcacggcgaagtctggtcggcccgcctgatggcggcggtgctgaaccatctcggcgtagaggccgcctggctggatgcgcgtagcttcttacgcgccgagcgctccccgcagccgcaggtggatgaaggcctctcctatccgcttttgcagcagctgatggcgcagcacccgaacaaacgcctggtggtgaccggctttatctcgcgtaacaacgccggggaaaccgttctgctggggcgtaatggttctgattattccgccacccaaatcggcgcgctggccggggcgtctcgcgtcactatctggagcgacgtagccggggtttacagcgcggatccgcggaaagtgaaagacgcctgcctgctgccgctgctgcgcctggatgaagccagcgagctggcccgcctggcggcgccggtgctgcatgcccgtacgctgcagccggtctccggcagcgatatcgatttacaattacgctgtagctacaccccggatcagggctctacgcgcatcgaacgcgtgctggcttccggtaccggggcgcgcatcgtcaccagccatgacgatgtttgcctgattgagttccaggtgcccggcggtcaggatttcaaactggcgcataaagagctggacgccattttaaaacgcgcccagctgcggccgctggcggttggcgtacacgccgaccgtaagctgctgcagttctgctacacctctgaagtggccgacagcgcgctgaagctgctggacgaagcggggctgccgggcgagctgcgtctgcgtcagaagctggcgctggtggcgatggttggcgctggcgtgacccgtaatccgctgcactgccaccgtttctggcagcagctgaaaggccagccggtagagtttacctggcaatcagaagagggcatcagcctggttgcggtgctgcgcgccgggccgacggaaagccttattcaggggctgcatcagtcgttgttccgcgcggaaaaacgcattggcctggtgctgtttggcaaaggcaatatcggctcccgctggctggagttgttcgctcgcgagcagacgacgctctccgctcgtaccggttttgaatttattcttgccggggtcgtggatagccgccgcagcctgctcaattatgaaggcctcgacgccagtcgtgcgctggcgttctttaatgatgaagcgattgaacaggatgaagagtcgctgttcctgtggatgcgcgcgcatccgtacgatgatcttgtggtgctggacgtgaccgccagcgcgcagctggccgaccagtacctggatttcgccagccacggcttccacgttatcagcgcgaataagctggctggcgccagtagcagcagtaagtatcgccagatccacgacgcgttcgagaagaccgggcgccactggctgtacaacgccaccgtcggcgccggtttaccggtcaaccacacggtgcgcgatttgattgatagcggcgataccattctggcgctgagcggtattttctccggcaccctctcatggctgttcctgcagtttgacggtaccgtgccgtttactgacctggtcgatcaggcctggcaacaaggactgacggagccggacccgcgcgtcgatctctccgggaaagacgttatgcgtaagctggtgattctggcgcgtgaggcgggttacgacatcgaaccggatcaggtgcgcgtggagtccctggtgcctgcccactgcgaagagggctctgttgatcacttcttcgagaacggtgaagcgctgaacgaccagatgctgcagcgtctggaagcggcgcgcgagatgggcctggtgctgcgctacgtcgcgcgttttgacgccaatggtaaagcccgcgtcggcgtggaagcggtgcgcgaagagcacccgctggcggcgctgctgccgtgtgataacgtctttgccattgagagccgctggtatcgcgataatccgctggtgatccgcggtccgggcgccggtcgcgatgtgaccgccggggcgattcagtcggatatcaaccgcctggcgcagctgctgtag

SEQ ID NO: 258070 - DNA, 372 bp, Klebsiella pneumoniae
atgagcagcgaacgttatactaccggacaagaaatgctacagcgcgtggacggcaaaggcggcgatgccgtcgtcaacagcctgaaggatatcgcccccgatttcgcccgctatctgattgagttccccttcggcgatatttacgccaggccgggactcgatttacgcagtcgtgaaatagccaccatcgccgcgctcacggcgctcggcaacgccgcgccgcagctaaaagtgcatattgccgccgggttaaatgtcgggctgacgcaggaagagattacggaagttatcatgcagatggcggtctatgccggattcccggcggctctgaacggtctgtttgccgccaaagacgttttcgcggcgcactag

SEQ ID NO: 258071 - DNA, 906 bp, Klebsiella pneumoniae
atgacaaattcacgcttacataccctcgatattcgcctgctgcgctactttgccgtggtggcggaggaaaataacatcagccgggccgcagagcggctctttatctcgcagccgccgctgagccgccatattcgtcatctggaaacgcagctgggggtgacgctgtttttacgccataccaaaggcctgatccttaccgacgagggaagacgggtgctggacatcgttcggccgctgctggcgcttcaggagcacaccctggcggcgctgagccagctctcggcgcctgcgcagcagcttctgcgactggggctgacgacggcctttgaacagggcgttttcgccgcagcggaatccgctctgggggaacagaccggcgctttgcatatcactcgtcagtcatcaccggcgctggcccggctggtgcgaaagggcaagctggatgcggcgctggtggcgctgccgctgaataccgaggggcttcacctgcatcctttgtcttaccaggagccgctcatcgctgcgttacccgcatcctggccggaggccgccacggcggacctggcgttaagcgcgctcaatcatcggccgctgttctggtttagacgcgagcgtaatcccgatttttttgactatacgcgacgtatttttgatcgggcaggctattcgcccgcttacgtggaggagcccgccgagcatgatgttctgctggcgcgcattgcgcgcggagaaggcatgatcctcctgccggcatcattttccgctatccagcgtcagggggtggttttttgttctctgcgtgatgccagccagcagcttccgcttaggctgggcgtggtcacaatgcccgcaaatgaggggttacgggaaagggtgatagcagcccttgaaaaatcattaccttag

SEQ ID NO: 258072 - DNA, 888 bp, Klebsiella pneumoniae
atgagcttttttcacgccaatcagcgggaagccctgaatcagagcctggcggaagtacagggccagattaacgtctcttttgaattctttccgccgcgcaccagtgaaatggagcaaaccctctggaaatccatcgatcgcctgagcagcctgaagccgaagtttgtctccgtgacctacggcgccaactccggtgaacgtgatcgcacccatagcattatcaaaggcattaaagatcgtactggtctggaagccgcgccgcatctgacctgtatcgatgccagccgtgatgagctgcgtaccattgccaaagattactgggatagcgggattcgccatatcgttgcgctgcgtggcgacctgccgccggggagcggtaagccggatatgtatgcggtcgacctggtcacgctgctgaaagaggttggggactttgatatttccgtcgcggcttatccggaagtccatcctgaagctaaaagcgcgcaggctgacctgcttaatctgaagcgcaaggtcgacgccggcgccaatcgcgcgattacccagtttttctttgatgtggaaagctacctgcgtttccgcgaccgctgcgtctccgcaggtatcgacgtcgaaattattccgggcattctgccggtctctaattttaagcaggcgaaaaaattcgccgatatgaccaacgtgcgtatcccgacgtggatggcgaaaatgtttgaaggtctggacaatgacgccgaaacccgccagttggtaggggcgaatatcgccatggatatggtgaagattctaagccgcgaaggggtgaaggatttccacttctataccctgaaccgcgcggaaatgagctacgcgatttgccacacgctgggcgtgcgcccggcgtaa

SEQ ID NO: 258073 - DNA, 750 bp, Klebsiella pneumoniae
atgagcatttacgccattctgcaacaggacaaaaaagtcgtcgttaatgaactcgccgacaagttcggcgtcaccaaaatgaccatccgtcgcgacctctctttctttgaaaaacaaggcattgtaaaaacaacctacggcggagcctatttaaccagcggcgccagcgtcgagcccagctttcagctgaaatcgatacaaatggtcgatgataagcacctgattggccagaaagccgccgggcaggttgaggacggcgacacgatcattatcgactgtggcaccacgccgcttgcgctcgcccagtttattttcgataaaaaaatcatggtgataaccaactccgttccggtagttaatctactgaaaggaagaaaaaatataaaattgatcgtggcgcctggcgaatatgaagatgacagccaggggatgatctctttcagcaccgccgacttctttcgtcatatccacgccgacaaggttttcctcagtactcaaggcgtcaacgaactcggtgagttaacggtacccaaaatgaccgacgcccacgtcaagcaagcgctgatgcgcgccgggcggcaaaaaatcctgctggcggacagaagtaaatttggtcaaacgttccttgcgggccatggtcgtctggccgactttgacctcgttatcagccagaccggcttgccccctgataccctttctctgatgaagacgcaaagcgtaccgctgctgctggctgatagtcacctctga

SEQ ID NO: 258074 - DNA, 663 bp, Klebsiella pneumoniae
atggaactctatctggacaccgcaaacgtagcagaagttgaacgcctggcacgtatctatccgctggctggagtcaccaccaaccccagcattatcgctgccggtaaaacgccggtttgggatgttctgccgcgcctgcaaaaagccgtcggcccggaaggtattttgttcgcccagaccatgagccgcgacgcgcagggcatggtggaagaagccaaacgcctgagcaacgccgtccccggtattgtagtaaaaattccggtgactgctgaaggccttgccgctatcaagttgttgaaaaaagaaggcatccctacgcttggcacagcggtctacagcgcctctcagggtctgctggccgcgctcgctggggcaaaatacgttgcgccttacgtgaaccgcgtcgacgcccagggcggtgacggcatccgtatggtccaggaactgcaatccctgctggaactgcatgcgccggaaagcaaagtgctggccgccagctttaagacgcctcgtcaggctctggactgcctgttagccggttgcgaagctattacccttccgttagacgtagcgcaacaaatgctcggtacccctgcggtagagtcagccattgagaagtttgagcaggactggaataacgcctttggaactctgaacctgtaa

SEQ ID NO: 258075 - DNA, 2652 bp, Klebsiella pneumoniae
atgaacgaacaatattccgctttgcgtagtaatgtcagtatgctcggtaaggtgctgggcgacaccatcaaggatgcgctaggagaaaacattcttgatcgtgtcgaaactatccgtaagttgtccaaatcttctcgcgctggcaatgaagccaaccgccaggaactgctcaccacgttgcaaaacttgtccaacgacgagctgctgccggtggcgcgcgcctttagccagtttctgaacctggcgaataccgctgagcaataccacagcatttcgccaaaaggcgaagcggccagtaatcctgaagtgattgcccgcaccctgagaaagcttaaagagcaacccgacctcaacgaaaccattattaagcaagccgttgaatccctgtcgctggaactggtgctgaccgcgcacccgaccgaaatcacgcgtcgtacgctgatccataagatgggtgaaatcaacagctgcctgaagcagctcgataacaacgacattgcggactatgaacgtcatcaggtcatgcgccgtctgcgccagctgattgcccagtcgtggcacaccgatgaaatccgcaaacatcgcccgaccccggtggatgaagcgaaatggggcttcgcggttgttgaaaatagcctgtgggaaggcgtgccaaactacctgcgcgagctgaatgaacagctggaagacaacctgaactatcggctgccggtcgactttgttccggttcgctttacttcctggatgggcggcgaccgcgacggcaacccgaacgtgaccgccgacattacccgccacgtcctgctgctcagccgctggaaagcaaccgatctgttcctgaaagacgtccaggtgctgatttccgagctatcgatggtcgagtgcaccgatgagctgcgcgatctggccggcgcagaaggcgcgcaggaaccctatcgttacctgatgaaaaagctgcgcacgcagctgatggagacgcaggcctggctggaagcgcgcctgaaagggcagaaactgccgaaaccagcgggtcttatcacgcaaaacgagcagctgtgggaaccgctttacgcctgttaccagtcgctacaagcctgcggtatgggcattatcgccaatggcgagctgctcgacaccctgcgccgcgtaaaagcctttggcgtaccgctggtgcgtatcgatatccgtcaggaaagtacccgccacaccgaagcgctgggcgaaatgacccgctatctcggcatcggcgactatgaaagctggtcagaagccgataaacaggccttcctgatccgcgaactgaactccaaacgccctctgctgccgcgccagtgggagccaagcgaagaaactcgcgaagtgcttgagacgtgcaaagtgatcgccgaagcgccgcgcggctcgattgcggcctacgtgatttcgatggccaaaacgccgtctgacgtcctggctgtgcatctgctgctgaaagaggccggtatcggcttcgcgctgccggtcgctccgctgttcgaaaccctggacgacctgaataacgccgacgacgtcatgacccagttgctgaatatcgactggtatcgcggctttatccagggcaaacagatggtcatgattggctactccgactcggcgaaagatgcgggggttatggccgcttcctgggcgcagtaccaggcgcaggacgccttaattaagacctgtgaaaaagccggtattgagctgaccctgttccacggtcgcggcggttctatcggtcgcggcggcgcgccggcgcacgcggccctgctctctcagcctccgggaagcctgaaaggcggcctgcgcgtcaccgaacagggcgagatgatccgctttaaatacggcctgccggaagtcaccatcagcagcctgtcgctctataccagcgcgattctggaagccaacctgctgccgccgccggagcccaaagcgcaatggcgcgacatcatggccgagctgtcagacgtctcctgcgagatgtaccgcggctacgtgcgtgaaaataaagattttgttccttatttccgttccgcaacgccggagcaggagctgggtaaactgccgctgggctcgcgtccggccaaacgtcgcccgaccggcggcgtcgagtcgctacgcgccattccgtggatcttcgcgtggacgcagaaccgcctgatgctgccagcctggctgggcgccggcgccgcgttgcaaaaagtcgtcgaaggcggcaagcagagcgagctggaaagcatgtgccgcgactggccgttcttctcgacccgcctcggcatgctggagatggtctactcaaaagccgacctgtggctggcggaatattacgatcagcgtctggtgaaaccagaactgtggaagctcggcgaagagctgcgcaaactgctgtccgccgatatcaacgtggtgctggccatcgccaacgactcccacctgatggcggacctgccgtggatcgcggagtctattcagttgcgtaatatctataccgacccgctgaacgtgctccaggccgagctgctgcaccgttcgcgtctggcagaagagaaaggcgaaaaaccggatccgcgcgttgaacaagcgctgatggtcaccatcgccggcgttgcggcaggtatgcgtaataccggctag

SEQ ID NO: 258076 - DNA, 636 bp, Klebsiella pneumoniae
gtgatgggcgtaagagcgcaacaaaaagaaaaaacccggcgttcgctggtggaagcggcatttagtcagctaagcgctgaacgcagttttgccagcttaagcctgcgcgaagttgcgcgggaagcggggatcgccccgacgtccttctatcgccattttcgtgatgtcgatgagcttggtctgaccatggtggatgaaagcgggcttatgctgcgccagctgatgcgccaggcgcgccagcgtattgcgaaaggcggcagcgtcattcgcacctctgtttccacctttatggaatttattggcaacaatccgaacgccttccgcctgctgctgcgggaacgatccggtacgtctgcggcgtttcgcgccgccgtggcgcgtgaaattcagcattttatcgcggaacttgccgactatttagaaatcgaaaaccatatgccgcgcgcctttaccgaagcgcaggctgaagctatggtcaccatcgtatttagcgctggcgccgaggctctcgatgtgggcccggagcagcgtcgacagctggaagaacgcctggtgctgcagctcagaatgatctcgaaaggcgcgtattactggtatcgccgtgaacaagaaaaaatatcaaatcattccgaataa

SEQ ID NO: 258077 - DNA, 1374 bp, Klebsiella pneumoniae
atgaatctttggaaagtttgcccgccagacgagagaaatggtgacgaaatggtcaggaaacagcaacgtttagcgatatggatgaacggcattcaggtcgggttctgggaaaagagtaaaggcgatgattcgttacgctatctccctgaatgggttgctgacgaacaaggtcggccattgtctctgtccctgcctttcacacccggcaaccaaattttgcacggtaacgtagtacgtgattattttgataatttactgccggatagtgaagggatccgcaggcgtctggcaatgcgctatcaggcagacagtctcgaacctttcgacttgttgaaagagttgggaaaagactgcgtgggggcaatacagctactgagtgatgaagaggaacccactgatttatattcagtaaaatatcgtcctctttctgaatcagaaatcgcgtcaacattacgaaatacgacggaagcgttactacccggcaggcatgtcgataatgatgacttacgattatcgattgccggtgcgcaggaaaaaacagctttactgtggcatgacggcagttggtgtctgcctctgggtcatacaccgacgactcatattttcaagttaccgctcgggctggtcgggaatatgaaagcagatatgagtacgtcagtagaaaatgaatggctctgttcgctgcttcttgagcaatacggggtccctgtcgccaaaacccggattgctcaatttgaagatcagaaggctctggtggtggaacgttttgatcgaagatggtcgggagaccagcagtggatcattcgcttaccccaggaggatatgtgccaggctctcgcggtatcaccattacggaaataccaggccgatggcggaccagggatctctgacattatgggtgttctgagtcattcagaccgggctgaacatgacagaatacagttcttcagggctcagattcttttctggcttatggccgctacagatggccacgccaaaaatttcagtatcgcgatagagcctcgcgggcagtatcatcttactccgctctatgatgttttatcggcatggccaattattggcaacggaaatgcacagatttcctggcagaaatgcaaactggcgatggcaatccgtggcagcagtaactattaccagatttacagaatattaagacgccactggatcaaacatggtgagatgactggtcttagcaggcagcagatcgagatgatgattgatgacattgtaaccgtgacgccagaggttattgaacgcgtctatgcacaacttccagctcacttcccacaagaacttgctgagagtgtttttgatggaatgaggcagcagtgcaggcgtctgagcgagaaatag

SEQ ID NO: 258078 - DNA, 300 bp, Klebsiella pneumoniae
atgatgaaaaatgtttttccaataaaaacactcaaccagttgcgtccattgctgcttggatttcgcaaagcgaatggactgactcaaaaagacgtttctgagcggttaggcgtaacccagcagacttacgctcgcctggaggccaatccagccagtgcgagtattgaacgcctgttcaaagtgttttccgtgctgggagtggaaatcagcctttcctcggtgaaaggttcatcagaaatgatgctgtcgggcgaaaatgaatctttggaaagtttgcccgccagacgagagaaatggtga

SEQ ID NO: 258079 - DNA, 612 bp, Klebsiella pneumoniae
atgaatcgacttagtcttaaagctgctatccgggttaagcgatacagctcctggcgcggggatcatggcgaaagcaaggacaatatccttcaacgaaacttcaaagctgaccagcccaatgaaaaatgggttacggatgtcactgaatttgctgttaatggcagaaagctttatttgtcaccaatcatcgatctcttcaataacgaagttatttcctacagcgtttcagaacgtcctgctatggacatggttgatgagatgctgattaaagcatttgccaggctagagcctggtaacaggccagtcctacactcggatcaggggtggcaataccggcaccgatggtatcagtatcagttgaagcaatttggcgtcttgcagagtatgtcgcgcagaggtaactgcctggataatgcctgtgcagaatgcttttttagcactctaaaatcagaatgttttcatcctaatacattcagcgacatagatgatttgaaagtcgcaatagaagattacattcgctattacaataaccgacgaattagccttcgattgaaagggctgagcccggtagagtaccgattgaaggtctgtggtcaccccctcagaatttaa

SEQ ID NO: 258080 - DNA, 510 bp, Klebsiella pneumoniae
atgtccagacgtaagtacacctttgaacaacgcctcgaagtggttatgcactattttgctagcgacgatggctatcgtatgacttcagtccgctttaacatccccatcacccaggtgaaaatgtggacagcagcctatcatgcatatggtgaagaagcattgaggccccggtacaagggcgtatcaatcgacccagatatcaggattgaagccgtgcatgctgtgctttcaggtcagctctcacaaaatcaggcaactaccaaatttaaaatcgccggtcccgcaacaattgccagatggttgaaggtgttccatgagcatggagaggaagggcttcgctcacttaaagttggaaaaaataggtctattaaaatggctgataaccctgaagctgttgaggccgcactggaacgttcgaaggagcgacagattcaagagttggaaagaaaagttaagttccttgagctgcggatactttatctccaaaagctgaaagccttagttcgataa

SEQ ID NO: 258081 - DNA, 690 bp, Klebsiella pneumoniae
atgtctttatttgatactttggatgtgaaggttaaagaattgggcggactcattgtctcgtgccagccggtgccgggcagcccgttagataagcctgaaatcgtcgcggcgatggcgctggcggcggtcaagacgggtgcggtcgcggtacgtattgaaggcattaataacctgaaggccacgcgcgaacttatttcagtacccattatcggcatcatcaagcgcgacctgccggactcgccggtgcgcatcacgccgttccttgaggatgtggacgcgttggcgcaggcaggtgcggatattatcgcctttgacggcacggatcgcccgcgtccggccagcgtgaaggcgactatcgagcgcattcatcagcagggctgcgtcgcgatggcagactgctcgaaccttgaagacggtactcgctgccacgctctgggcgcagaaattatcggcactacgctgtccgggtataccacggaagcagtacccaatgagccggatttcccactagtgcaggcgctgagcgccaaaggataccgggtcattgccgaagggcggttcaactctccggccctggcggcgcaggccataaagcaaggcgcatgggcggtgaccgtcggttccgcgattacgcgtattgaacacatttgccagtggtaccgcgatgcgctggctgaggttgcgctatga

SEQ ID NO: 258082 - DNA, 615 bp, Klebsiella pneumoniae
ttgcaacaggcattaactcatcgcagtgccagcagcaaacacaatgagcgcctggagtttttaggtgactcaatattgagctttgtgatcgcaaacgcgctctatcatcgtttccctcgggtagacgaaggcgatatgagccgcatgcgcgcgacgctggtgcgaggtaacacgttggcagaaattgcccgcgagttcgaattaggtgaatgtctgcgtcttgggccgggtgaattgaaaagcggaggctttcgccgtgaatcgatactggcggacaccgttgaagctttaatcggcgggattttcctcgacagcgatattcagaacgttgagcgccttattctctcctggtaccagagtcgtctggatgaaatcagccctggtgacaagcaaaaggatccgaagacccgcttgcaggaatatctgcaggggcgtcatctgccgctgccgtcgtacctcgttgtacaggtacgcggagaagcgcacgatcaggaatttactatccactgccaggttagcggcctgagtgaaccggtggttggcacgggttctagccgtcgtaaggcggagcaggctgccgccgaacaggcgctgaaaaagctggagctggaatga

SEQ ID NO: 258083 - DNA, 1197 bp, Klebsiella pneumoniae
atgcagcgtaccggtttaaataacgcccgggtcagacagaccaataaatccatttttctggctcatctctggcgggagaagcagctgagtaaatcccagctttctcagctcaccgggctctctattccggcggtgagcaatattcttgaagagctgctcagcgagggactgatcgaccattccacggaaaaaatgagcaaacgcggaatgaacagcggaagctaccagatccccgcgcgcggagcctggacgctatgcatgaatatcacgccaaccagtattgagtatcagcttgccgacgcccgtctactggcagttgacggctgccagcatgtgcccatcgacgcgcctacgccgcaggccctgctggagagcattattgcatgctggcggcgtatccaccgtctctacccgcagcacagtattcatctggcgcttggcgtccatggtcaggtagatccgataaccggcgtttcacaaactatgccccaggcgcgctggaaaacgccgattgaaataaagtatctgctggaagaacagctcggcgtgcaggtgcgggtagataatgactgcgtgatgctggcgctggccgagaaatggcagcatcagggcccacaaccggatttttgcgtgatcaacgtcgattacggtattggctcatcgtttgtgattaacgatcagatttatcgaggaagcctctacggcagcgggcagattggacacacgattgtgaatcctgacggcaaggcctgcgactgcggcagatacggctgtcttgaaaccgtagcctccctcagcgcgttgaaaaaacaggcgcgaatgtggctcaaaacccagcctgaggcgcagcgctccccggagcagttaaccacggcatcgctcattgaggcctgggaaaagggggacgtgcatattcgcgcatgggttgacagcgcggccaacgccattggcttaagcctttataatttcttgaatattttgaatattaatcagatctggctatacggtcgcagctgtgcctttggcgaacagtggctggaaagtatcgttaaacaaaccggctttaatccctttgaccacggcgatacgccgcgagcgcacgccactcaaatcggctttggcacactgacccgcgcccagcagctgatggggatcggttatctgtatgttgaggagcaattgcaaacgctgcgttaa

SEQ ID NO: 258084 - DNA, 1419 bp, Klebsiella pneumoniae
atgaacgtgctggctcgccgttggcaggcgacatcgctgacgttgcgaagcgccgttctgtttgccctggttgcagcgctggtggtcagcgccgctggcggatacttatatcacgccatgcgtcaggagatgattcaccgtagcgatctgcaggtgaccgggcgcatagaatattaccgaaacgtactcagtaaacgctttccgctggagcggctggtggcgaacaccgggatgttcgaaaacatgttgggcaacgagcaggacgttttaatctttcgtattccgggacaggcgccgttaattaatgtgaatcctgccagggttcaattaccgtcggtgacgccgacgccggcggatcgtccgcagcgcctgaatgaggtacagagcggaatgaccgggcagggggttccgctgcgtgtggcgtcggggctggtgacgctggaagatggcagggtactgcaaatttctgtcgcgcatgtgatggtaaatgaacagaaaatgctggcgcgctacctgtggcgcgtcatcgcggcggtggcggtggcctttctggcgattgcgctgctgggctactgggtgatgcgtcgcgagctgcggccattaaggcgtatggccgcagaggcggcgatcatcacgcccagtacgctggcgactcgcctgagcgaacaggacgcgccgcaggaactgcagcagctgattgtctccttcaacgccatgctcgacaggctcaacgaaggctatcagcgcctgacgcggttttccgccgatctggcccacgagatccgcacaccggtaggggcgctaatgggccagtgtcaagtggcgctgtatcagcctcgcagcgtggaggagtatgaaacgttgctctccagcaacatggaggagttggaacgcatttcacgcatggtggaaaatattctgtttctggcgcgcgccagccatgcgcagtcggtgctgaactgccgggaactggatattgctcaggagctacagcgtgtcgcggattatttcgaggggctggcggaggagcgcgatattctgctgatttgcgaaggcgaagggcagctgtgggccgatgcgatgctgttccagagggcgttaagcaatctggtggccaacgcggttcgctatgccgatgaagcgagccaaatcatcttacgagccggcatggaagaaaaccgacagatcatccaggtgattaatcagggcccgccgattgcgcaggtacatctggaaaagctgtttgagcgtttctatcgcgcagacgccgcgcgcagtagccatgccagcgggctgggattgtcgatcgtacgcgcaattatgactctgcacggcggtgaggctcgcgctcagtgcctgtcgcagcagccgggcgcgcaaatcgttttcagcctgattttcccgaaacgctcagcgtag

SEQ ID NO: 258085 - DNA, 669 bp, Klebsiella pneumoniae; identical to SEQ ID NO: 188627

SEQ ID NO: 258086 - DNA, 627 bp, Klebsiella pneumoniae
atgcatacacgccatcgtattgccggtttactgttgtctaccctgatgctctgcagcggcatagccactgcggcgcagacgccggctaaagctatcacgccgctgcgcggcaccatcgatcaggtctcggataccgctctgcaaatcagcaaccgtcaaggggaaaaggtcgacgtaaagctcaacgacaaaacgcaggtttttagcgtcgccaaaggttcgatcgacgatatcaagccggacagctttatcggcaccgcagcggtcccccaggccgacggtagcctgaaggcgctggaagtacacgtgtttgccgccagcctccgcggcacgggcgaagggcattctccgtgggagtccgcggacggtaaaatcaacaccatgaccaacggcaccatcggcaagctggtaaacgccaacggccgcacgctaaccgttaaatacggcgatcggcaaaaaaacgtcatcgtccctgacgatacgccggtggtgaccatcaatcccggcgatcgcggcctgctgaagcccggtacgcatatcgtgctgttctccgccactaacgataaaggcgaacgcgtcgccacccgcatttccgccggaaaagacggcaccgtaccgccgatgtaa

SEQ ID NO: 258087 - DNA, 609 bp, Klebsiella pneumoniae
atgaaaaccaacgcgtcgcggccagtacatcgctggccggtcaggctcacccactgggtgaatctggtcgccatgatcggtatgttcatgagcggctgggaaatctacaacgcttcgccgctgttcgacttccgctttccgccctccctcaccctgggcggctggctgggcggcgcgattggctggcacctggcggtcatgtggctgctggtcgttaacgctgtttgctacctgctgtggagtctgttcagcggccatctacgccgcgacctgctgccgctacgtctggccgcgctccggcaggatatctggttgaccttaacgctgcggctgaaccaccgcctcggccattacaatgcgattcaaaagcttatgtacctcggcgttatggcgctcggcctgctgctggtgctctccgggctggctatctggaaaccggtacagctctactggctggtggcgctgtttggcggttttcctgtcgcgcgctatgtccacttctgcgccatggcgggcatcggactgttcgtcgttatccatgtgctgatggtgttaatcgtaccttccaccctgtgggccatgctgtcaggaggcaaacatgaagggtaa

SEQ ID NO: 258088 - DNA, 768 bp, Klebsiella pneumoniae
atgaagggtaaagcgccaacccgccgggcgcccgcgctcgagccggatcagaaaaaacagctggtaaatgtgcagcgccgattactcctgcgatccgggctgacgctgggaggcgtggcgatgctgaccggatgcaacatgcaggatggcgatcaagtcgacaaagtgctgtgggctatgtcgcgctggaacgatcgggtccaatcctggctgttcagcggccagcgcctggcccagacttaccgtccggatcaaattacccacccctttccgtttaacgctttttatccgcaatataacgcgccggaagtcgatctgttcgactatcgtctggaagtctccggtaaggtggagaaaaaagcgccgtggacgctggaacagctacagcgtctgccgcaacagagccagatcacccggctgatctgcattgaaggctggagcgcaattggtcaatggggcggcgtaccgctaaagctattcctgcaacatgtcggcgccgacctcaacgcgcgctatgtcggctttaagtgcgcagatcgctattattccagtattgatatggccaccgcgctgcacccgcaaaccattttggcgctggattttgccggtaagtcgctgccggcggagtatggttttccgctacgactgcgggtgccgaccaagctggggttcaaaaacgccaagcatatcgccgccattttcgtcagcgataccaaccccggcggctactgggaggatcagggctataactggtttagcggtatttag

SEQ ID NO: 258089 - DNA, 987 bp, Klebsiella pneumoniae
atgtcggattttccaccaattgccagtttacgtagttttgaagccgtggcccggcttggcagcgtgacgctggcggcgaaagaacttcacgttacgcattcagccatcagccagcagattaaagtgctggaggagatggtcggcttaaagctgtttatccgtcacggtcgcggcgtgcagattaatgaagacgggcggctctatgccttacaggtccgcgaggcgttgcatcatatcgctgatgccacccggctggtgcaggtcaaaccgagaaggcaggagctgacgctggcgatggtaccctcctttggtagtcactggttagtgccgcgactggagcggtttcgggcgacatatccccatatctcgctgcgcatacaggcgagtctggcgatcgccgacatgcagcaggaagggattgatatggcgatccgaatgggcaaaggcgactgggaaggaatggaaagccattatcttttcgccgatgagcttatcgtcgtggccgcgccatcctataacgacggcgcgcttccccgaacaccatcagagatagcgaagagtaaaattatcttctcgatggagtcgtggaaaacatggtgcgttaatgcgggacttgaaagagagattgtgcccggcggtttgtgcatcaacgactcgaacctggttctggaggccgtccggcttggtaaaggtatcgcgctggaacgccgctcgttagtccaggaagcgctctgcagaggcgaactggtccagcttacgcctttcaccgccccatatccgtggccttactggctggtgtcgccacaggccgctgaacagaaaaccgaagccgttctgtttaaggcctggcttgatgaggaggttgctgcatggggtcaacaaactgacgcgctggaaaagaaacatccgcgagacggaaaccgtcgctcccgcccggaggcgggataccctgagaacattcataacatgggtgatgtcgatgaataa

SEQ ID NO: 258090 - DNA, 609 bp, Klebsiella pneumoniae; identical to SEQ ID NO: 188623

SEQ ID NO: 258091 - DNA, 906 bp, Klebsiella pneumoniae
atgaaaaaaatagtcaccctgttgttaacgctgctgctggcgggctggtcgctcaacgcctggtcgttcgcctgtaaaaccgccgccggggtgacaatccccatcggcggcggctcggcgaacgtttacgtgaacctcgcgccggcggtcagcgtcgggcagaacctggtggtggatctctcgacgcaaattttttgccataacgatttcccggaaaccatgatcgactacgtgacgctgcagcgcggttcagcctacggcggcttactgtcgagtttttccggcaccgtcaggtataacggcgtcagctatccgttcccgaccaccagcgaaacggcgcgcatgacctacaattccattgttgatagcccctggcccaccgtcctctatctgacgcccatcagcagcgcgggcggcgtcgcgatttccgccggttcattaatcgcggtcctgatcctgcgccagaccaacaacaaggataatgacgacttccagttcgtatggaacatttacgccaacaacagcgtcgtggtgccaaccggcggctgcgacgtttccgctcgcgatgtgacggtgacgctgccggaatatcccgcgtcagccgccattccgctgacggtttactgcgcgcaaaaccagaatctgggctactacctctccggtaccacggagaacgcggccaattcgatatttaccaataccgcctcggcctcccccgcccggggggtgggcgttcagctaacccgtaacggcagcgtcgttcccgccaacaccacggtgtcgttaggcaacgtcggaacctcggcggtcagcctcggattaaccgccaactacgcgcgcaccagcggccaggtgaccgcgggtaacgtgcagtcaattatcggagtgacctttgtttacgaataa

SEQ ID NO: 258092 - DNA, 1476 bp, Klebsiella pneumoniae
ttgtttacgaataaccccccgccccctgccggcaggcggcaggtcgactgcatcctgtcgccctgttcgctggccgccgaggggctggtgcggataatagaggaagggggaacccggcccgtcgtgctgccgtcagagtcgcctgccctaccggctggcgttcgccgcgtggtggtctttctccctgaagctcccgcccggcttctcgccaccctgaagcgggctgccgcgctgctggctcggtccgccacgccgcttcccatgctgtttctcagccgcagcccggcgagctggctgtggtccaccctgctgcatcaggtcgccgaccgtcgcctgctttcagccgtgcgagccgccgcatccgatctgccggtccccagcctggcggcgctgctgcgcgacgccatactcgacggctatccttcccttgaacagctggcagaggaagagatgcgagctttcggcaagcgccccgccgggctcaccaggccggagctagacgccatcctcggtttactctgcggctacagcgccagcgctcaggcgaaacgccgcggcatcagccacaaaacgctctacaatcaaagaaccgcaggattaaaaaaaatggtggaacaccatcctgaaatggcccccggttttcccggcagccagatacgagaacagaaaagcgagcccatcgccgccctttccgctttcgagcgcgaactcgtccatgcgatccacacccgacatatcttcccggttttccaggccattgccgatgaacgccggcaattaaaggggatggagatcctctcccgctggaaccgaaacggcagcgtgctgcttgccgatgagtttttaccgcaaataggctcggaatatgcctggctggtgctcaccgcttttgtgcttcaggaggcggtacagaatatcaaccggcattctggcgaatgctatttcgccgtgaatattcccgccgccgtcgccagtaatgataacctgcttcgcatgatggaaaccgcgcgccagcagctgcgtcagccacagcggtcgcagaggctggtgctcgaattcgctgaaaacagcgacctcaaccgccacggcaaaacagccgacaatatcgcccgcctgcaaaagcgcggctttcgtatcatgctcgatggctgcttctcgcaaagcagcgtgatgtttccggtacgtacggtgagattcaacgcctacaagctggatatgagcatcgtcaatgatatgcagcgcgatccgcacgcgctcgccctgattaaaagcctcatccactactgccagttgaccgacagccgctgtctggcggaaggcgtagacagccgggataaatttaacaaactcaaagcgctgggcgtcgactcttttcagggggacgccatcgctgcgccggtaggcagggaaaacgtggcggagatgatggcggagctctcaggcgaagcggagccgcagtccggcgtcgcagtgtag

SEQ ID NO: 258093 - DNA, 1893 bp, Klebsiella pneumoniae
atgaatagtattaagatctatacctgtcatcataagccgagcgcattccttaatgcatcgattataaaaccattgcatgtaggtaaagctaactcctataatgatatcggctgtattggcgatgatacaggagataatatttcgtttaaaaaccccttttactgtgagttaaccgcacattattgggtttggaaaaatgaatctctttctgattatgtcggctttatgcattatcgccgacatctgaatttttcttcagaacagagctttcccgaagataattggggcgtagttaattcacccgttattgatgcagattatgaaaagcagtttggtttaaccgacacggcaatccaggattgtatttcagggtttgacctgctgttaccgaagaagtggtcagtgacctctgctggaagtaaaaataacctcgatcattatgagaaaggggagtttttacatattaaggactatctggctgccctggagattgtcgaagagctttatccggattataaaacggctattcagcagtttaataatgcaactgatggctattacacgaatatgtttgtgatgcacaaagatatgttcgtagactattctgagtggcttttcgcgattttgactcatcttgaaagtcgcatctcgatgaataattataacgctcaggaaaagcgtgttatcggccatatcgcagagcgcctgtttaatatttacattataaaacagcagcaagatcgtgccctgaaagttaaggaactacagcgcactttcgtgacgcatgagaccttcaacggcaagctgatgccggtctttcctcacgctgcgccaatcgtcatcagttttgatgataactacgccatcagcggcggggctttaatcaactctatcgttcgccattctgataaaaacacccattacgatattgttgtgctggaaaacaaggttagcaatcttaacaagcagcgcttaaccaggctggtttcggcccatacaaacttttcacttcgattttttgatgtgaatgccttcactgaattggatggcgtacatacccgtgcgcactttagtgcatcaacctatgctcgcttgtttattccgcagcttttccgtgaatatgagaaggtcatttttatcgattccgatactgtggtgaaggccgatctggcgactttgcttaatgtcgaactcggcacaaaccttgttgccgccgttaaagatatcgtcatggaaggcttcgtcaagtttggcgcgatgtcggagtcagctgatggcgtgatgcccgccggcgagtatctgcaaaaaacgcttaaaatgaccaatcctgatgagtatttccaggcggggattatcattttcaacgttgcgcaaatggtgcaggaagataccttctccgagctgattaaaaccctgaaagagaaaaagtactggttccttgaccaggacatcatgaacaaagttttctacggccgggttgaatttttaccgctggagtggaatgtctatcatggtaatggcaataccgatgactttttccccaatctccagttcgcaacatatatgcgctttttagaagccagaatgaacccgaatatgattcactatgccggggagaataaaccgtggaatacggacaaggttgacttttatgacgatttcctggaaaacgtcatcaacacgccatgggaaaaagaggcctatttccgtcagctatctttgattaattcatcaaatcctgcgcataatgcagggcaaacgcctgttctgcttcagaccaggatcaaaaaagcgttgatgcctttccttaataaatatgctcctgtcggttcaccgaggcgaaatacgataacaaaatactattataaagttagacgctcaattcttggttaa

SEQ ID NO: 258094 - DNA, 1155 bp, Klebsiella pneumoniae
atgaacagtaaaaatattttaattgtcggcgctggtttttctggtgcggttatcgcccgccagcttgctgaacaaggccatcgtatcagaattatcgaccagcgggaccacattggcggtaactcctacgacgcgcgcgatccgcaaacggacgttatggtccacgtctatggtccgcatatctttcataccgataatgaaacagtgtggaactatgtgactcagcacgctgagatgatgccgtatgtgaaccgcgtcaaagcaaccgttaatgggcaagtgttctctctgccgatcaacctgcataccattaaccagttttttgccaaaacctgttcgccagatgaagcccgggcgcttattgcagaaaaaggggacagttcgatccaggaaccgaagacgtttgaagaacaggccctgcgttttattggtaaagagctgtatgaggcgttcttcaaaggctacaccatcaagcagtgggggatggagccatcacagcttcctgcgtcgattcttaagcgcctgccggttcgttttaactacgatgataattactttaaccacagatttcagggcatgccgaaactgggttatacgaaaatgattgagtcaattgccaatcatgaaaatatcactatcgaacttcagcagtcgttcaacgctgaagagagagaaaagtacgatcatgtgttctatagcgggccgctggatgccttctattcctatcaatatggccgcctgggctatcgtactttggattttgaaaaattcacccggcagggcgattatcagggctgcgcggtgatgaattactgctcactggatgttccttacacccgtatcactgagcataagtacttttcgccctgggaaacccatgaagggtcggtatgctataaggaatacagccgcgagtgcggagaaaatgatattccttattatccgattcggcagatgggggagatggctttactcgataagtatttgtccctcgcggaaagtgaaaagaacattacctttgttggccgccttggaacctatcgatatctggatatggatgtcactatcgcagaagcattaaatacagccgagaagtacttatcttcccttgataatcatgaagctatgccagtgttcacggtttctgtgcgatga

SEQ ID NO: 258095 - DNA, 894 bp, Klebsiella pneumoniae
atgaattgctccgcattaatagtcacttataatcgtttagagaagttaaaagtaactattgccaacactgtgaaattaaattttacagcgataatggttgtcaataacgggtccacggatgggacccaggagtggttagccacccttagcgacccccgcgtgattgtcctcaatctaccctctaataccggtggggcgggtggttttaaggccgggagtcaatatttatgcgacaacgtcgatagcgactgggttttcttttacgatgatgacgcctggcccgagagcgatgcgctggaaaaatttgcccatctggataaggctaactgtcgggtgttcaccgctttggtaaaagatctccgggggcaaccttgttcgatgaacatcccttttgctaaagtaccgtcatcgtttatcgacacattacgctacatcaaaaaaccggccgagtttctaccgttgatttcccgttcgaccgcggtacaaacggtatcctttgtcgggatgattattcagcgagatttgctgcgaaagaatatacacaatattcacgatgagctgtttttatattttgacgatctctactttggctatcagttgacgctcgatggcgaagagattcgttattcgcctgaggttgtcttctcgcacgatgtaagtatccaggggaagtgcgtctttcccgaatggaaggtttattacctttgtcgaaatcttattctggcgaagagaatttttccgcgagttgccatttttagccgtctctcaatccttttgcggttgattaaatatgtgtcaatattgccatggcaacgcaataaattgttatattttaaatacttgcgccgtggagttatccatggtgtaaaaggaatcagcggtaagaatcattaa

SEQ ID NO: 258096 - DNA, 1320 bp, Klebsiella pneumoniae
atgtctgatgaatcaagtaacgttattgtttccgttatcatccccgttcataatgccgtggagtatatttccgaaacgcttaatacggtattaacccagtctttaaaagacattgaaattatcattgttaacgataattccaccgataatactctgggtattgtcgctaaaatagccgatgaggattcgcgagtccgggtgataaccaacccgagcaacgtcggcggtggcgaatcgcgaaatatcggcttacgtatagcgaccggcgaatacattattttcctcgacgatgatgattacgccgataaagagatgttaaagagaatgtccgaccgggctacggccctgcaaacggatgttgttatctgtcggtgccagtcaatcgatctgcaaaccaatactcattctcccatgcctttgtccgcgcgggaggatttactgcctgaaaaagaggtcttctcttcacgggatattgctgacgattttttcagagcctttatatggtggccatgggataagctcttcagacgcgaagctattctggcaatgggcctggagtttcaaccgctgagaaccacaaacgacctgtactttgtgagtggtttcatgctgttagcaaaccgcatctcgctggttgatgaaatcttaatctctcatacgatcaaccgtgcgaagtcgctttcttccaccagggcacactcgtggcactgcgcgctggaggcattaacttcgctacgttcgtttatgaaagatcgtgatttactgccgtccagaagtcgtgattttaataattacgccgttgtttttctggagtggaacttaaatacgatctcgggcccttcctttaacctgctcttcaacgatgtgaagtcgttcatcctatctttagaaatcgatcgtgatgacttttatgatgactttattagagctgcgcatggccggatcgttaatcagtcagcggaagagtatattttttctctgaaagacagagtgttgcgcgagcttgaacatgcacatatgttgaattcaacgctgcaggaagaaatcacttcgcttaaacagtcaactttatctcagcgaagtgaaattgatgtcctgaaggcgcaagtgagcgataaaaccacgcttatccacgaatttgaacagctaaaaacgcgtttagagaacgagcatcacacgcagcagcagaaattactcagcgtccacaatgagctccaggagctgactcagcgctatagcgatttggtttcatctttgtcatggaaaatgacgaaaccattaagggtcgtcaaagcgatagcggcgcgaaaaaagccatga

SEQ ID NO: 258097 - DNA, 600 bp, Klebsiella pneumoniae
atgttaagtgaacagctggattggcaaaaaaccgacggtctgatgccggtcatcgtgcagcacgccgtctctggtgaagtgctgatgctgggctatatgaatcaggatgcgctggcgaaaaccaaagaaaccggcaaagtgaccttttattcgcggaccaaacagcgtctgtggaccaagggggaaacgtcgggcaatttcctcaacgtggtgagcattaccccggattgcgataacgataccctgctggcgctggtcaatccgattggcccaacctgccataaaggcacctcaagctgctttggcgaaaccggccatcagtggctgttcttatatcagctggagcagctgctggcggaacgcaagcacgccgacccggagagttcgtataccgcgaagctgtacgccagcggaaccaagcggatagcgcagaaggtgggagaagaaggcgtggagaccgcgctggccgcaacggtgcatgaccagttcgagctgaagaatgaagcgtcggatttgatgtatcacctgctggtgctgctgcaggatcagggactgaatttgacggatgtggtggaaaacctgcggagcaggcataagtaa

SEQ ID NO: 258098 - DNA, 777 bp, Klebsiella pneumoniae
atgctggcaaaacggataatcccctgtcttgacgttcgcgacggccaggtagtgaaaggcgtgcagttccgtaatcacgaaatcattggcgatatcgtcccgctggctaaacgctatgccgacgaaggcgcggatgagctggtgttctacgatatcaccgcctccagcgacggccgcgtggtggataaaagctgggtgtcgcgggtcgcggaagtgatcgacattccgttctgcgtcgccggcggcattaagtcgctggacgatgcggcgcaaatcctctccttcggcgcggataaaatctccatcaactcccctgccctggcggatccgacgctgattacccgcctggccgatcggttcggcgtgcagtgtattgtggtgggcattgatacctggtttgacgccgcgagtggcaagtatcacgtcaaccagtataccggcgatgagagccggacgcgggtgacgcagtgggaaaccctggactgggtgcaggaagtgcaaaagcgcggggccggcgagatcgtcctcaatatgatgaaccaggacggcgtgcgtaacggctacgatctggagcagttaagcaaggtgcgcgccgtgtgccgcgtgccgctgattgcctccggcggcgcgggcaccatggagcacttcctggaagccttccgcgacgctaacgtcgacggcgcgctggccgcctcagtgttccacaagcaaattatcaacattggcgaactgaaaacgtacctggcagcacagggcgtggagattagggtatgttaa

SEQ ID NO: 258099 - DNA, 738 bp, Klebsiella pneumoniae
atgatcattcctgctttagatttaattgacggcacggtcgtccgtctccatcagggcgattatggccagcagcgcgactacggcaacgatccgctgccgcgcctgcaatcctatgccgcccaaggggccgaagtgctgcatctcgtcgatctgaccggggcgaaagatccggcgaagcgccagatcccgctgctgaaaacgctggttgccggcgtaaatgtgccggtgcaggttggcggcggcgtgcggacggaacaagacgtggccgccctgcttgaagcgggcgtggcgcgcgtggtggtgggttcgacggcggtgaagtcgccggaagtggtgaaaggctggtttaaacgttttggcccgcagcatctggtgctggcgcttgatgtgcggatcgacgcggaaggccgcaagcaggtggcggtcagcggctggcaggagaactccggcgtgaccctggaagaactggtggagagctatcagtccgtcggcctgcagcacgtgctgtgcaccgatatttcccgcgacgggacgctggctgggtcgaacgtctcgctgtatgaagaagtctgcgcccgctatccgcaggtggcgtttcagtcttccggcggtattggcgatctcaatgatatcgccgcgctgcgcgaaaccggagtgcgcggggtgattgtcggccgggcgctgctggaaggtaaatttaacgtaacggaggccattcaatgctggcaaaacggataa

SEQ ID NO: 258100 - DNA, 591 bp, Klebsiella pneumoniae
atgaacgtggtgatcctcgataccggctgcgccaacctcaattcggtgaaatccgcggtgagccgccacggctacgagccgcaggtcagccgcgacccggatgtggtgctgcgcgccgataagctgtttctaccgggggtgggaacggctcaggcggcgatggaccagctgcgcgagcgcgagttaatcgaactgattaaagcctgtacccagccggtgctgggcatttgcctcggcatgcagctgctgggaaaacgcagcgaagagaacaacggcgtcgacctactgggcattatcgagcaggacgtgccgaaaatgatcgaccacggcctgccgctgccgcatatgggctggaaccaggtgtatgccaaagcgggcgatcgtctgtttcgcggtattgaagacggggcgtatttttacttcgtccacagctacgcgatgccggtcaacgtcaataccatcgcccagtgcagctacggcgaggccttcaccgcggcggtacagaaagataacttttttggcgtccagttccaccctgaacgctccggcagcgccggggcgcagctgctgaaaaacttcctggagatgtga

SEQ ID NO: 258101 - DNA, 1068 bp, Klebsiella pneumoniae
atgacccagaagtttctctttattgaccgtgacggtacgctgatttccgagccaccggttgattttcaggtagaccgcttcgataagctggcgtttgagccgcaggtgatcccggccctgctcaagctgcagcaggaagggtacaagctggtgatgatcaccaaccaggatgggttgggaaccgccagcctgccgcaggacgagttcgacggcccgcacaacctgatgatgcagattttcgcctcccagggcgtcaactttgacgaagtgctgatttgcccgcatctcccgacggataactgcgactgccgcaaaccgaaaaccaggctggtgctgccatggctggaacaaggggtgatggacaccgcccacagctacgtgattggcgaccgcgcgaccgatattcagctggcggataacatgggcattaccggcctgcgctatgaccgcgaaaagctggactggccgaccatttgcgaacagctaacccgccgcgaccgctacgcccacgttgagcgcatcaccaaagagacccaggtggatgtgaaagtgtggctggaccgcgaaggcggcagcaaaatctctaccggcgtcggtttcttcgatcatatgcttgaccaaatcgctacccacggcggcttccgcctggaggttaacgttggcggcgatctgtatatcgacgatcaccacaccgtggaagataccgggctggcgctgggcgaagcgctgaagctggcgctcggcgataagcgcggcatcggccgtttcggctttgtgctgccgatggacgaatgtctggcccgctgcgcgctggatatctccggccgcccgcaccttgaatataaagccgactttacctatcagcgcgttggcgatctgagcaccgagatggtggaacacttcttccgctcgctctcctataccatggcggtcactctgcacctgaaaaccaagggcaaaaacgaccaccaccgcgtagagagcctgtttaaggccttcggccgcacgctacgccaggcgattcgcgtccagggcgacacgctgccgtcttcgaaaggggtactttga

SEQ ID NO: 258102 - DNA, 1062 bp, Klebsiella pneumoniae
atgagcattgaagatttagcccgcgccaacgtccgcgcgctgacgccgtatcaatcagctcgccgtctcgggggtaaaggcgacgtctggctgaacgccaacgaattccctaccgcggtagagttccagctgaccgagcagacgatgaaccgctacccggaaccgcagccgaaagcggtcattgaacgctacgcgcagtatgcgggcgtcaagccggagcaggtgctggtcagccgcggcgccgacgaaggcattgaactgctgatccgcgccttctgcgagccgggccaggacgcggtgctctattgcccgccgacctacggcatgtacagcgtcagcgccgaaaccatcggcgtgacctgccgtacggtgccgacgctcgccgactggcagctggatctgccgggcatcgcggccaatctcgacggcgtgaaagtggttttcgtttgtagcccgaataacccgaccgggcagattatcaacccgaaagattttcgcaccctgctggagatgacgcgcggcaaagccatcgtggtcgcggatgaagcctatatcgaattctgcccgcaggcgacgctggcgacctggctgaacgagtatccgcacctggcgattctgcgtaccctctccaaggccttcgccctggctggcctgcgctgcggtttcaccctcgccaacgccgaggtgattaacgtgctgatgaaggttatcgcgccttatccgctctccacgccggtggccgatatcgccgcccaggcgctcagcgcggaaggcattgccgccatgcgggcgcgcgtggcgcagatcctcgccgaacgcgattatctggtaagccagctgcgcggcattgcctgcgttgaagaggtgttcgattccgagagcaactacgttctggcgcggatcgtcgcctccagcgcggtgtttaaatctttgtgggatcagggcattatcttacgtgaccagaataaacaaccttcattaagcggctgtttgcgtatcactatcggtacccgtgcagagagccagcgcgtcattgacgctttgactgcggagaatgtatga

SEQ ID NO: 258103 - DNA, 507 bp, Klebsiella pneumoniae
atgatccctcttttggccatcgccgcctggagcggcacgggtaaaacaaccttattaaaagcgctgattccagcgctacgcgcggaaggcatacgtcctgggctcattaaacatactcatcatgatatggatgtggataaacccggtaaagatagctatgagctacgtaaagcaggcgcggctcagacgatagtcgccagctcgcagcgttgggcattaattacggaaacacccgaagagcctccactggatctgacatggctggctagccgaatggatgcatcaacgttagatctcgtactggttgaaggttttaaacatgaagctgtgcccaagatcctgctctttcggcaaaacagcggacattgcagagaagaattagtgtttgatgatgacgtgattgccgttgccagcgatacgcctgtcgagacgtcgcttcccttgttagatttaaataatattccgcagatagccgtttttattatgcagtggttaaagagggcttaa

SEQ ID NO: 258104 - DNA, 582 bp, Klebsiella pneumoniae
atgcagggcaaggtaataaccggcgttgtactggcgggtgggagaggtacgcgtatgggaggcattgataaaggattgcagttgctgaaggggaaagctctgtggcgtcatgtcgccgatacgctgcaaccccaggtcacaaagctggtgattagcgctaaccgcaatcttgattgctggcgaagcagcggctacccgattattaccgactctctgaacgactttcccgggccgttagccggtatgctttccgttatgcatcaggttgagggtgagtggtttctgttttgtccatgcgatacgccttttattccattatttctggctgagcgcttaatactgcaaaaaaaatcatccccggtcgtttgggtacacgacggtgaacgcgaccatccggcgattgctctggtgaatcgagtggtgattagcgaactggaaacctatctggcggcaggcgagcggcgggttatggtgtttatgcgtaaaatgggcgggcatagcgtcgattttagcgatgtaaaatcagcctttattaacgtcaatactctcagtgacttacaaagtatggaggtgtcatcatga

SEQ ID NO: 258105 - DNA, 270 bp, Klebsiella pneumoniae
atgaaatgtaaacgcctgaatgaagtcattgaacttctccagccagcctggcagaaagaacccgagctgaatttgattcaatttttgcaaaaactggcgaaagaggccggttatgccggtgaactgagcgatctttccgacgatattctgatttatcacctgaagatgcgcgactcggcaaaagaggctgttatccccggtatccagaaagattatgaagaagattttaaaactgcgctgctacgcgctcggggcgtgattaaagagtaa

SEQ ID NO: 258106 - DNA, 240 bp, Klebsiella pneumoniae
atgatgacgggaacgaatatgggcagaatactactcgacttatcggatgacgttattaaacgtcttgaagacctcaaacagcagcgcaatcttcctcgagcggaactgttacgcgaggcggttgaacagtacctggaaagacaagctgacaccactatttccaatgcgctggggatttggcaaggctgtgaggaagatggagttgaattcgaaaggaaactccgcgaggagtggcaatga

SEQ ID NO: 258107 - DNA, 375 bp, Klebsiella pneumoniae; identical to SEQ ID NO: 188785

SEQ ID NO: 258108 - DNA, 1155 bp, Klebsiella pneumoniae
atgaaagcattagttatcggcggcggcatcggcggcctgagcgcggcggtagggttaaaaaatgcaggtatccattgcgaagtctttgaggcggtgaaagaaatcaaaccggtgggcgcggccatctccatctggcctaacggcgtgaagtgcatgaagcatttaggtatgggggatattatcgagagctacggcggcccgatgcattttctcgcttataaggattatctgcgcggggaggacctgacccagttcagcctcgctccgctggtagagcgtaccggcggccgcccctgtccggtttcccgcgctgaactgcagcgcgagatgctcgacttctggggacgcgacgccgtgcagtttggtaaacgcgtcacccgctgcgaagaacacgccgacggcgttcgcgtctggtttaccgacgggtcgatggcggagggagattttctgattgccgccgacggtagccattccgcgctgcgcccgtacgtgctcggctatacccctgagcgccgctacgcgggttacgttaactggaacggtctggtggagattgatgaggcgattgcgccgggcaaccagtggaccactttcgtcggcgaggggaaacgggtgtcgctgatgccggtctccgatggccggttttactttttctttgatgttccgctgccggcggggctggccgaggatcgcagcacgctacgggcggatctcagccgctactttagcggctgggcgccgcaggtgcagaagctgatcgccgccctcgatccccagaccaccaaccgcattgaaatccatgatattgaaccgtttgagcggctggttcgcggcaaggtggcgctgctgggcgatgccgggcacagcaccacgccggatatcggccagggcggctgcgcggcgctggaggatgcggtggtgctgggggatctgttccgcgagagccgcgatatcgccggggtgttgcgccagtacgaagcgcagcgctgcgatcgggtccgcgacctggtgctgaaggcgcgaaaacgttgcgacgtgacccatggtaaagatatggcgctgacgcaagcctggtatcaggagctggaaaccgagaccggagagcggattatcaacggcctgtgcgaaaccattcagggcggcccgctggggtaa

SEQ ID NO: 258109 - DNA, 501 bp, Klebsiella pneumoniae
atgatcgcgctgaatcactttaaccagctgagcggcgaagaggccgtttccctgctggcgccctgcgttgccgttcctggttgggcagcggcgctcgccgccggccggccctggcgcagccgcgctgatttgctcaacgccgcgcagcggctgatggcggcgtggggcgaagcggagctggccgaggcgctaagcgcccatccgcgtattggcgaaaagcccgccgggtctcaggcgcacgcggcgctctcgcgtcaggagcagggaagcgttgatgagcgcgatgctgcgctggcgcaggcgctgaaagcgggcaacgcccgctacgaagcgcgatttggccgggtttttttgattcgcgcgaaagggcgcagcggggatgaaaccttagcggcgctgtcgcgtcgcctgcaaaacagcgagcgcgcagaagttcaggacgcgttggcgcagctgcgcgaaatcaccttattaagactggaaggagcaattggcgaatga

SEQ ID NO: 258110 - DNA, 327 bp, Klebsiella pneumoniae
atgagtaccttaagcacccatattctggatatctctaccggccgaccggcgcagggcgtgaaggttgtgctggagcgcgaaggcgcgctgattgcccgcggggccaccgatgagaacggccgtattggcgaactcggcgccgggccgctggcgccggggcattaccggttgagcgcggaaatcggcgagtggtttaccgccagcgggcgcgagacgctctacctgagcgcgcagattgatttcgccatccgcgaagcggctggcgggcactatcatttaccgtttttaattgcccccggcggctggtccacctatcgcggcagctaa

SEQ ID NO: 258111 - DNA, 189 bp, Klebsiella pneumoniae
atgaacacaccgcacaacgaatgggacgcttacctcacgcaaatggaacagctgttggcgctggagctggacgatgcgcggcgcgcagagctccgggtgcagtttagccgcattgccgccatggccgggccgctgctggcctttcccctcgacgagcgcgtcgaaatcgctggagtttataaagcatga

SEQ ID NO: 258112 - DNA, 810 bp, Klebsiella pneumoniae
atgaccagtacagagttaaaatttgatttatttctaaaatcctatcatccatctcatcgatttgtctataaggcaaaccccggtaacgcgggcgatggcgtgattgcatctgcaacgtacgattttttcgaacgaaatgcgcttacctatgttccttacagagccgatgagcgttacagcgctgatactgatattttaatttttggtggcggaggaaatctcatagaagggttatatgctgaaggccgcgatttcatccaaaataatattcataaatttcacaaaacgatcattatgccttcgacaatcagagggtatagcgatttattcactaataatatcgataaattagtagtgttttgccgtgaaaataccactttcgattatataaaatctctcagctatgagccaaataagaacgtattcattgctgatgacatggcattttatctcgatcttagtaaatacctgtctcttaaaccggcctataaacaacaggcaaactgtttcagaacagactcagagtctctaacaggagaacataaagaaaacaatcatgatatttcgctcacgtggaatggcgactattgggataatgaatttctggcacgaaactctacccgttgcatgatcaacttccttgaagagtataaagttataaataccgatagactgcatgtagcaattttagcatccctgctgggaaaagaagtcaatttctaccctaactcatactacaaaaatgaagccgtttataattactcgctgttaaatcattacccaaaaacgtgctttattactaccagctaa

SEQ ID NO: 258113 - DNA, 2223 bp, Klebsiella pneumoniae
atgaagaaagttcttataatgacgccggacatagaggggcctgtccgtaacggcggcattggtactgctttcacagcccttgccactactttggcaaaaaaggggtatgatgtcgatgtattgtatacatgtggtgactattcagagtcatctgcatcaacttttagcgattggtcacgtatttatagcacctttggtattaatttgctgagtaccggtctggtaaaagagattaatatcgatgctccctattttagaagaaaaagttactcaattttgctctggctgaaagagaataatgtctatgacactattatttcttgtgaatggcaggcagatctttattacgctttattaagtaaaaagaatggcactgattttgaaaataccaaattcattgtcaatacccatagctcaacgttatgggctgatgaaggtaactaccagctcccatatgatcagaatcaccttgaactctattatatggaaaaaatggtagttgagatggctgatgaagtcgttagtccgtctcagtatttaattgattggatgttgagtaaacactggaatgttcctgaagaacgccacgttattttaaattgcgagccatttcaagggtttgaaaagagaagtgatgttgtcgttaaagccaatgaaaaaaccgcttcaggcgttgagcttgtatttttcggccgacttgaaacccgtaaagggctcgatatcttcctgcgcgcattaagaaaactctctgccgaagataaagagacgatctctggtgtgaccttcctcgggaaaaacgtcacgctgggtaaaattgattcatttacctatatcatgaaccagaccaaaaacctgggtctggcagtcaatatcatcagcgattatgaccgtaccaatgcaaacgaatatataaaaagaaaaaatgtattagtcatcatcccatcgctcgttgaaaactccccatataccgtttatgaatgcttgattaataacgttaacttcctcgcctcaaacgttggagggattccagaacttattccgcaggagcatcatgctgaggttctgtttaccccaacgccggttgatttatacggtaaaattcactatcgcttaaaaaatataaacatcaaacccggactggttgaatcacaagaaaatatccaggcagcgtggtttgccgccattgaaagaaaagataactgcgtcttcaagaaaattgatgaatctaatcgtccgttagtgagcgtatgtattactcatttcgaccgtcatcatttgctccagcaggcacttgcctcaataaaaacgcagacgtaccaaaatattgaagttatcttagttgatgatggaagcacaaaagaagaatctcatcgttatttgaaccttatcgagaacgactttaacgctcgaggctggaaaattatccgcagttctaataactacctgggcgcggcacgaaatttggccgctcgacacgcctccggtgaatatctgatgtttatggatgatgataatgtcgctaaaccttttgaggttgagacatttgtcacggcagcattaaactccggagccgatgtgttgaccaccccaagcgatctcatttttggtgaggagttcccttcgccattccgtaaaatgacgcactgctggctcccgttaggccctgatttaaatatcgccagctttagtaactgttttggcgatgctaatgctctgatcaagaaagaagctttcgacaacatcggcggttttactgaagattacggtttaggtcatgaagattgggagttttttgcgaaaatatccttacatggctataaattgcaaatcgtccctgagccgctattttggtatagagtagcaaactccggaatgttgttaagcgggaataagagcaaaaacaactaccgtagcttccgtccatttatggatgaaaatgtgaaatataactatgcgatgggcttgattccttcgtacctcgaaaaaattcatgaactggagaatgaagtgagccgactgcgcagcatcaatggcggccattctgtcagtaatgaactacagcttttaaataataagattgatggtctaatttctcagcaaagagatggctgggcccacgatcgctttaatgctctttatgaagcgattcatgtccagggcgcaaacagaggcaggagcctggttcgccgtgtggcccgcaaagtaaagtcattgttgaaatag

SEQ ID NO: 258114 - DNA, 1260 bp, Klebsiella pneumoniae
atgagtggtttaaaacaggagttggggcttgctcaaggagtggggctactttccacatcattactgggaaccggcgttttcgccgttccggcgctggcggcattggtcgccggcgataacagcctgtgggcctggcccgcactgattttactggtgtttcccatcgctatcgtcttcgccacgctgggccgccactttcccagcgcaggcggcgtagcgcattttgtgcatatggcttttggcccgcgcctggcgcgcgtcaccggctggctctttttatcggtgatcccggttgggttacccgctgccctgcatatcgccaccggctttggtcaggcgctctttggctggcacgacagccagctgctgctggccgagctgggaacgctggcgattatctggtgggtcggttctcgcggagccagctccagcgccaatctacaaacgctggttgccgtgctgattgtcgccctgattgtcgccatctggtggcgcggcgcgataaacccagcgcagatccccttcccgccgccttctgatatcgacagttcgcagcttttttctgccctttcggtgatgttctggtgttttgtcggacttgaggccttcgcgcacctggcctctgaatttaagcagccggaacgcgatttcccccgcgcgctgatgatcggcctgttactggcgggttcagtctactgggcctgtaccgtgctggtcctgcattttcatgcctttggcgaggagatggccgccgccgcgtcgctacccaatatcgttgtacgcctgttcggtgtccaggcgctatggattgcctgcgttatcggctatctcgcctgcttcgccagtctcaatatttatattcagagctttgcacgcctggtctggtcgcaggcgcagcacaaacccgatagctatttgtcccgcctgtcgccgcggcaaattccgcgtaacgcgttgaacgcggtcctcggctgctgcgtgattagcgcattgtgcatttatgcgctcaatatcaaccttgatgcgctgatcgtctacgccaacggcatttttatcatgatctatctgctgtgcatgctggcgggctgccgtctgcttcagggacgttatcgtctgttagcggcgtttggcagcgtactgtgcctggtgctgctggcgatggttggctggaagagtctgtacgcgtttatcatgctggcgggactgtggctgtttttaccgaagcgccggctggcagagaggtattccaggccggagtaa

SEQ ID NO: 258115 - DNA, 294 bp, Klebsiella pneumoniae
atgagtattcgtccgttacatgatcgtgtgatcgtcaaacgtaaagaagttgaaacgaagtctgctggcggcatcgttctgaccggttctgcggcagcaaaatcaactcgtggcgaaatcatcgctgtcggtaagggccgcatcctggaaaacggaaccgtgcagcctctggacgttaaagttggtgacatcgtcattttcaacgatggctacggcgtaaaatccgagaagatcgacaatgaagaagtgttgatcatgtccgaaagcgacattctggcaattgttgaagcgtaa

SEQ ID NO: 258116 - DNA, 864 bp, Klebsiella pneumoniae
atgcaaaatacattaaagggatttaataccgcagtgattaaacatgaagatcattttttagctcttcttttgaaggttaaatcgcaaaatgacatctgccaaacctattatttacaagctccacaccttgcagatctttgcttaattctacaaagcagaattaatttagttgcacagcgcatctctgaggaaggtgatacttataaagaaaaattaaataatattaatgaaatcattattgctgaaaccccagaaattgagatatcagagattgaagagccagattctggacaacgaattacttctcttacatttgctccaggaaacgcgtcagcaaaaattgtcgcagtcttacaaaatagaaaaaccataatatttaacatcgatgatacgcaggttgatgcactttcagttgcaattcaacaagcattaatcaattctaatgaaaatgatttaatgcagaatatttacttcgatatgaaatacctaatgctttatacagtagatttatcaaaagaaaaaaatatttcatatcaacaacatattcaagaagactggaaaaccactttatataaaaactatctagctatacttttctgctttgaaacaccacagggcaagaaaattctgaccggagctattgtcaaaataaattcgcaacatccatcagcagaaactaataccattattaggcgagtgctggataaccactctaaattaaacgttaatgacgaaggatattcaccacatgaaatatacagtaatataatgccaaccccacctgggaaaatacttactctccctgaatgtttgaatgcccttcatcatttctatcgggaaatgaatacaaaattacctggataa

SEQ ID NO: 258117 - DNA, 1287 bp, Klebsiella pneumoniae
atgcataacgacctctatcgcaaggaagcgattgaatataaaagattttactggaaaggtaaggcgctattattagctgggttacctgcatggctagtgaccttattatctttgatattcttaatcgcgctagtagccactattattttttgtaaattcactcagcgaatagatgttcgtggagaggtcatcacactacctcattctataaatgttttctctccacagcagggttttgttgttacacaatatgtaaaagtaggcgaaattgttaaaaaaggacagccactttacgaactggatgtgtcacgaaacaccactagcggcaatgttagcgagtcccaaatagaatctatcaatgaaaaaatcattaatgccaatgatattataaaaaaattaaaaaagaacaaagatgaaactttaaatgccctggattcacaaattaaaaacgttaaggattcgctaaaagaaacgaatcatatgctggctaatactcaagcaggcttacgtaaaatgtatgaaaacttatctaattatgataagtatctaaaaaatggtcttatcactaaagaccaatataactatcaacactcattatattttcaacaacaaagcaactatcagtctctaatcagccagcaaatgcagcttgatactcaggtgactcaaattaatagtgacagagtaacaaaagcagcagattttgataatcaaatctccaaccaatataatcagataaatgattataaaaatcaattgatagagtcgaatgccagcggtaatgttgtaattaaagcaaccgccaatggtaaagttgagtctttagcggtaaccaaaggacagatggtagaaaatggtagtagtttagcccagataaaaccgacaggtgacgttgaatactatctaattctatggctaccaaataatagcattccttacataaaacctggtgataccattaatattcgttatgatgcctttccagcagataaatttggacaatttccaggcaaagttctttccatatcgtctatgcccgcatcgcgccaggagttatcagaatatacaaacgttagtaatggaaccaatcaacaagagcttgcactttataaggcaatagtaacaatcaaacataaatcatttaactataaaggtaaaaccttaacgttatcaaatggtctgaaagcccaggctgtcgttttcttagaagaacggcctctttatatgtggatgtttactcctttttataaaatttcgcaaagcgtaagtggccccataaatgactaa

SEQ ID NO: 258118 - DNA, 366 bp, Klebsiella pneumoniae
atgaaagaattaactatcttcgaaatggaagaaatcgccgggggctatagctgggatttttcttccgcctccgctgggattcaatcgcttgtgtgtaacgctgttgaagccataggttctaccgctcttggcgctattgtcggcgctggtgtcggtacgctcattggggggactcagtccggtgaaaacggcggtctgttagggtttggtatgttcggtaacctggttggtatgttctggggaatgctgtggggcggcgtagcatgtggggccggcgcgctagccgtgggctgggacgaaacgcttagctatgttaaaactacagtagacaaagtactggacggtactttcgtaccatggtcttaa

SEQ ID NO: 258119 - DNA, 1026 bp, Klebsiella pneumoniae
atgaaaaaactaattttgtttattagcttattatgcttcagcctaccgacgctatctatatgcaaatatagtaagacttcaaatcccacggtaggcatttcgattaaatcaaaaatattatccgataagtctttacccgcaggctcaatattaggcgtgggaacagttggtggaggcgtcgctgatatgaaaactttttatgattgtgaggctggggatgtttacgccgtatcggcatcgccgggggctatagaggctccgggcgtaaaaggaatacagggtggtacagtttatgaaacaggcatcaaaggtattggttatcaaatatcagatgctatttcaggcagtaacattcgccctatccctgccaaaatgggaagtatttctgcctaccgactgacagttaatccagtagtacaattaacagcctggttaattaaaacaaatgacgatattgatacaaatgtgacatcatcacgaacaatatcagtcatgtatctcgcaggaacaccaacgcaggttcagtccagatcatcaacggctcgcttgcttggtgcaaatttaacactaggcgcatttactttccgagaaacgtcttgtgaggtaaccccgcgcaatggaagcaccataaagttgcctaatattgaagcaagtcagctaaatgccgtcaccccggggaacgcaaccggcaaacaaaaagatatcattctggatattaattgcccaacttcatcagtagggagtaaatatacctactggtttaaccccatcacgccaaacagctcctcaactaatggagttttaatgaactccgtccccgttgcttcaggtggtgcacaagatgtcggattaattatcaaaaaagacggcactgctattaaattctatgattatgatgcttattcaattgctaaagtggctaaaacgcaggaagtaaaattaactgctgactactatcgcttatctagcaccatatctaccggcacagtacaaggaattttcgaaataattttacaggaaaaatag

SEQ ID NO: 258120 - DNA, 2007 bp, Klebsiella pneumoniae
atgatgcctttacgccctgaattactggagctcacgccgcaggcgctcaccgcgctgagcaacgccgggtttgtgaaacgcgctcaaaaagagctggataacggcaatatccccgcgctggagcaggatgaggccggtacgctgaccgccgtttttcgcgatggtacccgtacccggctggaaaaagatcgggcactcaaagagtctagctgtacctgcggcgctagcggcatgtgccgccatcgcgtgatgctgatcctgagctatcagcgcgccaacgccggtcacgcggctcctgaaggggagccaaacgctgacgagcgctggcatcccggcctgtggcaggaggagctggccaccctgcccgagtcgattctcaagcgggcgcagcagctggcggataaagggctgacggtggaattgttctgccgacccaacgaaacgccgtcggcaaagctgccgatgagcgatgtgcgtttttattcccgcagcagtatccgctttgcccgctgcgactgcatcgaaggctccctgtgcgagcatatcgcgctggcggtgcaggcctttaccgacgccgaagcccaacagccgggctttacgcatctggtctggcaaacccgcagccgcagggtcgccgcccgcggcggaccttttgctacgcccgagggcgaagcctgtcgacaaagcctccgtcagctaagccaactgctgtggcaaaacggcgtcagccagccgccaatcagcttcgaagccgcgttcacccgcgcgcagcgcgcagcgcatgcggccaactggcgctgggtcatcggcgcgcttgccgagctgcgcgaaggcgtcgatgcctgccagcagcgcgccagccactacgtgcctgagcagctgctggcccagctcgcgggccttgatgcccgtcttgagagcgccgaccgaatggcgcagcttgccgatgccggccagacgccgcccctgccgtggcgcaccgtcgtcggtcagggtattgccggtgaagcgcagctcgatcatctgcggctgatttcccttggcatgcgcggctggcaggataaccagcagtacggcttacgtctctggtttagcgatccggataccggcagcattttgcatctgtcgcaccgctggccgctggctgaacgggcgcaaaatccgctatggcagcgccgcctgtttacctttcaggccggcatactggcgggcgggcaaatcattacccggtcagcgcgccgcactgccggcggcgagctgctgctgggcgcccgtcagcgcctgagcagcagccttccgctcaccgaagatgcctggcttttgctcagcgcgccgctgcggcagccgggcgccgcggccctgcgtgagtatctgcgccagcgccccccggcctgggtgcgcccgctcaatcaggttgataacctgtttattctgccggtggaggcctgccttgccgtcggatgggacgccgcccggcaaacgctggatgcgcaggtcctcagcggcgtgggagaaaacaacgttttgtacttgtcccttcccgcctccgccagcgcgccgtatgccgttgagcggatggcggcgctgctcagacaagaggacgatccggtggtgatggtttccgggttggtcagctttcatcacgggcagcttagcctggagccgctggtcatgatgacccgtacccgcgcctgggcgctgaacgccgagccgcttcccgtcgcgccgttgcctgttggcgatgtactgccgccgcgctcgccggccctgagcctgttgcagcgcgcccggacgctactgatccagatagcgcacaacggcctgcgctatcagcaaaagagcctgtttcgcgaggccgccacgctgggcggcgagttgacgaaccagggttttagccatcttgcgcgtctgcttcagcaactgggcgagagcgaaacggccaccgccgaggatacgctcagcaccatcgcgcaactctgtatacaattagagatgatgattgattaa

SEQ ID NO: 258121 - DNA, 2286 bp, Klebsiella pneumoniae
atgccagaacagccattaatcatcggcgttcgtcaccacagcccggcctgcgccaggctggtgaaagaacgaatagaacgcgtgtgcccgcgctacgttctgattgaaggtccggcggattttaaccatcgcctggacgagctttttttaccccaccaactgcccatcgccgtctacagctactgccagcagcagcatggcggcgcggcaggacgcagcgcctggacgccgttcgccgaattctcgccggagtggcaggcgctgctggccgcgcgggcaacgggggcgcatatccgctttatcgatttacccgtctgggcgcaggacgacaacgacagcgatccctctgacgcccgccgcgccgatgaccatcagcgcctgctcgaggtcagcggcatggagaataccgacgcgctgtgggaccatctgttcgaagatgaaaaccagcgcgccgggctgaaacaggcgctggagacctggtttgtccagctacgtggcgacagcggcggcggcgaaaacagccggcgacgggaagcttatatggcccgctggctggcatgggcgatgcggcaaaataacggcccggtggtggtggtctgcggcggctggcacgctccggcgctggctaccctgtggcggaactgcccggcgcaggagcaggagccggcattaccgcctccgccgacgcccgatgccgtcaccggctgctatctgacgccgtacagcgaaaagcggctggacgtactggcgggctatctttccgggatgccggcgccggtctggcagcgctggtgctggcagctcggtcagcggcaggccggggaacagctgctgaaaaccctgctcgcccgcctgcgtcagcatcgccttccggcctcaaccgccgatttggcagccgcccatctgcgcgccatggcgctggcccggatgcgcggccatacccagcccctgcgctgcgactggcttgacgcgctggcgggctcgttaatcaaagaagcgctaaacgccccgctgccgtggagctatcgcggcgccatccatccgcaaaccgatcctattctgctgaccatcgtggatgcgctggcgggggcggatttcggcaagctcgcgccgggaacgccgctgccgccgctgccgcaggatgtcgaacgcgagctggcgcgcgtcgggattgccccgccggcgaatctgaacctcaaccgctttgcgcccgacggattagcgaaaagtcaggtattacaccggctggccattcttgagatccccgggttccagcagcgaaccggcagcgcggtagccctttccggcgatggcgaagagcgctggggagtgtttcgcaccatggaacagcatgccgtcctgattgaatccgcccgctatggcgcctccctcgcggatgccgcgcgacggcggctggaagggaatattctctcctcctttggcatcaaaagcctcgccgccagcctcaatcaggcggcgctggcggggctcgccacctttagccagcagatgctggaacagctggcgcagctgattgccgaagagagccagtttgccgaaatggggccagcgctggaggtgctgtatgccctctggcagcgggatgatatcggcggcatgcagaacgccgtcgtgctggaaataacgctcagcgcggcgcttgaccggacgctgtggctctgcgaatccagcggcgtcgccgacgagaagcagtttcacgcccatctgcatagctggcagaccctatgccacatcctgcgcgatctccacagcggcagcgttttaccgggcgtttcgctcagcgccgctctcgcgctgcttgaacggcgaattcacgcagccgatgccgcaccgctcgaccgcggcgcggcgcttggcgcgctgatgcgtctcgagcaccccgccgctaccgctgaaacggcgctggccctgctgacgcggctgcccgcgcagcgtctgggagaggcggtacatggcatgctggcgctggcccgccatcagcttgcctgtcagcccgcctttatcgctggcttcagcgagcgtctcgcccgtctggcggaagaggagtttattctcgcgctgccggatttacgcgcggcgatggcctggctgccgccccgcgaacgcggcgcgctggcccgccaggtgctcgatcactatcacatgaccatgctgccgacccatgcgctacaggcgccggtttcctgctcgccgcagcggttaatccatcaccagctgttggagcagcaggcgctggcggcgcttcgccactggggaggacgctaa

SEQ ID NO: 258122 - DNA, 3612 bp, Klebsiella pneumoniae
  misc_feature (1390)..(1399): n is a, c, g, or t
atgcacaacacagcactcccgccatggctggcggatgacgcgcagctggagctatcctttaaaaagggcaaacaaccgttaagccatcgccgctggcctggcgacccggtaccgccgatcgaagagggacgcctgcaacgactggcgaacgatattccctcgcgctatcagcatattcaggcccttacgtgggactatgaaacatgcactgccgaatggcggcaggctattgcgcaggcggtcggctatgtgggcgaagccaaaccggcaatgcccccccgcgcgctggcggcgcttacccggctggcagaagatgacagtcccgagctactcgatgaaatcgtccagctaaggagcgtggaatatgccaccgaagtggtgattgaacggcaatttatcaccgtgacccacagcaatcttcagccacccagcatcgttttttctcatccgaaaaaagcgtaccagtacggttttcgctgcgatacttaccacgaattcgatctgcgtctgcgaaaacacctttcgctggctgaagaggcgatctggctacgctgcgctgacaaacttatccgcgcgctccctgatatcgagcttaatcgtaaaccgtttattgccctgctgttgccggaacgaccggacgttgcaaatagcctgctcgacgctgataaatacgccagccgttcatcaagcgagtggttgaaagcggtagcgacagatcctgctaagctggcagtactggagcaatcctgctggcttgatgtctttaccgattgtcaggccagcgagatgtgcgacgaaaaccgctacggttactccgcctgcgcggccctgctgcgcgagcaggggctggcggcgatccccaggctggcgatatatgcgcaccggaatgactgcggcagcctgctggcgcaaattaaccatccgcaggctatccggctgctgctgctggtggcggataaaaacaaacccagccagcagcgcgtgtcaacattcgccaaaaaatatccccatgccgctctggccgctgtagcggaattgctggcgctgccggaaccgcccgctcgtccgggctatcctgagatcgcagagaaaaagcgtccgcagcagcagaaaaagcgtgaagaaagctggagaatgctgctgcggacgctgctcaatacgcatcctcagctggctgagcaggttactccctggctaagcacgaaggcacaggaacttctggcggccagccgaccatcgatgccttcagacgttacgctggcaaccgatcgctcctgcctgccggagatcctgcgctcgccgccgtggcgcagcaaaaagaaaaaagtcgcgcccccgcgttttgcgctaacgtcgctgaccgttgcgcctcaggagcactggcagccannnnnnnnnnagccaggagagcgggaagcgctggctgccagcaaacccgcctgtttctttaataaccttccgctcgatgaacgtctcgccagcataggttgcaccatcgtcatgcaggagctgggctttcagagtattgaatacctgttccaccagtacacgttatgcggcaagcgggaccatttcgatacggagaaatattttcatcgctatgtctggtggggcaacgcctgccacgcactgcaaaacttcgatatcgctacgctactggaggcatggggggattacctggtaaaggcctacaaccctaacgactgctggaatctttatctgcttatgcagttgcctcgcgagcgggcgctggtggcctggcagggcatcaatgccgctaactttagatttgtcggcgccgaatatgcgctgagcattgtcgggaccgatgccctacccggcctgctgctagcgctgcagcatcggccaaaggagatcttccccctgctgacgcatctcggcgcaacggagctggcgctaccgatggcccgcgtctggcgacgcttgcaggcgcacagccaactggctcgtcagtggctcctgcagtggccggagcacgcagccgccgcgttaatcccactggcgttcgataaagcgggcgatagccgcgaggcggctattaacgcgctgcgtctgctgtaccaggaaggccaccatgaacggctgaaagcggtagcacaacgctggaacgaaccggcactgtggacgaagctggaacagctgctgacgcaggatccgctggacaactaccctgtccgcattccaaaagtgcctgacttctggcaaccgacgctctggcgcaggccgcggcttatcggcaccgaccagccgttgaccgacgatgcgctggagatcttcggcgaaatgctgcgcttcgcccagggcggccatcattacggcgggctggatttagccaaagccgcctgccagccccaatcgctggccgctttcgtctgggatttatttaacgcatggcagactgccggagccccagccaaagataactgggcgtttcaggcgctggggatttttggcgatgaagcgacagtgcgtgatttaacccagcttatcctggcctggccgcaggaagggaaatccgcccgcgccgccagcgggctgcatcttctcacccgcatcggcagcgatatggcgctgctgcagctgcaccacatcgcgcagggcgccaaatcccgcccgctgcgcgaaagcgccaggcagtctcttaaagaggtcgccgaagcccgcgatctcagcgaagagcagctgcaggatcggctaacgcctacgctggggctggacgatccccaaacgctggcttttgattttggttcccgcggcttttatgtccgttttgatgaaaatctgctgccggtgatttacgaccagcagggagcgcggcaaaagagcctgccgcgcctgcgcgccgaagatgaccaggtaaaagccgcggaagcgctggccaggctgaaaggcctgaaaaaagacgcagcccaggtggccaaacgcctgctgccgcatctggaaaacgccctgcggctggcacggcgctggacgcgaacggagtttcaatcgctgtttgtcgatcatccgctgaccaacaatcttacccggcgcctggtatggggaatctacgccgccagtgaaccccgtcgcctgctcaacgcctttcgcgtcgccgcggaagaggaattctgcgatggccaggatgaccctatcgctctaccggaagaggcgctgttcggccttgctcatccgctggaaatggatgacgcgacgcgggcagcatttagccaaatttttgccgattatcagctattgccaccgttccgccagctaacgcgccagacggtgcagctgctggcggaagaaaccgcccgcagcgagcttacgcgctggcagggaaaatcaacaacctgcgggcaattattgggcatccgcagtcgcggctggtggcagggcgctgaaaaccgtttctgctacgatgtcgggcggcatcgactgattctggaaatcacgccagggttcgtgcactacaacatggatgcgaaggctcctcagcggtttgccgccatcagactctatgatggcgaacggcccgctgcgttctcacagctcgatccacaggatctcagcgaggcgctaagcacgattgaggtcattttccgtggataa

SEQ ID NO: 258123 - DNA, 3720 bp, Klebsiella pneumoniae
atgaaaacctttatttatcaggacgaaaaatcacataaattctgggcgattgagcagcagggccacgagctgcatctacgctggggcaaggttggcacacacgggcagagccagatcaaaacctttgccgacgcggcggcggccagcaaggctgaagtcaaattgattaacgaaaaaacccgcaaaggctacgttgaagatactcgcaccgagcagcctgccttacccgcatcgccaccagccgccccacagcccgaatacgcctcaacgccctcagacatcacccgtccgtggctggcggacgatggcgaactgcttttatcggatgagctgcttgaagaggtgctcccttctcgcctctttcccggtaaaccgatcgccgcgcctgaaaatagcaaactgatggacctcggcaacgagatccacaaacaatcagggaatatcgtcacctttaactctaccgactgctccgcgtactggcagcaaatcatcaaccaggccctgaccgatggcccgctttcacccgcggcgctggcggttcaggtggcggtagccacgcgccgcggctggcgcagcgctgataatgcctgtctgatggacgagattgtttacgtttacggtctggaatatgccatcgagatgtttatcgccctgcagcacattgagtttgattataattatcaaacccttcaggtgactttccgcgccgaacccacccgcgcgcgcgggccggcgctgctcgacgtgcgcctgcgcgcccatctggctcatgcggatgaggcgctctggcggcgctgcgtggataaactgatcgccgcgttgccggatatgcccatcgggcaacagccgctggtggcgctcttgctgccggaacgccaggatatcgtgaacgatatcgcccgtcgggtactggcgcacaaaaatgtgaagacggcggaatggctgaaggtcgtcgcccgcgacccgcaggtggtcaaagcgctggagccttaccagacggaaaatctgtttaacgattattaccacggcagcgtctggaacgcgacggtgatgcgcgaacagggcgtcgccggtatcgcccgctttgcgccctacgttcacgatgacctgtgcggagagcgggtaagcggcgtgaaccatccccaggcgctgatgcagctgatccgggtgaacgaacaaggcaaacgctgccacgagcggatggcccgcgccagcgcccgcttcccgcacgcggcgctggcggcgctggccgaactgctggcgcagaaagaagagaagcgctggcgcattatgctgatgaccctgctgagcgcgcagccggagctggcggcgcaaatttcgccgtggctctcgtcgcaggccgcaacgctgctggcagcctgccaacggcagttaagccagcgggtcgactgcgccggggacgatattctgccgccggtgctggtttcgcccccgtggacggcgaaaaagaaaaaatcaccgatccctcagctaagcttaacgccgctggctttagaaccggcctgtatgctgacggaagaggcggccaacgcgcttctcgcccagcggaactggtacgcgcagcaggtggagatgagccaacaggagagtgagaaagcgtaccttacgcgcctgggtttcagggtctggagccgtcaaaacaatcgctatgaacacgcctccgacgccgcagcagatgcctggcggcggcagaattatcccgcgctgatcgccgaattccacgcttaccacgccccttatccgggggagtggaatctttatatgctcaccgcgctgcccgccggccgggcagccgatgcctggagctcgctgagtaaagagccccataccggcggggaatatgtgatggcctatctgcgtcttgccgggctaccgggttttattcacgccctgtcccgctatccgcaggagaatttaccggtcgctatctggtttgccgccagcgaactggcccccatcgtcgcccgcgcctttcacaagctgaaaacgctgcgcgaagaggcgcgcgagtggctgctggcctatccggagcacgccattgccggcctgctgcccgccgctctcggcaaagcgggcgaagcgcaggacagtgcgcgcctggccatacgcatgctgatggataacggtcatcagccgctgcttgaacaggttgcccgccgctacgatcggccggaggtgatggcggcggtcggcgcgctactggcgctcgatccgctggataaccatccgacgaaaattccgccgctgcccgcgttttatcagcccgcgctgtgggcgcgaccgctgctgcgggaaaatggccttgccttgccggacgacgcattaaaaacgctcggcgaaatgctgcgcttcccgtcagaggaaggtatttaccccggcctgcagcaggtaaaagatctctgtaccgtggcatcactcgccgccttcgcctgggatctgttcagcgcctggcaaaccgccggcgcgccgtcgaaagagagctgggcctttaccgcgctcggcatcttcggtaacgacgataccgcccgcgcgctcaccccgctgatccgcgcctggccgggagaatcccaacataaacgcgctaccgtcgggctggatattctcgccgccatcggcaccgatatcgccctgatgcagctgaacggcatcgccgggaaactcaagttcaaagccctgcaggagcgcgccagagagaaaatcggccatatcgccgcaagccgcgcgctgaccgtggaagagctggaggaccgcctcgcgccggatctgggactcaacgccgacggaaccttgaccctcgatttcggcccgcggcgctttatcattagctttgatgaagccctcaggccgtacgtgcgcgatgaaaacggcagccgccttaaggacctgccgaagccgaataaaagcgatgataaggcgctggctaccgaggccgttaatcgctacaaagccctgaaaaaagacgcccgcacgattgccgcccagcaaatcgcgcgcatggagtccgccatgtgccagcgtcgccgctggacggtggaaaacttccggcagtttctggttaatcatcccctggtctgccacctcacccgccgcctggtatggggagtctacgacgccgaaaacaggctgctggcctgcttccgcgtggcggaagacaacagctacggtaacgccgatgacgatctgttcaccctgccgcaaggcgcggtccaaatcggtcttccgcatctgctggaaatgcccgcggaagacgccgccgccttcggtcagctgttcgccgattatgagctgctgccgccgttccgccagcttgaccgcagctgctacaccctgacgaccgccgaactggcggccaccgagctgacccgctgggccgggcgcaaatgcccgagcgggcgggtaatagggctggcgaataaaggctggctgcgcggcgaaccgcaggatgcaggctggattggctggatgcttaaaccgctgggccagtggacgctggtgatggaaatcgacgaaggctttgccgtcgggttgctgccggatgaactcagcgccgagcagctgctgagcaaaatatggctgtgtgccgaaaatgcgcaccagtacggctggggcggcaacggcaaacagcaggccacgttttcggtgctggataacgtcaccctcagtgaattgattaacgatatcgacgggctgtttgagtaa

SEQ ID NO: 258124 - DNA, 1914 bp, Klebsiella pneumoniae
atgcgcggccacgaggtcaacttcatctgcgccgacgacgcccacggcaccccgatcatgctgaaagcgcagcagctcggtatcaccccggaacagatgattggcgaaatgagtcaggagcatcagaccgattttgctggcttcgacatcagctatgacaactatcactccacgcacagcgacgagaaccgcgagctgtcggagcttatctatacgcgtctgaaagagaacggttttatcaaaaaccgcaccatctctcagctctacgatccggaaaaaggcatgttcctgccggaccgttttgtaaaaggcacctgtccgaagtgcaaatcaccggatcagtacggcgataactgcgaagtgtgcggcgcgacctacagcccgaccgagcttatcgagccgaaatcggtcgtctccggcgcgacgccggtgatgcgcgagtccgagcacttcttcttcgacctgccgtcgttcagcgaaatgctgcaggcgtggacccgcagcggcgcgctgcaggagcaggtggcgaataaaatgcaggagtggttcgagtccggactgcagcagtgggatatctcccgcgatgcgccgtacttcggcttcgaaatcccgaacgcgccgggcaaatacttctacgtctggctggacgcgccgatcggctacatgggctccttcaagaacctgtgcgacaagcgcggcgataccaccagcttcgacgaatactggaagaaagactccaccgccgagctgtatcactttatcggtaaagatatcgtctacttccacagcctgttctggccggcgatgctggaaggcagcagcttccgcaaaccgaccaacctgttcgttcacggctacgtgacggtcaacggcgccaagatgtccaagtcgcgcggcacctttattaaggccagcacctggctgaatcattttgacgcagacagcctgcgctactactacaccgccaagctctcgtcgcgtatcgatgacatcgacctgaacctggaagacttcgtgcagcgcgttaacgccgatatcgtcaacaaggtggtgaacctcgcctcgcgcaacgccggtttcatcaacaagcgtttcgacggcatgctgtccgccgaactggccgatcctcagctgtataaaacctttaccgatgcggcaacaagcattggcgaagcgtgggacagccgggagttcgctaaagctatccgcgaaatcatggcgctggccgacgtggcgaaccgctacgttgacgagcaggcgccgtgggtggtggctaaacaggaagggcgcgacgccgacctgcaggccatctgcaccatgggcctgaatatgttccgcgtgctgatgacctggctgaagccggtcctgccgcagctggccgcccgcgccgaagcgttcctcaacggcgaactgagctgggatgctatccagcagccgctgctcggtcacaaggttaacgctttcaaagcgctctacaaccgcattgagatgaagcaggttgacgcgctggtcgaagcgtcgaaagaagaagtcaaagcgctgtcagcgccggtcaccggtccgctggcggacgatccgattcaggaaaccatcacttttgacgattttgccaaagtcgatatgcgcatcgcgctgattgaaaacgccgagttcgtggacggttccgacaagctgctgcgcctgacgctggatctcggcggcgagaagcgcaacgtcttctccggcatccgttccgcctacccggacccgcaggtgctgattggccgcctgacggtgatggtcgccaacctggcgccgcgcaaaatgcgcttcggcgtttctgaaggcatggtgatggccgcgggtcctggcgggaaagatatcttcctgctcagcccggacagcggcgctcagccgggccagcaggtcaagtaa

SEQ ID NO: 258125 - DNA, 399 bp, Klebsiella pneumoniae
atgacttatcttaaaaaagacacattaaatcccagtggtgagaacattttgctgtttgaattatctgcttacagtcgaatgcaatatattgaatttatggttgaagaacggaaagctttaccacctgagggaagcactcctgaagaaaattttaaattggccaccttgttgactatgcgtgatcaggccatgcttgtcgctttatccttgagcgaggcagacgatgagaaccgtgagggaaaagatattttccatgaaatcatgcgcaaatatccgccgggattactgggtagtgcagccataatggtccggatgctttcggggatggttcctcccgctattgatgaaactgaagaaactattaaagaagaggaagaaccggatctggaaaagtcctga

SEQ ID NO: 258126 - DNA, 474 bp, Klebsiella pneumoniae
atgtcagatatttattatccacatgattatatacccggcccgacatacgataattatggatttgaatcgactgatcctatggctcgtaccgacagagtgggggggcttgccaggcagcgtagaagatatacatcagtaccaactaataatactgttgtatggcaatttaaaagtgatgcgcatgcacaagtatttgaagcgtggtatagagacgttttaactgatggtgcggcatggttttacatgaaatgtaaaactccagttggactgaagttttttaaatgtcgatttaatggggtgtataaaggaccatcttatattaaaccaggtctgtggcgttattctgcaacccttgaattaagggagcgaccacttgcccctgtcggttggggatattatccagaatggctggccgggcaatctctccttgatattgcactgaataaggagtggcctaaacatgacgcagattaa

SEQ ID NO: 258127 - DNA, 690 bp, Klebsiella pneumoniae
atgactgaatataacgatcaaaagggatatttgcgttttgccattaacctgggcaacccagttctcgcgacacttctgccggatggctctccgggagggataaccgttgagctggcgaacaagctggcggcagagagccagcgcgaagcgcggtttgtgacctggccgacggccgggcaggtagtggatgcggcgctgcaggatcaatgggatatcgcctttctggctatcgacccggcgcgggaagataagcttcgcttcacgccgccctacgtcaccatcgaaagctcggcgatggttaaaaaagagagtgaaatacggtcggttcaggagatggaccgcgaaggtgtagtgataaacgtgggcaaaggtgcggcctacgagctgtatctgattcgcacgctaaaacacgcgacgatgcgccagtacgccacttctcaggaggctattcaggcattcatccacggcgaaggcgatatggcggccggtattcgccagcctctggagcaagccgcgcaggaaaacccggcgttacgcgttctgcccgacagctttagccagatacgccaggcgatatgcgtcccgcgcaatgcgccgcagcactatgaatttatttgccgctgcctttcttcatggatagcggacggtactattgccgggatggtgaagcgccatatcggcaatagctga

SEQ ID NO: 258128 - DNA, 273 bp, Klebsiella pneumoniae
atgtgcataggcattcccggacaaatctgcgccattgacggcaatctggcgaaggtcgaagtgtgcggcattcagcgcgaagtcgatctcaccttagtcggcgcggtcgacgaccgcggtcagccgcgtctcggccagtgggtgctggtccacgtgggtttcgccatgagcgtaatcaacgaagccgaagcccgcgacaccctcgaagcgctgcaaaatatgtttgaagtcgagccggacgtcggcgcgctgctgtacggcgaggagcggtaa

SEQ ID NO: 258129 - DNA, 351 bp, Klebsiella pneumoniae
atgcacgaaatcacccttagccagcgggcgctggaaattatcgaacagcaggcgcagcaggccggcgcgcgtcgggtcaccggcgtgtggctgaaggtcggggcgttttcctgcgtggaggccagcgcgctgaccttctgctttgagctggtgtgccgcggcacgctggcggaaggctgcgagctgcatatcgccgagcaacaggctgaatgctggtgtgaaacctgccagcagtacgtgcatctcatctcgcagcacgtgcgccgctgcccgcagtgtcagagcgaccggctgcaaattgtggcggatgacggcttacagattcagcgaatagaagtaactcaggagtga

SEQ ID NO: 258130 - DNA, 924 bp, Klebsiella pneumoniae
atgagcgtattaattgcattgttgcaggcgctggtgctgttcgccgtcgcgccgctgttgtccggggtgacccgcgtcgcccgcgcgcgtctgcataaccgccgcggcccgggtgtgctgcaggagtaccgggatatcctgaagctgctgggccgtcagagcgttggcccggatgcttccggctgggtcttccgcctgacgccgtacgtgatggtcggcgtgatgctgaccatcgccaccgcgctgccggtggtgaccgttgactcgccgatggcggggctgggggacctgatcactctgatctacctgttcgccattgcccgtttcttcttcgctatctccggccttgataccggcagtccgtttaccgctatcggggcgagccgcgaagcgatgctcggcgtgctggtcgagcctatcctgctgctcggcctgtgggtcgcggcgcaggtcgccggttccacccatatcagcagcatcgccgacaccatttaccactggcccaccgcccgcactcttccgctgattctggcgttgtgcgcttgcgccttcgctacttttatcgaaatgggcaagctgccgttcgacctggcggaagcggagcaggagcttcaggaaggtccgctctcggaatacagcggcagcggcttcggcgtgctgaagtggggcatcagcctcaagcagctggtggtcctgcagatgttcgtcggcgtatttatcccgtggggacagatgaccagctttagcgtcggcggtctgctgctggcgctggtggttgccgtcgtcaagctggtgcttggcgtgctggtgattgcgctgttcgaaaacagcatggcgcgtctgcgcttttgcgccacctcccgcgtcacctgggccgggtttggttttgcctttttagccttcgtctccttgctggtggcgtga

SEQ ID NO: 258131 - DNA, 411 bp, Klebsiella pneumoniae
atgagcgagacggtggtgttcagtcagctgagccgtaaatttattgatgagaacgacgccacgcccgaccaggcgcagcaggtggtctattacagcctggcgattggccaccacctcggcgtgatcgactgccttgaggcggcgctgagctgcccgtggcaggcgtatctggcgtggattgcgaccctcgaagagggcagcaccgcgcggcgcaaaatggaaggcgtgccgaagtacggcgagatcgtcatcgatagcaatcatgtggcgatgctggccaacgcgtttgataaagcgcaggcccggcagacccccgagcagcaggcatggagcaaaaccctgctcagcatgctgcatgatattcaccaggaaagcgccatctatctgatggtgaggagactccgtgactga

SEQ ID NO: 258132 - DNA, 486 bp, Klebsiella pneumoniae
gtgactgacgttttactctgtgtcggcaacagtatgatgggcgacgacggcgccggcccgctgctggcggagatgtgcgcggctaatcccgtcggcgagtgggtggtgattgacggcggcagcgcgccggaaaacgacatcgtcgccattcgcgagctgcgccccgagcgcctgctgatcgtcgatgctaccgatatgggcctgaaccccggcgagatccgtatcgtcgacccggacgatatcgccgagatgtttatgatgaccacccacaatatgccgctcaactatctgatcgatcagctaaaagaggatgtcggcgaggtgattttcttaggcattcagccggatatcgtcggcttttattacccgatgacccagccgatcaaggacgcggtcgcgacggtgtacgcgcggcttgatggctggcaggggcagggcggtttcgcggcgctggaagcggcagaggagccggcgttccccggctaa

SEQ ID NO: 258133 - DNA, 1950 bp, Klebsiella pneumoniae
  misc_feature (1865)..(1874): n is a, c, g, or t
atgaacggggtgcagatccgcattcgcggtaaagtgcagggggtgggattccgccccttcgtctggcagttggcgcagcagctgggagtgcgcggcgacgtgtgcaacgacggcgacggcgtgctggtgcgccttgtcggcgatgatgcggcctttctcagcgcgttaacccgccgctgcccgccgctggcgcgtatcgatagcaccgaaactcagccgtttgtctgggccgtcgcgccgctggatttcaccatccgccagagcggggccgggagcatgcgcacgcagatcgtgcccgatgccgccacctgcccggcatgcctggcggagatgaacaacccgcaggatcgccgctaccgctatccgtttatcaactgcacccactgcgggccgcgctttaccattattcgcgccatgccctacgaccgcccgctgaccgctatgtcgccgtttcctctttgccccgcctgcgcggcggagtatcgccatcccgccgatcgccgctttcacgcgcagccggtggcctgcgccgagtgcggcccgcggctggagtggcgcggcccgaaggggcatttatttggtgaggccgctttagacgcggcgattgctcgcctgcgggcgggcgatatcgtggcggtgaaggggctgggcggttttcatctagtgtgcgatgccggaaatcgcgctgccgtggcgacgctgcgggcgcgcaagcatcgcccggcgaaaccgctggcggtgatgctggcggcgacggcagggctcagcggaccagcggtgacgctgctgacctctcccgccgcgccgatcgtgctgctggacaaagcgcaggtggctggcctgtgcgacctgattgcgccagggcttgcggaagtaggggggatgctgccgtctaatccactgcagcatttactttcgcaggcgctggcgcgcccattagtgatgacctccggcaatcttagcggccgcccgccagcgctgactaatgaagacgcgctggcggatttagccgcgattgccgacggttttctgctgcataaccgcgagattgtgcagcggatggatgattcggtggtgcggcaaagcggcgagatgctgcgccgcgcccgcggctacgtgccggacgcgctggcgctgccgccgggcttttgcgacgcgccgccgctgctggccctcggcgcggagatgaaaaataccttctgcctgctgcgcggcgatgaagcggtgctcagccagcattttggcgatctcgacgacgagggcgtcgaagaacagtggcgacaggcgctgcgtctgatgcaggagatttacgcttttaccccgcagcgggtggtggctgacgcccatcccggctaccgcgcttcgcggtgggcggcgtcgctggcgctaccggtggagcgcgtgctgcatcatcatgcccacgctgccgcctgcctggccgagcatcgctggccgctggacggcggcgacgtgattgccctgaccctcgacggcatcgggatgggggagaacggcgagctgtggggcggcgaatgcctgcgggtcaactatcgcgagtgcgagcgtcttggcgggctgccggcggtggcgctgcccggcggcgacctcgcggcgcgtcagccgtggcgcaatctgctcgcccactgcctggcatttgtccctgactggcaagattatcctgcaaccgccgcactgcgtcagcaaaactggccgctgctggcgcgagcgattgagcgcggcataaatgcgcccaaagcgtcgtcgtgcggacggttgtttgatgccgtcgcctgcgcgctgggctgcgccccgctcaccctgagctatgagggggaagcggcgtgccgtctggaaacgctggcggnnnnnnnnnnggggttgatcatccggcgacgctgccgtggcgcgatggaaaactggatctggcgacgttctggcagcggtggctga

SEQ ID NO: 258134 - DNA, 1134 bp, Klebsiella pneumoniae
atgagtgatggcatcgtcatcatcggctcgggcttcgcggcccgtcagttggtgaaaaatattcgcaagcaggacccgaacatcccgctgaccctgatcgccgccgacagcatggatgagtacaacaaaccggatctcagccatgtggtcagccgcgggcagaacgccgacgatctgaccctgcaaacggcgggcgagtttgccgagcagtacaatctgcgcctgtttccgcatacctgggtcagcgatatcgacgccgataatcaggttgtgaagagccaggaccgcgagtggcgctatgacaaactggtgctggccaccggcgcgacgccgtttatcccgctggtgccgggccgcgagctgatgctgaccctcaacagccagcgggaatacggcgcggcgcaaagccagctgcgcgatgcaaaaagggtgctgatcgtcggcggcgggctgattggctgcgagctggcgatggatttctgccgcgccggcaaagcggtgacggtggtggataactccgccagcgtgctgtcggcgctgatgccgccggaagccagcagccgactgcagcatcgtctgaccgacatgggcgtggatctgatgctgaagtcgcagctgcaaagcctggcgcagagcgccgacggaattcgcgtcactcttgaccgccagcgtacgctgacggtggatgcggtggtcgccgccgccggtttgcgcccggaaacggcgctggcgcggcatgcgggtctgcagacgcaccgcggcgtggtggtgaacagccagctacaaaccagccatccggcaatttacgccctcggcgattgcgcggaaatcaacggcatggtcctgccgttcctgcagccgattctgctgagcgccatgtgcctggggaaaaatctgctgactcagcagggagaactgaagctgccgccgatgctggtgaaggttaaaacgccggatttaccgctgcacctggcgggcgatacccggcgcgaggatctgacgtggcatatcgttgccgccaaagacggcctggtcgcgaaaggcgttgacgccgaaaaccagctgcgcgcttttgtggtcagcgaggatcgtatgaaagacgcctttgcgctgctcaagcagttggtgagttag

SEQ ID NO: 258135 - DNA, 414 bp, Klebsiella pneumoniae
atgatacagatcggcgcgaaaacgcccctccaccacctcctgacgcaggtcgcggttggtggccgccagcacccgcacatcaacccgcaggctgcgatcgtcgccgacgcgctgaatatcgccatactgcagcacccgcagcagcttggcctgcagcgccagcgacagctcgccgatttcatcgaggaacagcgtcccgttgtccgccatttcaaatttaccgctgcggttgctgatcgccccggtaaacgcccctttaacgtggccaaacagctcgctctccgccacgctctccggcagggccgcgcagttaaggtacaccagcggattggccgcccgcagcgatccctgatggaccgctttcgccaccagctctttgccggtcccggtctcgccgctaatcagcacgtttaa

SEQ ID NO: 258136 - DNA, 1488 bp, Klebsiella pneumoniae
atggattttcacaacctggcttactggcaacaaaaagcacgcgaactgacgattgagacacgcttatttattaacggcgaatacagcgccgccgccgataatagcgtgtttgccaccatcgacccggcagcgcagcagacccttgccgaggtcgcgcgcggcaaaaaggccgacgtcgatcgcgcggtccaggccgcccgcggcgttttcgatcgcggcgactggtcgcaggcgtctcctgcccagcgcaaagcggtgctgacaaaattcgccgacctgatggacgcccatcgcgaagagctggcgctgctggaaaccctcgacaccggcaagccgattcgccacagcctgcgcgacgatatccccggcgccgcccgcgcgatccgctggtatgccgaagctatcgataaagtctacggcgaagtcgcccccaccggcggcaacgaactggccatgatcgtccgcgaaccgattggcgtgattgcggcggtggtgccgtggaatttcccgctgctgctggcctgctggaagcttggcccggcgctggcgtccggcaacagcgtggtgctcaagccgtcggaaaaatccccgcttaccgccctacgtctggcgggcttagcaaaacaggccggactgccggacggcgtatttaacgtggtgagcggtttcggccatgaagccggtcaggcgctagcgctgcatcctgacgtcgaagtgattacctttaccggctccacccgcaccgctaaacaactactgaaggacgcgggcgacagtaatatgaaacgcgtctggctggaggcgggcggcaaaagcgccaatatcgtctttgccgactgcccggatctacaaaaagcagtcaacgcgaccgccggcggtattttttacaaccagggccaggtctgtatcgccggtacccgcctgctgctggaagagagcatcgccgaccgctttctcgatctcctgaaagagctggcaaagggctggcagccgggcaatccactcgacccgaataccactatgggcatgctgatcgacaacacccatgccgatagcgtccacagctttattcgcgccggcgaagcgcacagcacgctgctgctggacgggcgcaaaaatccgtggcccgcggcggtcggcccgaccatcttcgtcgacgtcgaccccgcctccccgctcagccaggaggagatcttcggcccggtgctggtggtgacccgctttaaaaacgaggagcaggcgctggcgctggccaacgatagccgctacggcctcggcgcggcggtctggacccgcgatctctcccgcgctcaccgcgtcagccgccgtcttaaagccggctccgtcttcgtgaacaactacaacgatggcgatatgaccgtgcccttcggcggctacaagcagagcggcaacggacgcgataagtcactgcacgcgctggaaaaattcactgaactgaaaactatctggattgccctggagtcttaa

SEQ ID NO: 258137 - DNA, 1074 bp, Klebsiella pneumoniae
atggccattgatccggaactattatatatagaaattctggagactattctgttggctacgctggattctcaattctggaaacccgcgctgcagaaactgtcgttactgacaggacatcagtacgcggcattgctttattatgacaaaggtaatgcgcatcttatgacggattcattactttttgatgaaaaagtctttacggcctaccgggatgtttttctggcaatcgatcctgccgaaaaaatattgacggggttgcctgtagggcagatgtacagagacagggagtttttaggagataaatttattgctaatagtatttattataatgaatttcatcaccctaatgatttaaattatcttaccagcgtcaaactaggtaccgtcaacggttatgccacttatttatcgctgatgacggctaatgaagcagcctatccacagcccacgcaatttgacctgttccggcgcctcatccccgcgttaattaccgccagccagcttcatgccagatttgaacaccttcgtgacacgattaaatatcagggtgccgtcatggacaacggtatttacccggtctggcttgtgggtcatgccggtaaaatcctttacgccaacacccgggccgaaaattaccaccgcgcgagccatagcgcgatctggtctgtcggcgctgacacgctgagcctgaacacagacagcaaaaaactgcggcatgccattgaacaggccacccggacggaggcgcgcccccgggcaggattatgctacaccgccgggcggcaagcaaagccgatcctggtcatcccgtcccccagcattcccggtgcggcttgcattatcatccccgagcctttcctcaccggcagcgcattcatggagctctttaatgtcaaacccgccgagaatgcggtagcagaactgctggtcagagggatgaccccggatgaatgcgccctgcatctcggcgtctccatcaccaccgtcagaacccaccttagtgcgctgtaccggaaaacgcatacccgtaatcaatccgagctgctgctcattatcagggctattcatagctaa

SEQ ID NO: 258138 - DNA, 573 bp, Klebsiella pneumoniae
atgtttttactaaaaacacacgcatcagtaattgttttattttttatttccgccgccgctcacgctaatgaagcctcctgtcaggctcagcagtcctgcggtgagcatgtcaacaaatatttaatttaccttgtatttttcatcgttatctttggtaccttgctttctattttagtcatccgcaattcacttcctaaagcgtggtctttagccgatgcgctttctgaagatgttgaattatccgctaccgaagaggttaaagccaccagggacggcactgataccgtgacaaagaagcctctttatgacgatgcaggcaggccgcggctggtcaaagaaatgaaagccagttcgagccggctcattgcgctaatcggcatgctggttattttgtttatgtatattggcttcggctcgttattgctacttgactttggccgcaatggaaaaatatccaaccctgacgccctgagtgaaatcattaaattcctgatagccggaatgacattatttgcgccttacctggtaaataaagtctcttctctctttcagggcttaacctcgagtaaatag

SEQ ID NO: 258139 - DNA, 1065 bp, Klebsiella pneumoniae
atggatactatcaacaagcgtatattcatcgcgactcgctatcctgtcagcacgcagcatggtcgcccaccgatagcgtttttagaacagttagtcgatactttaaatgctttacctgatgaggtttttgctgaaaataagcttcatgatatctatgccgtaatgaaaggggctctcgggccttacactagtcttttacaccgtaaagccgtcatgtgtgaagtgcttcgcgttcaggcggggtttgaatcagactggcgctgggatgccggcgttgattccgaaaacgcgcgttcaatggctcacatggaaagcgaggaaaccggggcgtttcaggtgtcatttgacagcatcggcaatggaaaggcggaactcctgaattttgctaaacagcatggcattgatacagctgaaaaattcattacaaaaatgaaaacagaccacccgctggcgatagagtattgtgcccgactgttgcgtttcagcaccagctggtgcggtaccatcgtaaaccccgcgatggttatctctcacgtgcgacgcgatgccgtggaagaattccagacatttgttacgctacatacgcctcctgtgatgtttgccgatagcatcacgccgctgagcgacaaagaaaaaatgctcgacgtagtcaatattgccacaacgccggatcgttatgaaaaagttcaggccgtcgctgcgattgagcttttcaaattagcccatgagcagtggccgcatgatggttgcgccctgaacctggctaacctgttacaggccggagggattgccgttcccgatattacgcaggcattagctttgagtaactatcttcgtgataaacgacaatggaaagtcatttctgtgggtgatcaacagcccggcgatgtcggttccacctgcggtcccgtagcgcaccacggttacgatcatatttatctggtgctggaatgcgaaggtaacgacataatgctcattgccgataatcaaaaaccagtccctcatcaacgactagccagtggaaatggcaaaacacccacaactttctttttgcggccagtctga

SEQ ID NO: 258140 - DNA, 297 bp, Klebsiella pneumoniae
atgacgttttccacccttgccgatgtcagaagccagatcgattcgattgatagcgaattggttagcctgattgctcagcgcgctacgtgtgttcaagccgccgccgcatttaaaacagaccactcagccgtacgcgcgccagaacgcgtgcagcaggttattgatcgggttcgcgaaaaagcggctgcggcagggttgcccgaagtgattattgagaaagtatatcggtccatgatagatgcctttattgagtatgagcttgagcagcataatcagctacagcggcaaaaaaggtaa

SEQ ID NO: 258141 - DNA, 549 bp, Klebsiella pneumoniae
atgactattcatggaaaggatcgtgtatttatttctggcgtagagactctattgcaggagctgaacgatggcgcggatgcagggttaagcaactgcgtgtatgtcacctgcgggatggatatccaggagatatacgctttgttctttcgccatccgccggagcactacgccatcttcatcacctctgagcgccattttgaggctatcaaccggctgtttccgggcctgctaaagctctgtttgtcagagaggttgacggtcgaagagctgcgtcaggcgttaaaagtgatgggcctgttttcggcccagaaccaaagcgttgcttatctgcccgatacgtttaattttacccacgccgagcaacagatcatgaggctcagtttacgcggccattctctggatgatattgcccgtatccgcggggtcagtccgtccacggtcagcgtccagcgtacccggctgatgaagcgtatggggaccaacagcctgcaggagctatgctcgctgtatgcggctatgcgtacccagcgaccaccgctgtccggctaa

SEQ ID NO: 258142 - DNA, 354 bp, Klebsiella pneumoniae
atgattcatttaattattgaagatcgggaaaacgcgctgatctatatcccgcttatccgccgccattttccccatctcgctatcaacgccatcaaacagaacctgaacgcttcgggttacgtcacgtcatttgatgaagacacgatctgcgcagacattctggaagagcagaaccccattggaaattttcttaatctcatcaaggtattaaagcatcgaggcgcgcggcttaaattcatcgaacaaacgggagatgaaccgggagatgaattactcttgagccaggtgttgaactatgtggaaagaggtctcgaaatcgcccgtcagagagagcgagaggatgaacaggactga

SEQ ID NO: 258143 - DNA, 291 bp, Klebsiella pneumoniae
atgagagaattaaccgcaattgaaatcgacgccgtaagcggcgcaggctggttacaggatagtctcgcttctataggtgcaaaagctggcgccgccgtgtggtcgctcagcagcgatatgttgaacattgaactgccgattataggcactatcaatctttcaactattgctcccgatttaggcaaaaccgtaggcgagacggttggtttcaccgttggcggagccattgagagtaccctggcaggcctgccggtaatcggtggtctgctcaataaacttctcggcaattaa

SEQ ID NO: 258144 - DNA, 1050 bp, Klebsiella pneumoniae
gtgctcttcgatcatgccctgagtccggctcaggaacgaaacctggagcgcttatgcgaatgtcgggttatcgatcgtaccggcctgattttagatatttttgcccagcgagcgcgtacccacgaagggaaactgcaggtcgagctggcgcagctgcgtcacatggcgactcgcctcgttcgcggctggacccaccttgaaagacagaaaggcgggattggtttgcgcggcccgggtgaaacccagctcgaaactgaccgccgtttgctgcgtaaccgtattatgcagatcctggcgcggctggaaaaagttgaaaaacagcgcgagcagggacggcgttcacgcgccaaagccgatattcctaccgtgtcgctggtcggttataccaacgccggtaaatccacgttgttcaaccagataactgaagccgaggtctatgctgcgaaccagctgttcgccactctggatccgacgctgcgccgcattgacgtccctgatgttggcgaaaccgtactggcggataccgtaggttttatccgccacctgccgcacgacctggtggccgcgtttaaagcgacgctccaggagacgcgccaggcgacgctgctgctgcatattattgatgcggccgatgtgcgtgtgcaggaaaacattgacgcggtaaatacggtgctcgcggagatcgaggccgatgagatcccgacgctgctggttatgaataaaatcgacatgctggatgattttgagccgcgtatcgatcgagatgaagaaaataaaccgattcgggtctggctttccgcccagaccggggttggcgtaccgctgctttttcaggctttgacggaacggctttctggtgaagtggcgcagcacacgctgcgcctgccaccgcaggaaggccggttgagaagccggttctatcagcttcaggcgatagagaaagagtggatggaggatgacggtagcgttggtctgcaggtgcgcatgccgatcgttgactggcgtcgcctctgtaaacaagagccagcgctggttgaatacgtgatttga

SEQ ID NO: 258145 - DNA, 765 bp, Klebsiella pneumoniae
ttggtctgcccgaaaccttggccattactggactataaagagtggagaaattttcaaaaggtaatctcaaaagcgataatttcatgtgaggcgagcggtcagctaccctcagaccattttgttgagtccaacaaaatggtcgaattgggttccggttccagcaggaatcttgaagacattcatctatcccgcgacgcctgctatctggttgtgcaaaatggcgatccgtcgaaaccggtcattgccgcggggcaaacctactttgcgttgcaaacccggcgtcaggaactgaaggacgatcaaacctttaaatctctacgagaggatgagaagcggctatttttgcgcaatgagctgaaagaacataataaacaccttgttgaaacggcccagctagcgggcgtacagacaacgctggatttcgctattttccagaaccatggctataaaggcctctacggtggtctggatcaacaagcgattcatgagcgtaaagggctaaagaaaagccaaaaaattctcgaccatatggggtctactgagcttgcagccaaccttttccgcgctacccaaacggaagaaaaactgcgccgggatgaggtcgatacgaagcagctggccaatcaaacccattatgaagttggccaaaaagtgcgtcagacgattaacgatcttggcgatacgatgcctgaagcgttcccttccccggagaaaagtattcagcagctgaaaattgcggcgaaaaataaaggcgtgcctgaatag

SEQ ID NO: 258146 - DNA, 945 bp, Klebsiella pneumoniae
atgaaactgaaaatattaaagcaagcatcattgcctgaccaacttacggcggagctgaacagtctgtatgaagtttatgaatatgaggcgcttacacgcgaagagttggcagtcctggctgaacaattcactattatgatcaccaatggtgaggccaccgtaacgcgccagctgatttccagcctaccctctctggagcttattgctgtgtttggcgtgggttatgatggggttgatgttcgtgctgcggcagatcatcgtgtggctgtcagccatacgccgggcgtattaacggatgatgttgctgatttagcgatggggctgatgttggcgacatcgcgacaaatcgtttctgcacagaagtttattgaggcgggaggctggcgtcaggggggctttcagtggacgcgtaaggtctcgggctcgcgtgttgggatcgttgggatggggagaattgggcaggcaatagcccgacgctgcgaagggtttgcgatgcagattgcttatagcgatcggaaagcaataccggggctggattatccgtggattgaggatatttcaacactggcgtcacaaacagattttttagtgatatgtacgccaggaagtgcggaaaaccaggcgcttattgatgaacgggtactctcggctctgggcgcgagcggcattttaatcaacatttctcgcggcagcgttgttgatgaatttgctctgataaaagccctcgaacaaggaattatcgccggagcaggattggatgtttttagccaggagccagaagtgccgcaggcgctcctgcgccgcgcgaacgtggtggtcacgccacatatggcaagcgcgacctggagtaccagggaggatatgtccaggttagttcttgaaaacgtgtcgggatgggcaaaaaataagactttggttacgcctgttcccgcgcttgaaccatag

SEQ ID NO: 258147 - DNA, 1311 bp, Klebsiella pneumoniae
atgagcattgaactctatacatctacactaaaaaaactcaatagcaaaataataccttttgtgattatttgctattttgttgcaaaccttgataaaaccaatatttctattgcggccttacaaatgaatgcggatttaggtctgacagccagcatgtatggtctcggggtgggaatgttctatatctcctatattatttttgaaattcccagcaatgttattatgacccgcataggtgcccgtatttggattgcgagaataatgataacctggggtattgtaagcgcagggatgtcgctggtacataccccaacgcagctctatgtgatgcgctttttgttgggaatggcagaggctgggtttacccccgggattatttattatatttcctgctggttccctaaaagtaatcgagctcgcgctatgtcattcttttatatggggtcggttctggcatcaattattggtttaccaatatccgggtttattttgaatatgcacggtattgctgatatcgctggttggcgttggttatttgcgatagaaggaatcccggctattatccttggtgtgatggttttatggttgctgccatcgagtcgtgaaaaagcacactggttaacgggttcagaaaaagaatggttagtatcacaattagaggaagataatcgaaatgtaatggtcaataaaaatcattcgtggctgagcgctttgaaaaataaagttgtgctcttattaagtttggtgtggtttttacaagctttcggttctattggtattaccttgtttttacctttgattctaaaaagcatcgccagcgagcaaagcaattttgttattagcttactatccgcggtgccgtttatttttgcctgcttatttatgtatcttaacggccggcattccgatctcaccaaagagcgatcgttgcatatggggttaccattgattcttgccggcgtatcgctgggggtggctatctattcagataacctactgatctcttatatcctgctggtgcttaccgttgggttcaactttgctctgacccccgttttttgggcggtcaccactgaaaagcttgctggcgttgcagcagcagcctcaattgcttttattaacactatcgcgaattttgttggcttaggcctgcctcctgttttaggcaagattaaagatgtgacccatagctatcactacggcctgcttattgttgctatcgcactggtattaggaggaattatcggtatagccgtttcgcgtactggtaaagatacctccttaaagcactctgcccactcttccttataa

SEQ ID NO: 258148 - DNA, 876 bp, Klebsiella pneumoniae
atgacatctcgctacatcgcaattgactggggatcgaccaacctgcgctcctggctttatcaggacgaccagtgcctggagagcaggcaatcggcagcaggcgtcacgcgtttgaacggagaatcccccgcggcggtgtttagcgaaataacccggggctggcgcgacggcgcgaccccggcggtgttggcaggaatggtcggtagcaacgtcggctggaaggtggcgccctatttgcccgttcccgttgatttctccgccattggccaacaattgacgtccgttggcgacaaagtctggattattcccgggctgagcgtctcccgcgacgctaaccagaatgtgatgcgcggcgaagagactcagctcctcggcgcgcggatgattgccccttcttccatctacgtgatgcccggcacccactgcaaatgggtgcaggccgaccgccaacaaattaacgactttcgcacggtgatgaccggcgaactgcattatctgctgctgcgccactcgctggtcggcgccgggttaccggagcaggtctccgctcccggcgcgtttaacgccgggcttgagcgcggcctgcattcgccagacatcctgccgcggctttttgaggtgcgcgcttcgcacgtgctggggtcgctgccgcgcgagcaggtcggcgagtttctgtcggggctgctgattggcgcggaagtcgccaccctgagcgaacgctttcgcgacccgcaggtcaccattgtcggcggcgaggcgctggcgaaccgctatcagcaggccctgagcgccattggccgtcagaccaccgtggtgtcaggtgataacgcatttcagacaggagtaaggagcatcatccatgcagtggcaaactaa

SEQ ID NO: 258149 - DNA, 525 bp, Klebsiella pneumoniae
gtgatcgtgccgcgtaaaggcgtgattgagctgatgcgtatgctcgacggcggcgatacgccgctgcgcgtgcagatcggcagcaataatattcgcgctcacgttggcgactttatcttcacttcaaagctggtggatggtcgttttcctgactatcgccgcgtactgccgaagaatccggataagcatctggacgccggctgcgatattctcaagcaggcctttgcccgcgcggcgattctttctaacgaaaaattccgcggcgtgcgcctgtacgtcagtgaaaatcagctgaaaatcaccgccaataacccggaacaggaagaagcggaagaaattcttgatgtcacctatgccgggaccgagatggaaatcggctttaacgtcagctatgtgctggacgtcctgaacgcgctgaagtgtgagaacgtgcgcattctgctgaccgattccgtttcgagcgtgcagattgaggatgcggcctcccaatccgcagcatacgtcgtcatgcctatgaggctgtag

SEQ ID NO: 258150 - DNA, 735 bp, Klebsiella pneumoniae
atgaagataaacgtaattgcaaaaggaattttatgcctggcgggcgccagttttgcggccaatgccgccgtatctcctgacagaactcgcatcatttataaccaatcggataaaagcgtctcggtgcgtctgaccaaccagagtcccgacacgcctttccttgcccaatcatggatagaggacaaggataataaaaaatctcgtacttatatcaccgcaataccgccaatgttgcgccttgaagccggcgagcaggcgcaggtgcgcctgatggggcaagcaacgctggcgcagcttcctgccgacagagaatcgctattttattacaatattcgggaaattccgccgcgttcagaacagaaaaacgttatgcagattgccatgcagagccggattaaacttttctggcgaccaaaggctatcgaaatacctgatggacaggtaaatctggtcggcaaagtcgacattagccgaaccgccagtggattgacgctgaagaacaagtctccctactttattactgtcggttatatcggcgttaacggcaaaacattgctaccgaaaaccgccagcatgatggcggaaccctttggccaggcggtccaggaaattaaaaatttaccggcgaatttccaggtcggctatattggcgattacggtggcctgcatatgtttaagatcagctgcaactctgttcaggcaacatgccagtccgaaccggtgaaaaaggaataa

SEQ ID NO: 258151 - DNA, 1053 bp, Klebsiella pneumoniae
atgaaaaaagtaatcagttttttagcattattagcctgcctgttttcattccctgcgtgggcggttgactgctatcaaaatacctatggcggcccggtgagcgcaacgctaactctccccccattcaccatccctaacgacatccagctagggaaaaagatatgggaaagctcggacattaacattacggtttactgcgataacgcgagcgaatggtctccatcgaaacccacagaaaatatctatgcgtggataaagttatcagcttttaatagcggcgatgtgctcaacaatccctattttacttttggcgtaacatatgccggtgtcgattatgaaggcattaatcaagggatcaacaccggcgcctgtcttgatagacaggatcactatctaatcccaagtatctttcatgatcctgtatgtaatggttcgtcattgcaaaaaaatataacctttaacgcccgcttccgcctgtacgttaaaatagcagcgattcctcctgatagctcaacggtctataattttggcgatattaacgtactgcagtttgatggtgaagggggagcgaacctgcttagcaacgctaaaaatttacgttactatatttcagggctggataatatccatattctgacctgcacagcatcagttaagctgtatcctgaaaatcaaactgttgatttcggagctatttataactacgaaaaaaacatgccggtcctgaaaaaaaactttagtctttcaactattcgagatcaaactgcaggctgcactgaacgatttgatattactaccagtttctatattaatgaaaatctctatgattccacacatctggatatagggaacgggctattattaaatatcgtagatgacacggctaatactgatgttcttttcaaccaatatatgccttttacaacatatatacccggtgaaccttcaacagtaacgcataactataccgccgaactcactaaaaaaccgtctgaatctgtggccgatgggccattcagtaaagatgtcatcatcaagataaattatcaatag

SEQ ID NO: 258152 - DNA, 633 bp, Klebsiella pneumoniae
atgttgatcgtcaaaaaactcaccctgcgcctcaacggagagccgctgctgcgcaacgtcgatttttccgttgctcccggcgaggtcctgaccctgatggggtcatccggtagcggcaaatcaacgctcttctcctggatggtcggtgcgctggaagagagtttctgcgccgccggcgagctgtggctggataaccagcgctgcgacagtttacccaccgagcggcggcgtatcggcattctgttgcaggacgcgctgctgttcgaccacttcagcgtcgggcaaaatctgctgctggcgctgcccgctgacgtccagcgttcccagcgtaaaccccgggtagaacaggcgctggagcgtgccgggttagcggggttctacaggcgagatccggcaaccctttccggcggccagcgggcgcgagtcagcctgctgcgcgccctgctggcccggccgcgggcgctgctgctggatgagccgtttaatcgcctcgacgtggcgctgcgcgccgattttcgccgctgggtgttcaacgaactggcgcggcaggcgatccccgcggtgctggttacgcatgatgaccaggatacgcccgtcggagggcgctgcttgcatatgaggctctggcaatga

SEQ ID NO: 258153 - DNA, 1536 bp, Klebsiella pneumoniae
atggctgcgccgctacggcacgcactaaggctgctgacctgggccgccgtcgcgctgatctatctgccgctgctgccggccgcggcgctgatggcgcttccggctcttcgcctctccctctggcaatcgctatttgccgacccgcagtttggccaggcgctggcggcgactctcgtctcaaccctgctgtcggtgggcggcgcgctgatcatcacgcttaccgtcgtggccgcgctctggccgtcgggcggctggcgacggctggcggccaggcttccgctgctgctggcggtgccccacgtggccttcgctaccgccgctctgctgctgtttgccgaaagcggctggctctctcgccttttcccactcttttccccgccgatcgaccgctacggcatcggcctgggcctgactatggcgatgaaagagagcgcgttcctgctgtgggtggtttacggtctgctgggtgaaaaacgcctggccgaacaggcaacggtattaaaaagcctcggctacggacgctggcagtgcctgacgtggttggtgttacccaccctgcttccggcgctgtcggtagtgctgctggcgactgccgcctggagcctttcggcggtcgacgtcgcgctggtgatcgggcccggcaacccgccgaccctggcggtgctggcctggcaatggttaagccagggcgatgagcgccagcaggcgaaaggcgccctcgccagtctgatactgctgctggccctcgccatgatggcgctggcggcatggggagtctggcgtctctggcgacgacggatcccgccggttgaggggatccgtcgcccgcagccgcgggcgctcgccgggaaaagcttcgcccttcttctgccgctgtgcggggtggcctgcgccctgctgcttgccgcggcggcgcagaatagccagccggtccacgatagcgtcggcaacagcctgtggcttgggctatgctcagcagcgatcggcgcggtcatctgtctgctatggctgccgctgggcccctcccgcttcggcgaatggatctggctgccgctgattttaccggcgctgccgctggtggacggccaatatcagctggcgctgtatacgtggctggacggcgagcgactcaccgttttatgggggcatctgctgtgggtcgtaccgtggatgctgtttattctgcgtcccgcgtggcgcgctcgcgatccgcgcgcggagctggtcgcccgcaccctcggctggcaacgaggccgcatcttctggctggtcaccttacctgccctgacccgtccgctgctgacggcgctggcggtgggcttttcggtaagcatcgcacaatatctgccgacgttatggctgggaggcggacgggttgcgaccctgaccagcgaagcggtggcgctgagcagcggcggcgatacctccaccctcgccgcgcaggcgctgtggcagctgctgttaccggcgctgttttttgccgccaccgcgctgctggcctggctgatcggccgctatcgacaaggattacgctaa

SEQ ID NO: 258154 - DNA, 738 bp, Klebsiella pneumoniae
ttgaccgccgcgcaatacaggagaacccaatgcaaaagaagccgtcataaagcagagtataagctgctttttgttgtcgtcgtattgagcattgtcgcctgtattattcagcagtcgggttttgccgagctggttacccattttgatcgtctgcgcgaggccatccgccagagcggcgccttcggctatacgctctatattctgctgtttattgtcgccaccctgtttttaataccgggctctattttggtgattgccggcggcgtcatttttggtccgctcgcggggaccttgctgtcgctgttggcggcgacgttcgcctcttccctgtcatttctgttcgcccgctggctgggccgcgagctgctgatcaaatacgtcgggcagacggcgatatttcagactattgaatacggtatcgcccatagcggcagcgattttttaattctgacccggctcatcccgctgtttccctataatatccagaattacgcctatggcctgacggcgattccgttctggacgtttacctttatttccgccctcaccaccttacccggcatatttatttacacgctgctggccagtgagcttattcgcgacgggatcacctctctgtttatgctcaagctgacgctcgcggggctggtcttatttgccctgattcaggcggcgaaaagatatgcccgctatcggcggatcgcgacgccacggttactgtctaacgatgaaaaatag

SEQ ID NO: 258155 - DNA, 966 bp, Klebsiella pneumoniae
gtggacgactttctggcactcactctggcggggcgtttgccccaccattttcatggtcaaaacgcgcagttccgctggcactggattgactgcggcattctgcagctcgttccccatgagccctgcgatcggtcgctggttttgtcatccgggcttcacggcaatgaaaccgcgccggtcgaaatcaccgatctcctgctgcgtcagctgtttcgtggggaaacgccgctccgctggcggctgctggttatcttcggtaaccctcaggcgttaagggccaacaagcgttatctgcatagcgatatcaaccggatgtttggcgagcgctggcgggcctttagcgccagcgatgaaaccgttcgcgcccggcagctggagcatgccctggcgcggttttatgccgcgacggctggcgagcgctggcacctggatttacataccgccatacgcggttcgctgcatacccgctttggtgttcttccggcgagagaaaaaccatgggatgaaggttttttgcgttggctgggggcggcagggctggaagcgctggtgtttcatcagcagcctggcgggacctttacccatttcagcagcgaacgtttcggcgcgctctcctgcacgctggagctcggcaaggcgctaccttttggcgataacgatctgcgcctgtttgtggccacccaacgcgcgctgttgctgctgctggcgggggagttgacgctggaggatgagcacacgccgctgcgctacagggtggtacagcaaatcacccgcagcagcgacaggttccagctgcatatgtcggcgcagacgctgaactttacgccgttttcgtccggaacgttgcttgccgaggatggcgacacccgctacgtggtggaaggggagcaagagtacgttttgtttcccaatcccagcgtcgctttcggccagcgcgccgggctgatgctgcagcgcttccagtga

SEQ ID NO: 258156 - DNA, 780 bp, Klebsiella pneumoniae
atgcaccagcggcaaagcggcctccggcgccggagcgtcggcaaggatcgaccgaggccaggtatagaccacggtcagcccctccccccgcgccagaggccgcagggtgcggacgctaccgtcaggaagaacttgcgcattgtgttctttcgcccctgcgacaccggtataaacatcaagcgatcgcagtctggcgtccttagcgtcagcgttgagatttccaacggcgtccgggagttcaagatgaaagctggccatgctgataggccacgcccagtcgttgcccgtcacgttccagtaaagctcatcccactcggggaagcggctgaaatggttgctgatttgatagcgaatttcgtagttatagatcccgggtttcaggacccgttcgccgctgccaatgcgtaccgtcagttttttttctgcttcgtcaaggctaaaaggctcaggcacgccatcgcgcgacaccgactctatcgcgtaatacacgcgaaagatcttgccgtcctgacggttccaggtcagcggcagcgtacggaaaatcccccgccgaatctgcctgcccagagaaagtactttgatattttctcgcatctccatactaccgtccgggttaaagcgcgcccgggcatcgaaagagaggatatgttcatacgctggaatagcgtcagcgggaagctgggaggcatccttgatgatgatcatgtcgtcggcggcaaaagccgcactgatgttcaaaagcagcagcaggacgagggtgcgccccccctgaaaaagtaa

SEQ ID NO: 258157 - DNA, 1149 bp, Klebsiella pneumoniae
atgagtctgaaagagaacacccaagccctgtttgctgagaaatttggctatccggccagccatgttatccaggccccaggccgcgttaacctgatcggcgagcataccgactataacgacgggttcgtactgccctgcgccattgattaccagacggtcatcgcctgcgcgccgcgcgacgatcgtaccgtgcgggtgattgccgccgattacgccaatcagaccgatgaattctctctcgactcgccgattaccagccacgatacccagcagtggtcgaactatgttcgcggcgtggttaagcacctgcagcagcggaataacgctttcggcggcgcagatctggtgatcagcggcaacgtgccgcagggcgccggattaagctcctcggcttcgctggaagtcgccgtcggcaccgtgttccagcagctgtaccatctgccgctcgacggcgcgcagatcgcgctgaacggccaggaagcggaaaaccagttcgtcggctgcaactgcggcattatggaccagctgatctccgcgctcggtaaaaaagatcatgccctgctaatcgactgccgcaccttaggaacgaaagcggtgtcgatgccgaaaggcgtggcggtagtgattatcaacagtaactttaagcgcaccctggtcggcagcgagtacaacacccgccgcgagcagtgtgagaccggcgcgcgtttcttccagcagcccgccctgcgcgatgtgactttacaagaattcaatgccgtcgcccacgagcttgacccggtggtcgccaaacgcgttcgccacgtgctgaccgagaacgcgcgcaccgtagaagccgccgccgcgctggaaaaaggcgacctgcagcggatgggcgaactgatggcggaatctcacgcttccatgcgcgatgattttgaaatcaccgtcccacagattgataccctggtggacatcgtcaaggcgaccatcggcgataaaggcggcgtacgcatgaccggcggcggtttcggcggctgtatcgttgcgctggtgccggaagatttggtcgataccgtacagcaggccgttgccaaagagtatgaagcgaaaaccggtatcaaagagaccttctacgtctgcaaaccgtctcagggagctggacaatgctaa

SEQ ID NO: 258158 - DNA, 1017 bp, Klebsiella pneumoniae
atgaaagtactggttacaggtggtagcggttacattggaagtcacacctgcgttcaactgctactgcagggacacgaagtgattattctcgacaatctctgcaacagtaaacgcagcgtactgccaatcattgaacgtctcggcgggaaaagcgccacctttgtcgaaggcgacattcgtaacgaagcgctgatgacggaaatccttcacgatcacgctattgaagcggtgatccatttcgccggcctgaaagccgtcggcgaatccgtcgccaagccgctggaatactacgacaacaacgtgaccggcacactgaaactcgtttccgccatgcgcgccgcgggcgtgaaaaactttattttcagctcctccgccaccgtgtacggcgaccagccaaaaatcccttatgtcgaaagcttcccgaccgggactccgcagagcccgtacggtaaaagcaagctgatggtcgagcagatcctcactgacctgcaaaaagcgcagccggagtggagcatcgcactgctgcgctacttcaacccggtcggcgcgcatccgtcgggcgatatgggtgaagatccgcagggcatcccgaacaacctgatgccgtatatcgcgcaggtcgcggtcggccgtcgtgaatcgctggcggtattcggcaacgactacccaaccgaagatggcaccggcgtgcgcgactacattcacgtgatggacctggccgacggccacgtcgcggcgatggaaaaactggctgataaagccggcgtgcatatctataaccttggcgcaggcgtcggcagcagcgtgctcgacgtggtcaacgcttttagcaaagcctgcggcaaaccgattaactaccacttcgcgccgcgccgcgaaggcgacctcccggcctactgggcggacgctgaaaaggccgatcgcgagctgaactggcgcgtgacgcgcaaccttgacgaaatggcgcaggacacctggcactggcagtcccgtcatccgcagggttatccagactaa

SEQ ID NO: 258159 - DNA, 477 bp, Klebsiella pneumoniae
atgaatagccaaaatagcgacgttaatcacgggcaaatcaccctcctccccgcagctgatagcgactttgcccagtggctgccgctgtggaaaagctaccagacgttttatcgcgtcgacattccggaggaggtgacgcgcctgacctggagtcggtttttaaatccggtcgaaccgatgttttgcgccgtggcaaaacgtgagggaaagatagtaggattcgttcattatctcttccaccgctccacctgggccgaaagcgactattgctatctggaagatttattcgttgatccggacgtccggggtcagcatatcggtaaacaactgattgagtacgttcaacggcaggcgcggaaacgccattcggccagcctgtactggcatacgcatgagaccaaccttcggggccagcgtctgtataactgggtcgcggaaaaaagcggcatgattgagtatcgtatgcgggtgaagtag

SEQ ID NO: 258160 - DNA, 1470 bp, Klebsiella pneumoniae
atgccaaaacctattgcaccgctgtttcaggaactgttgctcccgcgcggcgttatcaaagatcaggtgtatcacgccctgcgtaacgcgattctggatgggcgcttaacggcgggttcaaaaattccctccagccgggcgttggcagagatgatggcgatctccaggaattcggttatctctggttttgaccgcctgatggatgaggggtatctggtgacgcgtaagggcgcgggcacctttgtctgcgaacatattccggatagcgtcattagcgagtatgaatcgtcgccaaagccggaaacggcaatagccgccgcagggccgcttaatcctgacgttgccgcattgctgccatcatggtccgagagggaagagagcggtgaaatgcgtcaggtttttgccgtcggtatcggctgtaccgatctcttcccgcatgcgttatgggggcggctgctggggcgcgtctggcggcaatcgcgccgcgaactgggggcgcacgccacggcttatggatatctacctttacgacaggcgattagccactatattcaggcgacgcgcggcgtaaattgccatgaagatcgggttattattgtcaatggtattcaacaggcgctggccattaccgctcaggttttactggaaaagggcgatgaagtctggctcgacgatcccggctataatggcgcgcgcggcgcattcgccgcccggggagcggtggtccggcccgttcgcgttgacggtgaaggcatggatattcaggatggaatacgtcattacccgcaagctaagctggtctataccgcgccgtcgcatcagttcccgctcagtggaacgcttagcctgccaagaaggcttgctttgctggaatgggcgcaagccaatcgggcgtggatatttgaagatgattacaacagcgaattccgctatgccgcccgctctttacaggcgttgcaagggttggataaacatcagcgggtcatctattccggtaccttttctaagatgatgtaccccgagtttcgtctgggttttttagtggtccctgagcatttgcgcgaacagttcgccatgacgaaatattacaccgatctctgtagcggatatctggaacaggccgttctggcgcgttttatccgcgagggacactatgccagccatgttcgtcgtatccgtaaagcctgttttgagcgaaaaagcgcgctggaggcggcgattgagcgctattttgccgggcgcatgcgggtgcatccaacggattcgggagtgcatatcgtctgctggttagcggatggtctaaaggcaaaagaggtcgtcgctaaggcgcgccagatcggtttaggcgtgcagagttttgagcgatattgccagcggccgatgtcgcgcgagggggttttattcggttttgccaaccatccgccagaggtgctgctcgacggcgttcgccgcctggccggggtgctgtag

SEQ ID NO: 258161 - DNA, 1593 bp, Klebsiella pneumoniae
gtgctagtatccagcaacgtcaccatgcagttcggcagtaagccgctgttcgaaaatatttccgtcaaatttggcggcggcaatcgttacggcctgattggcgccaacggtagcggcaagtccacctttatgaagatcctcggcggcgatcttgagccgacgctgggcaacgtctccctcgacccgaatgagcgtatcggtaagctgcgccaggatcagtttgcgtttgaagagttcagcgtgctggatacggtcattatgggccacggcgagctgtgggaagtgaagcaggagcgcgatcgcatctactccctggcggagatgagcgaagaagacggttacaaggtggctgaccttgaagtgctgtacggcgagatggacggctactccgccgaagcgcgcgccggcgaactgctgctcggcgtcggtatcccggttgaacagcattacggcccgatgagcgaagtggctcccggctggaagctgcgcgtgctgctggcgcaggcgctgttctccaacccggatatcctgctgcttgatgaaccgacgaacaacctggacatcgataccatccgctggctggagcagaccctcaacgatcgcgacagcaccatgatcatcatttcgcacgaccgtcacttcctgaacatggtttgtacccacatggcggatctggattacggcgagctgcgcgtttacccgggcaactacgatgaatatatgaccgcggcgacccaggcgcgcgaacgtctgctggcggataacgccaagaaaaaagcgcagattgccgacctgcaatctttcgtgagccgctttagcgccaacgcctctaaatctcgccaggcgacctcacgcgcccgtcagattgacaaaattaagctggacgaagtgaaagcgtccagccgtcagaacccgttcattcgctttgagcaggataagaagctgttccgtaacgctctggaagtggaagcgctggcaaaaggctttgacaacggcccgctgtttaaaaacttcaacctgctgctggaagtgggggagaagatcgctattctgggcgccaacggcgtgggtaaatccacaatgctgaaaaccctggtcggcgacctgatgccggataacggtaccgttaaatggtccgagaacgcgcagattggctactatgcccaggatcacgaatatgaattcgaaaacgatctgacggtatttgagtggatgagccagtggaaacaggaaagcgatgacgaacaggcggtgcgcagcatcctgggccgactgctgttcagccaggacgacatcaaaaagccggcgaaagtgctctccggcggcgaaaaaggccgtatgctgttcggtaagctgatgatgcagaaaccgaacattctggtgatggacgaaccgaccaaccacctggatatggaatcgatcgaatcgctgaacatggcgctggagatgtatcaggggaccctgatttttgtttcccacgaccgtgagtttgtgagctcgctggcgacccgggtgattgaaattacgccggagcgcgtggtcgacttcaccggtaactacgaagattatctgcgcactaaaggtatcgaataa

SEQ ID NO: 258162 - DNA, 1932 bp, Klebsiella pneumoniae
atggtagaaggttcctgcaaagcgtacgatcgcgagctggacccgatgctgaagaaaatcttcaccgaataccgcaaaactcataaccagggcgtgtttgacgtatacaccaaagacatcctgaactgccgtaaatctggcgttctgactggtctgccggatgcctatggccgtggtcgtatcatcggtgactaccgtcgcgttgcgctgtacggtatcgacttcctgatgaaagacaaatacgctcagttcgtttctctgcaagagaaactggaaaacggcgaagatctggaagcaaccatccgtctgcgtgaagaaatctctgaacagcaccgcgcgctgggtcagatcaaagaaatggcggctaaatacggctgcgatatctctggtcctgcaaccaccgctcaggaagctatccagtggacctacttcggttacctggctgccgttaaatctcagaacggcgcagcaatgtccttcggtcgtacctccagcttcctggacatcttcatcgaacgtgacctgaaagccggtaaaatcaccgagcaagacgcacaggaaatgattgaccacctggtcatgaaactgcgtatggttcgtttcctgcgtactcctgaatatgatgaactgttctctggcgacccgatttgggcaaccgaatctatcggcggtatgggcgttgacggccgtactctggtcaccaaaaacagcttccgtttcctgaacaccctgtacaccatggggccgtctccggagccgaacatcaccattctgtggtctgaaaaactgccgctgagcttcaaaaaatacgctgcgaaagtgtccatcgatacctcttctctgcagtacgagaacgatgatctgatgcgtcctgacttcaacaacgatgactacgccatcgcttgctgcgtaagcccgatggttgttggtaagcaaatgcagttcttcggtgctcgcgctaacctggcgaaaaccatgctgtacgcaatcaacggcggcgttgatgaaaaactgaaaatgcaggttggtcctaaatctgaaccgatcaaaggcgacgtcctgaacttcgacgaagtgatggagcgcatggatcacttcatggactggctggctaaacagtacgtcactgcgctgaacatcatccactacatgcacgacaagtacagctacgaagcttcactgatggcgctgcatgaccgtgatgttatccgcaccatggcatgcggtatcgcaggtctgtccgttgcggctgactccctgtccgcaatcaaatatgcaaaagttaaaccgattcgtgacgaaaacggtctggctgtcgacttcgaaatcgaaggtgaatacccgcagtttggtaacaacgactctcgcgtcgatgatatggccgttgacctggttgaacgtttcatgaagaaaattcagaaactgcacacctaccgcaacgctatcccgactcagtccgtgctgaccatcacctctaacgttgtgtatggtaagaaaaccggtaacacccctgacggtcgtcgcgctggcgctccgttcggaccaggtgctaacccgatgcacggccgtgaccagaaaggtgctgttgcctctctgacctccgttgcgaaactgccgtttgcttacgcgaaagatggtatttcttacaccttctctatcgtgccaaacgcgctgggtaaagacgacgaagtgcgtaaaactaaccttgccggcctgatggatggttacttccaccacgaagcgtccatcgaaggcggtcagcatctgaacgtcaacgtcatgaaccgcgagatgctgctcgacgcgatggaaaacccggaaaaatatccgcagctgaccatccgcgtatccggctacgcagtacgttttaactccctgactaaagaacagcagcaggacgtgattactcgtaccttcactcagaccatgtaa

SEQ ID NO: 258163 - DNA, 438 bp, Klebsiella pneumoniae
atggaagagacgctattttccgcctgtcagttcaccagcgacagcctgaactggcgcagcgccgttcagctcgcctgccgcccgcttgagcagcagggaaaaatcaccggaagctatgccagggctattatcagcgccacggagcaggatggtccctggtatatactgagcccggcgtttgcgctaccgcacgcgcgaccggaagccggagtgctgagcagaaacagcgcgctttcgctgctttgctgtcgcaaggccgttgattttccgcagcatcccggtattcggctgatagtcgtactggcggcggccgatagcgaacagcatattcagacaatccagcgattagtcagttggctggatgaggaggacagactacggcgattcaccgaggttcacaatcaggcccagcttgaagcgcttctcgcttcgcattaa

SEQ ID NO: 258164 - DNA, 2439 bp, Klebsiella pneumoniae
atgaaaatcaaaacccccgatgctttactggctgccgaggtgagccggcgtggtttaatgaaaaccacggcgattggcgggctggtgatggccagcagcgcttttaccttacccttcacgcgcattgcccatgccgcagacaacctcaaccctgtcagcgaaacgctcacctggagcgcctgtacggtgaactgcggaagccgctgcccgctgcggatgcatgtggttgatggtgagattaaatatgttgaaacagacaataccggtgacgataactacgacggcttgcaccaggttcgcgcctgtctgcgcggtcgctcgatgcgtcggcgcgtctacaacccggatcgcctgaaatatccgatgaagcgggtgggcaaacgcggagagggcaaattcgaacgcatcagctgggaagaagcgttcgatactatcgccagcaatatgcagcgcctgataaaagagtacggtaatgagtccatctatctgaactacggaacgggaaccctcggcggaaccctgactcgctcatggccgccggggaaaaccctgattgcccgtctgatgaactgctgcggcggttacctcaaccattacggtgactactccaccgctcaaatcgccgcgggactgaactacacctacggcggctgggccgatggcaatagcccgtcggatatcgaaaacagcaagctggtggtgctgtttggcaataacccgggggaaacccggatgagcggcggcggggtgacctactacctggaacaggcgcgggagaaatccaacgccagactgattattatcgatccacgctataccgacaccggtgccggacgcgaagatgagtggatccctatccgccccggaaccgatgccgcgctggtctcggcgctggcgtgggtgatgattaacgagaatctcgtagaccagcctttcctcgacaagtactgcgtaggctatgacgagaaaacgctgccggaaggcgcgccggccaatggtcactataaggcctatattctcggtcagggcaaagacggtatcgcgaagaccccagagtgggcgtcgacgattaccggcattcctcaggcgcgtatcgtgcagctggcgcgtgaaatcgccggcgcaaaacctgcctatatttctcagggatggggcccgcagcgccatgctaacggcgagctggtttctcgcgcgatttccatgctggcgatcttaaccggcaacgttggaatcaacggcgggaataccggcgcgcgtgaaggctcttactcgctgccgtttgagcgcatgccgacgctggataacccggttgaaacaagtatttccatgtttatgtggaccgatgcgattgagcgcggagcggaaatgaccgcactacgcgacggcgtgcgtggtaaagataagctcgacgtccccatcaaaatggtctggaactatgccggtaactgcttgatcaaccagcattcagaaatcaaccgtacccatgacatcctccaggatgacaaaaagtgcgagatgattgtggtcattgattgccatatgacctcgtctgcgaaatatgccgatattctgctgccggattgtaccgcctcggagcagatggattttgccctcgatgcttcctgcggcaacatgtcctacgtgatttttgccgaccaggccatcaaaccgcgttttgagtgcaaaaccatctatgagatgactaccgagctggcgaagcgcatgggcgttgagcaacgcttcaccgaaggccgcactcaggaagagtggctgcgtcacctctatgagcaatcccgtaaagcgatcccggcgctgccgccgtttgatgaattccgcaagcaggggatcttcaaacagcgcgatccgcaaggccaccacgttgcctataaggctttccgtgaagatcctgccgccaatccgttaacgaccccgtcagggaaaattgaaatttactctgcgcaactggcggaaatcgcggcgacatgggagctgaaagaagaggatgttatcgacccgctgccgatctacagccctgggtttgaaaattatgacgatccgctggctaaaaaatatccgctgcagctgaccggctttcactacaaagcccgcactcactccacctacggcaacgttgacgtactgaaagccgcgtgccgtcaggagatgtggatcaacccacttgatgcgcagaagcgcggtatcgccaatggcgatcggatccgcatttttaacgatcgcggtgaagtgcatatcgaagccaaagtgaccccgcgaatgataccgggcgtggtcgcgctgggtgagggggcctggtataacccggacgccggtcgcgtggatcaggctggcagcattaacgtgctgaccacccaacgcccatcgccgctggcgaaaggcaatccatcgcataccaacctcgtccaggttgaaaagctgtaa

SEQ ID NO: 258165 - DNA, 4047 bp, Klebsiella pneumoniae
ttgagccaggaatacaccgaagacaaagaagtcaaattcacaaagctaagtagcgggcgccgactccttgaggcgttactcattctttgctccctttttgccatctggttgatggcggccttactcagctttaatccctcggatcctagctggtcacaaacggcgtggcatgagcctattcacaacttaggcgggacgccgggagcctggctcgccgatacgctattttttatttttggcgtaatggcctataccattccggtcatcattatcggcggctgctggtttgcctggcgtcatcaggaaaacgacgagtacatcgactatttcgccgtctcgctgcgtttgattggcgcgctggcgctgatcctcacgtcctgcggtctggcggcgattaacgcggatgatatctggtacttcgcttcgggcggggtgatcggcagcctactgagcacgaccctgcaaccgctgctgcacagcagcggcggtacaatcgcgctgctctgcatctgggcggcaggactgacgctgtttaccggctggtcctgggttagcattgctgaaaaactcggcggcgcgatcctttctattctcactttcgccagcaaccgtacccgtcgtgacgacacctgggtcgatgaaggggaatatgaagaagatgaagaagaatatgaagacgatgaatccactaaaccgcaaggttctcgtcgggcgcggattctacgcagcgccttagcacgccgccagcgcctggctgagaagtttgccaatccgctggggcgtaagaccgatgccgcgttgttctccggtaaacggatggacgacgccgagggcgaggttcagtacagcaccagcggcgcgcctgttgccgcagacgatgtgcttttttctggttctagcgcagcgcgtcaggcgaacgccgatgatgttctgttctccggagccagcgcggcgcgccccggcgattttgacccctacgatcctctgttgaacgggcatagcattgccgatccggtggctttggccgcgcaggataccgcggcgccgcaggcatggtctgaaccgctgcctgggtatgacgctcagccagtttatcagcctgaaccggcttacccgccgcagtacgcgtctcagccggagcaggctcctgttcagcagcctgcttatcagcctgaaccagcttacccgccgcagcaggcctatcaaccggcgcaggcccctgttcagcagcctgcttatcagcctgaagcggcttacccgccgcagcatgcctatcagccggagcaggctcctgttcagccgcctgcttatcagcctgaagcggcctacccgccgcagcaggcctatcagccggcgcaggcccctgttcagccgcctgcttatcagccagaaccggcttacccgccgcagcaggcctatcagccagcgcaggctccagttcagcagcccgcttatcagcctgaaccagcttacccgccgcagcaggcccctatccagcagcctgaaccttacgttcctgcttctgccgtagagcctgagccagcagaggaagtgaaaccacagcgtccgccgatgtactacttcgaagaagtggaagagaaacgcgcgcgtgaacgcgagcagcttgccgcgtggtatcagccaattccagaaccggtcagtccagttgcgacaaaaccgatctcgcctccgcctgctccggcggctgatgttgccgcggtgagcgcgctggcggccggcgtccatcatgccaccggggcaagcgccgcggcggcctccgtcgcatccagcgccgcgccgctgtttagcccggcgtctggcggcccgcgtgcgcaggtaaaagagggcataggcccgaaattgcctcgtccaaatcgcgttcgtgttccaacgcgacgtgagctggcatcctatggcattaagctgccttcgcagcggttggctgaagaacgcgcgcgtcaggcagaacatcagcactatgatgatgatgcgctgacggacgaggaagttgcagagtttgagcagggcgagctggcgcgtcagttcgcggctgcgcaaaatcagcgctatggcgatagctacgctgcggaagaggataatgtagacgaggattccgccgctgaagccgaacttgcccgtcagtttgccgcttcccagcagcagcgttacgccagcgagcagccgccgggatcgcatccgttctctgcggctgattatgaattctcgccaatgaaaacgttagttgatgatacgccgagcgagcctgtcttcacgccgatgccggaagtgcagcagcctgccccgcagccgacccagcattcgcagcccgtacagcagccgatgccgcaccagcagatgcatcagcagccgcaaagtgcgcagcctcaggcctatcagccagtacagcagcagccggttcaacatccgcagatgccacagcaggctcctggcggttatccgcagcagcaggcttcgcagcagcagcaaccgatcccgcagccgcaggaaagcctgattcacccgctgttgatgcgcaatggcgacagtcgcccgttgcagaaacccacgacgctgctgccttcgcttgatctgctcacgccgccgccagctgaggttgagccgatcgatacctttgccctcgagcagatggcgcgtttggttgaagctcgtctggccgatttccgcattaaagccgacgtggtgaactactcaccaggcccggtcatcacccgctttgagctaaacctggctccaggggtgaaagcggcgcggatttccaacctgtcgcgagatctggcgcgttcactgtccacggcggcggttcgtgtggtggaagttattccgggtaaaccttacgttggcctggagttgcctaacaaaaagcgccagaccgtttacctgcgcgaagtgctggataatgcgaaattccgcgacaatccttcaccgctcacggtggtcctcggtaaagacatcgcgggcgaacctgtgaccgccgatctggcgaagatgccgcacctgctggtggcgggtaccaccggctccggtaagtccgttggggtcaacgccatgatcctcagcatgctctacaaagcgcagccggaagatgtgaaattcatcatgattgacccgaaaatgctcgaactgtcggtctatgagggaataccgcatctgttgacggaagtcgtgacggatatgaaagacgcggccaacgctttgcgctggagcgttaacgagatggagcgccggtataaactcatgtccgcgctgggcgtacgtaatctcgcaggctataacgagaagattgccgaagccgcgcgtatgggacgacccattccggatccttactggaagcctggcgacagtatggatgcgacgcatccggtactgaaaaaagagccttatatcgtggtgctggtcgacgaatttgccgatctgatgatgaccgtcggcaagaaagtggaagagctgatcgcgcgtctggcgcagaaagcgcgcgccgcggggatccacctggtgctggcgacccagcgaccgtcggttgacgttatcaccggcctgattaaagccaacatcccgacgcgtatcgcctttaccgtatcgagtaaaattgactcgcggaccatccttgaccagggcggtgcggagtctctgttgggaatgggcgatatgctctactccgcgcctaactccacgatcccggtgcgcgtgcacggcgcttttgtacgcgacgaggaagttcacgccgtcgttcaggactggaaggcgcgcgggcgtccgcagtatgtcgatggcatcacctccgatagcgaaagcgaaggcggcggcggtggctacgagggcggtgaagagctcgatccgctgttcgatcaggccgtcaactttgtgacggagaaacgcaaggcttccatatcaggggtgcagcgtcagttccgtattggctataaccgcgccgcgcgtatcattgagcaaatggaagctcagggtatcgtgagcgagcagggtcataacggtaaccgtgaggtgctggctccgccgccttttgagtaa

SEQ ID NO: 258166 - DNA, 3144 bp, Klebsiella pneumoniae
atggcgctaagtgacttactgcaacaagcctgctttcaggcgaaaaaattaaaatccaccgaattgccctctgactatccggcatgggtcatcttcttcagcgtcagcgatggtaagtcacgcgcgcatactcatatctccagcggaaccagctttgacctcgcatggctggcgggggccagagcgctgcaggagtggcgtaaaaaacaggacagcgaaccgcagtggctgcggattgacatcgtggacagcgtggaaaagctcagctggcaatccctcaacgaaaaattcatggtcaccaagcgtaactattttcgctttggcctcgcgtttgatccgcagtttagctgcgcgatgcttgagcaagaaattaccggtaacgcgctgctctatgacggggataacggcgtcgtggcgccgaatagcgtcaatctggaaaactacgcccagcggcggtttaagcagacgctgagctggccgcaagatccgcagcagccgctctggcgctttaaaactcagggcgtcttctgcgatcgttttggggcaaaagtgattgaacacaccggacggggttccggctatcgcgtcatcggggaagagtggcaggacgagtgcctggccgaggtgattaaaaaaggcaccgattatctggcccgccaggtaaaacaagacggcctctaccattacggctggtttccctgtttcgatcgcccggtccgctcctataacgcgctgcgccatgccagctcgacctattcgctgatcgagggctgggaggcgacgcgtcagccgtcggttcgtcaggcgatagaccgggcgattgcgtacctggttaacacactgattgaagtgcggacgctggacgatggccgcgaggcggcgtttctctgcgatgtgggcgatgagatcaagctcggcggcaacgccgtcagcatcctggcgctggtgaaatacaccgaaacgaccggagaccggcaatatctaccgctgatggcgcagctggcgaccggcattgcttttatgcaggatccgctcagcggccagtttgttcatgtattaaatagccgcgatctgtcgctgaaagccaaattccgcatcatttattacgatggcgaagcggcttttgccctgatgcgcctgtacggcctgaccaacgcgccgcagtggctggagatggtggagaaagccttcgcctatttcattaaaaataaacactggcagcatcacgaccactggttgagctactgcgtgaatgaattgacccgcttccgtccgcaagagaagtactttcgctttggcctgaataacgtgcgcgatcatcttgatttcgtgctgcatcgcgtcaccacctatcccacgctgctggaattaatgatggcggcgtctgaaatggtgacccggctggacgcctcgcccgagcatcgtcatctgctggcggattttgaccagcagaagttctggcaggcgctggaggcccgcgcccgctatctgctgaacggctttttctggcccgagctggcgatgttctttaaaaatcccgcgcggatcgttaacagcttctttattcgccaccacagctaccgcgtgcgtatcgatgatgttgagcactatctttccggctttatcgcctaccagaaataccatttagcggcaaaaaagccgccgctccagcaggacgacacgcagccggcgaatagcgcgacccccgtgtttttgctggagacgctgcgtgacgtcggcaacggtattgaggtggcggccatgcgccgggcgaaactgttcaccgaacatctgcgcaccgtaccctggctgattaccgcgacgtggaatcccgaactctccacggcggttaaggcgctgaaagcacgcggcgcgctgcccgaagaggtgccggtttataacctttatgcctggctaagcgattgtcttgagctgaatgcgatctctgcgctggcgccgctggtgggcaatattgagctcagacatgccgtgaatcccaccgcggatctaccggtgggtaaacacaacttcctgctgcgtccgcaggggagaatcatcgaagactatattgatcgcgccggcaatattctgctgcgcaaaagctttgacgaaaaaaagggcaacgtgcagctaagccatcttgaaatcgctctgccgggaggggacgttaaacgctttgctcaggaagaggcgttttatgcgtggatgctggaaacccggttggcggaaaaagggcgctggcactttatcgtcgataaaaataaaacgtggaaaagcttcgtttgctcacggcccgcccagcgtatggcctgcacgctgagcgcgattatccactcccatcatcagttgtctaacggggcgctgaaaagctcataccggcatatcctggaacagccggaactcgtagaccagctgattgtcctgaccgatgaacagtggcaggacctgcagcaggagggatttccggccgcccggatggcggtgatccccaaccatctcgataacggcgctataccggcgaacccgcagaagacgccttcgcaaacggtcatttacctggcgcgctactcggaagagaagcagcacgctttactgctgagcgcgtttcgtcaggtggtgaaggcgatccccgacgcgcagctgcacacttacggggtagggccgctgcggcgcagcttaagcgcgcaggtggcggagtgggggctggagcaggctatccatatcaacggcttcacctccgacatcgcgcaggcgcataaaacggcctgctgcacggtgctttgttcgactcaggaggggcagtccatttccgccgtcgaggcgatggcatacggtacgccgctgattagctttgccattaaatatggcccgcgcgacatcctgcaggaccggcaggcggggattctggtgccctgcggcgatgagggcgcgctggcggcggcgatgatcaaggtcatctccgacaagacgctacagcaaagtatgcagcaggccgcgctgcgcaacgcgcaacgctactacgccagcgcgatcgccggacgatgggcggcatggcggcaggcaagcgaacgtcagctggataccgggacggagctggagagcgggccggaaaaaaagcgtcatcaggcggctaacgttggataa

SEQ ID NO: 258167 - DNA, 318 bp, Klebsiella pneumoniae
atgatagccagcaaattcggtatcggccaacaagttcgccacacgcttctgggctacctgggcgtgatcgtcgatgtcgatccagagtactcgctcacggagccggaggaggacgaaatcgccgctaacgacgaactgcgtcttgcgccctggtaccacgtggtgatggaggacgatgatggtcagccgattcacacttatcttgcagaagcgcagctgagcagcgaagccagcgatgagcatccggagcaaccgtcgctggacgaactggcgcgaaccattcgccagcagctgcaggcacccagattgcgtaactga

SEQ ID NO: 258168 - DNA, 1203 bp, Klebsiella pneumoniae
atgacagactccattttcccccgcttagtgttaaccaaaggacgcgagaaatccctgctgcgtcgccatccgtggattttctccggcgccgtcgcccgaatggaaggtaaagcccgttcaggtgagaccatcgatatcgttgattcgcagggaaaatggctggcccgcggcgcctattcaccgtcttcgcagatccgcgcccgcgtctggagcttcgatcgcgatgaagccattgataacgcctttttcgagcgtcgtcttcagcaggcgcaaacctggcgcgagtggctggcagcccgcgacgggcttgatagctatcgcctgatagccggtgaatccgacggcctgccgggcgtgaccatcgaccgttttggcgacttttttgttctgcagctgctgagcgccggtgccgaataccagcgcgcggcgattgtcagcgcgctgcaaacgctgttcccgaactgcgctatctacgatcgtagcgacgtcgcggtacgtaaaaaagaggggctggagctggcgcagggtccggttgtcggcgagctgccgcctgccctgctgccgattaccgagcacggtatgcagctgctggtagacattcagggcggccataaaaccggctattaccttgaccagcgcgacagccgtctggcgacgcgtcgctacgtcgccgataagcgcgtgctgaactgcttctcctataccggcggttttgccatctccgcgctaatgggcggctgccgccaggttgtcagcgttgatacctcccaggaggcgctggacgtcgccagacagaacgttgagctgaacaagctggacctgtcaaaagcggagttcatccgcgacgacgtcttcaagctgctgcgtaaatatcgtgacgccggggaaaagttcgatgttatcgtgatggatccgccgaagtttgtggaaaataaaagccagctgatgggcgcctgccgcggctataaggacatcaacatgctggcgattcagctattgaatcccggcggcatcctgctgaccttctcctgttccggcctgatgaccaccgatttatttcagaaaatcgttgccgatgccgccctggatgccggacgtgatgtacaatttatagaacagttccgccaggctgccgatcatccggtgatagcaacctacccggaggggctgtatctgaaagggtttgcttgccgcatcatgtaa

SEQ ID NO: 258169 - DNA, 555 bp, Klebsiella pneumoniae
atgaaaacaggattgaaagtcgctgccgcgataatggtcatgataagtggaacggcgattgccgcgccgtttagcgtcagcagcgcggatatgcgcgaaggagacgctctggcgcagaggcattggtttggcggctttggctgcaccggcggcaatatctcaccgcagatcgcctggcaaaatgccccggcgggtacccgcagtttcgcggtgaccgcttacgatcctgatgcgccaaccgggagcggctggtggcactggacggtggtgaatattgcccaacaggcgacaagcttagccgctggcgccggagacaaaaataacgctaaactgcccgccggggcggtacaggggcgcaatgactttggctatgccggctttggcggcgcgtgtccgcccgccggcgataaaccgcatcgctaccgctttacggtatgggcgctggatatcccgacgctgcccattgacggcgagtccagcggggcgttagtcggatttatgttacatagccacgccatcgccagcgcgcagataacggcgatggccggaagataa

SEQ ID NO: 258170 - DNA, 792 bp, Klebsiella pneumoniae
atgcaaataatttacccaagtgattactttaatctgaatagagttgatgaaaattatgaggatgaattcaactgtgcaagtgataacggagtaaaatgtgttttgctatcatcacagcatttattagatagcaaaattaaactttcaggaaaccttgaggcgcatgcgccagttatttggcgaggctggatgcttaaacagaaagaatataaaacattatacaatactgttaaaagccatagtgcggaaatgttagtttctcctgatgattacgcttcttgccactatattacgggctggtacggaacatgtagtgattatacacctgaaactattttacttactgagaatgatgatttcgaaaaaattacatcccgattaaaatggccttcatattttgttaaagactatgttaaatcacttacgacatcgcgtggttcgatagcgaaaaatgccgaggaaatacaggggattttagcccatattaaacaatatcgcggagaaatagagggtggtgtcgtgcttagaaaggttgaggacctaaaacccgaaacagaacgtagatatttttcattctatggaaatgtctactctgctgatgatgttatccctgctattgttcatgaaatagcgaagcatataagctccccttttttctcaatagatatggttgagacagcttcatccaatcttcgtttgatcgaaatcggcgatgggcaagtttcagatattaaagaatgggacgtccaaaaattcgttaagatgattgtaaaggccagcgtgtctggatga

SEQ ID NO: 258171 - DNA, 231 bp, Klebsiella pneumoniae; identical to SEQ ID NO: 206850

SEQ ID NO: 258172 - DNA, 801 bp, Klebsiella pneumoniae
atgacgtgggtttatcagctcagggatcgtaaagcggctgatgccgccgattaccagacgctgctgcgtaatgccgatacggtacttaaagacgacgtactggcgtcaaaatcgctgctggtgatgcccaaaggcagcgtgacactcaatatgcccatggatgaagacgctcagttcgtggcggtggtggggctgtttaaccggccggatcagaaggacaaccgctggcgcctggtactgacccgtgacgacctcgacccggacaaaccccgcacagaagcggtgcttttctcggcgccggaaggcatggtcctgaccagcggggaagatatgcagctggcagccagccggaacctggcggtaaacgccggagaaggcttcagtgttggagtgatgggcaatgcgacactgctcaccggtgagaaactgggactctttgcccgcaccggtcaactgagcctgaaatccggagaaggaccagtagatgtccaggcgcagaacgccagcatgcggttgtttgcggagaagaagctgacgctgagctcagcgagtgatatctcctttgccgggaagaagcgtatcacgctgatcggcggcggaagctatctgcgacttgaggccggaaaggtcgagtatggtacgacggcgtcgtatatacgcaaagtgaagcggactatggctgcgggaagtaattctcagactccagaaatcccatttttaccagggcctggtgatgtttttcgaaggagttttattcttgttgatgatagaactcaagaaccaatattagatatgaattga

SEQ ID NO: 258173 - DNA, 1206 bp, Klebsiella pneumoniae
atgaagggactaccaccacttgttatacttggttgccttgtttattctgattgtattattgcacaggaatggaagggtgagtgcattggttattatcagttgctgttgcctgatggcttggaggtggctttatatcccgtgaatttaatcattgacccactcgcaaatccagcgcggcaaaaaaacacgttggtgtcgcgttatttgtttccaaaaatatctttcagtgaaaatcgatatcagagtaatggtgacacagttcaggcacaattctcagtattccattatgcagattatgacgttgtagtttcctctgaaaacaaatcgactatcgatttgctgaaatatgaaaaggaatttaaagagcgtactgacaatcgaatacaggactactgggataaaaggaaccacaaattatcaatgaaacttccagtattaccaaaagatattgctgaaagatcacttgcgtacagtatcgataactacgacaatgctttttcagccactgattcgggtggttattctttatttgtaaacaatggcaacagactgtttatttttaaaaaggcagataaagtacaatcacttgatgagcaactgaacaaaagcagacctgagatgctttcattgcttaaacgttttcagccacgcaaactctacgaagttccggcaaaacaggggttctgtttaccctatggttttatcgccggggattccggacatgaaaaacgcaatatggccgtcacttaccgtctgaaaaatcacccagatgtgaccatatttttccaggacctggggatgatgaatccgcaggcaggagaagaagacgacctgaatgagaaggattacatggcctggctgtggagctgggatttccaagcgggagcaacttcaaaagagctgataaaaccaaagtggcgctcaattaagatggatggtcgtgacgggaccggaacttttgttaaaggcacatacaaaaatgttccagtatatgactataaaggtcatgtgagtaaccggatgaattatattaactatggctatgcggcttatgtgcagggcaatcataaagccagaaacctggaaccagatttactgctctatgttatgcaggacagccgtcagcttaaaaatcagccgccaatggataaggacgaaatagaaaaaatggctgaacatattatcagttcgattaagagaaggtaa

SEQ ID NO: 258174 - DNA, 2436 bp, Klebsiella pneumoniae
atggcagtgcaaaaacttgatgatggcatgaatcgggggagtgtgtatttcgatgacaaaagcgacaagagctatacagccacgttaactcacaaccattgggtacattacaccagtggcctggagcgtcaatcagaaaactttgccgagtataccgaaggtaatgcggtgcaggctttcctggggggaaaagcctattttactgcgttactgactgcctttaaacaggcccaaaaatgcatttacatcacaggctggcaggttaactgggatgcccaattagcggaaggggttcgcctggtggatgcattactcgaagccgtaaaggtttcaccagagctgcaggtgtacattatgccgtggaataacccctcacaggtagaaacctattcggcggcaacagagcgggtatttgctgcgatgaatacccatctcggaaggcaggctttttatgttcagcgtgcgggctctaaatccggaatgatgttttcgcatcatcagaaatgtgtgattgtcgatgaaaaactggcatttgtcggcggaattgacctggcctatggacgctatgatgaccattatggtttgcaggcaaatgcagacggacgacagggcatgaatatgtacaattcgtgtattccgcctgtttcccggcaaaacagttataaccccatggaggaatatgtcatcccgacagggagtttccagagggataaccagcaggatgaacggcacaaagccgaacgtcggcaggctgacagtgtacagcacattattgataacgtgctcggccataagctctggcagtcatccgctacgtcaaaggacagtacctgtctggacccgacggtccagccccggatgccctggcaggactaccaaatgcaaattgacgggccagcggtctatgacctggtgcgcaactttgtgtttcgctggaacagttatagtcacccctacccggaccatccgctgaaaactccagttcctgaactggacattccggcaaccctaccagggaaaaaaggcggttgtcaggtgcaggtgctgcgcagtgcctcactcgacatgcgtaaggatgaacataagcatatgccggacagcgcaccaaaggccaggctcaaacaggatgatatcctgcgcagtatccacctgttgatcagcaaatcagagcattttatctacatcgaaaatcagttttttgtctccgcgtttggggcgtcgtctattgaccctgagagtaagttaagtccggtggccaaaagcattagtccttccttggatacttgggcaacccggctcttgcctgatgatgaaacaccgcaaaatccggtggcggaatggctaggagaccggattaaacgggcagtctttagtcatatgcagcaggcgttccatgtgtatattgtactgccggtgtatcctgaggggcggcttgatgatccggccattgtggcgcaaattcatttaacccgacagtcgttggtctttggttcgcagagcctgcttaaccgtattcgccgtagcttatgggtaaaacaacaacttgaactacagacggtcccgcgaagggagtggtggaagaaaatcactgaactggaagagcagtgcggcgataagtataaaaccattccactggaagcatgcaatgagtatgtgacgctgctgaatctgcgcgaccacgttgaactaaacggcagagcggtaacagagcagatatatgtccacagtaaactgatgattgtcgatgaccgctatgttctggtgggaagtgcgaatatcaatgaccggagtctgcaaggtgaccgggactccgagctggcggtactgatatccgatacagcccattgttatacggacctggatgggacgggcgttgctgcaccgacccgaaactttgcgcgcgaattgagacaaagtgcatggcgtaaatggctgggcagcgcagcgggagagtgtgcagatgtgctggataaaccggcactgaaaaaaggctgggagaagattcagatgttggcgaaaaaaaatgctgagacctatgaaatagtgtttgattttattccgaaaaattatattgacagcaatccctatcctgctgaaataacaccttctgtttctgataccgaaagcacaaaaactaatgaaatacccgcctcaatatggcctgtaatgaacacgggtgacaagattaaaagttttgtaagaagtagcatgcccttctcagagattttttggcgaaattataaatttcagaacgacggttccctgcatgcaattaaaggttatttcactgctctgcctatatactggaccgaaggagagaataacatgattcgatataatatgcggctcattgccagcaatgctgtatctgctgacgatacacagctgttagcggataacagtgccggtgataataatgaggtaaatcaggcatga

SEQ ID NO: 258175 - DNA, 1770 bp, Klebsiella pneumoniae
atggatgatttaaccctgcgctattacgaagcagagatgcgctatctgcgtgaggcgggtaaagagtttgcccgagcccatccggatcgggcagcgatgcttaatctggataaacccggcgcccgcgatccttatgtagaacgcctgtttgaaggctttgccttcctgatgggccgtttgcgtgaaaagctggatgatgacctgccggaactgaccgaagggctggttagcttgctctggccgcactatatgcggactatcccgtcgctggccatcgtcgagttctcgcctgactggcgcagtctgcgtcaggccgaaatgctggcggaaggtttctccgttttgtcacgccctgtcgggccgcataaaacagcctgccagtatcggaccacccgcgatgtgccgctacaaccgctgcaccttgccgacgcccgcctgcacacagaaaacgatggccgctctgctattcgcctgcgctttgaatgccctgaaaaagtggactggagtaaagccgggatcgacaaagtcgccatttttcttaacgcagaaagtccggttagctcagcgctgcatctggcaatgacccgtcgcgtccacgccatgtatgcgcgtcatgccgggacgcacactgaacgtcatcagtttgacggctggtgcaaacccatgggctttgatgacaatgatggcctgtggaagaaagccgatactgccttcagcggttatcaactgctgctggaatatttcagcttccgttcgaaatttatgtttgttgagctgcgcggtctcgacgccatcgggctcactacggccagcacctggtttgaagtcgacattgtgctcagtgaagcctggtcatccgatctgccttttgagacagaaaacttccggctgcactgtgccccggtcatcaatctctttaccctggaagccgatccgctgacgcttgacccgctggataacgaatacctgctcaggccgctgcgtcttcaggatggtcacaccgagatttacagcgtcgataacatccatggggcggtgaagaatggcaaacacccctatgtaccgttcaccagcttcaggcaccggggcggtatgatgcgccacgatgcccctgaacgctatttccatacccgcgtgaaacgcggcccctctggcctgtatgacacctggataattctcggggggcgctcgttcgagctggagcagctgtccgaaaagccagaatccatttcgatgcgaataaccggtaccaacgggcagcttccgcgtaaggcgctggaaagtacgctcctggacagggtggtcaaaaccggcaaggtgcccgtcagggtactgaacgtcacagcaccgacgatgccgctatatccccctgcaaacgatcgttttcactggcgggtgatgagtcacctcggatcaaacttcctcagcatgatggacaatccggaggttctgcggggaacgctggcgctctatgactggaccgacgatgaaatgaaccgccgtcggcttgaagcaatcgtcgccgtgaagcacaccctgatccgccgttttgagaagggctttatgctccggggcgtggacattgaggtcacgctgaatatggataattttgcaggcgagggcgatgtgaatctcttcggggagatgctgcaccggttcttcgcgctctatgccgatattcacctctttaaccagctcacgctggtgctgcaaccgacagggaaacgactgagatggcgcgagaatcacagccagcacgtaccaggctga

SEQ ID NO: 258176 - DNA, 360 bp, Klebsiella pneumoniae; identical to SEQ ID NO: 190372

SEQ ID NO: 258177 - DNA, 549 bp, Klebsiella pneumoniae
gtgattgaacggctgcatggtcagttctttaacgaacccaccaacgcctttcattttgatgctgtagaaaataatcaggatgaacacgccaagcgccatcgacagggtgatgttcacgtcggcagacggaaccacgcgcagtgctggcaggccgaaaatgtgttcgccgatataaggaagcaggtcgattggcagcaggtccatcaggttcatcaggaagacccagacgaacacggtcagcgccagcggcgcgataaccttgctcttgccatggtacatgtctttgacgctgccatggacgaagccgatgatcatttcgatgaaggtttggaatttccctggtacgccgctggtcgctttcttagcaacgctacggaacatggcaaggaacagcagaccgagaaccaccgagaagaacatggagtcaatgttgagcgtccagaaggtggctgtgtggttgtgcggatccaccagcgagaatgtacgcaggtccaactgaaggttgttcagatggtgtcctatgtaatcctgcggcgtcatattttctga

SEQ ID NO: 258178 - DNA, 423 bp, Klebsiella pneumoniae; identical to SEQ ID NO: 206327

SEQ ID NO: 258179 - DNA, 672 bp, Klebsiella pneumoniae
atgagtatttatggtaagtgttttttgagtctgttattgtttattctgtcttgttctgtgtttgcggaaagaactcgtgtattaacagcaaaaaatattgatggaagtgagtggcttatcgaaaaagatggaggtgagtacaatcttaagtatataaatgcaaaaggggatgtgtatagtaacgatacaatacttacatcggatattgaagggagtggcttatttttagattccaaaccagatggtacagtatctttggttatggattacccacgggatgtatatacgtttaaattcacctcaggtaaaagaccttttttaatatcagcatgtaagcaaataagactaccatcttcgggatatcaggctgacgcgttactaactttgtgttctaaagatgatgaaatatccggcctgagtttatcaacgctggatgcaagtaaactcctaaaatctgataatttagtacttaaagataaggttaaaacgattgttagaggtaataaggcttttttatatgatgaaaataaaaaacaacagaaaaacaaaccatatttgataaaaggtgacattgtcgaggttttggcatataaaaattccatgttaaatattaaatacacatctgaaactagagttgttgttgcttggataaagtttatagatattttgtag

SEQ ID NO: 258180 - DNA, 2667 bp, Klebsiella pneumoniae
atgacagcaaagttacccaaaatcagttaccccgtaccgtcaaacaaaaatggccatgccttttcctctggggaagagttgttatcgatgatcggaggggaaagctcaggactgtatctggtgggaagtcagggaatgtggcatggcggtatccatattactgatgccactattccctggtgcgccctgagtactgacagtgaagctgagaatgaatattgtcgcgagctctataaaggggaacaatttattcgttgtatggcggatggtgagatagttgcctggcgcgtcagtaaggactatgagagtgctgcgattgaatggcgcggtgaaaaactgttactttcgacctcttttgtgctggtgagacattatattcagccgggtgatacagaagagagtggactgacatttttcactctttatatgaatctggcgccttatgctgcttataaacaacagggcagcctggcggacagaaaagtggcaggcgtccagcgctattactccagtgcggaagatttgcaggcaggtcgcacagccggaaaactggagaaagacacggtagtcacgttgagtgacactatcgtgacccgtagcagcgaccagcgtcagtttaccgaagtaaccattaccagagaaacgaaaaatgtagcaggaaacacgcttgcagcgggtgctaaagtctggacggtatcagaccaggggaatctgaaagcaacagaatcggtgcccgttccgtcctggtgggcaaaatgtactccggcttacactaatcagtcagaaggtttggtgaactgcacctcgcgtacaaactgggcgtactatctgagcagtaatgatgttctgcaatataaaaatgcaggtagcctggtagccgatttcccgctttcatacgagcccggtaataccgcacagcaggtcatccgtccaggtaagaatccaggcgatgcagcaagaacattcagtctggtcactctgggccgggataaggataagttgaaaaagggcgaccgggtatgggtagtatcagacggcgacagtctgacgccggttgcaccggcagcatccggtagtgaacccgtttttaatgatgtgtatgtaccttcagcgcctgtaccggtcaatgccggagacagtctcgggcatatgggtttttatcagctaccggaagaaaatggcaaacgctcgcgctaccaggtacatatagagtgcctgagcatggatgatatggaaaagttcatcaccaatcctggaaaggcgggagaggatgcgccggtttatctgacctggaaagctgatgcaccgttgtttgacaagagcgataccggaataacagcaggcggtcgaaaaacaaaggggccgggtattctgacactggcaaaagtaccaggcgttgatgctgaggggaacacgctgtccagtaaccaggatgcggcatactatcagatacgacctgaaggtggctggctggccgcagccagtgttcagaaagtatcgcaatatgcgcttggtgagctcggatttgttacgctgaataaggcttcggaaagttttgacctgattgatggcataaaacaaccggataacgtggtgaagggtattctggagcagttgtataaagcagcagaggaggaaacccgcaccactcacgcgctgaacaagtataactataaacggctgctggaattgatagacagtaaccaggacgggcattactcggagcaggagtatcttcaggcggttcataatgtgtcgtatcgcgaccatctgtaccgtgtgatagcgaagcatgccagtgaatggtattacggcaaggatgacccgctctggaatacatacctggatacgttaaccacggacgcaccgttatggaaaacgtacctggaagcctttctggataagatgacatggatgaaggcagtgtccgaaaaggatgtggcgctggggccggacccctggcatatgcatccggtggtgtttttggcggcgatgaaagcagtaaataaacaatgttattgctataaacaaggtattgctgaccgcccgtgccaatccggggctgtagatgtaactaaagatgattttgaattgctcgctacacagcttggtgttgagcgagaagtattaagagcgatcgcagtggctgaaacaggtgataaggtgccgtttagatactatgtaagagatgagaggcacgcggcaattctttatgaaagacattatatgaagagaatctcgctgaatttgggggtaagtacagaaactgttcgtgaggtcgaatcttcagagccagacattattcattcctatgatagcagctatcgtcatggaagagatagtgagcagtatcagcgattgttgagagctcgtgaaattaactttgatgctgcaaatatgtcgtgttcttggggtaagtttcaggtaatgggtgagtattatcatcatctatatagttcaactcaggaattagtggatgctcagaactattgtgcgatgcagcacttacaatactttaagatctttcttgttaatgagaaaagaatgcttcagtcgatgaaggataaagattggctaacaattgccaggaagtataatggcactggtcaaataggatatgatgaaataattgagaatgcatataattcattaaaaaatgagtggtga

SEQ ID NO: 258181 - DNA, 2358 bp, Klebsiella pneumoniae
atgattgaaagtttaagcagtctggtacataaggccatggatgaagcccagggcctatcgcgctaccgggttgatgtgcatgactgcagccatttcctggatgtattgcgttacaacgccgttgaatccctcagtcagccctggcggtatgacgtggcggtcacctgctcctctgcggatattgcctgcgacacgttactgctgaaaccagcgtcattcactttccagaccccagtgtttgacggaacaccggcgctgccggtcaggacggtattcggcgtggtggagtcctttcgccgcgtgtccacctcgaatgatgagacccggtacgcgctgacgatcgttccccgtatcgcccttctggactatacgaaagggagcgggatctacctcaatcagtcggttattgaggtggttgaacaggtcctgcgtaaacacgggctggaagggcctgattttgagttccggctctcccgggagtatccctcccgggaactcatcacccagtggcgggaaaccgatcttgagtttattcagcgcctgctggccgaggttggcatttactggcgctatgaaatggacagccgtcttgaacaggacgtggtgattttccaggacagccagcagcagtatgaatttggcgtcacgctcccattacgcaaccaggccgggatgagtgacagcgggcaggagagcatctggggtattcagactgcatataacgtggtgagcggaagtatggccacccgggactacaactaccgtgaagcgctgacgcctcaggacagttccgagagcattttcagcaaggaagggatcaccaccggggaaacataccattatgcggaacctttcctgaccgcaggtcacgctgaaagtacagagtccggggcatacttcgcccgtctgcgtcacgaacgcattctgaacgggcagtattgcgtcagcgggcattcctccagccctcatctggctccgggtcaggtactggaaacggacggcgcgttacccgatgccgtcagggaaggcatcgtcatcaccacggtgcgcaccagcggttcacgcaaaagtcgctttactatgacgtttgaggggatcccctatagcgaaaccgtctgctggcgtccggcattgctcaatcgtccggtgatatccggctcgctgcctgcccgggtggaaagcacacagaaaggcgacacctattcctggctcgatccggacgggcgttaccgggtgaagctggattttgaccgcaacagtgctgaacagggctatgcctgtgtgtggctgcggctggcgaaaccctatgccggagatacgtacggattccactcaccgcttatcgacggaactgaagtggccgtcgtattcgacggcggagacccggatcgcccctacatcgcttatgccctgcatgattcagagcacccggaccctgtcaccagtgacaatcatacacggaacgtgtggcgcactccggcgaacaataagctgcggatggaggataagcgccaggaagagcatatcaagctcgcgacggaatatggcaaaacgcagctcaacatgggccacctggtcaacagccagcgtgaaaagcgcggggccggttttgaactgcgaacggatgagcatggcgctgtacgtgcggcaaaagggctgttcctgacggctgatgcccaggccaaagcccagggcccggtgctggaaatggcccctgcgataagccagattaaccaggccaacagccagatgcaggcgctgaacagcgctgctgaagccgccggagcactggtctgcgacatcaatacccagattagtctggtgaccgacaaaatcagggacctccagtcttcggtcctgctgggtagcgcgccgcagggggtggcactgacctcaggtgaacatcttcagctcagcagcacccgcaataccatgatcaatgccggtcagcatcttgatatcggtgcgatgaaaaatctgtccgtgagcgttgaaaaagcgctcggtctgtttgtgcataaagacggggcgaagcttgttgccaaccagggagacatcgagattcaggctcagcacaacacgatggtcctgttttctgaaaaacagctgacggtgaccagtagtgaagacgaaatcattatcagcacgccggaaacgctgacgcttaacggcggcgggtcttacctgaggctgagtaagaacggtattgagcatggttccgaagggatgatggtgatgaaggtagcgagttatctggtgcctggaactggcagcagtctgccactggagacaccagactttaaaatgacagacgtgacggtcacgacaaaaaattccgccaaatggaccagtgaatag

SEQ ID NO: 258182 - DNA, 822 bp, Klebsiella pneumoniae
atgaagtttatgaaatatattacggctcttatcacatttacctgcgctgccaattcatatgctggattctttagttcatctgatgaattcaaatgtggtcgagatgatgctgttaaagcgctacagcagtacataagagatggggcatcagaaatgcttcagcatgattccatccaaaatgcaaagatacttttaaataagccggttaatgtctattcagaaaagatgaacagcattacagttgatgttaagggggcgtctacgatcggtaacaccagccctacggaagtatcgtgtaaagctaaggtaagtatattattaccgcaggaaagtattgatgtcattcatgctatcccggagcaaattgctcgtctccagtcgggacaagaatctttttataacaacgctgttatatggaaggattatcgctataacctgaaactctcagatgataaaaaagatatttctgtaacagatctcatgaaagacagtgcttcctctgagctgtattttattacattgtcatctgttaacaaaaatgaactcattgacaaaaataatgacataaaaatcaaggttgcacaaaatgaatataacgaagcagataccgagttaaatatcctgtggaaaaatatgcctgattctatacgtgcttcgatgaaatcctcccagttggcatgggtgaaagacaaagcagtgaaatgcgggaaaattagtgatgcaacgggcaataccgcagatattgctacgaaggtaaatatctttaactgccagacaaaaatgactaatgagcgaatcactattttgggtggcggtaattaa

SEQ ID NO: 258183 - DNA, 2661 bp, Klebsiella pneumoniae
atggaacatcattcagcagtcctgctacgacgacttaacccttattgcgccagagcactggagggggcggcttctttatgtcagacccgtgcacatgcagaaattacgccagagcactggttgttaaagttgctggagcagggagaaggtgatctgaccgttctcgctcgccgctatgaatgggacatggatgccgtctggcagtcactcctgagctggctggatgcacagcctcgttcagttcgcacccgaccagagctctctgcgtcccttcagacgctgctgaaacaggcatggcttgccgccacgctcgtcggagatgagcagatccgcagcatacatttgcttacggccatgattgaaacgtcagggctgacgcgctgcgatggcctctggcctttgatgacgctgaccaccagccagctggagaggttacgccccttactggaagcccagtcggatgagcggcatgacgttgcgctcagcgagcaggctggcaatgcctccattattggccgggcgccgccattacaacatgaagcccaaaagcatgctgagggtggaattgcgcagcctgccgtttcacaggtggagtccattctcaatcgttttacggttgatgtgaccgcccgtgcccgggaaggaaagattgacccggtctttggacgcgataacgaaatccgccaggtggtagacattctctcaagacgccggaagaacaaccccattctggtgggtgagccaggcgtgggcaaaacggccctggttgaaggcctggcgctacgtatcgccgaggggaatgtgcccgaaagtcttaagcctgtcatcgtcaggacactggatctgggtttgctgcaggcgggcgccggtgtaaagggtgaatttgaacagcgtctgaaaaatatcatcgacgccgtccagcaatccccggtaccggtgctgctgtttattgatgaagcgcacaccattatcggggcgggtaatcaggcgggcggggcagatgcggctaacctgctgaaaccggcgctggcgcgtggcgaattgcgtaccatagcggccactacctggagtgaatacaagcaatatttcgaacgtgacgctgctctggagcgccgcttccagatggtcaaggttgatgagcccgatgatgacacggcctgcctgatgctgcgcggtcttaaatcccgctatgccgaacatcatggcgtgcatattaccggtgaggccgtccgggcggcggtgacgctatcccgccgctacctgacagggcgccagttgcctgataaagcggtggacttactggataccgctgcggcccgggtgcggatgagcctggacacgctgccagaacagcttacccggttgcaggcccggctaactgcgcttgccatggagcagcaggagttgctggaagatatttccctgggtaacgctgttgatgccagccgtctgcctcagatcgagcaccttactctggatctcaaccagcagaaaactgcccttcagtcacaatatgagaccgaaaagcagctcaccgactcgctgaaagcctgccgtgaagatatcagccgccagaaggagatctccgccttccagcaggaactggcgcaggtacaaaataacagcccattactgggtctggatgttgatgtccgcaccgttgcgaccgttatcgccgactggacaggggttcctctctcgtcgctgatgaaggatgagcaaaccgaattactgacgctggaagagcagctggcaacccgtgttgtcggccaacatccagctctgaatgccatagcccaacgactgcgagcgtcaaaaaccggcctgacgccggagaacgggccacagggtgtatttttactggtggggccaagcggggtgggcaaaaccgaaaccgcgctggcacttgctgacgttatgtatggtggtgagaaatcgctcattaccatcaacctgtctgaataccaggagccgcacacggtctcgcagttgaaaggctcacctccgggctatgtcggatatggtcagggcggcattctcaccgaggcagtccgtaagcggccatacagcgtagtgctgctcgatgaagtggagaaggctcaccgggatgtgatgaacctgttttatcaggtctttgaccggggctttatgcgggacggggaagggcgtgaaattgatttccgcaataccgtgatcctgatgacgtccaacctgggaagtgacccgctgatgcagttcctggaagagcagccagaagccactgagagcgatctgcatgagttgttacgcccgatcctgcgcgatcatttccagccagcgctgctggctcgcttccagacggtgatataccgctcgctggcaatggatgccatgcgcaccatcgtcggcatgaagctcgcacaggtgagtacgcgtctgcaacgccactacggcatttccactcacactggagaaagtctcatcgacacgctgacgaaggcgtgtttgctgccggataccggtgcccgcaacgtggacagcctgcttaaccagcagatcctgccggttctgagccagcagttgctggcccacatggcggcgaaacaaaaaccacactccgtgatgctcagttgggatgaggaagaaggaatcgtactggagtttggaatagaaagatcataa

SEQ ID NO: 258184 - DNA, 1680 bp, Klebsiella pneumoniae
atgcgtagatcagtcatcattccggtagccctacacactttagcagccgttgccacgttgctgtggttgctgtggtatttcatcccgacaggtaacgtttttaaaggcctgaccactctgctgattctccttctggcaggctggtatgtttttaaaagctgtcggcgtgaggagcaagcatccgacgcgaccctcccggctgctgaactgccattactcgacacccatgtccccgttgtactggtgtgtggtgacatgctggatgcgctgtttcagggaagccctctgcgtaaaacagcgcagggatggtggctacggaccgatgacgtcagccggttaactgacgttgtccgcagcatacagacgcagttcccgcgccaggtcggtcagctctcggtgatgtaccgctgcctgccagaccatcatcaggatgaggccgttcttcgttccgcgctgaaaacgctccgccagcaatgtaaacagattaaatccctgacgggtttcacactgccggttgtgttgagtgccgaattttccgggcctgaaacgccgtggataatcgttcggggtgacaagtcgattgtgtgtccggttaatgattcaccgcaggcgttcattgactggcagcaggcggaagacaatatcctggcgctgccggcggttagtcaggcattctcctttatccgtaatacgttgacaaatgagctggagaaacctgatcggtttacgccacctgtacgcgcattttccgttgcaatgcgcctgggtgtagtcaatcctgagactcagtccgtctggtccgactggctctattcccgcacctgtttacagttttcccgagaccccgggcattcaatcccgacagtttttttcccggatgcggttctgccccttctggcaccgtttgcgtcgatggtacaggggggccagcgtacccgtcgtctggttctgctgatgtggctgtgcattctgacggcgttgggcatctccgcgctcaataatcgttaccttatccgtcatgtcagtgccgatttacagcgctggaacgccattcccatggatcattaccggcctaaagcggaatcactggccgcgctgaaacaggatgcgctcctgcttgaacgctggcagcgtcagggagagcctttacgttacagcctgggttattacccggggcaacgcctgtggctggccttgcagcaggctatcgatacctggacaccaccccccgcccctaaaccgaaaccggtagcgaaaattgtacgactcgacagcatgtcgctgtttgattccggcaaatcggcactcaaagacagctcaaccaaaatactcgtcaacgcactggtggggatcaaagccaagccaggctggctgatcgtggtcagcggccacacagacaataccggcagcatacaactcaatcagactctgtctttgcaacgagcggaggccgtccgtaactggatgcgtgataccggagacgtaccggaaagttgctttgccgtgcagggttacggtgacagccgaccgattgcatcaaacgatacgcctgatggccgcgcgcataaccggcgtgtcgagatcagcctggtaccgcaggctgacgcctgtcgtctgccaggcgcaaagcacgcgtcacaggatgtacgtgacgtttcaactcaagaaatggagaagtaa

SEQ ID NO: 258185 - DNA, 153 bp, Klebsiella pneumoniae
atgcaaacgaatattattgccattccgaataccggtctccagggcctcataaaagaaaaaacccgcacagagaggcgggtgtctaacgagactaatatgctatataaaaaacactcaatttacaaggaattgtgcctgaggtcctatccttag

SEQ ID NO: 258186 - DNA, 321 bp, Klebsiella pneumoniae
atgggcccatttccgtcgccagcggctgattatattgagacggcgatgacagtcacggccgcatgtgatatcagcgctaactctcaggttattcagactgacagaggctacgtagttttagatttgtcgctgaaagtgacgcagggaagcgtcgttcttatccgcctggctggcgaactgcagtttgcaaaattgatggggcgttcttttatcactgtcgaaggtgaatcgattgaaggagatgccatggatgaggtcgaagtgctcggagtcgcgacacatgcgatcaacgatctgagacaagataatagccctatttga

SEQ ID NO: 258187 - DNA, 774 bp, Klebsiella pneumoniae
atgtctcttaacatcaaaatgccagacagtaattttacccacgtatgcggggttatcccagcagtagccagtgggcttgttggctttggcttgatgggaaataatgttggcgtcaatctttacggaagcacagatgcatcagcagtaggcacaattactcagactggtgaacttgtttcaactcttggcaccaataaatacgtccaaaccaaccttaaagcgaccagtgaccttacgtatctggtggtggcaaaatgctatctccctgcttctggtgataacaacctgctgattggcgataacctgaacgcgaaaaccgatggtaccgttatcaactctacaggcatcctcctgacgacgacgcaggcgatcggtgttgttggtgtccgcaataagtcaactaatgccaataccacctacaatgccaatggggttattgggctgccgaccggagtagctaatgcggcatggaaatgcctggcattgcgtattggtgttgatggcatttcggggcgggcagagtcagtaaacctggataacctaacagatagcttgaaagttacgcggtctactctggataccaccacttttgaccgacagactgatctgacgaaaactatcaacgttggttcgatggttgatagcacgacgcagaacaacaattttgatgtccttggatatgccatttacaaccgcgctttgtcggacacggaactatcggcggcatatgcccagctgaaggctgtggctgcatcgcaaagcatcaccatctaa

SEQ ID NO: 258188 - DNA, 318 bp, Klebsiella pneumoniae
atggaacaatattgcgcttatgagaatacgggaagcggtaaaaaggttttcccttatttaatcaacctgcagcatccggtcgcgaatgtcctgaagcatatcctggttgcccctgtgatagaacaaaaccaactacctgatacccagcctccgaccaaaatttgtcccgtgattacgattgccggtcaaacttatattgtgatgacgcatatgatggcgggtttgccgcaaaaagaactgggcaagtgcgttgctgatttgacggcggacagggctgcgctgcgcgatgcaatcgactttctgatcaacggttattag

SEQ ID NO: 258189 - DNA, 294 bp, Klebsiella pneumoniae
atgctcgtttattacgctaatctgaggcatgtcatgcgcattaccatgggggctatcatgcgcactacgtcgaacgttaaaaaatcagtcaatgtctcgctttcgcctgaaatcctggaagaggcgcgtaaacttaaaatcaacatttcggcggttttaacggaagctttacttgagaaatttcgtgagcacaaacgtgaagagtggttacgagacaataagaaatcgatcgatacgattaaccaatgggtagaagaaaacggttcgtttagtgattttcaaaggccgttctga

SEQ ID NO: 258190 - DNA, 1062 bp, Klebsiella pneumoniae
ttgagtaaaaataaactctccaaaggccaacagcgccgcgtgaaggccaaccaccagcgccgcctgaaaacgacttcggagaaggccgattttgatgacaacctgttcggtgagaaatccgaagggaccgtcattagccgctttggcatgcatgccgatgtcgaatccgccgacggtagcgtccaccgttgcaatattcgccgaactattcgttcgctggttaccggcgatcgcgtggtctggcgcccgggcaaaagcgaagctgacggcgtcaacgtcaagggtatcgtcgaggccgtacatgaacgaacttccgtactgacgcgtccggatttctacgacggcgtcaaacctatcgccgccaatatcaatcagattgttattgtctccgcgattttgcctgagctttctccgaatattatcgaccgctatctcgtggcctgcgaagcgctgaacgttgagccgctgatcgtactcaacaagatcgatctgctggatcaggagagcatggccttcgtcaacgagcagatggacatttatcgccatattggttatcgcgtattgatggtttccagccgcacgcaggatggcctgaagccgcttgaagaggcgctcaccgatcgtatcagtatttttgccgggcagtccggggtaggcaaatccagcctgctgaacgcgctgctgggcctgcatgatgaccaaatcctcaccaatgacgtttcggacgtctcaggactggggcaacacaccaccacggccgcgcgcctgtaccacttcccgcacggcggcgatgtgattgattcgccgggcgtacgcgagttcggtctgtggcacctcgacgcggaacaaatcacccacggctttgtcgaattccatgattatttaggccgttgcaaataccgcgactgcaagcacgacgctgacccgggctgcgccattcgcgaagcggtggagaaaggggaaatcgccgaaagccgatttgaaaactaccaccgcattctggaaagcatggcgcaggtacaggtaaaaacgcgtaaaagcttttcatcatctgatgactga

SEQ ID NO: 258191 - DNA, 147 bp, Klebsiella pneumoniae
atggtaaaaaaagcgattgcagcgttctttacggttttggctctttcctctgtactgactgcatgtaacaccacgcgcggtgttggtcaggatatttcagaaggcggcagcgcgatttcgggcgccgcgaccaaagctcagcaatag

SEQ ID NO: 258192 - DNA, 564 bp, Klebsiella pneumoniae; identical to SEQ ID NO: 188637

SEQ ID NO: 258193 - DNA, 561 bp, Klebsiella pneumoniae
atgaaaaaaacaatcgtagctgtaatggtcgctgcatctgcagttctgagcgcacaggctttcgcggcaggaaacagttctcaactgacaatcctcggcaatgtaaccgacactggcgaatcctgtaacgtcactcctgcagcgctgatccagggcggctctttgactctggatgacgtaaaagcctctatcctggaaggccagggcatcaacactccatatatggcgctggctaaagatatcgagtacaaaattgaagactgccagaaaggctcttctgcgtatactggtaacctgaacgttactgttaccggcgactacatcagcggccaggatgatatcctgacaaataccgcagttaacccggcaacgaatgcagctgtaaccgtagttaataccgacggttcacgcgttagctttactggcacaactgcaaaaactatcgcttataccgcgggcaccccgtcttatatgcgttataaagcagcatatgttaaaactgcaaacggtgtaactgatggtgctgttaaaggtgtagctacctttactatctcctactaa

SEQ ID NO: 258194 - DNA, 693 bp, Klebsiella pneumoniae
atgttcaagtcattattaaaaatagtggccgttatttctctttccgcaagctttgtcgcccatagtggagtggtggttgattctacccgtcacctttataaagaaggtacacgagaaatcagcgccaacctggaaaataaagacaacatcccttatttagtcaaatcatgggttgaaccacgtgaaggaaacgctacctcattttttatggttacgccaccgctgttccgtctcgaggccaagcaaaaaaataccgtccgtatttttcctaatgccaatatcatcaatgcgccaaaagatagagagtccgtttattattttaacgtgatgtctatcccaccaactagcgatgcggatacggataaaaacagaattcagctggctgtacgccatagaatgcgtctgatctatcgtccttcatccttacaagatctctcaataaaccaggaagccaaaaaactggaatggcgtaaagtcaataacaaaattacggttaaaaatacaacaccattttttatctattttaaatctatcaaaattaatggcgtcgaactgagcggtttcattaacaatattgatgcctttgcgacaaaagaattttcgttaccagcaggcgcaaatggatctgaagtagagtggaaaatcgcgacggataacgggggcactggctctgcctactccgtatcaatttaa

SEQ ID NO: 258195 - DNA, 2211 bp, Klebsiella pneumoniae
atgtctattttaataaaaaaaagggatgatgttttttctagtgtgtcccgcacatttttcgttcttgtacctgcgctagcccttggttttagcaacaataccttggctcgcgatttttttgatcctgactttatcaaatcagtgggtcaaaacgatccctcttcaataccggatttatcactatatgcaaccaaggatgctcaggctccggggaagtatcgcatcgacgttgttttaaacaataatttacaagaaacgactgacgtgcgctttgttgaaaaaaaagattctgctaccggtgatttaaaattagtaccatgtttaagtattgctacactaaagaactatggcttaaggaccgaggcatttccaaccctaaaggaggatgctgacggctgtacgaacactaacattataccgaacttcaaaaccgattttaactttaatactcaacaactattaatatctataccccaagcagcgctctcaactattgcgcaaggctttgtccctccggaagaatatgatgacggtattaacgccttattgaccaactatcagttcagttcaggcaaggactacgaggccaataacgaatattataaccttaacctgcagtccgggctgaatattgggccatggcgacttcgaaaccttagcacctggaataaatcagcaggtgcaaaaagcgattgggattccgtttatctatatgctcagcgcagcatcattccattaaagagcaagttggtaatgggggaaagctcatccctgtcgagcatttttgatagcgtgccctttacaggggtccagttggcgacagacgaggatatgatcccggaaagcctacgcggtttcgcgccaattgttcgcggtattgccagaactaacgcccgtgtcgttatcaaacagaatggttatcagatttaccaggcttttgttgctcccggtgcctttgaaataaccgacctctactctaccggcggtaacggcgacctgtatgttaccgtagaagaagccgatggttcccgtcaaaacttcgtcgtgccatacgcttctctgccgctgatgctcagagaaggccagatggagtatgaaattaccagcggtcaatatcgtccctatgacgacaatattgatgaaaaaccctttacgcaggccaccatcagctatggcgcgttaagcaatacaacgttttacaccggtattcaggcagcatctaactatcaagcgctggcatttggcgttgggcaaaaccttggcgatattggcgcactttcagccgacgtcaccgaagcgtggtctaagaaaaaagatgcggataaaacgtccggccagtcctggcgcattcgttacggtaaaaatattattgaaaccggcaccaatattaccgtcgctggttatcgctattccacttctggctttaatacacttaccgacgtgatgaatacctacaacaatcgctacggtggttatatttctcactcgatacgtaaccgaactaatattaccgtcagccagagcctggggtcagggctaggtagcctttccgtatccggtatatttgaggattattgggatagcaatcgccacaacaactcattaaacgttggctacaacggcgggttccgacgctttaactattatgcaggctatagctatagtcgttattcctggagcaacaatggttcaagccgtaccgcagaggacgatcatgtttttacctttaatatcactgtaccgttaagcgactggttaccgaagacctacgcaacctataatgtcactaacagtagcccgggttctaccgatcaatatgtctccctgagcggtacagctctggagaacgataaactggactggaacgtacagcagggttatagcaatcgagaagatgcgagcggcggcgtatacggtaactatagaggttctatgggttcggttaacggaggttacagttatagcaagcatagtcagttagttaactatggtatgagcggcggtgcattagttcatgctgacggaatcaccttaggtcaggaaatgtcagagacttcagtattagttaaagctccgggtctggaccacgtacgtttggagaatgatgaaaccgtagagaccgattatcgaggttatgcgattcttccgtacgtaacaccttatcatcgtatggattggcccctatatttccatacactttttatcacttaa

SEQ ID NO: 258196 - DNA, 1833 bp, Klebsiella pneumoniae
gtgagtgatgtttttgacgcaaaagctttcctgaaaacagtgaccagccagccgggcgtctatcggatgtatgatgctggcggtactgtcatctatgtaggcaaagcaaaagatctgaaaaagcggcttagcagctatttccgtagcaacctggcttcgcgtaaaaccgaagcgctggtggcgcttatcgcccagatagacgtcacggtgacccacaccgaaacggaagcgctgctgcttgagcacaactacatcaagctataccagccgcgttacaacgtgctgctgcgcgatgataaatcctatccctttattttccttagcggcgatacgcatcctcgcctggcgacgcatcgcggggcgaagcatgctaaaggtgaatattttggcccgttccctaacggttacgcggttcgcgaaaccttagcgctgctgcaaaaaatcttccccatccgccaatgtgagaatagcgtttatcgcaaccgctcgcggccgtgcctgcagtatcaaattggccgctgtctggggccgtgcgtcgcgggactggtgagcgaggaagagtatgcccagcaggtcgactacgtacgcctgttccttgcaggtaaagacgatcaggtgctgacccaactgattgcccgcatggaaaaagccagccaggcgctggagtttgaagaggcggcgcggatccgcgaccagattcaggccgtacgccgggttacggagaagcagttcgtctccaataccggggacgatctggacgttatcggcgtggcgtttgatgccggaatggcgtgcgtccacgtgcttttcatacgccaggggaaagttcttggtagccgcagctatttccccaaagtgcccaatggcaccgagctgggtgaagtggtggaaacgtttgtcgggcagttctatttacagggcagccagatgcgtacgctgccgggtgagatcctgctggatttcaacctcggcgacaaaaccctgctggcggattcactctctgaactggccgggcgccgggttaacgtacagactaaaccccgcggcgatcgcgcgcgctacctgaagctggcgcggactaacgccgcgacggcgctgaccaccaaaatttcccagcattcgacgattacccaacgcctgcgggcgctggcgacattgctcaagcttcccgccgtcaaccggatggaatgctttgatatcagccatacgatgggtgaacagacggttgcgtcgtgcgtggtttttgatagcaacgggccgctgcgagcggagtatcgccgctacaatatcaccggcatcacgccgggagatgattatgcggcgatgaaccaggttctgcgtcgtcgttacggcaaggcaatagaagagaataaaatccccgatgtcatactgatcgacggcggtaaaggccagcttgggcaggcgaaagcggtttttgccgagctggatgtgccgtgggataaaaatcatcctctgctattgggcgtggcaaaaggcagcgatcgtaaagcggggctggagacgttattcttcgaaccggaaggcgagggctttagcctgccgccggattcccccgcgctgcatgtgattcagcatattcgcgacgagtcgcacgatcacgccattaccggccaccgtaaaaaacgggcaaaagtaaaaagcaccagcacgctggaaaccattgaaggggtcggaccaaaacgccgacagatgctgctgaaatatatgggcggtctgcaggggttgcagaaagccagcgtggaagaaattgctaaagtaccgggtatatctcacggtctggcagaaaagatcttctactcgttgaaacattag

SEQ ID NO: 258197 - DNA, 987 bp, Klebsiella pneumoniae
atgtcactgcaaaatttaacccttttcccgcgtctggaactgattggcgcgccgacgccgcttgaatatctgccgcgcttgtccgattaccttggccgcgaaatctttatcaagcgtgatgatgtgaccccgcttgcgatgggcggcaacaaactgcgtaagcttgagttcctggcggctgatgcgctgcgggagggggcggatacgctgattaccgcaggggccatccagtccaaccacgtgcgccagacggcggccgtggcggcaaaactgggcctgcactgcgtggcgctgctggaaaacccaatcggcacccgggccgagaactacctgactaacggtaaccgtctgctgcttgacctgtttaatactcaggtcgaaatgtgcgacgcgttgaccgatccgaatgcgcagctggaagagctggcgacccgtatcgaggctcagggctaccgtccgtacacgatcccggttggcggttcgaacgcgctgggcgcgctgggctacgtggagagcgcgctggaaattgcccagcagtgcgaaggagcggttgagctctcctccgtggtcgtcgcgtccggcagcgccggtacgcatgcgggcctcgccgtggggcttgagcaactgatgcccaatgccgagcttatcggcgtgaccgtgtcgcgcaaggtggccgaccagctgccgaaagtggctgcgctgcagcaggcggtggccaatagcctggagctggaggcaaaggctgggattcagctctgggatgactactttgcgccgggttacgggacgccgaacgacgaagggatggccgctgtgaagctactggcgcagctggaaggtatcctgctggatccggtttataccgggaaggcgatggctggactgattgatggcatcagccagaaacgctttaaggatgaaggcccaatactgtttgttcacaccggcggcgcccccgcgctgttcgcctatcatcctcatatctaa

SEQ ID NO: 258198 - DNA, 414 bp, Klebsiella pneumoniae
atgaaaaagatagtgtttgctggtgctctgctgaccctcgccgggtgcgttcaggttgatagctacagcgatgttgttaaagcgccagcgccgacagggctggaaggatactggcaatcggcaggcccgcagagcgagatgatgagcccggaggcgatcgccagcctgatagtgactaaacagggtgacacgcttgactgtcgtcagtggcagcgggtcatcgtcctgccggggaaattaatgaagcgtgatgacgcggtttataacgtcacctccgctttggacgtctatccgattgagcgcgaaggcgataccctgagctacgatcggatgacgcttaaaagggtggatcgtctcaccccggagtgtgaactggcacggaaaaaagcgtcggcggataaaaacggacaataa

SEQ ID NO: 258199 - DNA, 1668 bp, Klebsiella pneumoniae
atggataagctgatgtgggtggaaaaattgcgtcagattttaagccccggatatgtggttaacctctgtttttttatcgtcttctgcttctccacgctgctgatatggcgtgagatcaaggtcctggaagaagcctacgttgcaaaccagcgcaataatcttgaaaacgtggcccatgagttcgacagtttgctgcagtttaatatcgacagaatgattttttttcgcaacggtatgcggtcggcgttgggtacgccgttggattttgccgcgctgcgcaaggccgaagaggattacttaacaaagcggcacgatcccatatggtcggttgagatccataaccgccggacgctgccgatctacggcgtcgcggatgcctttgtcgacagcgacgcgctgctttcccgtgataatcccttttccggaaatgagctcatggccacactggagctgggttatatgctgcgtctggccaataacaaccgtggatttgcgaaacgcatgctgtacgtgtcgcgcagcggtttttttacgacgaccgagctgccgaaaaattcgacgcaggcgctggctctctattcgcgggcaacaggcgccgcctggtttacccgacaaacgcagcggaataatcctgctcgcggtattgtgtggcaaacgtttcccgatgatgaatcgcagcgcgaaatgcaggtggtgacggcgtctattccgcttgatttccagcgctactggctcggcgttctggcgatggatttctcggtacaggagatgaaaacatttctggtcaatgcgatcaaaacgggcgaggaaggtgagtaccagctttatgataatcgactcaatttaattgcctcctccgcgccgggcaacgtgctgacgctgctgtcgccgcgtgaacaggagatgctaagccgcgcctcttcccatgagaatcagggcggaattcgcctggtcacgcgctatatcagctgggaaaatttacgcaattttgatggggtgctgatccgtatccatactatccaggaaggggtccgcggtgattttggcagcatcaccatcgcgctgatgctgatgtggttaatgttcactttgatgctgctgatctcctggctggtcattcgtcgaatggtgcgcaacatgagcgtgctgcagacctcgctggaatggcaggcctggcatgatgcgctgacccgtttattaaaccgcggcgcgctgtttgaacgtgccattgcggaaactcgcctgagcgagcgtctgaagcggcctgtggcggtaattcagctcgatctggattattttaaaagcgttaacgatcgcttcggtcatcacgcgggggatcgcgtgctgtcgctggtggccagcactatcgccagccatattcggcaaggcgatctggcggggagggttggcggggaggagttttgtattgtgctgcccaataccccgttaaaagaagcgcaggtgattgctgaacggatccgtatccggatcaatagccgcgaaattttgctgggtaacagcatttctttgcgtattaccgcttcgcttggggtgagcggtagcgatgataccggcgaatataacttcgaaaatttgcagtcagtcgccgatcatcgcttgtatctggccaagcagaacgggcgcgatcgggtctgtgctgaagggtga

SEQ ID NO: 258200 - DNA, 696 bp, Klebsiella pneumoniae
atggacctttttcactggcagcaacgatttgaaacctggctaaccgaacatcacgcgcgaggggatgcggctcatgatatttcgcatttccgccgggtatgggctacagcgcagcggttggccgaagatacggatgctgaccgtctggtgatcctgaccgcctgctattttcatgacatcgtcagcttggcgaaaaaccatcctgagcgtagccgctcttctgcgatggcggcggaaaaaacgctggctatcctccagtcagcttttcctgatttcccctctgaacgctacgcggcggttttacacgctattgaagcgcacagttttagcgcggcgattgctccgcgaagcgaagaagcgaaaatcgttcaggacgccgatcgactcgaggcgttgggggcgattggcctggcgcgcgtttttgccgtgtccggcgcgctgaacaatatcttgtttgatgccagcgatccctttgccgaccggcgggaattgaatgataaaacctacgcgctggatcacttccagtgcaagctgttgcgtttaccgcaaacgatgcagactgaaaagggccgggcaatggcgatacacaatgcgcgctttctggtgcagtttatggccaagctcagcgcggagcttcgtggagacccgatggctattgatgacgaggttttgcagcgctttaacccactcgcgtaa

SEQ ID NO: 258201 - DNA, 330 bp, Klebsiella pneumoniae
atgaacaatattgctctaatcgttaagttacgagaactgctggttatttttatgcatacgcgcacgctgccggagaaagccgcagacgcgttacgctattgccaggagcatctcccgatggctgaaattccgattggtgcttatggtgaatacagtgatatttttgaacagcttgtttttttatcggatgaaaagagtcgtactgccccggatgatttattgcgtagcggcggcgatttgatattaagtattttaatgctctatgagcacgtggcttccggtattgccgtcgaggaatttatgcataaacaaaaccgctttaacggatag

SEQ ID NO: 258202 - DNA, 801 bp, Klebsiella pneumoniae
gtgaaacgaattaacgcgttaaccatcgccggcaccgacccgagcggcggcgcggggatccaggcggatctcaaaaccttctcggcgctgggcgcttacggctgctcggtcatcaccgcgctggtggcgcaaaacacccgcggcgtccagtcggtgtaccgtatagagcctgattttgtcgccgcgcagctcgattcggtcttcagcgatgtgcgcatcgataccaccaaaatcgggatgctggcggaaaccgatatcgtcgaggcggtggcggaacggctggcgcgctaccggataaccaacgtggtgctggataccgtcatgctggcaaaaagcggcgatccgctgctctcagcctcggcggtggagacgctgcgccagcgcctgttgccgcaggtgtcgttgatcaccccgaacctgccggaggcggcggcgctgctggatgcgccacatgcccgaacggaaaaggagatgctggagcagggcagagcgctgctgggaatgggctgcggagcggtattaatgaagggcggccatcttgatgatgcggaaagccctgactggctctttacccgcgacggggagcagcgctttaccgcgccgagagtccagaccaaaaacacccacggtaccggctgtacgctgtcggcggcgctggcggcgctgcgtccgcgttacgatgattgggggcgaaccgtggcggaagccaagggctggctctctgcggcgctggcgcaggccgattcgctggaagtggggcacggcatcggtccggtccaccatttccacgcctggtggtaa

SEQ ID NO: 258203 - DNA, 750 bp, Klebsiella pneumoniae
atgaaccactctgtctcctctatgaatacttccctcagcggtaaagtcgccgctatcaccggcgcggcatccggtatcggcctcgaatgcgcgaaaaccctgctcggggctggcgctaaagtggtgcttatcgaccgcgaaggcgagaagctcaacaaaatcgtcgctgaactaggcgaaaacgccttcgccctgcaggttgacctgatgcaggcggaacaggttgataacctgctgcagggcattttacgccttgccggacgtctcgatattttccacgccaacgccggagcctatatcggcgggccggtggctgaaggcgacccggacgtatgggaccgcgtgctgcatctcaacatcaacgccgccttccgctgcgtgcgcagcgtcctgccgcatcttatcgcgcaaaaatccggcgatattatcttcaccagctctatcgcgggcgtggtgccggtgatctgggaacctatctataccgcgtcgaaatttgccgtccaggcgtttgtgcataccacccgtcgccaggtttcccagtacggcgtgcgcgtcggcgccgtgctgccgggtccggtggtcaccgccctgctggacgactggccaaaagcaaaaatggacgaagcgctggccaacggcagcctgatgcagccgattgaagtggccgagtcggtactgtttatggtcacgcgctcgaaaaacgtcaccgtacgcgacatcgtgattctgcctaacagcgtcgatctctga

SEQ ID NO: 258204 - DNA, 1002 bp, Klebsiella pneumoniae
atgaagaaaatcacgatttacgacctggcggaactctccggcgtttcggcgagcgcggtcagcgccattcttaacggcaactggaaaaagcgccgcatcagcgcgaagcttgccgaaaaggtcacgcggattgccgaagagcagggatatgccatcaaccgccaggccagcatgctgcgcagtaaaaaatcgcacgtcattggcatgattgtccccaaatacgataaccgctatttcggttcagtcgccgagcgttttgaggagatggcccgcgagcgcggcctgctgccgatcattacctgtacgcgccgtagcccggagctggaaattgaagcggtaaaagcgatgctctcctggcaggttgactgggtggtggcgaccggggcgaccaacccggataaaattaccgccttatgccagcaggcgggggttccggtggttaatctcgacctgccgggttctcttgcgccatcggtgatttcggataactacggcggcgcgaaggcgctgacgcataagatcctcgccaacagcgccgggcgtcgtgggacgctggcgccgctgacctttatcggcggacgcagcggcgaccataataccagcgagcgtttacgcggctttcacgatgcgcaccgggagcgggggctgagcgtgccgcaggagaacatcctggcgcccggttattcgaaaggtaaagtcgaggcctgcctgcaagcgcggtttggcgccgcgaagacctcattgccggggatatttgtcaactcgacgatatcgctggaaggagtggtgcgttggctatcgcaggcgggactgaccggcagcgaacagccgccgatgggctgctttgactgggacccgtttgtctatctgctggggcacgatatcgacatggtgcagcaggacgtgccggcgatgctggaagcggtgtttcagattatcgattccggcgatgccagccagcagcggattgaaatcccgccgctgttgatgagcagccgctga

SEQ ID NO: 258205 - DNA, 525 bp, Klebsiella pneumoniae
atggcgcacgttatcgcagttcagcagggtcagcggcccggcgttgtcggccatgcgcttttccagaatccgcgcgagggtgccgtaaatggttttgcactcccctgccagatcggcctgcaaatcggggttgctggtttccagctgatggcgggtattcaggtagtagcccccttccgtcacggtaaaggcgataactttggtctgcgggtttgccccttcgttaatcagcggctgcagcccggcctgccacggcagcagtttttgaatggaggtgatttcttcatattcgcgctccccttccgggctgacggtttccagcacgtaacgccccccctgcgccgccagcgcctggaccacctgctcggcgtcgttgcgaatattccccgccgcgatatgccagcgcttatctccggaagcgatcaaacgatgcagataccacgcctggtgagcgcgatgaaaagaacccagaccaatgtgaagccatgtgaattgattgttcatgttctgctctccttgagttga

SEQ ID NO: 258206 - DNA, 903 bp, Klebsiella pneumoniae
atgtcagttggaaaatttcccaatctgcggctgttacacgtgtttattaccgtagcgaaataccagggctacgccaatgcgcagcaggagctcaacctgacagtttcggctatcagcaactatatgagcgaactggaagagaaacttgggatcatcctctgccgtcgcggcaggggcggtttttctctgaccgaaaaaggggaaaccgtactccagcaaagcatcgacctgctgaattcaatggaggattttgagcgcaatacggcgacgctacgcggcgaacaaaccgggatctttaactttggagtgatcgattcaacaattaccgacccgatgctgccgatgagcgacatcatcgccacatttagcgaacgtttcccgcgggtgcatatcaatttacaggtcaaaagcccgaacgcgcttttgcagggcgtactgaacaatgaactggatattgccatcggtaccttctcgttgcaggccaatagcgtggtgtcccatccgctctatcgcgaacaaaactggctctattgcggcgacaaacactcgctatttacccttaaacatccgacggaagcactgatttccgagatgcgaatggtcacccgcagctactggagcagcagcgatttagggcgtaagggatttaagcggagcgccgcaagcgcggaaagtatggaagcgcagctgatgctgattctgtccggcaaatacgtcggctatctgccggaacactacgctttgccatgggtgcaatcgcataagctgcgcgcactgctgccgacggaatatggctatcaagcgcctttttcgctgattttccgccgcggccgcagcaaagaacccctgattcgcgccatgcgcgatatcgtgcgcttgcgcgttaaatcacgcaaaagttag

SEQ ID NO: 258207 - DNA, 972 bp, Klebsiella pneumoniae
atgactaccgcaacagaaaaaaactatccgcagccgcaggacggtgaaatcccgcgctttagcggattgccgacttttttccgcctccctttcgcaccgcaggccgctgagctggatatcggcatcgtaggcgtgccgtgggacggcggaacaacaaaccgtgcgggaactcgccacgggccacgcgagctacgcaatgcctcaagcctggtgcgtcggatccaccagactacccgccgttctccctatgattacgcccgcgttggtgacctgggggatgtgcgtatcaatccggttgatatgcaggatagcctggcgcgcattgaggcctggtatcgcgccctggctgaacagcaggtgatgcctttaaccgctggcggcgaccatctcaccacgttgccgattttacgcgcgctcggacgggataaaccgctgggaatgatccattttgatgcccactcggataccaacgacagttatttcggcggcgagcgctttacccacggtaccccgtttcgtcgtgcggtagaagagggggttctcgatccacggcgtacggtacaaattggtattcgcggcgcgctgttttccgcagatgaacactgctgggcggaggaaaacggcatcaccatcattcgcatggagcaggtggacgagctgggtattgacaaggtgatgcagcgggcgcgcgcgattgtcggcgagcagcctacctatatcagcttcgatatcgatgtcctggatccggtctatgcgccaggtaccggaacgccggaaattggcggtatgaccacgctgcaggcgcagcgctgcgttcgtcagcttgcgggattgaatctgattggtgccgacgtagtggaagtctcgccgccctttgatcagggcaatctcaccagcctgaccggcgcgaccatgatgtttgaactcttgtgccagcttgccgacgcccatcattggcgcatttctctataa

SEQ ID NO: 258208 - DNA, 939 bp, Klebsiella pneumoniae
atgcctatgactcagttaaccatcgtcgtggattgtaacgatcctcagtacagcgaggaaatttgcgccgcgttcgcgctgtttccgcaagtgaaagcggttctgccagaggaccccgccgcccgcgaggcgcaatgcgcctgctgctggtttcccgacccgcagctgctggcgcgctcgcctcagctgaagctgatccaggccgcgtccgccggcgtcgaccatttgcccgccagcgttttcgccagcgacgttccgctctgtcgggtggtggatgaagattttcgtcacggtatgtttgaatacgcgctgtggggcgtgctgtggtttcagcggcgctttgaccgggcgctggcccaccagcgcgagcgcgtctggaaaatgtatccgcagcgagcggcagccgattatcacgttggcgtcatgggcctcggcgaaattggcggctatatcgcctcgcagctggccgggctggggtatcgggtttccggctgggcgcgtagcgaaaaagcccttaccgacgtgcgctgctaccacggggaggcgcaggccggcgaattccttggccaactggatgcgctgatcaacgtcctgccgttaaccgagcagacgcgaggcatcctcgcccatcctttactgcagcagttgcccgacggtgcggcgctgattaactgcggccgcggcgagcatatggtgaatcgggacgtgctcgaggcgctggatagcggcaagctctccagcgcgctgcttgacgtcttccccgtcgagccgctgccccagcaagacccgctatggcaacatccgcaggtggttatcactccgcatatggcctccatcgcgcagacggaggtgattgcccgccagctgctggacaacatccagcggctgcggcaggcgctgccgctgaaaaacctggtgaacaaacagagcggttattaa

SEQ ID NO: 258209 - DNA, 405 bp, Klebsiella pneumoniae
atgataagaaatagattattagcattggtgtgcatttctgtcggtttattacaggggtgcgctaatgttaaaaaaccacagagcgcgctaataaaaaaagatgtgattcaaaatgaacagccggctcagattcctgccttacagcagtgtatccaggatgttgatgctttagttaagctcgataaaaagtttcagcaggattcaaacgagctgtatggtttaatcaacgacgctaagttttatgcttctgtttcaagccaaacgtcggccagcgtaaagtcaacgattactccactttttgaatacaagataaatgataagtgtaatagtatttcgcagaaattaattaaagagttcgaaatccgggcaagaaaagccgaacttaagaatgggctggccagatga

SEQ ID NO: 258210 - DNA, 1602 bp, Klebsiella pneumoniae
atgtaccataagggggaattgaatatatataatcttcgcggtcttgcgattttattgtctctctttacccttattatgatgtctcccgctcgtgctgagagaggagatttccttgataatatatcgaaactcgaaatcaacaatccgccggcctcagacgccgccagcggggattcggcgtcggctaaacaacataacgatagccgtgataaaaaagcaccgcaaaagcaggacgtcgtcagaaagaaagtgaatcagacgaaaactgaaagtacgcttagcgctttgcgcaaacaaaatgcggagctgagcgctgcggccaaagcggcggagaaaaagctcgatgaaacgacgcgccagctgtcggcgcagattgccgcgctgaaagcgcagcgtgggcagcaagagagcggcgctcctgccgccgctagcgcgctaatgaagaaaaacgccgagctgaccgccgccgccgacgcggcgcaaaaaaagctggatgacacgacccgcgacctgtcggcgcaaattagcacattgaaggctcagcatgcgcagcgcgaaagtgggcagaaaaccgcgcttgatgcgctaacgaaaaagaatgtcgagctggccgccgctgctgccgccgcgcagaaaaagctcgatgacacgacccgcacgatgtcggtgcaaatcgccgcgctgcaaacccagaaggagcagggggagagcctgcaaaaaaccaccattgatacgctgacgggaaagaatctggaacttcgcgcagcagcaacagcggcgcagaaaaagctggatgagaccacccgcacgctatcggcgcagattgccgcgctgaaaactgagaacacgcagggcgaaagccagcaaaaaaccgctcttgacgcgctgtcgaaaaagaacgctgagctcatcgcggcggctgaaacggcgcagaaaaaatatgatgcttcagtcgctgcgttgaatgataaaaataaagaattacagtcaacgctcgatagcctggccatcaagcaaagcgatgtaaacctggcggataaaagcaacaaaaatgcctatgcgctgggtgttttctacctgactcaggcgctatccgatgtgaataaaatggccgacaataatgtcaagctagcgccttcagcgttggtttccgggtttaatgatgcctataataaaaagcttagaatgcaggaaaacgaaattgaaagcatcgtcaacatgcttaacgaaaaactatcgtctaagtacattgatattgaaaaaagaatcatggctaaaatcaaaaacaaaaaatatgaggttttgcctaatggcgtctattttgtgattgataaaaaggggaaagctccgtacaagcagaatgagactttatccttgaatattctggagaaaaagatggatggtacgccgatacttaatacgatgaattcaacgatggtgtacgataaacaaaccgatccgctgctggctaaggtattatcatccggttttaaaggcggaacggtgacgctgtatggtcaggccggctcattatatagcaccacaccggctgacgtgaatcctgatactttaatctccatcaccttcgagttaatgccctaa

SEQ ID NO: 258211 - DNA, 1266 bp, Klebsiella pneumoniae
ttgtcatcttgggctgatataagaattgacgggtatgtgattgaagaatttactcattatggctgtcatttttggtacttcaaacactcggagcgagtaagggaagtggtcgagagaacttctgacgaggactcagatgatgtacgtgattttataggatatagagcaagcgctaaaacgatacaaaagcggctggaactgaacggtttcaactacctgactctgaaggaagactttaacgtcagtctcgaacgctatatcgatcagcttgagtatggactcagatcagtacaggaaagactttctaaaaacattgatgacgccttttatcttaatatgagggatatacaaagcaatattattcaagtaattaaaggaacgtcacttgacgaatggcttcaattgctaccggcggcgcgtaaggaaaaaataagacggaagcacgataaaccgtattcagatggtactccagaatggagcagctgtgatagctccccagcattacttaatgcaatgctgagtactccgttaatatattctgatagctatttggcggctgactttaattttccggtatcaaatcctgatttcttctctctggcgctgcttttaaccgtgccagatgatgcaatttgtgagcttgacctgaccgagcttattgtcgctgaatatcttgatgattttactgatcttgctgaaatagctttgtccgaaacctctccttgcaaagcctgccgcgaatcgcttgctgagctgtcggaacttgctggggtagaaccatctaactccacgcttcaaaggatgtgttatgccagcatgattacggcaatggaaacctatcttggtgacattattaaaagagaaatcatgacgcgccctgccttaatggagcgttttgtaactacctatgaagaatatagtgagatgaagtttccactcagcaatattcactctcagcttcgtaagctagataaacgagtccgtgacaccttagatggaattgcttttcacaatcttgctaaggctaaagaaatattccgtaatgtattgatagtggagtttgacaatagcagctttagcaagctttgtaaggccgtcggtacacgaaatgatattgttcatcgaaatgggaaggacaaaaaaggaaacattgtcagtcttagtattggcgatattcaggcgcttagaggagtgattttgcagtttatcagcaatattgatcagcaagtgcttgatggcctagcggcagcgtgcgcagaagattag

SEQ ID NO: 258212 - DNA, 813 bp, Klebsiella pneumoniae
atgtaccagaacatccggctttgccttttaactactgccttaatgatctctgcttcgaacagtaacggtatggatataaatctagggcctattggacatttatgcgatacatgcggaggtggggttatcgggggattgccgatagtcggcccaagcctcaatgaacttgtctcacaagctggtgcccctgccttggaacaatggattattcagtctcgaaacacggctataaatgggacggctccaatccctcctatgattcgtcaaatgctcaccgggtatgcaagtgaagactcaatgaataaggcgagatttaaggtcgaggataatggtttcctcaatctgtcgcgtgttattgagcaagccgggcaagctagtgctgtgaccctcatagacgtcatagtgtttcgtgatactgccagtgctaataatccagcgatttgggcacacgaacttactcatgttgatcagtattcgagatggggtgctcatgactttgccatttcatacatacgtgaccatggcacagtagaacaacccgcttatgacaaacaatatcgttatgcagcctgggcgcaatcaagaggattccctcagaatccgcagccggttgtttctatgccgcctccagttatcaacatgccaccaccgcaatatgttccgatcaacaacccgccgttacagccagtagttgttggctcgttttgccaaacacctatgggacggttcggccccggccctgcgatgattgtcggctcaccctgctatgctcagattccgcagggcctggtgcaagggtttataactagataa

SEQ ID NO: 258213 - DNA, 675 bp, Klebsiella pneumoniae
  misc_feature (501)..(510): n is a, c, g, or t
atggctcaatcacatttactggcagaaagaatttcccggctcagcgccgcgctggaaaaaggactcttcgaacgcagccacgcaatacgcctttgcctgcttgccgccctcagcggcgagagcgtttttctgctggggccgccggggatcgccaaaagcctgattgcccgtcgcctcaagttcgccttccagcaggcccgcgcgtttgaatacctgatgacccgcttctccacgccggaagaggtctttggcccgctctccatccaggcgctgaaagatgaagggcgctacgagcgtctgaccgccggctatctcccggaagccgaaattgtttttctcgatgagatctggaaagcgggcccggcgatcctcaatacgctactgacagcgataaacgaacgccatttccgcaacggggcaaccgaagagaaaatccccatgcgcctgctggtggcggcgtcgaacgaactcccggaggcggacaatagcctggaagccttnnnnnnnnnntccgcaacggggcaaccgaagagaaaatccccatgcgcctgctggtggcggcgtcgaacgaactcccggaggcggacaatagcctggaagccttatacgaccgtatgcttatccggttatggctggataaggtacaggataaaactaacttccgctcaatgctga

SEQ ID NO: 258214 - DNA, 213 bp, Klebsiella pneumoniae
atgtcgctgcttttggcggctcatgcgcagacgttcagcgcggatgatatttttcaggtcgctcagggcggtgtcaaaatcatcgttcacaatcaggtaatcatattccgcgtaatggctcatttccgcaacggcctgggccatccgtttcgcgatcacctcttcgctgtcctggccgcggccgcgcaggcgacggtccagttcatcttttga

SEQ ID NO: 258215 - DNA, 1326 bp, Klebsiella pneumoniae
gtggaccatttgcctatattttgccaactacgcgatcgcgactgcctgttagtcggcggtggcgatgtggctgagcgtaaagctcgcctgttactggatgcgggagccagattaacggtcaatgccctggatttcgtaccgcagttccaggtctgggccgattcgaacatgctgactttggtacaaggtgagtttaatcctgtgctgctggataactgctggctggcgattgctgccaccgacaacgaagcggttaatcagcaggtcagcaaatccgcggaagaaaggcgaatattttgcaacgtggtcgacgctcctcagcaagccagctttattatgccgtcgattatcgaccgctcgccgctgatggttgccgtctcttctggcggcacctcgccggtgctggcgcgcctgctgcgtgaaaagctggagtcggttctgccgctacatttaggtcaattagcccactacgcaggtcagctgcgctcccgggtgaagaaacagtttgccaccgttggcgaacgccgccgcttttgggagaaactgtttgttaacgacgcgacggagcagctgctgaccgagccgctggatcatcgcggcgaagtagtgctggtaggcgccggccccggcgatgccggactgctgaccctcaaaggcctgcagcaaatacagcaggccgatgtcgtggtttatgaccgcctggtctccgacgacattatgaatctggtgcgccgcgatgccgatcgggtcttcgtgggtaaacgctcgggctaccactgcgtaccgcaggaggagatcaaccagattctgctgcgcgaagcccagggtggaaaacgcgttgtacgcctgaagggcggcgatccgtttatctttggccgcggcggcgaagagctggaaaccttgtgccatgccggtattccattctccgtcgtaccggggattaccgcggcctccggctgttcggcctactcgggcatcccgctgacccatcgggatttcgcccagggcgtgcgtctggtcaccggccacctcaagaccggcggcgagctggactgggaaaacctggcggtagaaaagcaaaccctggtgttctatatgggcctgaaccaggccccggcgatccgggaaaaactgattgcccacggcatggcggcggatatgcccgccgccatcgttgaaaacggaacggcaatcactcagaaggttgtcaccggaaccttagagcagctggatattctggcgaagcaaatggccagcccggcgttgatcattgtcggccgcgtggttggcctgcgcgacaagctgaactggttctcaaaccattaa

SEQ ID NO: 258216 - DNA, 156 bp, Klebsiella pneumoniae
atgattaacgatattctggcgccgaacctgagggtcgtcttttgcggtatcaatccggggaagtcttccgcccataccggttttcatttcgcccatccgggaaatcgcttctggaaggtgattcaccaggccgggtttaccgaccgtctgctgtag

SEQ ID NO: 258217 - DNA, 300 bp, Klebsiella pneumoniae
atgccaacagcaatcgataaagccctggattttattggtggtatgaacacctcgttgtcggtgccgaatactatggatgaaagtaccgcgaagggaattttgaagtatttgcatgaattaggcgtaccggcgaaccctgccgacgtcacggcccggggtgaaaaggagggatgggatgccgggttcacggaaaaagtcgccggatgggcggacaaaattgcctccggtaagcggatcgtcattaaaaacccggaattcttcaccgtctatatgcgcgaacagctgcaggcgctggtgtaa

SEQ ID NO: 258218 - DNA, 1098 bp, Klebsiella pneumoniae
atgctaaaagttattcaatctccagccaaatatctccagggaccagatgcatccacgctgtttgggcaatacgccaaaaacctggcggacagctttttcgtgattgccgatgacttcgtaatgaagctggcgggagagaaagtgctggaaggtttgcacagccacaacattagctgccatgcggagcgcttcaacggcgagtgcagccacgttgagatcaatcgcctaatcgccattctgaagcagcacggctgccgcggcgtggtgggtatcggcggcggtaagacgctcgatacggcgaaagccatcggctactaccagaagctgccggtggtggtgatcccgacgatcgcctccaccgatgcgccaaccagcgcgctgtcggttatctacaccgaagccggtgagtttgaagagtatctgatttacccgaaaaacccggatatggtggtgatggatacggcgattatcgccaaagcgccggtgcgcctgctggtggccgggatgggcgatgcgctgtcaacctggtttgaagccaaggcctgctacgacgccagagccaccagcatggcgggcggccagtcgacggcggcggcgctgagcctggcgcgcctgtgctatgatacgctgctggcggaaggcgaaaaagcccgcctcgccgcccaggccggggtggtgaccgatgcgctggaacgcatcgttgaagcgaatacctacctcagcggtatcggctttgaaagtagcggtctggccgccgcgcacgccattcacaacggtttcaccatcctcgaagagtgtcaccatctgtaccatggcgagaaagtggcctttggtaccctggcgcagctggtgctgcaaaatagcccgatggaagagatcgaaacggtgctgaacttctgccataccgtcggcctgccggtcacgctggcgcaaatgggcgttaaagagggcatcgatgagaaaattcaggcagtcgctaaagcgacctgcgcggaaggtgaaaccattcataatatgcccttcccggtcagcgcgcagagcgtgcatgcggcgattctgaccgctgacctgctcggacagcagtggctggcgcgctaa

SEQ ID NO: 258219 - DNA, 1071 bp, Klebsiella pneumoniae
atgaaaaaactgattaaccgtgtcgaagatgtcctgagtgaacaactggcgggtctggcaaaagcgcaccctgaactgaggctgcaccaggacccggtctacgtgacccgcgccgatgcgccggtggccggaaaagtggcgctgctctccggcggcggcagcggtcacgagccgatgcactgcggatatattggccagggcatgctttccggggcctgtccgggggaaattttcacctccccgacgccggataaaatgtttgagtgcgccatgaacatcgacggcggcgaaggcgtgctgctgattatcaaaaactacaccggcgatattcttaacttcgaaaccgccaccgagctgctgcacgaaagcggcgttaaggtcaccaccgtggtggtcgatgacgacgtggcggtgaaagatagcctctacaccgccggacggcgcggagtggccaataccgtcctgattgaaaaactggtaggcgcggctgccgaacgcggcgactcgctggaatcctgcgccgaactggggcgcaagctcaacaacctcggccactctatcggtatcgcgctcggcgcctgcaccgtgccggccgccgggcagccctcattcgaactgcaggacgatgagatggagttcggcgtcggcattcacggcgaaccgggcatcgaccgccgccgcttcacctccctcgatcgcaccgttgacgaaatgttcgataccctgctggaaaacggcgcctatagccgcacgctgcgccactgggacaacgtgaaaggcgcgtggcaggaggttgcgcagaccaagcaggcgctgcaaaaaggcgatcgggttatcgcgctggtcaacaacctcggcgccacgccgctgtccgaactctacggcgtctataaccgtctgacgcagcgctgcgaggaaaccggcatcgttatcgagcgcaatcttatcggcagctactgtacctctctggatatggtgggtttttccatcaccctgttaaaagccgatgacgagacgctggcattatgggacgccccggttcacaccccggcgctgaactggggaaaataa

SEQ ID NO: 258220 - DNA, 633 bp, Klebsiella pneumoniae
atgtcattaagcagaacgcaaatcgtagactggctctatcgctgcggcgatatcttcacgaaagagagcgattttttgaccggtctggaccgggaaatcggcgatgccgaccacggcctgaatatgcatcgtggtttcagcaaggtagtggaaaaactgccgtcaattgccgataaagacattggtttcattcttaaaaataccggtatgacgctgctctccaacgtcggcggggccagcggcccgctgttcggcaccttctttattcgcgccgcccaggtgacccaggcccatcagagcctgacgctggaagagctttatcagaccttccgcgaaggcgcggaaggggtggtgaatcgcggcaaagccgagcccggggataaaaccatgtgcgacgtctggctgccggtggtggaatcgctgcgccagtccagcgaacagcacctgtcgataccaagcgcccttgatgctgcctgcgaacaggcgcaagccgccgtcaacgccaccatcgccatgcaggcccgtaaagggcgggctagctatctgggcgaacgcagcatcgggcatcaggatcctggcgcaacctcggtgatgtttatggttcagatgctggccgcagcagctaaagagtaa

SEQ ID NO: 258221 - DNA, 1422 bp, Klebsiella pneumoniae
atggtaaacctggttattgtttctcatagcgcccgtctgggcgaaggtgtcggagaactggcccggcagatgttaatgaacgatggctgtaagctggcgatcgccgccggcattgacgatcccgccagcccgatcggcaccgatccgattaaggtgatggaggccattgaatccgtcgccgacgccgatcatgtactggtaatgatggatattggcagcgccctgctgagcgccgaaaccgcgctggatctgctcgatccggcgattgcggcgaaggtccgcctgtgcgcggcgccgctggttgaagggacgctggcggcgacggtgagcgccgccgccggggccgacatcgacaaggtgattgaggacgccatgaatgcgctggaggcaaagcgcgtacagctcgggttaccatcgcaaccgcaacccccttcgcttaccgccgcgctggccgatgaccgcgacgcgcgctcggtttccgtagtgattcaaaatcctaacggcctgcacgttcgcccggcgtcaaagctggtcgccgcgctggcgggattcaacgccgacctggtgctggagaaagagggaaagtgcgtcacgccggatagcctcaaccaaatcgccctgcttcaggtgcgccgtaacgataccttaaggctgctggcccgcggcccggacgccgacgccgcgctggcggcattccaggcgctggcggcggagaactttggcgagcaaacggaggcgacccccgctttgcagcccacccatgccgcccgcattcagggccaggtcgtgctctaccctcggcctcagaacagcgttacgcgggaaaagagcgccgccatcggtcagcagcagctgcgcctgaaacgggctattgatcggacgctggacgatcttagcgcgctgacggccctggcggaggagaagtattccgccgacatcgcggcgatcttctccgggcatcatactctgcttgatgatcctgatttatatacggcagcgtgcgatatcgtgcgcgacgagcagtgcagcgcggagtgggcgtggcatcaggtgctgagcgatttaagccaacaatatcgccatctcgacgatgcctaccttcaggcacgctatattgatattgaagatattttgcaccgcacgctgcgtcaccttaacgagagcagcgaagcgctgccgcagtttagcgcgccttcgatcctcgtagccgacgatatctttccttctaccgtcgtgcagctcgacggccgtcaggtgaagggaatctgtctgcaggagagcagcgagcacgctcacggcgcgattatcgcccgccaggcgggcattgcgatgctttgccagcagcgcgatgtgctgacgacgctgcaaaacggcgagaccgtcacccttgatattcccggcaaacgcgtgattcgcggctaa

SEQ ID NO: 258222 - DNA, 774 bp, Klebsiella pneumoniae
atgacaaaggcaaataaccccaaatacccgcagcgcgtgcgtaacgagctgcgttttcgcgagttgaccgtgcagcgcgtcgagcgtatcggtcacgctttccagcgtattgtgctgggcggagaggcgctggacggttttgtttctcagggttttgacgaccacaccaagctctttttccccgaagcgggcgccgcattcacgccgccggtggtgacggatgaaggcattaactggggcgaaggcgtgcgtccggcgactcgcgactatacgccgctgtacgacgccgggcgtcatgagctggcgtacgatttttttattcacgacggcggcattgccagccgctgggcgctgacggcgcaagcgggcgataagctggtgatcggcggcccgcgcggttcgctggtggtgccggaagattacgcctggcagctgtacgtgaccgatgagtccggaatgcccgcgctgcgccgccgtttgctcgggttgcagcagcttccgacgccgccgcaggtgacggcgattgtgactattggcgatgcgtcttatcaagattacctggccgatcttgatggctttaatatcgagtgggtggtagggcataacccagccgccgtggccgaacgtctggcgcaggtggtgattccggcggacgattattttatctggctgaccggtgaaggcgcggcggtgaagtcgctgctggcgcgctttgaaggcgaagagattgacccgcagctggtgcgttcgcaggcctactggcacagcaagtaa

SEQ ID NO: 258223 - DNA, 297 bp, Klebsiella pneumoniae
atgaacgtaacgctggtggaaatcaatatcaaaccggaacgggtcgacgagtttcttgaggtgttccgtgccaaccacgaaggggcgctgcaggagccgggcaatctgcgctttgacgtgctgcaggacccggaggtgaagacgcgcttttttatctatgaagcctatatcgacgatgaggcggtgctggcgcacaagaaaaccccgcactatctggcctgcgtagagaagctggaggcgctgatgtcgaagccgcggcagaagcgcagctttatcggcctgctgccggaggtgtaa

SEQ ID NO: 258224 - DNA, 888 bp, Klebsiella pneumoniae
atggctgatttagacgatatcaaagagggaaaaaacttcggcttagaccgtccgcagcagaacaccctctatacgctgaagggctgcgggtcgctggagtgggggatgcagtcgcggctggcgcgtatcttcaatccgcagagcaaccgtacggtgatgctggcgttcgaccacggctattttcaggggccgaccaccgggctggagcggatcgatctctctatcgcgccgctgttcgaagagaccgacgtgctgatgtgtacccgcggcgtgctgcgcagtcaggtgccggcggcgaccaacaaaccggtggtgctgcgtgcttccggcggcaactcgatcctcagcgaactttccaacgagtgcgtggcggtggcgatggaggacgcgttgcgcctgaacgtctgcgcggtggcggcgcaggtctatatcggcagcgagcacgagcatcagtcgatcaacaacatcatcaagctggtggacgccggcaaccgctacggtatgccggtgctggcggtaaccggcgtgggcaaagagatgacccgcgacgcccgctacttctcgctggccagccgcattgccgccgaaatgggggcgcagttcgtgaaaacctattttgttgaggaaggctttgagaaagtcaccgccagctgcccggtgccgatcgtcatcgccgggggcaaaaagctgccggagcaggaggcgctggagatgtgctggcgggcgatcgaccagggcgcatccggcgtggatatggggcggaatatcttccagtccagcgcgccgcgcgcgatgctgaaggcggtgaaaaaagtggtgcatgagaacctgagcgcccgcgaggcgtatcagttctggcaggaggaaaaacagggagagctgcaatga

SEQ ID NO: 258225 - DNA, 1002 bp, Klebsiella pneumoniae
atgaaattaaaactgatggcgctggcaatggcgttaagcgtcacaaccgcccaggcggcagaccgcatcgcctttattcctaagctggtcggcgtcggcttctttaccagcggcggcaacggcgcgaaagaggcgggcaaagcgctcggcgtggatgtgacctacgacgggccgaccgaaccgagcgtctccggccaggtgcaactgatcaataacttcgtcaaccagggctacaacgcgattatcgtctccgccgtatcgccggacggcctgtgtccggcgttgaagcgggcgatgcagcgcggggtgaaggtgctgacctgggactccgacaccaaaccggagtgccgcagcatctatatcaaccaggggacgccgcagcagctcggcggcctgctggtggagatggcggaaaaacaggtgacgaaaccgaccgccaaagtggcgtttttctactccagcccgacggtcaccgaccagaaccagtgggtaaaagaggcgaaggccaaaattgaaaaagaacatccgcagtgggaagtggtgaccacccagtttggctataacgacgccactaaatcgctgcaaaccgccgaggggatcttaaaagcgtacccggatctcgacgccattatcgccccggacgccaatgcgctcccggcggctgcccaggcggcggagaacctcaagcgccagggcgtggcgatcgttggttttagcacgccgaacgtgatgcggccctacgtggatcgcggcacggtaaaagcctttggcctgtgggacgtggtgcagcagggcaagatcgcggttaacgtcgccgatcgtctgctgaaaaagggcgatcttaacgttggcgacagcgtcgatgtgaaagatctcggcgccctgaaagtcgagccgaacagcgtgcagggctaccagtatgaagcgaaaggcaacggcatcgtgctgctgccggagcgggtggtgttcaccaaagagaatatcaataactacgatttctga

SEQ ID NO: 258226 - DNA, 993 bp, Klebsiella pneumoniae
atgaagctcaactgggaaagcgcgctgctggcgttactggtgctggagatcctgctgtttggcgccctcaatccgcgcatgctggatctcaatatgctgctgttcagcaccagcgactttatctgcattggcatcgtggcgctgccgctgacgctggtgatcatcagcggcgggattgatatttcgctcggttcgaccatcggcctgtgcgctatcgcgctgggggtgatgatgcaggcgggctggccgatgagcctcgcgatccccctgacgctgctgctcggcctgctgtgcgggctgctgaacgcggcgctgattcactacaccggcattagcccgctggtgataaccctcggcaccctgtacctctacggcggcggcgcgctgctgctttcgggcatggccggggccaccggctacgaaggcatcggcggattcccggatagctttaccgccttcgccaacctgaccctgttcggcctgccgataccgctggtgctgttcgccgttatcacctttttcttctggctgctggcccaccgcgggcgctttgggcgacacctttttctgctcgggcagaacccgcgcgccgcgcgctacgccgcgctttccgttaacgggatgccctacgcgctgtatggcctggtgggcgtggcgtcggcggtggcggcgctggtgatggtctcctatttcggctcggcgcgctcggatttaggccgtgacctgctgatgcccgcgctaaccgccgcggtgcttggcggggccaatatctacggcggttccggctcgattatcggcaccgcgctggcggcgctgctggtgggctatttacaacaaggtttgcaaatggtcggcatccccaaccaggtgtcgagcgcgctatcaggggcgctgttggttgtggtggtgatggggcgctcgctgagcctgcaccgggaatgggtgcggatgagctggcggcgtcttttctcgcgtaaaacaatcggagcataa

SEQ ID NO: 258227 - DNA, 714 bp, Klebsiella pneumoniae
atgaatgaaacaacccatcgttttgcacgtttagttgatctgagcgcagttcaggccaccagtaccgaagcggatgttcgcgcctgcgccgagctggctgccagatacaacattatttccgtccacgtactgccttgctggacgcgctttctcagtacgttgctgccgcagcagggtacgggagaggtgatgattggcggtccggtcggctttcccggcggtgggcataccaccgataccaaggttcaggaagtgcggcagctgattgccgacggcgctcgggaagtggatatggtcgtgaatatcggcaaagtgctctccggcgattatgactatgtgcgcgaagatttgcgccgcgtggtggaagccgccgccccggtaccggccaaagtgatccttgaaacgcactatcttaatgaggagcagattcgtcgcgtgtgcgaaattgccgtagaggtggggatgaagtgggtcaaaacctctaccggctgggcgcccaccggcgccacggtggaaaaagtcagcatcatcgccgaccagcttaaaggccgaatcgatatcaaaggcgccgggggcattcgcgatctggccacggtgcgtgcgctgtaccagcttggcgtgcgccgctttggcatgagccatggcgcggtaaccaaggtgctggctgaactggagcagcacccggaacgttttcccgagctgaacgccgattaa

SEQ ID NO: 258228 - DNA, 441 bp, Klebsiella pneumoniae
atgcgggttgagattgaacgctggctgacggggcgcaaaagcctgttaacaatacctgtcgtcctggttctcattgccgaagtctggggatggctactgcagcccccccaaccagacattaacgcgggcggcacgccgcgcatacaagcacagtggcgcaaattgttgccgctgcgggctgcgctacaaaacgttggtattgatgagcaacaaacccaggctttctctcccattgacctcccggtgacgggcgctgcgcttatggactggcggccgatagggcgcggtggcgagatgcagctggcggttgactggcaagcggtaccggcgcttttttcctggctggcccgctgcgggatgcgcgccacggctttctcaatgcagccggaaaatcaggctctacggctgatcctgcaactggaggcggaagatgcgccgtaa

SEQ ID NO: 258229 - DNA, 534 bp, Klebsiella pneumoniae
atgagccatatagtcaacttccttccctggcgcgaaacgcgtcgacggcaacgtctgcagatggcggggctgctgattcttggtttgctgcttattctgctggcggcgctcctcacttcacggctcaaccagcgggtcagccactcgcttgaaaccgcgaagattagcgctgaagagcagctgtataccgcctttcagcagcgtgagcgcgccatgcgccaacggttacagcagcaggaacaacgacgcctgcgcgctctgcggcgggagaaaaccgccgcgtggcagtcgaggttgcaggcgatagcggcgcttatgccggaacacgcctggttaacccaactggaataccgccagaataccctggtactgagcggactcacgttgcatctaaaggggctggctgagcttgaaaaagcgctggggagtgttgccggcttgcgtccgccaaaggcgggagaaacgcaccgcgacggtgaagggcgctggttatttcacttttccatggccggagaggacgacaatgcgggttga

SEQ ID NO: 258230 - DNA, 792 bp, Klebsiella pneumoniae
atggcgtttagaaactggcgcataggaatgcatatccagcaggaccacattgctattgtcgcgttattacatgagcgctcacgctgggcgctacgccgctggtggagtatcccgctcatgcccggtagcgtgcggcagggaatggtggtggacgttgaatcgctggcccgtcagctgcaaagctggcggcgggagctgcctttgcagcatcaggtctgtatcgccttcccggcggcgcgaaccctgcaaaagcagctcccgcgcccgcagatttcattaagagaaagcgaacaggcgacctggattgccagcgcgatggcgcagcagctggaaatgcccgcatcttcgctatgcgttgattatgcgcaaaccggagcggttgatggctggcgggttaccgccgcgcagcggttggacgttaaccttctgtgccgcctggcaagtcgactcaagctgaggttggtggggattgtgccggatgccagcgcgcttagcgcctttctcccctggcaacctgatgacgttcaggggctggcctggcgtgacgaagcgagctggctttgggccaccgccgatagctggggatgctgtccgtgcagcgacgctccctcttttccagacctggtatcccgggtgaatggcggtacgtttcgcctctgcgcctccgcatcgcccgacgggcggaattttgacgcctggagcgctatccatcgcctgcagcccccgctcccggcacgtggcgatagctttaccgttgccctcggcctggcgctgggagcgcgtcagtcatga

SEQ ID NO: 258231 - DNA, 1449 bp, Klebsiella pneumoniae
gtggatatttcgattattatgagtgccgttgcggcgctggccgtgggcctgattgttggctggcttgcgacgaaagcgcacgccgatcaaattcgcgccgatcttatcgaagagcggcgcgagctggatattgaactgagcgcggcccgccagcagctggtgcaggagtcccactggcgagaagagtgcgaactgctcaataacgagctgcgcagcctgcgcgatatcaacgcctcgctggaagccgatctccgtgaagtgacaacccgtcttgaatccactcagctgcatgccgaagataaaatccgccagatggtcaacagcgagcagcggcttagcgagcagtttgagaacctggcgaatcgcatctttgagcacagcaaccgacgggtggatgagcagaatcgccagagcctgcacggcctgctgacgccgcttcgcgagcagctggatggttttcgccgtcaggtgcaggatagctttggccaggaagcgcgggagcgccacaccctggcccatgaaatccgtaatctccagcagcttaatgcgcaaatggcccaggaggcgctaaacctgactcgcgcgcttaagggcgataacaaaacccagggcaactggggcgaggtggtgttgacccgcgtgctggaagcgtccgggctgcgggaaggccatgaatatcagacccaggtgagcatcgaaacggacaaccgctcgcggatgcagcctgatgtgattgtccgtttgccgcaggggaaagacgtggttatcgatgccaagatgaccctggtggcctacgaacgctatttcaatgccgaagatgattatacccgtgaagcggcgctgcaggagcatatcgcttccgtacgcaaccatatgcgcctgctggggcgtaaagactaccagcagctgccggggctgcgctcgctcgactacgttctgatgtttatcccggtggagccggccttcctgctggcgatcgatcgccagccggaactcattagcgaagcgctgaaaaacaacattatgctggtgagcccgaccacgctgctggtggcgctgcggactatcgccaatctctggcgctatgagcatcagagccgtaacgcgcagaaaattgccgaaagagcggggcggctgtacgacaaaatgcgcctgtttgttgacgatatgtccgctatcggccagagcctggataaagcccaggataactaccgccaggcgatgaaaaagctcgcttccgggcgaggcaacctgctggtgcaggcggaatcatttcgcgagctgggcgtggaggttaaacgtgggattaatcctgacttagtcgaacaggcaaccgcacaggatgaggaatacttccttacagatgacggtaacgttcaggaagataacgatttttcttccgatacggccgctgccgccgcgtatgataaccgccctcagccgcgttga

SEQ ID NO: 258232 - DNA, 606 bp, Klebsiella pneumoniae
atgcctttcaaaccactggttactgccggtcttgagacggtcctcaacgctttcctctggcgcgatcgggcgctgaaacccgcccgccagcgtctgctggggaaagtgctgcgcgtcgagctgcaagagctttccgatccggtggtgctggtttttagcgaacgccagctggatgtgctgggcgcgtgggaaggcgaggccgactgcaccgtgcgtacccgcctgagcgtgcttccgcagctacgcaatcgccagcagcttaccgcgctgattcgtagcggcgatctcgaagtagagggcgatctgcaggtggtgcaaaataccgtcacgctgtgcgatctggcggagttcgatccggctgaactgctcgccccgtataccggtgatgttgttgcggaaggcttcggtaaagtattccgcggcggcgctcgctttcttgtgcatggcgctcagcgccagcagcgctatgttgcggaagcgattaccgaagagtggcgcctggcgccgggtccgctggagctggcctggtttgcagaagaaaccgctgcggtggaacgaaccctggccgcgctggaaaaacggctggaaacgctggagggcaaatga

SEQ ID NO: 258233 - DNA, 312 bp, Klebsiella pneumoniae; identical to SEQ ID NO: 188737

SEQ ID NO: 258234 - DNA, 423 bp, Klebsiella pneumoniae
ttgacacccgctggcgtaattggcgtcgtaggcgtcaaaaataaatcaacaggggcaaataccaactacaacgcatccgggacgctgggtattccgtcaggcaaggaaaatgccgcctggaaatgtctggcgctgcgtattggtatcgacggtatttcaggcggcactaattctgtcagcctcaaaaatctgacggataacgttgaggttgtccgcacgaaaatggatacgacgctttatgagcgccagagcgatatgacaaaaacaatccaggtgggcgcgatggttgacccttccacccagaataatgatttcgaccatttcgggtatgccatttgcgatcgcgctctgacggacggcgagctttatacgctttacgctcagctccaggggattggcgaatcaaactcagtcattttttaa

SEQ ID NO: 258235 - DNA, 981 bp, Klebsiella pneumoniae
atggccgtcggtgacggtggcgggagcattcctgacttctccgaatctcaggttgacctgattaatgaatgctatcgcgcaccattaaatcgcctggtgatagcggatcaatccgcaaatatcatccgggcggaaatgattattttgcctcaaaccggtgggttctggctgcgcgaggctgcactctatgacagcgacggcgtgtgcatggcgctggccactttgccgccgtcatacaaaccgcagctcgctgaaggctccgggcgacttcatgccgttaatctctggattgccgtcagtaataccgccgatgtggagctgaaggccgacccgtccgtgatactggcaacgcaggaagaggtaaaccgcgcaaaaagtgaagcaaaagactacaccgacgaggtggcaggtgagataaataccgacattcagcaggctattgccgccgccatcgcagcggcaaaacgtgatttctgggaagaggataatcccgtcggcacggtgaagttttacgcgcagaatatcaatccgaacgagcgttatccgtggtcgcaatgggtttacactggcgaaaataaaacgatccgcatcggcaaagcggacggttcggacgtcggcacgaccggcggcagcgataccgttacactacaacgtgctcacctgccagcagaacaagttgctatcagcggggaaaccagtgatgaaggggcgcaggaactgacaacctccgaaagcggcaatcacacacacggcggcgtggcgagtcgggttaacccgtgggagattggcggtgatatcaaccagcggttcaacccggcgaacctgggcgaaaccgacgaagcgggaaaccataaccatacggtgaccatccctgcgcataatcataccgtgtcaggtaatacagagaatctcgggagcggtcaggcgctcagtgtggtggaggctcataccctgctgatgtgttgggtgcgggtggtgtag

SEQ ID NO: 258236 - DNA, 639 bp, Klebsiella pneumoniae
atggcacagggcagcgtgaaaaagatcggcaaacgttcactggcggtgagcgcgaaaaaagaggcgatcctggccgccgcgctggacgcgttctcgcagtttggtatccacggtacgcggcttgagcaggtcgccgagctggccggggtatcaaaaacgaacctgctctactactatccgtcgaaagaggcgctgtatattgccgtgctgcagcagattctggctatctggctggcgccgctgaaggcctttcgcgaagatatcagcccgctggtggctatcggcgaatatattcgcctcaagctggaggtgtcccgcgatcacccgcaggcgtcaaggctgttctgcctggagatgctgcagggcgcaccgctgctgatgggtgaactgaccggcgatctgaaagcgctggtggatgaaaagtcggcgattatttccggctgggtcgagagcggcaggctggcgccggttgacccgcagcatctgatctttatgatctgggcgaccacacagcattacgccgatttcgccactcaggttgaggcggtaaccggcgcgacgctgcgcgatgaggcgttttttcagcaaaccgtcgataacgtccagcggatgattattgaagggatccgcgtgcgttaa

SEQ ID NO: 258237 - DNA, 3114 bp, Klebsiella pneumoniae
atggcgaatttttttatcgatcgccccatttttgcgtgggttctggcaatccttttatgcctgaccggtaccctcgcaattttgtcgcttcccgttgagcaatatcccgaacttgccccacccaacgtgcggatcacagcaaactatcccggcgcttcggcacagacgctggaaaataccgtcactcaggttatcgagcagaatatgaccggtctcgacaacctgatgtatatgtcatcccagagcagcggcaccggacaggccaccgtgacgctgagctttaccgccggaaccgacccggatgaagccgtccagcaggtgcagaaccagctgcaatcggcgatgcgtaagctcccacaggccgtccagaaccagggcgtaacggtacgcaaaaccggggataccaatatcctgacgatcgccttcgtctccaccgacggcagcatggataaacaggatatcgccgactacgtcgccagtaatattcaggacccgctcagccgggtgaatggcgtcggcgacattgacgcttatggttcccagtattcgatgcgcatctggctcgatccggccaagctcaacagctttcaaatgacggcaaaagacgtcaccgatgccatctcttcgcagaacgcgcagatcgccgtcggccagttgggcggcacgccatcggtggacaaacaggcgctcaacgcgacgattaattcacaatcgctgttacaaacgccggaacagttccgtgatattaccctgcgggttaatcaggacggttcggaggtcaccctcggtgacgtcgccaccgtcgagatgggagcggaaaaatacgattacctcagccgctacaaccgccaggcggcgtccgggctgggggttaagctggcctctggcgcaaacgaaatggcgaccgccgaacgcgtgatcgaccgcctgaacgaactctcccagtacttcccgcacggcctggaatataaagtcgcttacgaaactacctcattcgtgaaggcatcgattaccgacgtggtgaaaacgttgcttgaggccatcgcgctggtgttcctcgtgatgtatctgttcctgcaaaatttccgcgccacgctgatcccgaccatcgccgttccggtagtgctgatggggacctttgccgtcctctacgcctgcggctacagcattaacactttaaccatgttcgcggtggtgctggcgataggcctgctggtggacgatgccatcgtagtggtggagaacgtcgagcgtatcatgagcgaggagggcctctcgccgcgggaagcgacgcgaaaatccatgggtcagatccagggcgcgctggtcggtatcgccatggtgctatcggcggtatttgtgccgatggccttcttcggcggcaccaccggcgcgatctaccgccagttctcgattaccattgtctcggcgatggtgctgtcggttctggtggcgatgatcctgacgccagcgctgtgcgccacgctgttaaaaccggttcacaaaggcgaaacccacggacagcggggcttcttcggctggtttaaccgcacctttaaccgtaacgccagccgctacgaaaccgcggtcggcaaaattcttcatcgttcgctacgctggataatgatctacgtcctgctgctgggcggaatggtctttctgtttctgcatctgcctacgtcgttcctgccgctggaagaccgcggcatgtttaccacctcggtgcagttgccaagcggttcgacccagcagcaaaccctgaaggtggtgcagcaggcggaagactacttcctgaacaatgagaagcaaaatgttgaatcggtgttcgcgaccatcggttccggccccggcggcaacggccagaacgtggcgcgtatgttcgtacgcctgaaagactgggaccaacgcgatcccaccaccggctcctctttcgccatcatcgaacgcgcaaccaaagcgtttaacaaaattaaagaagcgcgcgtctttgccagcagcccgccggccatcagcggtctgggcagctccgccggtttcgatatggaactggaggatcacgccggcaacgggcacgaagcgctgatggccgcccgcgataccctgctggagctggccgctaaaaataaccagctcacccgcgtgcgccacaacggcctcgacgatagcccgcagctgcaggtggatatcgatcagcgtaaagcgcaggcgctgggcgtctctattgacgatatcaacgacacgctgcagaccgcgtggggatcaagctacgtcaacgattttatggaccgcggccgcgtgaagaaggtctacgttcaggcggcggcgccgtatcgcatgctgccggacgatatcaatctgtggtacgtacgcaacagcagcggcacgatggtgcccttctccgccttcgccacctcgcgctgggagaccggttcaccgcgtctggagcgctacaacggctactcggcggtagaaatcgtcggtgaagccgcgccgggcgtcagtaccggtaccgccatgacgcttatggaggagctggcccagcagctgccgaacggctttggcctcgaatggacggcgatgtcctatcaggaacgcctctccggggcgcaggcgccagcgctttacgccatctcgctactggtggtgttcctgtgcctggcggcgctgtacgaaagctggtcggtgccgttctcggtgatgctggtggtgccgctgggggttatcggcgcgctgctggcgacctggatgcgcggtctggaaaacgatgtttatttccaggtgggcctgctgacggtaatcggcctgtcggcgaaaaacgccattctgatcgtcgaatttgccaatgaactgaatcagaaaggcgaagatctgcttaccgccacgctctccgcctgccgccagcgtctgcggccaatcctgatgacctcgctggcgtttatcttcggcgtactgccaatggccaccagtaccggggcgggctccggcagccagcatgccgtcggcaccggggtaatgggcgggatgatctccgccacggtgctggctatcttcttcgtgccgctgttcttcgtgctggtgcgccgccgcttcccgctcaaggagcggccgcaataa

SEQ ID NO: 258238 - DNA, 882 bp, Klebsiella pneumoniae
atgactgctactactgctaattcaactgctaatacatctactcgtgctaaaacatcaaatactgctaaaacttcacagccagctgctaaagctcctaaaaaaattgataaagactcaattttaatggcgcatgcaaaagtattctatggtgacgaaattccaccatcaaatactggcagtgatatttgcaaaattgaaaagggcactgataacgacaaggcttacatttggtatatgacagattctgtcagccgtgtagtcgagttaaaagcgcttgaggaaagttcaaaactgaagcatcttgttggttctgaacgttctgttatctacagcatggatgttaggcttatcgagttaaatattgactctattgtttcatcagaaaatcttaacttcggaaaagaaaaactgattaaacttggagcagttaaagtaagtcagtggcttcaacttgtcattgatgaagtctttgttttttataaacgtgaaaactttattgagactgtagaatctccccataaggaccttaatgacttttacagtaaattgaaacctttgatgagagagttcggtcttaaagataaacattatgggctttcatttaaagagatgatgatccacaaagttgatggttttgattttgttgtttctgattcaatgcctaagttgcttaagcttgaagcctcattgaaagaagaggaattaaaagcaaaggccttcactgaaaagccattagttgatgaagcaatcactgaaattccaaataaggttatttctttctatgattcggtaacaacaagagttctgaaaggagctgcttgtgtagccgttgtctattttggagcttctactttatataacttcgttagctacattcaatga

SEQ ID NO: 258239 - DNA, 1800 bp, Klebsiella pneumoniae
atggcatctagtactgaagaacaagaccgtgttatacgaaacatggataaaaacacaatggtgattgcatgcccaggcagtgggaaatctttcacaatgaaggaaggaactaaagctatttttcagcgacatcctttagccagagtagcattggttacttttacccgtgccgctactgattctttaaaaggtagtctacaaaaaatgatagaaccacaactcatgagtaggattgaggtagacacatttcatggtttcataaaaaaaatggttaatcaaaccggctggaaaggtgggctacttatcggtcacaaacagatggctatggtttctcgtgttcagaaacatttggactaccatgaaggtgtgtacgacatcatgccatttattgatgggatcggacgagaactaaatcctgatattattaagataaaatatacacgtgaccaaatagcattttacaacgagtatatgaatttttgtaaaaaggacaatgttgcagatttcaactcattgtcaaaatatgttgttggaatgctcagcacagataaaatgaggccattaggtatcacgcatctgattgttgatgaagtacaggataccgatggaattcaattcacatggatttcagaacacgccaaaagagggatcaataccacgatagttggtgatgatgaccagacaatatatagcttcagggatgccggaggcgtaaagattttcaggcagttcaacaaagcatacaaccccaatgtttttcatctaacaaagtgcttccgttgtgccccagtcattttgaaatttgctgatgcggtgataagcaagaacaaggcacgttacgagaaaagccttgtatcaggaaggcaaggagatagagggaaagttacttttgtgaaaactgatgatgcagaaaaccagtttgagactatcagagatctggtggagaagaacccaaatgactgggccattttgagcagaaacaacaccactttggacaagatggaaagttatctcgagatgccggtcacccggataggaggtaaatcattctgggaaggactggagcctagtaatatccttcacctgttcacctacttcaggcagcctggtaacgttggtctgatgaaacgagtgctttcatttctaaatgaagatgagcaaatccttgatgtgttatggaaacagatgagtgccagaaaagttacttttcagcaaacggacttacccaatgattcttctgtgctcactaaaatgctgcataagcatatgacgctcatgttgactgacacgcaaagtaaggaagagatagaaaaccggtttaaaaaaataaaagagtggttagaaatggccggatacaaaatgttcaatactaaaggtgatccatcagttacccggttatcattaatgtcctgctatcgatgggcaatcaaagatggatggctgaagatgcttaatattgcagctggcatgacgatggggagcaaaaaagaaccaactgataccgagcagagtggaatatgtctttgcacactgcatggttcaaagggccttgaatggaaaaaagtaataattataaattgcaacaatgaccaaataccatcaccaaaagccattggggatgaaggtattgaggaggagcgccgattattttttgtaggaatgacacgcgccgagtcagagctttacataacgtggcatggaaaaccatctgaatttataaccgaatcgttccctaaagtagttgagttatccggtgaatatgctgtggttgaaggcaaagaagatttttgtttacaatga

SEQ ID NO: 258240 - DNA, 852 bp, Klebsiella pneumoniae; identical to SEQ ID NO: 188791

SEQ ID NO: 258241 - DNA, 525 bp, Klebsiella pneumoniae; identical to SEQ ID NO: 188790

SEQ ID NO: 258242 - DNA, 540 bp, Klebsiella pneumoniae
atgatggaagatctaacaaaagattcatcgtcgctgttgcaatacagaaacgagaaggtatttaactccggaaaagctgcgcttgaactcaatacttcagcttccaatggtgacgttaacctgatacttaccggtccatcgccagaaaagtctggttcttttgactggacaggtagtaaatgcatttcaacaaagcttagtgacgatgaagtcataactttatgcatggcatttcttcaccttactccagaagcagcgcttaaagataagaaaaccatgcatcatgggaagagagtctacaaaaacataaaagtaacttttgacggaaaactaacagctatactggaaggtggggttcttgccataaacaagactgaaagtggagtcaatttcgtacataaaattagtatcgaaccttcagcttgccttaggttaggacttttcctcctgtcagtcattcaatcaagaaatcctggcctaccgtccgatacgatactgacgtgcatgcgtctaaatgcaagcgctcgatcccaaaagtaa

SEQ ID NO: 258243 - DNA, 453 bp, Klebsiella pneumoniae; identical to SEQ ID NO: 187058

SEQ ID NO: 258244 - DNA, 804 bp, Klebsiella pneumoniae
atgactattctttcaaatttaaacattgacctgactaactttaacggacgtattcttatagtaagtgatctgtatggtcactttgaattacttcgcacagggttgtcacgcttgacagctgttagcgacgaactcgttattataactaccggtaacctttttgactggggaccatctgctaagagtcttttgaagtcaattgtacaaagaaaaattggcgaccaaaaagtccatgttttttcagtagtgggctttcatgagcttctcatgactgatgctataactcaaaaaaacaataaaagcctgcgctattatccagacacgcatactcgtaaacactggagaagtttgggcggtaaatggcatgatcaatatgatcaaatcttacttgaacgtgacatatacaaaatagactacccattggttattaatgtaaaaacaaagcacggtatttacataattggttcgtctgatatcccccaggatggaagggaatggaaagacataatagataccctaaacaaaatggacagtcaaaaactgcgcattatggcaactaatatcaccaggagtcgctattttcttgattctggcaaagtaatagacaacgtttcgcttgtagtgttaggtgcgcaccagcctaaagaaattgcatatggacaaaggtctaacgcagtgattaataaacaaatcacttgcctcttccctaatgactggaatggtttatcctctgctcctttggattttaaaataagaattcttgatatcacggatacagaactggggcgtttatatgaagtttaa

SEQ ID NO: 258245 - DNA, 1662 bp, Klebsiella pneumoniae
atgtgttcgatttttggcgtactggatattaaaactgacgcgggtgagctgcgtaaaaaggcactggagctttcccgcctgatgcgccaccgcggtccggactggtcaggcgtctatgcctgtgataaagccatcctggcgcatgaacgcctgtcaatcgtcgacgtgaacgccggcgcgcagccgctgtacaacgctgcaaaaactcacgccctcgccgttaacggtgaaatctacaaccaccaggcgctgcgcgcggaatacggcgaccgctatgcgttccagaccggttccgactgcgaagttatcctcgcgctgtatcaggaaaaaggtccggacttcctcgacgatctgcaggggatgtttgctttcgctctctacgacagcgaaaaagacgcgtatctgattggtcgcgaccacatcggcatcatcccgctgtatatgggtcacgacgaacacggcaacttctacgttgcctcagaaatgaaagcgctggttccggtatgccgcacgattaaagagttcccggcaggcagctacctgtggagcaaagatggcgaaatccgcgagtactatcagcgcgactggttcgactatgacgcggtcaaagacaacgtcacggacaaaaacgaactgcgtcaggcgctggaagagtcggtgaaaagccacctgatgtccgatgtcccttacggcgtcctgctctccggcggcctggattcatcggtgatttccgccatcaccaaaaaatatgccgcgcgccgcgtcgaagatcaggaaaaatcagaagcctggtggccgcagctgcactccttcgccgtcggtctggaaggcgcgcccgatctgaaagccgcgcaggaagtggctaaccatctgggcaccgtgcaccacgaaatccactttacggtgcaggaaggcctggacgcgattcgcgatgttatctatcacattgaaacctatgacgtgacgacgattcgcgcgtcaacgccgatgtacctgatgtcgcgtaaaatcaaagccatgggcatcaaaatggtgctgtctggcgaaggttctgacgaagtatttggcggctacctttatttccataaagcgccaaacgccaaagagctgcacgaagagaccgtacgcaagctgcaggcgctacatatgtttgactgcgctcgcgccaacaaagcgatgtccgcatggggcgttgaagcgcgcgtgccgttcctggataagaaattcctcgatgtggcaatgcgtatcaacccgcaggacaaaatgtgcggcaacggtaaaatggaaaaacatgtcctgcgtgaatgttttgaatcttacctgccggcaagcgtcgcctggcgccagaaagagcagttctctgatggcgtcggttacagctggatcgatactttaaaagaagtggccgctgaacaaatttccgatcagcagctggaaaccgccagcttccgcttcccgtacaacacgccatcatcgaaagaagcgtatctgtaccgtgagatcttcgaagagctgttcccggttccaagcgcggccgaatgcgttcctggcggcccttccgtcgcatgctcttcagcaaaagcgattgagtgggacgaatctttcaaaaaaatgaacgatccgtcaggacgcgcggttggcgtacatcagtcggcctactaa

SEQ ID NO: 258246 - DNA, 705 bp, Klebsiella pneumoniae; identical to SEQ ID NO: 189874

SEQ ID NO: 258247 - DNA, 1476 bp, Klebsiella pneumoniae; identical to SEQ ID NO: 189873

SEQ ID NO: 258248 - DNA, 2004 bp, Klebsiella pneumoniae; identical to SEQ ID NO: 189872

SEQ ID NO: 258249 - DNA, 282 bp, Klebsiella pneumoniae
atgaagaaaatctatgtactagccgcgttcaatttcaacgacggtgcgaaaatcacgccattcgctgcaggcttccatgatgttgaagacgcagtggcagagcattggtttgtaaaagcacattgctcaccagatggcgaagcgccggcggtggttgatgatcctcgcattgccgaactggaagcgcagatcgtagagaaagatgcgcgtatcaccgaactggaagcgcagttgccggagaccgcagccaatggcaagaaatcaaagtctaccgacgcctga

SEQ ID NO: 258250 - DNA, 942 bp, Klebsiella pneumoniae
atgccaatgacatttgaccaggcaacagtcgacagttctggcgcctttctcattcacgagctggagcgcctcgatcaaacgctgaacctgccgctgacctcccagacgtggagccgtgatattcagctgcgtgaagacgtgtctatcgctgacgaaatcagttctttcaccaacaccacctttgctgcggctggcacgcctaatgccaacggcaagaactggatcagcccgctggcaacagcaattgccggtatcaatgttgatatcgagaagaaaggcttcccgctcgaattgtggggcatggagcttggctggaccattattgagcttaatgctgcagcgcaggtaggtcgccccatcgacacccagaaatacgatggtatgcagcttaagtggaatatggacaccgatgagcaggtttatatcggtgactcggcgaaaggtgctaaaggacttcttaacctgtctcaggtgacaccgaccaacgcgaccaaaacgtgggccacctcaaccgccgacgaaatccgcgccagcattaaccaggtgctgagtaatgcatgggcccgctccgcttactccaaagtgccggaagatttgctgatcccgcccgaacagtattcgttcattgcgagcaccatcgtttccagcgccggtaaccagtctctgctgacctacctggaaacgaacactatcgccttccaccagaacggcaagccgctgaacattcgtccggttaaatggatgaaaggtcgcggtgtgggcggtactgatcgcatggtggcctacaccaacgataagaagtttgttcgcttcccgatggttccgctgcagagcgtcccgatccagtatcgcggcctgtatcagctggtgacctattacggcaagctgggtgcggttgagccggtttacccggaaaccctgaactacatggatggcatttaa

SEQ ID NO: 258251 - DNA, 495 bp, Klebsiella pneumoniae
atggacaacactattctctaccggatgtcttcgggcatcgccggtgcaatttcacgtccgcaggatctgacggttgaacctcagacactggacagcacgaaggcatttgccgcgtatggactcgccggaaagttctccgcaggtaaatttgtgccgattgaggcggctgatacttctgctgttgtggtgggtatctatgttcgcccgtacccgacagcctcccagcctgacaaggtacgccagatcggtactggctataacttcgcgggcgactgcatgaagcgtggttatgtgacggtgaacctcggcgcagatgccagcgctgtggcacttggcggtgctgtgtttatgcgtgtggcaacgccgaccgcatccagcccgttaggtgccttcctggctgctgcagacgatacgaacaccgtgcagctcaccaacgcttatttcaatggtcctggcgatgccaatggcaacattgaactggcctttaacatttaa

SEQ ID NO: 258252 - DNA, 1200 bp, Klebsiella pneumoniae; identical to SEQ ID NO: 190067

SEQ ID NO: 258253 - DNA, 870 bp, Klebsiella pneumoniae
atggaatggggagacgtccgggtatttcttgcagtccttcgtcaaggctccttcggtgaggcagcgcgcagccttggcgtgagtcatccgacggtaggacgcaggataaaagcgctggaagatgaagcccagcaggcgctgttccgccgtacaagggagggtctggtgctaacggacgccggcgacagagttcttaagctggctgaggcgatggaaaactccgcgctggcaatggaacgacgcctggcggggaatcatgaacgtcttgaagggatattaaggatatcttcagcagaatggttcgctaactatgttctggccccggtgcttgtcgaactgacgcgccgccacccggccattgtgccggaagtcattgcaagctaccgcttgctcaatttgtcgcgccgcgatgccgacatcgcgtttcgcatcgtcccgtttaccgaaccggatattgtccagcgccgcctgatgagtatgccctatgcgctgtatggaacagcggaaaccgcgcagacggtgcagcacgatccggccgccgtggggcttattttgatgaatacggcgcaatctcacttttctgatgttgcctggctgcttgatggcttccccctgtcgcggcgggtgttcaccagtaccagtcgggccgttcaggcgcagatgtgtcagcggggaatggggatggccgtgctaccgcagcctcttggcgatgccctctccggattgcagcgcattggcacgccgacgccaccgccatccaaagatatatgggtcgggtatcactctgatctccgacatatggatcgcctgcgggcaatgctggatatcgtcgatgccatgcttgccgatcctgttgcggccggcacctga

SEQ ID NO: 258254 - DNA, 1437 bp, Klebsiella pneumoniae
atgtcgacccatcgcatcacgcaagctgagccgcgccgctgggccatgttcgtcattttgctggtcggcgcgtttttgccgccgctcgatttttttatcgtcaatgttgcgctgcctgccatccagagcgagctgggcgcctctttctccgccgaacagctggtcatttcatcctatgcggctgtgtatgctgtcaccctcattaccggaggccgcctgggcgatatttatggccgcggcaggatgtttttccttgggcttatcggttttgctgctgcatcgttattgtgcggtttagcctggtcaccgtgggtgctgattatcggacgcattttacagggtgccacggctgcgattatggccccccaggcgctggcttccgtgcaggccattttcccggaagcggaaaaaccgttcgcgctgagtctgtatggcgcagtgtttggcctggcctccgttatcggccaggtatcaggcggcattctgatctcagcgaacctgtttggcctgggatggcggactatttttctcgttaacctgccggtggcgctgctggtcatcctctttggcgtgccgctgctgaaagagacgcgggcgcaatctgcacagcggctggaccccgtcggcacgctgctgacaaccgtgatgctgagcgcggtgattgtgccgttgactgaaggccgagaggcagggtggccgtggtggacgtggctgtcattgcttgctttcccactgctggcccggttgttatggcgctatgaggatcggcttagccagcatggcggttcgccgctacttaatcctgccgtgttgcgcgcgccgggactgggccagggactggcgatcgtattgctgttttattccatcggcgccttctttcttttattttccatttatctacaaggcgcgttgcatttgaacgccctgaccgcgggcctgatttttctgccctttggcgtcggctttctgatcggaccgttgctgacgccttatctcaggcgcttggttggcaattacctgagcgcaatcgggatgggatgcgagaccttagggctggcaggtcttgcaggggtcattgccaatacgccgacgggcagttctcccgccgcgctgccgctcgccctattgctttttgttaccggtctcggccagggactggcgatgccaacgctggtcagaatggtaaccggtcgcgttgcgccggcgttttcgggaatgattgccggcgtgaccagctcggcgctgcagctcagcacggcgctgagcgtcgcggtgattggcggccttttttacagcatgttggacaacgggaaaagcgcggcgaatatcacccaggcttttatcgtcgcgctggcggcgatgtcgctctgccttgccgcgggcgccgggttaagtttccgccttctccggcgctcttcggaatgggaccggcgatag

SEQ ID NO: 258255 - DNA, 1497 bp, Klebsiella pneumoniae
atggcgccccgcaacgcctgtatagtcagatttatcaaaaatcagactatacagatgacgatgtccgaccctctcccgccgattccccactaccgccgaatagccgatatgctgcggctgacgcttacttcaggcgctttgcgggcaggcgatcgcattatctccgcgcgcaaactggccgagcgcgagcaggtcagccttcccacggcgctggaagccctgcgttatcttgaggcggaggggctgatcgtcgcccgaccgcgttcaggctactttgtccgccagataaacaccgccaaagacgggcagcgcgcagcatctttatccggcccggtgccggtgaccatgtccgccatcgcccgctcgttgttcggtagcgctgaagcgcgtctggtgccgcttggcgccgcgctacccgatcccgcctggcttcccgtcgaggctttgcagcgggcgttgcacactgccggtcgtcggcttgatgcgcgcgggcagagctacagcctgcccccgggaagagcggacctgcgcagaaagattgccgcccgcgcggcgcagtggggcgccctttttggcgccgatgaccttatcatcaccgcaggcgcaacccaggcgctacgcctggcgctccgcgcggtatgccagccgggcgatgcggtggcgattgagcagcccgcctatttcggcacgcttctgctgctggaagatctggggctgaaggcgttacagatccccacggacccgattaaagggttattactggcgccgcttaaagaggccattaagcaccaccgtccggcagccgttctggcctcacccacggtgcaaaatccgctgggcgccagcatgcccgtcgcgcgcaagcaggcgctggtggccctgcttgccgatcagggcatccctttaattgaggacgatgtctacggcgatctggccggtggcgcgcagcgtccgcccgcgtgtaaagccttcgacaagggcggaaatgtgatttattgcagttctctgtcgaaaaccctggcaccgggctggcgaattggctggattgccgccggacgctattacccggcagtgttgcaggcccgcatggccggggaatgggcgggcgcgccgctgatagaggccgcggcgaacgagatcctcgccagcggagattatgaccggcacctgcggcacctgaagctgcggattgcggaaggtatgcgggccattatcgccagggttgacgcctgcttcccaccgggcacgcgcgtagcggcgcccgaagccggctttctgatttgggtcaaactgccgtccgggatcgatgcgctggaagtccatcgtcgcgccctcgccctgggtattggcgtcagtccggggccgctgttttccccgggcgcagctgaactgcaaaactacctgcgcctgaacggtgcgaacgaacccacgcccgcgcttttgcaggccgtggagcagctcggtagcttatgccatgaactggtcgggggccgttga

SEQ ID NO: 258256 - DNA, 768 bp, Klebsiella pneumoniae
atgcacagcgacagttttgacctttccctttacttccgccgcataggctatagcgggcctgcggctgccgataccgcgacgctgcacgcgctcatgcgccaccagctcttttcgatccccttcgagaacctggacgtacaggcaggtaaaatcgtttcgatggagcccgatgatattgccaacaagctcttacggcagagacggggcggctactgctatgaactcaacgggctgtttacgatggcgctggaagcgctgggtattgcctggcggtttgtcgcggcgcggcccatgttctatcctgcgcgccggcctaaaacccatatggcggtggtcgcggaagttgatggccgtcagtggctttgcgaccttggctttgggagctacggtatccgcgcgccgctggccctggacgaacttgatacggacatcatccaggattttgatacgttccggcttacgcgtgatgcgaacggaagctatctgctgcaggcgagggttgagggaagctgggccaatcaatacggttttgacctgtcacctcaggagtggattgattttgttccggccaattttcttaactccacgcatcccgatgcggtctttgtacaaaagctgctggtgatacagcatcagcccgaggggcgttttattctgctcggcaatatgcttaagagtattaccgccgaccgcgtagagaagcagtggctgacagaagatgaaatagcgcatgcgcttgagaaccgctttgctttgtctgctcgctaa

SEQ ID NO: 258257 - DNA, 969 bp, Klebsiella pneumoniae
atgacgaatatctacgactctacctctatcagtagtcaggtacccgcggccgcggttaacagcgcgagcgcggtatcatggggagcgatatttgcaggcgccgccgccgcggcgtcgctggcgcttatgctgctcatgcttggcgccggattgggccttacctcaatttccccgtgggaaaatcaaggacttgcggcgggaaccgtcggtattgccgccatcgcatggctgacgtttacccaaatagtggcgtcaggtatgggcggatacctcgccgggcggctgcggactaaatgggttgacactcataccaatgaaatctatttccgcgacacggcgcatggctttctgacgtgggccgtggcgctgctggtctccgctgtgctgttgaccaccaccatcagttcgctgatcggcggtagcgcaaaagtgataggttccgttgccggcggcgcgacggcaaccgccatgaataacgcgggggacggagcctctctgttatcgaagtcatcgatggaatattttacccgttcactgttcagggctaccgctgccactccggcggataatagcgggctgccagcaaattcatcaggcaatgacgttatggcaatgaatcatcctgtgccgccaaaggcggagtcaccggctcaattagcagaagtgacgggtatttttgctaatagcattaattctggcgcgcttccccaggacgatctgacgtatgtggcgcagctggtttctcagaataccggcatcagtcagaaagaggccgaacagcgggtacaggcggtttatgataaagcccaggccaatttaaaagaggcaaaagataaagcgcagcagaccgcagacgccgccagaaaaaccactagctacgtcaccctgtggtcattcatttctctgttaatcggcgcttttgttgccagtctctgcgcaacttatggcggccgtcagcgtgatttataa

SEQ ID NO: 258258 - DNA, 801 bp, Klebsiella pneumoniae
atgcttaatacgttacccgatttacacagaagttttgcagagcacctcaagcttcaatttcagtctgactcgcggattcactcccttctcgccggcggctcgattatccatggcggatttgataaatactccgatttggattttgtcgttgtggtcgatcccctctactatgacgaaatcatggcccagcgtgtggcgttcgccggaacgctgggccatctcctgcatgctttcagcggggaacatgtcggagagcctcgcctgctgatatgcctgtatggtcctgaactccttcatgtcgatctgaaatttgtcaccctggaaatgctcactcaacgcgttgaggagccagccgtgttatttacccgtgataaccgtgctctgcagcaacaactggcaaaattcagtgctcactggcctgatatgacgccggagtggttcgagtcccgagcctggatctggcttcattatgcggtggctaaactaggaaggggcgaactctttgaggcgattggtatgctgtcattcttccgcgagcaggtactggggccaatgctgcaccgccgtgcaaatttaccgcaacgtggggttcgccgcattgaatcgcgcggtattgatcctgacggcctgctgacttccacgctggcaacgcacgatcgtgactccgtcagcgttgctatcagaatggcccttgacgcttatatcactctgcgagcggatgctctgcctgaaaatatcgcagacgatgccgcgcaacgggcgctgttggcgatgctgaaagcgtattctgacaaagtttaa

SEQ ID NO: 258259 - DNA, 1695 bp, Klebsiella pneumoniae
atgagtaacgcaataactaaagtgcaaaacgccaatgcacgtcgtggcggtgatgtattgttagaagttctggaaagtgaaggggtggaatatgtgtttggtaatccaggcacaaccgaactgcccttcatggatgcgctgttaagaaaaccgtcaattcagtacgtattagctctgcaggaagcgagtgcagtagccatggcggacggttatgcgcaggcagcaaaaaaaccaggatttctgaatctgcataccgccggtggtttaggccacggcatgggaaacctgttgaatgcaaaatgttcacagacaccacttgtggtgacagcagggcagcaggatttacgccacacgacaaccgatccgttattgttgggtgatctggtcggaatggggaaaacgttcgctaaatggtcacaggaggttacccacgttgaccagctaccggtattagttcgccgggctttccacgattcagacgctgcaccgaaaggctccgttttcctgtcgcttccgatggatgtgatggaggcgatgagctgtatcgggatcggggcgccttccactattgaccgcaatgcaatcgcgggttcgttacctttgctggcaagtaagctggcggcatttactccgggtaaagtcgcactgattgccggcgacgaaatttaccaaagtgaagcggccagcgaggttgttgctcttgctgagatgcttgccgctgacgtatacggttcaacatggccaaaccggatcccctacccaacagcacaccctctctggcggggtaatctgtccactaaagcgacggaaattaacagagcattaggccagtacgatgctatttttgcacttggcggtaagtcgcttatcaccattctttatacagaaggtcaggcagtaccggaccagtgtaaagtgttccagttatcagccgatgcgggcgacctgggacgcacctacagtagtgaactctcagtggttggcgatattaaatcatcgttaagggtgctactgcccgaactggaaaaagccacggcaaaccatcgcagtgattatcaacgtcgttttgaaaacgcggttaatgagtttgaattgagcaaagaaagtctgctcgggcaggttaatgaacaacaatctgctacggtaattacgccactcgtggctgcgtttgaggcagcaagggcgatcggaccagatgtggcaattgttgacgaagcgattgcaaccagcggctcgcttcgcaaatcactcaacagtcgccgtgcggatcagtatgcctttttgcgcggcggtggtctggggtgggggatgcctgccgctgtgggctattcactcggtttgggaagagcgcctgtggtgtgctttgtgggcgacggcgctgcgatgtactcccctcaggctctctggacggccgcacatgaaaaactgccggtaacctttattgtaatgaataacacggaatataacgtattgaaaaacttcatgcgttcacaggcagattatacttcggcgcaaacagaacgctttatcgcaatggatttgattaatccggcagttgattatcaggcactgggtgcatcgatgggactggaaaccagaaaagttctccgtgccggagatatcgccccggcagttgaggccgcactggcgagtggcaaacctaatgtgatcgaaatcatcatcagtaagagttaa

SEQ ID NO: 258260 - DNA, 921 bp, Klebsiella pneumoniae
atgaaaccgaccctaaatcagttgattaacttttgcactgttgctgaaaccggaaacatcggcaaagccgccaataaactcaatatttcgcagccccccttaagccggcaaattgcccagctggaaaccatcctcggtgcaaagctatttaaccgggccgctaaaggtgtcagtttaacccttgccggagagcaatttctggtagactgccaggcggtgctggcaatgctggagcaggcctgtaataacgtacgggcagtagaatcagggcagaaaggtgttctgaaattaggtgcaacaatgtatgccagctatagcgttgtgcctcatgttgccatacagcaccgggatacctattctgatgtggaattgcattttcaggagatggtcccctctgatttacacgccgcattacaggatggcagattagacgcggcaatcagcttctccgagacggccactccgggaattcattcactggtgctcttgcgtgagccgctaatcgccgcccttcctgccaatcacccccaggttcaaagcgagcatttcaggcttgaatcactcagtgatgacccgttcatcactgttccgcgccagagtgcaccgatgctctatgattccatccttcatcagtgcctcaaggccggatttagcccgcaaataggactggaagcctccgtacagcagactgtgatgaattttgtggcccgtggcgttggcgtggcgcttattcccgcaagtatggagaatgcccaattgcgtggtgtggtttaccgtaggctggaaaatccgaatatggtggagaatatgttgatgtggtcgacaaagaacaaaaacccggctttaccgggttttgtgaacctgtgccgcagtatcagggataaactggatgcagcgcagtccggacggattaacgattaa

SEQ ID NO: 258261 - DNA, 912 bp, Klebsiella pneumoniae
atgaacacatctatcccatgggagtggtaccgaacatttctggctgtgctcagggaaggctcgctttccggcgcatcgcgccggttttcgatgacgcaacccacggcaggacggcatatcgctgcgctggagtcggctcttggccaggtattgttcacgcgttcgcaaactgggttgctggcgactgaaacggcgctggcgctgagggtgcatgccgaagcgatggagagcacggcgaatacgctagcgcgcacagcctccaacttcagtcataacagcgcgtccattcgcggcgtcgtccgcgtctccgcgagtgacgttatcggcgttgaggtgctgccgccgcttattgccaggctccgggagtctcacccacaaataacgattgaattagttctgtcgaatcgggttcaggatttactgcacagggaagccgatattgctgtacgcatgacgacgccggtacaggagcagcttattgcgcgtcgtgtaggccggattgaactcggcctacacgcatcgacttcctatctggcacgacatggcacgcctgaaaatagcgaagaactgctgaaacatgcgctggttggctttgatcagaatacgcctttcatccgtaaggtactggaaaaataccctcagttaagccgggattcattttccatgcgcaccgatagcaacgtggctcagcttaatcttattcgcgccggtgccggcattggcatatgccaggtacagttggccaatggctatattccactgcagaggttactgccgaatttcttttctttatatcttgatacctggatcgtcatgcacgaagacctgcgcaatagtctgtgctgcaaactggttttcgatattctggcaaagggattagaggaatatatctgccagaggcaggaaccgtga

SEQ ID NO: 258262 - DNA, 963 bp, Klebsiella pneumoniae
atggtaacccgaggcagggtcttaatacttggcgcaaccggcggtattggtggtgaaactgctcgccggctcattcagaaaaaatgggacgtacgtgcgctaaaacgaggacttcacggcagtgaacgaagcggtgacatccagtggataggcggcgacgctctcgacccggagcaagtcgccgctgcggcagcagactgtagcgcgatcgttcacgccgtcaatccgcccggctaccgaaactgggagcatctggtgctgcctatgctgcgcaacacgattggcgcagcagaacgaaccggcgccttagtcgtgcttcccggtaccgtttacaactatggtcctgacgcttttccgctagtacgggaaggtgctcagcagatgccggtcacaaagaagggagcgatcagggtacaaatggagaaagaactggaggcctattcgcagcggggcgggcgggtattaatcgtccgcgcgggggatttttttggcccacgcgccggtaataactggttttctcaaggtctgattaaacccggcaagctgcctggcgtcattaccaatcctggttcgcctgcaaccggtcaccagtgggcttatttacctgatgtcgcggaaacgatagctgcgctgctggaacgacgcgaggaacttgagccctttgcgcgcttccatatgcaaggccattgggatgccgacggcagcgaaatggtcagcgcgattcaacgcactgcggcgcgctttggcggcgttgccaaaatacgctcatttccgtggtggtttatgtacctggctgcgcctttcaacgcaaccttacgcgaacttttggagatgcggtacctgtggcgccagtcggtccgcctggacaatacgaagctggtgaattttttaggcgctgagcctcataccccacttgatgtagccgtccatacgacgttacagggcctgggctgcattgaatga

SEQ ID NO: 258263 - DNA, 2874 bp, Klebsiella pneumoniae
atgacccagactttaggccagcttgaaaaccgtgacgcctttattgaacgtcacatcggcccggacgccctgcagcagcaggagatgctgaaaaccgttggcgccgattcgcttaacgccctgattggccagattgtgccgcaggatatccagctggcgacgccgccgcaggtgggcgaggcaaccacggaattcgccgcgctggcggaactgaaagcgatcgccggtcgtaacaagcgcttcaagtcgtacattggcatgggctacaccgccgtgcagctgccgccggtgattcagcgcaacatgctggaaaatccgggctggtataccgcctatacgccttatcagccggaggtttctcagggccgtctggaatcgctgctgaacttccagcaggtgaccctcgacctgaccggtctcgatatcgcctcagcctcgctgctggacgaagctaccgccgccgcggaagcgatggcgatggccaaacgcgtaagcaaactgaaaaacgccaaccgtttcttcgtcgccgccgacgttcacccgcagaccctggacgtagtgcgcacccgcgcggagaccttcggtttcgatgtgattgtcgatgatgcggaaaaagcgctcgaccatcaggacgtcttcggcgtactgctgcagcaggtgggcaccaccggcgaggttcatgattacagcaaactgattgctgacctgaaagcgcgcaaagtgattgtcagcgtcgccgccgattttatggcgctggttctgctgaccgcaccgggtaagcagggcgcggacatcgtttttggctccgcccagcgctttggcgtaccgatgggctacggcggcccgcacgcggctttctttgccgccaaagatgaattcaaacgctccatgccgggccgtattatcggcgtatcgaaagatgcggcgggcaataccgcgctgcgcatggcgatgcagacgcgcgagcagcatattcgccgcgagaaagcgaactccaatatctgtacttctcaggtgctgctggccaacattgccagcctgtacgcggtattccacggtccggctggcctgaagcgtatcgccagccgtattcaccgtctgaccgatattctggccgatggtctgcagaaaaaaggccttaagctccaccatgcgcactacttcgataccctgtgcgttgaggttgccgataaagccgctgtgctggcgcgggcggaagcgctgcgcattaacctgcgcagcgatattcatcatgccgtcgggatcacccttgacgaagccaccacgcgtgaagacgtcctgaacctgttccgcgccatccttggcgacgatcatggcctggatatcgacaccctggataaagacgtggccctcgatagccgctcgatccctgccagcatgctgcgcgacgatgcgatccttactcatccggtgtttaaccgctaccacagcgaaaccgagatgatgcgctatatgcacgcgctggagcgtaaggatctggcgttgaaccaggcgatgatcccgctgggctcctgcaccatgaagctgaatgccgccgccgagatgatcccgatcacctggccggaattcgccgaactgcatccgttctgtccggtcgatcaggctgaaggctatcatcagatgatcgctcagctctccgactggctggttaagctgaccggctacgatgcggtctgcatgcagccgaactccggcgcgcagggcgaatacgcgggcctgctggcgattcgtcattaccacgaaagccgcaacgaggggcatcgcgatatctgcctgatcccaagctccgctcacggcaccaacccggcttccgcgcagatggcgggaatgcaggtggtggtggtggcctgcgataaaaacggcaatatcgatcttgcggacctgcgggcgaaagccgagcagcatgcggcgaacctctcctgcatcatggtgacctatccgtccacccacggcgtttacgaagagaccattcgcgaagtgtgcgaagtggtgcatcagtttggcggccaggtttacctcgatggcgcgaacatgaacgcccaggtcggcattacctctccgggctttatcggcgcggacgtctcgcaccttaacctgcataagaccttctgtattccgcacggcggcggcggcccgggtatggggccgattggcgtgaaatcgcacctggcgccgtttgtgccgggccacagcgtggtgcaaattgaaggcatgctgacccgccagggcgcggtttccgccgcgccgttcggcagcgcctccatcctgccaatcagctggatgtatatccgaatgatgggcgcagaagggctgaaacaggcgagccagatggcgattctgaacgccaactacatcgctacccgtttgaaagacgcgtttccggtgctgtataccggccgcgacggtcgcgtggcgcacgaatgcattctggatattcgtccgctgaaagaagagaccggcatcagcgagctggatattgctaagcgactgattgattttggtttccatgctccaaccatgtccttcccggtcgccggtacgctgatggttgaaccgaccgaatcggaaagcaaagtggagctggaccgctttatcgatgcgatgctggcgattcgcggcgagatcgaccgcgtgaaagccggcgagtggccgctggaggataacccgctggtgaacgcgccgcatacccagggtgaactggtgagcgcgtggaaccatccgtacgcccgcgaactggcggtcttcccggcagggctgaacaacaaatactggccgaccgttaagcgtctggacgatgtttacggcgaccgtaacctgttctgctcctgcgtaccgatgagcgaataccagtaa

SEQ ID NO: 258264 - DNA, 744 bp, Klebsiella pneumoniae
atgcagcaaattaatttttatcgccaacgagcggcaattaacgtactggcgaaagatatcgccaacgcccgggaaatttatgatgccgccgaaggccatgcggcgatcggcgtcctttcggcacagtttgcctcggtggaagaaggtgttgaggaagtaaaacgctggatggcggagataccctctatctccgtcggcctgggggccggcgatcctgcgcagtattacaaagcggcgatgatcgcgtccgcacttcacccggcgcacgttaatcagacctttaccggcagcggatttgccgcaggcgcgctggcggcaacgggcgggaagcagacctatattaatgcgctggtcagcccgacgggaacgcctggcgaggttcttatctcaaccggcgtctgcagcagtcagggcacaccggcacgcgtctcctgcgatgcggcgatacgcatgatgcaggacatgggggcccatgcggcgaagtttttccccatgggcggtgagaagtcattaccggaattgtatatgctggcgactacggcagcccgtaacggaatgacgctgatagaaccaaccggcggaattgatctcgataactttggcattattttgcaaagctgtctggaagcaggcgtacctcgcgtgatgcctcatgtttatagctcgataatcgacccgcaaaccggcaatacccgcccagaagatatccgcagattaatggatatcgtgaaagccgtggtctga

SEQ ID NO: 258265 - DNA, 1110 bp, Klebsiella pneumoniae
atgacgcagaatatctatcaacagctggggctaaaacaggtgattaacgcctgcggcaaaatgacgattctgggcgtctccagcgttgcgccgcaggtgatgcaggcaacggcgcgggcggcgtcggcctttgtggaaatcgacaggctggtagaccggaccggcgagcgggtctcccgctttaccggcgccgaggacagctatatcacctcctgcgcctcggcgggaatcgccatcgccgtggccgccgcgatcacccgtggcgaccaggcgcgagtgatgcagatgccggacagcgccggtatggccaacgaagttgtcatgctacgcgggcataacgtcgattacggcgcgcccatcactagcgcgattcgcttaggcggtgggcgcgtcgtggaggtcggatcaagcaatctggcggcgcgctggcagctggagagcgcgatctctaccagctccgccgccctgctgtatgtgaaatcacaccactgcgtgcaaaaagggatgctgggcattgaggacttcgcccaggccgcgcagcgccacaacctgccgctgattgtcgacgccgccgccgaggaggatttgctcgtctgggtcgcgagcggagcggacatggttatctatagcggggcaaaagcgtttaacgcgccaacgtcgggatttatcaccgggaaaaaacgctggattgacgcatgtaaggcacagcatcacggtattgcgcgggcgatgaaaatcggcaaggagaatatggtcggtctggtttatgcgctggaacactatcatcaggggcagaaggtggtcactgccgaagagctccagcctgtcgcgaaagcgatttcagagatcaacggcttaaccgccgatattgagcaagatgaagccggacgcgctatctggcgtatccgcattcaggtgaatgcccgtgagctgggcctggatgcccgcgaagtcgaagcacagctgcgcaacggcgatatcgccatttacgcccggcgctataaccttcatcagggaatctttagcctggacccgcgaacggtggctgaaggggaaatggccctgatcgtggcgcgcttaaaggagattgcaaaccatgcagcaaattaa

SEQ ID NO: 258266 - DNA, 858 bp, Klebsiella pneumoniae
atgagcagcgacgtaatgcagcatgaactggtggagcgcgcacgtgagaacggcacgctgaccaaagcggacatcaccaaggcctggtttatctactggctgggcgcggaagtttccagctcctatgaacgtttacaaagcctgattttctgcgcctccatgacgccgatcatcaaaaaactctacccgcaaaaagaagaacaggtggaggcgctaaagcgccatttgaacttcttcaactctgagcagacctttggcgcggtgatacaggggatctccattgcgatggaggagcagaaaacgcgtggtgaacccatcagcgacgcttctatcaccggtattaagaccgggttgatggggccgctggccgggatgggggactcgatcatctgggcggccgtcatgccgttgttgattgcgattttcattccgttcgccgccagcggcagcgtaatgggcggtattgtgcccttaattctctatccggccattacgctggcgatcagctacggcatggtgcacaaaggctataccctgggacgcgactcaataatcggcctgctccagggagggcgaattaaggagcttatctacggcgcgaacgtgctgggcctgataatgatgggcgcgctctccgcaagctacgtcaaaataaccacccctttaaagctcagcgcactgaagggctcagaggtggtggtccagcagatccttgactctatcgcgcccggcctgttaccgctggcggcggtgttcgccatctatttctatctggtgaagaaagggccgcgctacaccaccattctgctatcaattgtcgcgctcagcgtggtctgttcgctgttgggagtactgtaa

SEQ ID NO: 258267 - DNA, 750 bp, Klebsiella pneumoniae
atggatactttagtctttgcaagcctgatgggattgtattactggtttgcccgcttacgccttggctacaccttctccgccatgctgctacaacccgtggtgatcgccgtttttgtcggcctgctgttgggcaacatggaaacagcgatgattattggcgctggcatgcagctggtttacctcggcgtgacctcaacgcccggcggtaacgtgccgtcagatccggcgctggccgcctgtatctcgattcctattgccgtaaaagccggaatggatccgaatctggccatcgcgctggccatcccgtttggcgtgatcggcgtatttcttgaccagcttagacgcacgctgaacgccgcgtgggttcatatggcggataaacacgcggaaacggccaacatgggcggcattatgcgctgcgcgttcctctacccggcgttgctcggcctggtgctgcgtttcccggtggtgtttgctgccaactattttggccaggacgtggtggaaagtttcctcaagctgatgccgcactggttgactcactcctttgaaattatgggcggaattctgccggcgctgggctttgctatcaccattatggtgatcggtaagaagagcctgctgccgtggtttatcggcggattctttgcggtgctgtacctgaaggtggacatcatggcgatggcgatctttggtacctgcgtggccttcctgattaaaggcctggcgaaaaatgaaggagcagcatga

SEQ ID NO: 258268 - DNA, 486 bp, Klebsiella pneumoniae
atggctaacatcgtgttatgtcgtatcgacagccgcctgattcatgggcaggtggtgacaaagtgggtcggacaatcccaggccaaccggatcgcggtagtcagcgatgagctggacgccgatccatttatgaaaaatatctatctgatggcggcaccgccaaacatcaaagtggattgctacagcaatcagagctttgccgcatcgtggaaagagaaccagcttggcgacggcagcgtgctggtgctgttcccctccctcgcggcgattcaggaggccgtacggctcgggtttgatgtttccgccattcaggttggcggcttaggcggcgggccgaaccgcaaggtcgttttccagaacatcacgttggatgaaaaagacgttgctattcttcacgacctgaaaagtcgagggattaaggcggtcttccagactatcccggaagataagccgcagtcgctggacgatatcctgaaaaaattctaa

SEQ ID NO: 258269 - DNA, 426 bp, Klebsiella pneumoniae
ttgattcccactgaacccttgtcccagatcctgctgctgacccacggcggctggggacaacagctctgcaacagcctgtgcatggtgacgggcgaaattaaaggcgtaacggaaatagccctgatgccggtagataccttgggcgagttttatcagcgcgtagaagccgtcgtgaaaaccctgcccgaaggctcacttattctgaccgattttatcggcgggaccacctctaacgtggccgcgcggctaagcgccgattatcccgtggcggtgatttctggactgaatgcctcgcttcttctggaggcgctggacaagcgtgaacaggggccgctatccgcctgcgtagccgaattagttgaagccgcgcgcagcagctgtctggacgttgtcgcccacgttcgtcagttacaacaatcgcaataa

SEQ ID NO: 258270 - DNA, 2799 bp, Klebsiella pneumoniae
atgagacggattgaggtcatactgggggaactggagcggctaacgcgcgggctgagtcttgcggatctggaacacgaaacggcttttacggccgaagccatcggctttaacctcgggctggcgcgcaactcggtcagtaaggatctcaatcagttatggaacgacggcctggcgattaagagcaaagggcgaccggtgttctttctgcaccgtcaggcaatagaaacgtttctggggcgcagactgaatgataccgaatgtgaagtgcgcacggttagcgaccttctaccgcatcaggaaggtcgttcgccggatgaccccttcagcggcctgattggctacgaccgcagcctccgtgacgcggtggaaaaaggccgcgccgcggtgctttatcctcacgggctccatgtgttgttgaccggtccctccggcgtgggaaaaactttctttgccgaactgatgcaccgctttgcctgcgaacacgccgcgggctctcctccgccgctggtctacttcaactgcgcggagtatgcgcacaacccggagctgctctcttcgcatttatttggtcatcggcagggcgcttttaccggcgcgagtgagaataaagccggtttggtggagcaggcggacggcggatacctgctgcttgatgaggtgcaccgcctgccgtatgaaggacaggaaaaactcttctccattctcgataaaggccaatatcgcccgctcggttcaagcgctacggcgcgttccatcacggtacgcttgatttgcgccactaccgaaccggtcagctcggcgctgctgcgaacattccagcggcgcatccaggtctgtatcgatcttcccgggatccgtcagcgctcggtggaagagcaggtggagcttatcgtcggttttctccagcgtgagagccgaaaaattgagcgtacggttagcatcgacaaaacgctgttgctctggttgctgaataagccgctggaaggcaacattggccagctcaaaagcgatatccagtttctttgcgcccaggcgtgggccgcgggaatgaccgagcataacgacacgctccagctggataaacggctggtagaagtgccgttcaacgccactccggaacagcgtctgctggtcgataccttgtttgacggtcaggagcggctaagcgttgatgcgcgcacgttacccgcattgaaaacctctctggcgacaggagcggagatcgaagaaagcgatctgttttacagcttcctgacccgcgaatacatcaacctgcgcaacagcaacgtcccaccggcggaaacgctggcgatcctcaaaaacaaactcagctccatctttgaatatggcctctacagccgcgacagcgtggcccatccgccgcgctatggcgatcggattgaagagcgggtgaccctgctgattggctgcgtggaacaggtgctgggctttacgctgccagaaaacctgatgaatccgctgcgtaaacactttctggcgctgattggctacgtccagcgcgggctgatcccgcagctttactcctccagcctgatcctcgaccgctgcaaagatgagtatgaaaacgcgactctgctgtgccggaaaatcaacgaactgctgcatattcagtgcccggcgacggaggtcgtctggctatgtttgttcctgaaagagtgccgccattatcgccagcgtatcgacgccagccccgactgcggcgtcattttaatcgcccacggcgcgacgacggcgaccagccaggcccagtacgtcaatcgagtgctggagcgcgagctgttcaacgccatcgatatgccatttgagcagtcggtgcatgacacgctggaaacgctaacccagctgatccaaacccaacgctaccggcggctgattctgatggtggatatcggttcgctggtgcattttggcagtaccatcagcaaactattccagattgacgtcctgttaatgcccaatattacgctgaccagcctgctggagctgggtctggatttaagctatgaaaccagcgagctaccgcagcttgcggaattactgcagagtaaaaatatcccctgtcagctctgtactccgcagcaggagaacggcggtaaggtgctggtgatctcctgcattaccggcatgggaaccgcagagaaaatcaaaaaagtgctggaggaaagttttggcgagctgatgtcgcaggatacgcgaatggtgatcctcgattacaacgaggttcgcagccttgagcgcgttcagcagtcgctgctggccggtgagcgactggccgggattgtcggcaccttccagccggggctgccggacattccgtttatctcgctcgaagagctgttctccgagcaggggccggagctggtgctcagcctgctcacgccggacctttcaagcggtgagcgccgtctggagatggagcgcagcgcgatgcgatttatcagcgcgctgaccatggaaagtatcatcaaccatatttcggtactcaacccccagcgtattcttaaagagatggagggcgtgtttaaccatttaaccacctcgctttcgctgaaacccagccgccaggtgacactacgcttcctgatccactgctgttgtatggtcgagcgtatcgtgattaaccgaaaaccgttacagatgtcgctagagaacaagcccgctctggatgtccgggcgtttagtgtcattaaatccgcctttcagccgatcgaagaggcttatgccattcgtttatccgacgcggaatatttttatatctacgaactgctgtatcgctga

SEQ ID NO: 258271 - DNA, 213 bp, Klebsiella pneumoniae
gtgccggaagccggggaagacctggagctgaaaatgggtgaaaactggcgccgtaccggcaccgttttagccgccgtacagctggacgacggccgtctgctggtgcaggtggtgatgaataatgatatggaaccagacagcgtgttccgcgtgcgcgacgatgccggtagcctgagcatcgagccgctgccgtatacgctggaagagcgttaa

SEQ ID NO: 258272 - DNA, 492 bp, Klebsiella pneumoniae
atgagcgacatagtgatacgccacgccgagccacgggatgcggaacctttacgccagatgactgcgcttccggaggtctatcacgacacgctacagcttcctcatccttctatggaaatgtggcaggaacgcctgcaaccgaaacccggtagccgtcatctggtcgcgacaatcgacgaaaaggtggtgggccatcttaagctcagcgtggagcccaatcctcgccgcagtcacgtcgcgaccttcggcgttagcgttgccgcgcaggcgcacggtcgtggggtaggcagcgcgctgatgcgcgagatgattaatctctgtgataactggctgcgcgtcgagcgtatcgagttaaccgtgtttacggataatccctccgcggtagcgctttaccgcaaatttggctttattgtcgaagggaccggcaagaaatacgccctgcgcaacggcgaatatgtcgatgcctactttatggcgcggctgaaggggtga

SEQ ID NO: 258273 - DNA, 639 bp, Klebsiella pneumoniae
atggaaagcaaatatatcgccttaaatagcgcccttctcttttggctgcttggcctgatggcctggtgcttcgaatccacgtatctggcctggctatcgggctctttctccttatcctccttcgtttttcattttcaatatcagcggattaaccatatgtttaaaaaaaacaaaatcattgaagctacgccaccggcggtgaatacagcggtactcaacggtgaatctccatccgccgtggcccgaaaaccggccaccacggttatcgccagcggtatccgctttgacggaaacattatcgccgagggagacgtcgatatttacggcaccgtaagcggcaatatcgacgcgcgcgagagtcaaattaagatcatgaccggcggtctggtagaggggaatatcacctgccgcgagctggttatcgacggctgcgtgatcggccagtgccacagcgagacgattgaaatcgataagaacggcaacgttaccggcacgttggcctaccgcacgctgaccatcaaaaagggcggtgttttttccggccaggcagaactgctgccggcggcagataagagcaacgtcgtggggtttatcgcggataccgctattgaaactaaagataagattgaggcgcagtag

SEQ ID NO: 258274 - DNA, 531 bp, Klebsiella pneumoniae
ttgagcacgactaaccatgatcaccacatctatgtcctgatgggcgtttccggcagcggcaaatccgctgtcgccagcgaagtggcgcatcaactgcacgccgcgtttctcgacggcgactttctgcatccgcgcagcaacatcaacaagatggcttccggcgaaccgttaaatgacgatgaccgcaccccgtggctgcaggcgctgaacgatgccgcgtttgccatgcagcgtaccaataaagtgtcgctgattgtctgctccgccctgaaaaagagctatcgcgacatcctgcgtaaaggcaacccgaacctctcttttatctacctgaaaggcgatttcgaggttatcgaacaacgtctgaaggcgcgtaaaggccatttctttaaaacccagatgttggttacgcagtttgaaacgctgcaagagccgggcacggatgaaaacgatgttttaatcgtcgatatcgaccagtcattggaaggcgtggtcgccagcaccattgaggtgatcaacaaaggcagtaaatag

SEQ ID NO: 258275 - DNA, 2100 bp, Klebsiella pneumoniae
atggacaaattcggcgcagagcagcttttgcaacggatgctggcaaatcctgctgcaagctttcgcgaagggcaatgggaagctattgatactttagttaattatgggcgaaagttgctggttgtgcagcgtactgggtgggggaaaagcgcagtctactttattagtacgaagattttccgcgatcgcggtagggggccaacaataatagtttcacccctgctggctttgatgcgaaaccaggtgctggctgcggaacggctgggcattcgggctgaaacgctgaattcaacgaacagggatgagtggctgcttatcacccgacagcttgtcgccggcgaactcgattgcttattaatttcacctgagcggctggcgaatcaggatttcattcaatcggttttagcgcccgtaggggatcgcatttcgatgttggttgtggatgaagcccactgtatttctgactgggggcatgatttccgccctgattatcgacgtattctggatatcctgcgtcagctacccgctaatacacctgttctgggtaccacggctacggcgaatcagcgagtcgtgactgatatccaacagcaaattggcgacatcgtcattcaacgaggaacgttatcgcgtaaaagcctggcgctggatgtactgactttgcgcgaccagccttcacggctggcctggctggcgggcacgatccccgaatttcccggcgctggcatcgtttataccttaacgacgcgagatgccgatctggtcgctcgatggctcaggcaaaacgctattaatgctcaggcctactatagcggcgtggtccatccagggtttaatgataccaacgcgaccagagaatatctggagaatgcgctacagggtaatgagcttaaggtgctggtggcgacgaccgcattgggaatgggttatgacaaaccggatttaagttttgtcattcattatcaggctccggggtcgatcgtgggttactaccaacaggtagggcgcgccgggcgcggaatagaccatgcatcagggatcctgttgacgggagaagaagatagcgcgattcatgattattttcgccagtccgctttcccaacgcaaagtcagattgctgaggtgttacaggtgcttgaaagcagcgatgggctgacgcttcgcgatattgaagcgcgaactaatctgcgctacggtcaaattgaaaaaacgatcaaattactgagtgttgaatacccttctccggtgttgctggagaaccggcgctggtatcgcacggctgtaccatttgcgttcaaccagcagcgtatagatcatctcacccggcagcgggagactgaatggcaggaagtcaggcagtatatcgctacggatgaatgcaaaatggcgtttatccaacgcgcgctggatgaaccaacaacagaacgttgcgggcaatgtagttcctgccaaaagcatcatcttttagattatcgtgaagatcgttctttgcttgagtcggcaaatctctttcttcagcgtgccgatctcccgctgatactgaacaggcaggttgctgctggggctttcagtacctatggctttcaggggaattttccggattcgctacgcgctgaagaagggcgcgttttatcacgatggggagattccggttggggagcggaagtcgcgagagataaacatcgtggctttttttccgatagtctggttgccgggttggctgaaatgatttctgaccgctgggcaccaaatccgccgccgagttgggtttgctgtgcgccttctttacagcaccccgagcttgttcctgattttgcccggcgtctggcgcaacttttagaacttccttttgttgatgccattgttaaggtcagggacaatcagccgcagaaattacagcaaaaccgctatcatcagtgccagaatctggatggcgtttttcaggtaaactcagcgctgccgaatggtcctgttcttttggttgatgacctcattgattctggatggactatgaccgtacttgcagcactgctgcgtcaggccggatgcgaaaaagtgtatccggtagcccttgcatcaacttcggtgaaaaatggatga

SEQ ID NO: 258276 - DNA, 1206 bp, Klebsiella pneumoniae
atgaaccttaccgcgatcgcgcaagccacgcttttactcacctgtcacttttcggcagggcaggcgcatgagcaccagccgttaagccttgctgagtggggaaggctggcgctttggttaaggcatcagcgcatgtcgccagcggatctattaacgccagaggtcggtattcggttagtggcctggcaggatccgaaaattcccgttacgcggattatcggactgttagcacgcggtcatagcctggcgctggcgctagataaatggcagcgggcagggttatgggtggtcacgcgcgctgacgaggattatccgtgccgtttaaaagcaacgctaaaaaatgattcgccgccggtcatttttggctgtggtaatcgtgcattgctgcaaagcggcgggctggcggttgtcggttcacgcgcggcgcttcctgatgatttgcattttacgcaacagctcgccagcaaagccgcagcgcaaggggtgaatattgtttccggcggggcccgcggcattgatgagtgtgccatgatctctgcgctcgaagcaggaggaagcgcgaccggcgtgctggcggatagcctgctgcgggcttcaacctcggcaaagtggcgtaaggggcttatggatggcaggctggtgctcatctcacctttttatccggagggtggcttcagcgttgcgaatgcgatggcgcgaaaccgatatatttactccctggccgaagccgcgctggttgtccatgcgggtactaaaggtggaaccatcaccggtgcaaaagaggcgctaaaacatcgctggggaaccgtctgggtaaagccctcggatgatcctgaatcatcgaatgcgcttctggttcaactgggaggcgcctggtgtagtgaagatgccctcgatattgaaccgcagcagcttttattaccgcagcctaaccccccctcagccctgttgactcaaagcgtcgagcaatattcgctttatgaatcgcccgcggggtatcacacctcttctgatccgttttatcagctctttctggctgaaatgcgtcggctggcacaacagccggtttctctgcaaaagctgagcgaggagctgaacgtgctcccttcacagctacgtgagtggctggttagagccgagcaggagaaagttattaacaagctaaccgatccgcagcggtatcagataagctttgcatcccgctaa

SEQ ID NO: 258277 - DNA, 1272 bp, Klebsiella pneumoniae
atgaaaatgcaaatcacgcttctcgcaacggcgctcgtgctggcgctgccggtactggcgaaagaggtccctttgaaccaggcggcaacaatggccaacgccgtgacgccagccgccgccagcccggcgtttgacgcgctggagagccaaagcctgtcgcagctgcgcaacgcgctgaagggcgatgcggcgaccctgactcgcgaccagcttgaacacgccagacagaataaaacccaggcggataccgcgtggctgaaggccagcgggtacgactttcagaccaaagccaaccagcaggcgggaatcgagctgctctcggcgttcactgcgctgccgcaggcggtgattgagcaaaatctggcgacggtcaccgccattaaccgcgatgccgtacagacctcccgccatcaggcgctggcggatgccgagggcatcagctatctctacttcctcagcgatgcgctggggccgcgcctcggcaaagcattcctcaccgcctacgacaaaggcgagctcggtaaggcggcggcgctgatcaaagcctctgaagtgagtaccggggcggcgaaaaagcactttaacaacccgcgtccgttcctgattcagggcaataccatccatctggtgccggacgatgtggtcgttaaggacaataagccctataccgcagacggcggctcgtttccaagcgggcacaccaatacaggctataccgacgctctgctaatggcggagatgatcccggagcgcttcgatgcgctggttacccgcggcgctcgctatggctattcgcgcatcgtgctgggcgtgcactatccgctggacgtgatgggctcgcggatggtggcgcagcgcaacgtcgcccactatttgaatgacgcgaagtatcgcgggctgtttaatgaggcccgcgaccagctgcgcgccgcgctggagaaggagtgcggcacgacgctggcggaatgcgcgaagatgcctgcgaaagacgatccgtatcgcgacccggcgatgaaggcgttttatcgtttcaccatgacctacgatttgccgcagcagaagggtgaaaaacagagcctgaaggtgccgcaaggggctgaagtgctgctggaggctgcgctgccgaatctgtccgccgcgcagcgtcgggcgctgatggtcaaaacggcgctgcccgcagggtatcccctctccggtgagaatgacgctcaacagttctggcagcggctgaatctgccggcggcgtatcagatggcgaataaagcgcattaa

SEQ ID NO: 258278 - DNA, 132 bp, Klebsiella pneumoniae
atgagaatagtttttatcatcaatacatataatgcgctcgattctttttttaaacaggaaattgagcatttgttgatattgagcaaactctattttgtcacgaccgtagagagaatcattatttctgcttag

SEQ ID NO: 258279 - DNA, 783 bp, Klebsiella pneumoniae
atgaaagagttggcgtggcagactacgggcgaaggaaattgtcatcttgtgctgctgcacggatgggggctgaatgccggggtgtgggattgcattacgccgcagctgtcctcgcattttacgctgcacctcgtcgaccttccgggctatggccgcagcggcggttttggcgcaatgtcgctggaggagatgacgcaacgggtgctggagcaagcgccggaccgcgcgatctggcttggctggagcctcggcgggctggtagccagccaggcggcaataacgcatcccgagcgcgtgcaggcgctagtcaccgtcgcctcttccccctgctttagcgctcacgacagctggcccggcatcaagcccgaggtgctaagcggatttcaacagcagctgagcgaagattttcagcgcaccgtcgagcgctttctggcgctgcaaaccatgggtaccgaaagcgcgcgccaggacgcgagagcgctgaagagcacggtgctgtcgctaccgatgccgtcgccggaggttttaaacggcgggctggagatccttaagaccgccgatttacgtcaggcgttgaccaccctcgacgtgccgtttttgcgcctgtacggtcgcctggatggcctggtgccgcgtaaaatcatcccgattctcgatgcgctgtggccaaaaagcacgtcgatgattttcgataaggccgcccacgcgccgttcatttcacatccgcaggcgttttgcgctcctctgattgagctgaagcgtgagttcgataaatttttatag

SEQ ID NO: 258280 - DNA, 1656 bp, Klebsiella pneumoniae
  misc_feature (1624)..(1633): n is a, c, g, or t
atgaccaatccattactgacgcctttttcattaccgccattttctgcaatcaaacccgagcacgtggtccccgcggtcactaaagcgctggatgactgccgggcggcggtagagcgcgcggtggcgcaaggggcgccgtatacctgggaaaatctttgccagccgctggcggaagtggacgatgtgctggggcgtcttttttctccggtcagccacctgaactcggttaaaaacagcccggagctgcgcgaagcctacgaacaaaccctgccgctgctctccgagtacagcacctgggttgggcaacatgaaggtctgtacaaagcgtaccgcgacctgcgcgacggcgatcattacgccaccctgaataccgcgcagaaaaaagcggtcgataacgcgctgcgtgattttgaactctccggtattggcctggcgaaagagcagcagaaacgctacggcgaaatcgccgcccgcctgtccgagctgggcaatcagtacagcaacaacgtgctcgacgcgaccatgggctggaccaagctgatcgccgatgaatccgagctctccgggatgccggaaagcgcgctggccgccgcgaaagcccaggctgaagctaaagagctgcaggggtatctgctgaccctcgatattccgagctatctgccggtgatgacctactgcgacaatcaggcgctgcgtgaagagttgtatcgcgcgtattccacccgtgcctccgaccaggggccaaacgctggaaaatgggataacggcccggtgatggcggaaatcctcgccctgcgccacgaactggcgcagctgctgggctttgacagctatgccgataagtcgctggcgaccaaaatggcggaaaatccgcagcaggtgctcgacttcctgaccgacctggccaaacgcgcccgtccgcagggtgagaaagagctggcccagctgcgcgccttcgccaaagccgaatgcggcgttgatgagctgcagccgtgggatatcgcttactacagcgaaaaacagaagcagcatctttacagcatcagcgatgaacagctgcgcccgtacttccctgaaaacaaagccgttaacggcctgttcgaagtggttaagcgtatttacggcattaccgcgaaagagcgtaccgatgttgatgtctggcatccggaagtgcgcttcttcgaactttatgatgataaaaatgagctgcgcggcagcttctacctcgacctctacgcccgcgaacataaacgcggcggggcatggatggatgactgcgtcggccagatgcgcaagcttgacggtacgctgcaaaagccggtcgcttatctgacctgcaactttaaccgtcccgtcagcggtaagccggcgctgttcacccatgatgaagtgatcaccctgttccacgaatttggccacggtctgcaccatatgctgacccgtatcgataccgccggcgtatccggcatcagcggggtaccgtgggatgcggtcgagctgccgagccagtttatggaaaactggtgctgggagccggaagcgctggcgtttatctccggccactatgaaaccggcgagccgctgccgcaggagctgttggagaagatgctggcagcgaaaaacnnnnnnnnnngaataaacatcgccgcctggtag

SEQ ID NO: 258281 - DNA, 438 bp, Klebsiella pneumoniae
atgctggcagcgaaaaactaccaggcggcgatgtttattctgcgccagctggagtttggtctgttcgacttccgcctgcatgcggagttcagcccgcagcagggcgcgaaaatcctcgaaacgctggcggaaattaagcagcaggtcgcgttgattcccgggccgtcgtggggccgtttcccgcacgctttcagccatatcttcgccggaggttatgcggcgggctactacagctatctgtgggccgacgtgctggcggcggatgccttctcacgcttcgaagaggaggggatcttcaatcgcgaaaccggccagtcgttcctcgacaacatccttagccgcggcgggtcggaagagccaatggtgctgttcaaacgcttccgcggacgtgagccgcagctggatgcgatgcttgagcattacggtatcaagagttaa

SEQ ID NO: 258282 - DNA, 870 bp, Klebsiella pneumoniae
gtgctccgccagctgtttttcatccagctcaatacgtaccggcaggcgctgaaccactttgatccagttgccggtggcgttctgcgcgggcagcagcgagaaggcgctaccggtacccatatcgaggccgaccactttaccggtgtatttcacatcgtcgccgtaaatatcgctgatcacggtggccggctgaccgatacgcatatgcgccagctgcgtttctttaaagttggcgtcaatccacaggttggtcgccggaacgacggccatcagcggcgtggtgctgctgatttgcgcgccgggctgtacggagcgacgcgatacgtagccgctaatcgggctgacgatttttgtccgctgcagggccagccaggcgttacgcacttcggtggccgcctgcagcacagcaggctgctgttccagcttcgtacccagcacgattgcctggttggcgttgtactgctgaatcgccacgtccagttcggcctgggcgctggcaaccgtgtcgcgggcgtgctgcagctcttcgcggccaatcaggttggcggcccccagcggaatacggcggttaaggtcggtctgcgcctgggaaagcgcggtttttttaacctcaatgctggcctgcagctgcttgctgttgatcatctgctggcgcgtttgacgcacgctggcggccagctgggtttgcgctttttcaaacgcctgctgggcatcggtctggtcgagggtgaccagcggatcgcctttttgcacgtagtcggtgttgtcggcccagactttcgtcacgctgccggacacctgcgccataatttgcacctgattccctgccacatacgcgtcatcggtctcttcgaagtgacgcagtactaa

SEQ ID NO: 258283 - DNA, 531 bp, Klebsiella pneumoniae
atggatagttcgtttactcccattgagcaaatgctcaagttccgcgccagccgtcacgaagactttccttttcaggaaattctgctcacccgcctttgcatgcatatgcagggaaagctgctggaaaaccgtaacaagatgctgaaagcgcaagggattaacgagacattgtttatggcgctgatcacgcttgagtctcaggaaaaccacagcattcagccttctgagctgagctgcgcgctgggctcttcccgtaccaacgccacgcgcattgccgacgagctagaaaaacgcggctggattgagcgccgcgaaagcgataacgatcgtcgctgcctgcatttacagctcaccgaaaaggggcatcagttcctgcgcgaagtgttaccgccgcagcacaactgcctgcatcagctctggtcttctttaagcaccagcgaaaaagatcagctcgagcacatcacccgtaaactgcttggtcgcctcgaccaaatggaagaggatggcgtgcttgcggagtctctgcgctaa

SEQ ID NO: 258284 - DNA, 1293 bp, Klebsiella pneumoniae
atggacgcccaaaaaatcccccactaccgacgcattgccaggcagcttaagcaggcgattgaacgcggcgagctggctcccggcagcaggctgcctgcgagccgggtatatgctcaggagcttggcgtatcgcgggcgacggttgagaacgcctggggcgagctggtggcgcaggggtggctggagcggcgcggacaggcggggacctttgttagcgagcggcttattccgcagcaaaacgcggccgttcagcccgtcgcgggcgatgagcccgcggcgccgctgccgtttcagctggggctgcccgcgctggatctgtttccacgcggtctgtgggcgcgcgtgatggggcggcgtctgcgtacgcaaacgcgttttgaccttgcgccaggcgatccctgcggtgaactgacgcttcgccgggcgatcgtcgattatttgcgcctgtcgcgcagcattgagtgtcggtctgagcaggtcttgatcaccggtagctacgcggcctcgatgcgccttatattgcgcacgctggcgcggcctggccagcaaatgtggatggaagatccggggtttccgctgatccgcccggtagtgaacgacgagggggtagcgatcaaccccgttccggtcgacgacgacgggatggatattgcctgggcgcagcggcattacccgactgcccatttcgcgctgctgaccccggctcatcagagcccgctcggcgtggcgctctcgctgtccaggcgcagacagctcctgctatgggcggcgcagaataacgcgtggattatcgaagatgattacgatagtgaattccgctatcacggtaagccgctgccgccgctgaaaagcctcgacgccccgcagcgggtcatctatgccggggcgttcagcaagtctttgtttccggcattgcgcgctgcctggctggtggtgcctgaaccgctggtggcgcagtttcgtgaacaggccgccttctggcgacatctgaagaaaatgcgcgccagctatgcccagcgccgcctgtggcttgagtcggcgctgcgcgcgcagggctttaccgtggtgcctcaagcgggggggatccagatggtggtcagggtggccggtgacgatcgccttctggcgcagcgcgccaggcgggccggtctggccgtccaggcgctgagcgactggcggatggagagtcggggagatggggggctgatcatgagcttcactaatctgacgtcggcggaaatggccaacgaggccgtgcgtaagcttgatgccgcgctttacgcgaagagataa

SEQ ID NO: 258285 - DNA, 180 bp, Klebsiella pneumoniae
atgttttcagtcggtgacctggtacaaccgcgcgcgggtgggccaaaacttaaagtcgttgaagtcgaggacgatcgcattattgccgttcaggcaaacaacgagcagggcgagaaatatacgctgaaggcagccgatgtgacggcatataaagaagacggcgattttggcgtatgctga

SEQ ID NO: 258286 - DNA, 495 bp, Klebsiella pneumoniae
gtgatttgcgccacccaccgcaacctggcgcagcgcgtcgccgaaggtaccttccgcgaagatctgctctaccgcctgcgcgagtttgctctgacgctgccgccgctgcgcgagtggcctgaactcccggcgtttatccagcgattgtggcgcgatcttggcggagaaaagcgtcgcgtcgcgctgggcccggcgcttgtgcaacacctggcgactcagccctggccaggcaacgtccgccagctgcaaagcctgatgagggtactgctggcgctcgccgaagagggtgaaacgctggcagtgggtgatttgccccaggaataccgaagttcgcccgccccccgcccgccgcgtgggcttcagcagcacgatgcgcagctgattgccgatacgctggcaagctataacggcaatatcagtaaggccgcgcaggctttaggcgtcgcgcgcagcacgctgtatcgccgcgccgctcgtcgcggaagccgcttctga

SEQ ID NO: 258287 - DNA, 846 bp, Klebsiella pneumoniae
atgccaaagccttctcattttaaaactcccctccgttatcccggaggtaaagcaaagttctcaccacatattgaactaatactccgctgcaatgacttggttggaggatgttacgctgaaccctatgccggtggagcaggcgtcgcattgggtctactacttaacgggcttgtagaagacattttcataaatgatatcgacccagcactatatgctttttggtccgccatagttaatcataacgactcattctgcgaaatgattgatgaagttcctgttactattgagaactggcatatacaaagagatattcttctaaaccatgataaatataatattctcgaagtcgcacttgctactttctttttgaatagaacaaatcgctcaggtatactcaaagctggtgttattggcggcaaagaacaaaaaggcaaatggaaattagatgccagattcaataaaaaagatttgattaagagaatccaattaatcggtacttataagcgaaaaattcatgtatcaaatcttgatgctgtagattttttattggacaaaaaaaattcgcttccccaaaacagcttaatatatcttgatccgccttattatgttaagggtgctgagttgtatagaaatttctatcagcatgacgatcatgtcaagattgctaatactttgcgaagtatcccacttccttggatcgtttcttacgacaacgtatctgaaataaaagaaatataccatgactttaacatggctgattattcactaagctacactgctcaagataagaaaaaagggcttgagattgttatttataacaacgggttaaaagtccctgaggtttaa

SEQ ID NO: 258288 - DNA, 720 bp, Klebsiella pneumoniae
atgtatagagtaaatcaaatcataaaaacagtgagtgagatgaactcttatgctccttataagaatataaataataaaagtagattactgaaaaaagttcaagtacattcgtttcttatatcgcttttatctctttttttaatggttattctcgcattagtatataaagtttccaacctacctaaagatccttttattttgccctctctatttttatatgttctcaattctcttgcgggaattatatacttattcacccccatcattcctggggtaaaattcatgctaaatttgaaaaaggaaatatttaacgatttgatttgtgaaattgataatgatgaacaaaatgttgaaaaagtaatgccctattctttaacggaattagaatattcaatagattggttgaatatgaagatacaacgtgtaagatcaaggattaatgatttttttggagaaaaaacagccatcctatcagtacttggattagcttattcagctatacaagccattggtggtctaaataaaattagtgaaaccatatctaaaggaatattcacatctggcacagcaaatacaataattgtatttgggttagcctttcttttaggtttatcacttggcgctttgacgctcaaaaatattgcaaatcacttgcaatacttgaaggaaatattagaaatggcaaaaaagaataaaataatacaagaacaattaaaatga

SEQ ID NO: 258289 - DNA, 297 bp, Klebsiella pneumoniae
atgacgctgaaccgcattttcgccttccagcacggaaaccacgatcggaccggaagtcataaattcaaccagaccgtcaaagaacgggcgaccttcgtgctcagcatagaagccgcgagcctgctcaacggtcagatgcagcattttggtgccaacaattttgaaccctgcagcttcaaagcgagaaaagatgccgccaataacgttttttgccaccgcgtttggtttgatgatggaaaaagtacgttcaatagccatgataacctctttatatatgttgttctgtttcgcagatga

SEQ ID NO: 258290 - DNA, 393 bp, Klebsiella pneumoniae
gtggcggcagattgcccaggcgcggtggcgaaaagcctcgacgtctggccgctgccgcttgaaccctggctgcccgcgggcgaacggcgtcgcgccaggttgccggcggtttcggcggactgcccgccggtgcaaaccgtcgatgccgccccgctggtgctatccggcatccgtgaaggcgcggtggttaaacgtctgcccggcgagctgaaggtgatgctgccgctgcaaacgaccggcggggaagggcggcgctggtggtttctgaacggcgaaccgctgaccgcggaaggcgccagcgccatccttaaccttgagcgccccgatagttatcagctagtggtgatggatgaggcggggcagattgttgccgctaacttcaccgtgcaataa

SEQ ID NO: 258291 - DNA, 387 bp, Klebsiella pneumoniae
atggcttacagcgaaaaagttatcgatcattacgagaatccgcgcaacgtcggttctttcgacaatagcgacgaaaacgtcggcagcggtatggttggcgcgccggcgtgcggcgacgtgatgaagttgcagattaaagtcaacaatgaaggtatcattgaagacgcgcgtttcaagacctacggctgcggttccgctattgcttccagctccctggtgaccgaatgggtaaaagggaaatcgctggacgaagctcaggcgattaaaaacaccgatatcgctgacgagctcgagctgccgccggtgaaaattcactgctctattctggcggaagacgcgattaaagccgcgattgcggattacaaaagcaaacgtgaagcaaaataa

SEQ ID NO: 258292 - DNA, 1302 bp, Klebsiella pneumoniae
atgctccgccatcctgtgtactcggtcgtacatccagccggttgcctgattccttgcattgaagcgatgtacggagtttatagagcaatgaaattaccgatctatctcgattactccgcaaccacgccggtggacccgcgtgttgccgagaaaatgatgcagttcctgactctggacgggacctttggtaacccggcctcccgttcccaccgttttggctggcaggctgaagaggcggtagatatcgcccgtaatcagattgccgagctggtcggtgccgacccgcgcgaaattgtctttacctccggcgcgacggaatccgataacctggcgattaaaggtgcagccaacttttatcagaaaaaaggcaagcacatcatcaccagcaaaaccgaacacaaagccgtgttggacacctgccgtcagctggagcgcgaagggtttgaagtcacctacctcgccccgcagcgtaacggcattatcgatttaaaagaactggaagccgcgatgcgtgatgacaccatccttgtttccattatgcacgtgaataacgaaatcggcgtggtgcaggatatcgctaccatcggcgagatgtgccgcgcccgcggtatcatttaccacgttgacgcgacccagagcgtgggcaaactgcctatcgacctgagccagctgaaagttgacctgatgtccttctccggccacaaaatctatggcccgaaaggtatcggcgcgctgtacgtgcgtcgtaaaccgcgtattcgtatcgaagcgcagatgcacggcggcggtcacgagcgcggcatgcgttccggtacgctgcctgtccaccagatcgtcggtatgggtgaagcttaccgtatcgcgaaagaagagatggaaagcgaaatggcccgcctgcgcggcctgcgtaaccgtctgtgggacggcgtgaaagatatggaagaggtttatctcaacggtgaccttgagcagggcgcgccgaatatcctcaacgtcagctttaactacgttgaaggcgagtcgctgattatggcgctgaaagacctggcggtttcctccggttcagcctgtacttccgcaagcctcgagccgtcctacgtgctgcgcgcgctggggatgaccgacgagctggcgcatagctctattcgtttctctttaggtcgttttactaccgaagaagagattgactacaccatcaatctggtccgcaactccatcggccgtctgcgcgaactctcaccgctgtgggaaatgttcaagcagggcgtggatctgaacagcattgaatggtcacatcactaa

SEQ ID NO: 258293 - DNA, 663 bp, Klebsiella pneumoniae
gtggccgagcaggctctgctggcggtcggcgcgctcccgccactgcgggcccatcagcagcagggagcagtcggtggttccgccgccgatatcgacgaccagcacccgcttttcttcactgagggtcgcttcgaaatcgagcccggcggccaccggttcaaactgaaagaccacatcgcggaaaccggcgcggtgggcggcgcgctcaaggatcccctgcgcctgggcgttcgcctcatcgccgccgaggccctggaagttaatcggtcggccaatcaccgcctggtcgatctgctcgggcagctggctttcggcctgcagcttgatatgcagcatcatggcgcagaccaggtcttcaaacagtgccacctgctgcggcttcagcccgctggcgccgaggaaggatttgggcgatttaacgaagtagacctcttgcggatcttcaacatactgctgcagcgaggcgagaccgaactgcacgctgttgcgcagcacctcgatgtcttcgtcgcggttggcggcgatggcccgacgcagcagcgcctggttttcgtcgctgtgggtggggacatcatgatggcgatagagccactcgctgaccgcttcgcgcgtcggcgcgcagagcatggagggcaacagggcgctgccgttttccagcgttaa

SEQ ID NO: 258294 - DNA, 315 bp, Klebsiella pneumoniae
atgatacgtgaacagatcgaagcaaaacttagggcagcgttcgacccggtgtatcttgaagtcgtggatgaaagctatcgccacaacgttcctgcgggctctgaaagtcattttaaagtggtgttggtgagcgatcgcttccttggcgagcgttttcttaatcgtcaccgtatgatttacggaacgttgactgaggaactatcaagcaccgtgcacgctctggcgttgcatacctacacaatcaaagagtgggaagggctacaggataccgtctttgcttctcctccttgtcgcggggctggaagtatcgcgtag

SEQ ID NO: 258295 - DNA, 333 bp, Klebsiella pneumoniae
atgaaagagttaacttttaatgaaatggaatatatttccggtggttttaatctgctgaatgcggctactggctttaccagctttgtcgtcaactccgggcttggcttcggatcttttgtcgccacctcaggagcctctttcgcgaattttgtgattgatagcgccgtagaatttggcaagttcgttatcggtcagtctaactggaacacctttgtgtctgcggggttggataactggaatggctttgtgaacactgccgccaatagctggtcaaccttcgtgaacaacgctggagcggactggaatagctttatcgacggcgcgaaagcctga

SEQ ID NO: 258296 - DNA, 822 bp, Klebsiella pneumoniae
atggtcagtggattcactcaggtcgtcgccgtcatcggtcacccgattacccaggttaaatcgccggagaatttcaaccgctactttgccgaccagcagatggacagcgtcatgatcccggtggatatcgccccgcaagccgttgctgactatctgcaggcgctacgcggctggcataacatgagcggcgtgctggtcaccgttccgcacaaacagcgcgccgccgccctggtcgatgagttaaccccgcgagcgcagcatctcaatgccgtcaacgtcatccgtaagctggccgatggccgtttacagggcgacatgctcgacggcgtcggcttccagcttgccgcagaggcgcacggctttaacgccgcaggtaaaaaagcgctgctctcaggctgcggcggcgtcggcagcgccatcgcgtgggggctttgcgaagcgggcctccgtcaactggcgctttatgacccgaatcccgccacgcttcagctgctgcataaccggctggccacccattttccgcacgttcacctaaccgatctgcccgcgacgctcaacggtctggatgtgctggtgaacggttctccggcgggaatggccggtttcgatccattaccgctgccgcaaacgctgctggaaacgctgccggtatcagcgcatgtcgcggacgtggtaaccgccccggttatcaccccgcttctggccttcgcccgggatcgcggctgcgcgattcagaccgggccggaaatggcgctggcgcagatgaaattaatggggcagttcattggcgccattgcgcaggaacagggagcggcggcatga

SEQ ID NO: 258297 - DNA, 1590 bp, Klebsiella pneumoniae
atgaaaagctgggacgtcatcgttatcggcagcggcgccgcaggctttgccgcggcggtgaccgcctgctgtaacgatcaggcgcggaaaatggccgcaggcggcagcccgcaggaaatcgaaacctatctgcggaccatcatcggtgagcccaactatcgtcaggatctgatcgaagcctttatcgcttcgggacgcgaggcgctggcgtttctggaaaaagagggggcggtgaaatatagcctgcgtccgctttctccggattattacccggatgaacccggtgccgtcgacgtcgggcgggcgctggaggtggtggagtttgacgggcgagaactgggtgagcattttcgcgacctccgctctcctccaccggggatgctgctgtttggcgggatgatggtcaatcgcatcgatatccaacactttcttgatatgcgccgctcccttagctcgttcgcgcactgcggcagactgctgctgcgctatggtcgcgatcgtctccggcaccatcggggcactcgcctggcgatgggcaacgcgctgatcgcccgcatggcgacgctcgctttccgcaaaggcatgcagctcagactcaacgtcaacgtgctttcactgagcgaacgcaatggcgaggtgaccggcgtagaaattgagcacgagggtcaaaagcaggctcttgaagcccgctgcggcgtggtgctggcagccggaggttttgccgcaggcaagctggctgaacgctaccgcccccagacccgcgagcactataccatgtcccccgctgccaacgacggcgccgcgctgcgccttgccgccgcgctcaatgcccgcgaaggcgctgacctgccgtctaactttttctgggcaccggtctccgttttacaccatgccgatggcacgcaggagcgcttccctcacctggtcaccgatcgcgccaaacccggcgtgattgccgtcaaccagcgcgcggtgcgcttcgtgaatgaatccaactcttatcaccacttcgccagcgccatgcaaagccgggcagaaaacgccccctgctttctgatttgcgacgcccttgccatgaagcgctacggcctcggcctggcgcgccctgcaccggtaaataatgacgcgctggtgaaagcgggctatctgcacaaggccgatacgctgtcagagctggcgcagcgcctcggactcgatccgcaaaccctcggggaaacggtggcgcgctataaccgcgacgccgctcagggccaggatgcggaattcgctaaaggcggcaacagctataaccgcgcgatgggcgaccccggccaccggccaaacgcctgtaacgccccgctgacccgcgcgccgttttatgccgtcaccctctataccggcgatctcggtacctcgcgcggtctggtgactaccgccgatgctcaggtgattaaccagcagggtgaaccgattaaaggcctctacgccgtgggtaacgatatgaattcgatgatggccggaacctatcccggccccggcattacgctcggcccggcgctgaccttcggctatctctcagccagccatatggcgcaacaacacgcactgtaa

SEQ ID NO: 258298 - DNA, 1704 bp, Klebsiella pneumoniae
atgggcgggcagataaacgtggatgttctggtggtcggctccggcgcggcggggctctctgccgccgtcaccgccgcgctcggcggcgccagcgtgctggttgcggagaaggagtcggttattggcggcaccagcgcctggtccggcggctggctatggatcccgcgtaatccgctggcgcgagaggagggtattgaagaagaacccggctcaccgctcacttatttacgccatgaaatggacggcgagcctgccgatgcgcgtctgctcgcctacttacagtacggaccggagatgatcgactttttccgccgccgcaccgccgtgcagtttctttccggcagcaaaatgcccgattttcacgcttcaccgggcgctgcgctgggcggccgctcggtcacggcgcagccttttgacggacggctgttgggcgactggctgcatcgcctgcggcctccgctggagaccatcagcctcgcggggatgggcattgccggcggcacggatatggcgcacttttttaacgccacccgctcatcgcgctcggcgctgtacgccacctgtcgcctgcttcgccacggctggcagcggctgcgcgccggtcgcggacagcatctggttaacggcaacgcgctggtcgcccgcctcctgcgttcggcgctggatgcgggggtgaattttcagcttaacgcgccggtagaacgtctgctcgccgacaacaacggcgtgacgggcgcgatattacgtagcgacagcggcgcgctggaggttcgcgccggcgcggtgatcctcgcctgcggaggctttccccacgacagacagcgtctggccgaacaggttccgcacgccgccagcggctacggccacttttccgccgcgcctccggggaaccagggtgatggcattcggctcggcgaaacggtcggcggtcagtttgatcattcgctcaggcacccgatggcctgggcgccggtgtcgcgcgttaccctcgccagcggagtgcagctcccctttccgcatctggttgaacgcgcgaagcctggctttattgccgttttgcccaacggcaaacgcttcaccaatgaggccgactcttatcatgattttattgccgcgctgctggactcgacgccgccgggcgaaacgccgcaggcgtggctgattgccgacagccgggcgctgcggcgctacggattgggccatgctcgccccttcccgtttaccccagaggcctggcgcaggaccggatatctgcagacgggcgaaacgccggaagcgctggcaaaagcctgcgccattaatccgcagcagctaacggaaacaatcacccggtttaacgactttgtagaccagggcgaggataaggattttcagcgcggcgcgtcggcatacaaccgcgcgcagggcgatgccagccgctctccgcacccaacgcttgggaaactcagccatgcgcctttttatgcggtacgcattttgcccggctcgctgggctccttcagcggattaatcaccgatgaaaatgcgcgggttctcaacgcgcagcagcagccgattcaggggcttttcgccatcggcaacgacatgtcgagcgtgatgcggggattctatcccagcggcggtatcacgctgggtccggcgatgacctttggttatctggtcggaaaaaacctggcagcaaatataaataaaacaacgcagtaa

SEQ ID NO: 258299 - DNA, 780 bp, Klebsiella pneumoniae
gtgaccctgcgatttattgatacccactgccatttcgatttccccccgttcaccggtgacgaaagcgccagtattgcccgggcggtgcgggctggcgtgacgcagatcgtggtgcccgcgacggaagcggataactttgaccgcgtgttagcgctggcagagaagcatagcgagctctacgccgccctgggcctccacccgatagcgattgagcggcatggcgccgacagccttgaacggcttgagcgctgtctggcgaaacgcgatgctaagctggtcgcggtcggggagataggtctcgatctctatcgcgaagatccgcagtttgagcgccagctttctgtatttgaggcgcagctacgtctggcgaaacgctacgatttgccggcgatcctccactccagacgcactcacgataagctggcgatgctgctgaaaaaacacgctttaccgcgaaccggcgtggtccacggttttgccggcagccttcagcaggcggagcggtttgtgcaactgggctataagattggcgttggcggcaccattacctacccgcgcgccagcaagacccgcgatgtgatggcgcagctgccgctttcggcgctactgctggagaccgatgcgccggatatgccgttgaacggtttccaggggcagccgaaccggcccgaacaggcggctcgcgtcttctccaccctatgcgagctgcgccctgagcccgcggaagtgatagctaataccctgatagataatacaaaagagatgttttcccttcagtaa

SEQ ID NO: 258300 - DNA, 1017 bp, Klebsiella pneumoniae
atgtccacgttgcgcctgctgctctccgactcttacgacccctggttcaacctggcggttgaggagtctatttttcgccagatgcccgccacccagcgggtactgtttctgtggcgcaatgccgatacggtggtcattggccgggcgcaaaacccgtggaaagagtgtaatacccgacgcatggaagaagataacgtgcgcctcgcgcgtcgcagcagcggcggcggcgcggtattccacgatctgggcaatacctgctttacctttatggccggcaaaccggagtacgataaaaccgtttccacgaatatcgtcctgtcagcgctgaatgcgctgggcgtcgaggcggaagcctcgggccgcaacgatctggtggtgaaaaccactgagggcgaccgcaaggtctccggctccgcctatcgcgaaacgatggatcgcggctttcatcacggtacgctgctgctgaacgccgatttaagccgtctggccaactacctcaatcctgataagaagaagctgcaggccaaaggcattacctccgtacgcggacgggtagccaatctggtcgagctgctgccggagattacccatcagcaggtctgcgaggcgattcaggaggcattcttcgcccattacggcgaacgcgtcgcagctgaagtgatctcgccggagaacatgccggacctgccgaattttgccgcgacctttgcgcgccagagcagctgggagtggaactttggccaggcgcccgccttcagccatctgctggatgagcgttttacctggggcggcgtagagctccatttcgacgtcgagaaaggccatatcacgcgcacgcaggtctttaccgacagccttaacccggcgccgctggaggcgctggccaccagattgcagggttgcctgtaccgcgcggatatgctgcagcaggagtgtgacgcgttgattggggatttcccggagcaggaaaatgagctgcgggagttgtcagcgtggattgcacaggccgtacgctag

SEQ ID NO: 258301 - DNA, 1218 bp, Klebsiella pneumoniae; identical to SEQ ID NO: 202629

SEQ ID NO: 258302 - DNA, 147 bp, Klebsiella pneumoniae; identical to SEQ ID NO: 202630

SEQ ID NO: 258303 - DNA, 321 bp, Klebsiella pneumoniae; identical to SEQ ID NO: 185670

SEQ ID NO: 258304 - DNA, 378 bp, Klebsiella pneumoniae
atgaatcgctatattgcggaagttattgcggcccacgtggctatagaacactggctgaatcaggggaaagggagcgccgaagcgctgctgcatcgctttagcccggaatttagcatgatcccgataaacggtatgcgcatggaccatcagtcggtcagcgctttttttcacggggctcgcgccagccgcccgggcttgaagattgtcatcgacaatgccgccatacttgccgaatggcgcgatggcgcagcggtgctctatcgggaaacccacgctttacccggcaaagcggacaccgcacgctggtcaacggttcttttccgtctgcaggaagagaaaatcatctggctgcacctccacgagacggcgctcgcataa

SEQ ID NO: 258305 - DNA, 1215 bp, Klebsiella pneumoniae
atgacgtatcgcagcaaggtcgcaaccgtttttctgctgggtttctttctcgacttaatcaatatgtttatcgccagcgtcgcctttccggcgatgggccggacgctacacgcgtcggtgggcgagctggcgtgggtcagcaatggctatattgccgggctcaccctggtgctgccgtttagcgcctggctcagccagcagtttggggcccggcgggtattcctgctttcgcttagcttgtttagcctcggggcgctggctgccgggatggccgactcgttgataagcctcgtcatgtggcgcgccctgcaggggatgggcggcgggctgctgattccactaggacaggcgttaacctggcaacagttcaagcctcacgaacgggcgaaactttccgccgcggtgatgctggttgggctgctggcgccggcgtgctctccggcgctcggcggagcgctggtgcaatcgctgagctggcgctgggttttctttgccagcctgccgatagcgctgctgacgttcgggctggccgcgctgtggctcaaggatgagaagagcgtcgcgcggtcgggcggctttttacatctctcgttactgcgcgacccgctgctgcgcttttctatgctggtctatctctgcgtgccgggaacctttattggcatcaatgtcgtcgggatgttttatttgcaaagcgtgacggggatggcgccctccgccatcggctccctgatgcttccgtggtcgctggcctcgtttgtggcgatcgcgacgaccggccgctatttcaatcgtctcggcccccgccccctgattgcgctgggctgccttctccaggcagccggaatactcatcctggctggcgtcaatgcgcataccgccagcagcgcgctgatcgcggcgtttatcctgatgggcgcaggcggcagcctgtgcagcagtacggcccagagcagcgcgtttcttaacgtggcgaaccccgatatgccggacgccagcgcgctgtggaacctcaatcgccagctcagtttcctgataggatctgcgctactggcagccttactgagcgcttttttactttactggcccaccccgctggcgtggcgcggcgtatttatcgccgccgccgttttgaccctggtgccgctgctgggctgccttaaattcgataaccgggcgttaatcatgcgcctgcacggtaaaatggagaacaaatga

SEQ ID NO: 258306 - DNA, 888 bp, Klebsiella pneumoniae
atgctgaacctgcaacggatgaacatgtttgtggcggtagtcgatagcgggagttttaccgcagcggcggcggctctggggcagaccaaggcggtggtgagtttcaacgtccgccagctggagaacgaactgggggtcacgctgctattgcgatcgacccgtcgcctgacgcttaccgaagctggttcgctgttctatcatcgcggggtcgcgctgctgaaagcggcggaaaacctgcaggacgacgtccggggcagccacgtggggttgagcggtgagctgcggatcacgacgacgcctgaatatggcgcgcaggtgattattccggcgctggcggagttcagcctgcggcatcctgcgctccgcgtacgccatgtttcctcttctcaccacgcggatttaatctccgagcggtttgacgtggcgattcgtctcggcacgctggcggattcgcgctaccgcgcggcgctgatatcacgctttgccatcgtcccggttgcagccccgtcatggctggcacagcatcctgtgaagacgcttgaagatctggcgcaatcggcgtggattattcatgaacgtctgaccgcgccgctccgctggcagcttagcgggccccatgacgagagcattgccttcgagattaaaccggcgccgcggctgtcggcggatagcgccagcgcgctgatggcttttgcgctggcgggcagcggcatcgcgctgctacccgagtggctggtggccgctgcgctggcggatggcgcactggcgaaggtgatgccggagtttagctttccgccccagggggtatatgcggtttacccggacgcgcagcatatccctgccagagtgcgggcgtttattgattttttacgcgaacgcgtgggttaa

SEQ ID NO: 258307 - DNA, 1941 bp, Klebsiella pneumoniae
atgggcaaactgagactgacaacggcgcaggcgctggtgaagttcctcgataaccagtacctggaagtggatggcgtagagctgaagttcgtgaaaggcattttcgcgatattcggccatggcaacgtcctggggctggggcaggcgctggagcaggacagcggcgatatgcgcgtctatcaggggcgcaacgagcaggggatggcccacgcggccaccggttttgcccgccaggccctgcgccggcagattatcgcctgcacctcctccatcggcccaggagcggccaacatgatcaccgccgccggcaccgccagcgccaaccgcattccgctgctgctgctgccgggcgatgtcttcgccacccgccagccggatccggtgctccagcagattgaacagagctacgatctcagcatcagcaccaatgacgccttccgcgcggtcagcaaatactgggaccgcattacccgcccggaacagctgatgagcgcctgcatcaacgccatgcgcgtcctgaccgacccggcggaaaccggcgcggtgacgctgtgcctgccgcaggatgtgcagggcgaagcctgggactacccggaatccttctttgcgcgccgcgtgcaccgactcgaccgccgcccggccagcgccgcgcagctggcggacgccgtcgcggccatcaaagccagccgtaaaccgctgatcgtctgcggcggcggggtgaaatactccggcgcgggcgaagcgctgtcccgtttcgccgagcgctacggggtaccctttgccgaaacccaggccgggaaggggacggtggtctcttctcaccccctgaacgtcggcggcgtcggcgagacgggctgcctggcggcgaacctgctggcgaaagaggccgacctggtgatcggcgtcggcacccgtttcagcgattttaccaccgcctcgaaatggattttccagcacccggaggtgcgtttcctgaatattaacgtcagcaacttcgacgcctggaagctggacggcattgccatgctggcggacgcccgggaagcgatgaccgccctcgacgcggcgctggcggacagcggctggcaggccggctggggcgcgcagatcgagagcgtgcagagccgtcagttaaaagagacccagcgtgtctaccaggcggtgtggcaggaaaaatcttttgtgccggagatcgacgatcatctcgatcgcgaatcggtgtatcgcgagttccgccagatcaccgactccaccctgacccagagcagcgtccttggggtactgaatgaaacgctgccggccgaggcggtgatcgtcgcggcggcgggcagcctgccgggcgatctgcagcgcgtctggcgcaaccgtgcagaaaatacctaccacgtggagtacggctactcctgcatgggatacgaagtcaacgccgcgctgggcgtgaagctggcgcagccgcagagcgaagtctactccctggtcggcgatggctccttcatgatgctgcactctgagctggtcacctccctgcaggagcgggcgaagatcaacgtcgtgctgttcgacaacatggccaacggctgcatcaacaacctgcagatggagcacgggatggacagcttcggcaccgagttccgctatcgtcagccggaaaccggccagctgcagggcggcctggtgccggtggacttcgccaccatcgccgccggctacggctgcaaaacctggcgcgtcaccaccctggacgaactgcgccgcgcgctggacgccgcccgtcgcgaaacggtcagcaccctgattgatattaaagtgctgccgaagaccatggtgcacaaatacggcagctggtggaacgttggggtcgcccagacggcgctctctgagcggatccgcaaggtggcgcaaatgattaatgaaaagcgcgcccaggcgcgtgattactaa

SEQ ID NO: 258308 - DNA, 1914 bp, Klebsiella pneumoniae
atgaatgcagcagtaaagcggctcgacgtcatctgtataggtcgggtggccgtcgacctctatgcccagcagattggttcgcggctagaagacgttgccagtttcgcgaaatatctgggcggctcctccggcaacgtggcctttggcaccgcgattcaggggctgaaatcggccatgctggcgcgcgttggcgatgaacacaacggccgtttcctgcgcgaaacgctcaaccgcgccggggtggataccgagtatctgattaccgacaaatctcgcctgaccgcgctggtgatgctggggattaaggatcaggagaccttccccctgattttctaccgcgataactgcgccgatatggccttaacgcctgacgacattagcgaggagtatattgcctcctcgcgggcgctggcggtgactggcacccacctgtcgcacgccaacacccgcgccgcggtgctgaaggcgctggagtacgcccgccgtcacggcctgcgtaccgcgctggatatcgattaccgtccggtgctgtgggggctcacctcgctcggcgatggcgaaacccgtttcattgagtccggaccggtcaccagccagctgcaggaagtgctgcatctgttcgatttggtggtgggaaccgaagaagagtttcatattgccgggggcagcaccgataccctgaccgcgctgaaaaatgtgcgcaatgccaccaaagccactctcgtctgcaagcgcgggccgatgggctgcgtggtgctggaaggcgacatcccggacagctgggaccaggtgccgctacagcagggcgtgcgcgtggaggttctcaacgtgctgggcgccggggatgcctttatgtcgggtctgctgcgcggctggctcaacgacgaaggctgggagcaggcttgccgttacgccaacgcctgcggggcgctggtggtctcccgccacggctgcgcgccggcgatgccgaccaaagtcgaactcgacgactacctgcagcgcgccgaatcggtgccgcgcccggacgtcgacgagcgcctcaaccacctgcaccgggtcaccagccgccgtcagcagtggccggagctgtgcattttcgcctttgaccatcgtaaacagctggccgatctggcgcgggagaccgggcgcgatgaagcctgcattccgcagctcaagctgctgttgttggccgcggccgaagcggcggcgcaggaggcaggtctcgatcagcgcagcggcattctggccgacggcacctacggccagcgtgcgctcaacgccattaccggcaagggctggtggatcgggcgccctatcgaactgcccagctcgcgaccgctgcgtctggagcatggcaacatcggctcgcagctgatcgactggccgctggagcatgtcgtcaaatgcctggtcttctatcacccggacgacccggcggcgctgcgtgcagagcaggatgccctgctgctcgaggtctggcaggcctgtaacaagtcaggccatgaactgctgctggaggtgatcctgccggaaaatggcccggacaaagacgagcgccattaccacaccatgctggaacacttctatcagctggggatcaagccggactggtggaagctgccgccgctctccagcgccagctggcagcagatcaccgcgcttatcgagcgtgaagatccgtggagccgcgggatcctgatcctcgggcttgacgcgccttccgacaaactgcgcgccggtttcgccgaggcggccgcacacccgatgatcaaaggtttcgccgtcgggcgcaccatctttggccagccgtcgcggcgctggatgcagggtgagctcagcgatgaggccctgatagaggaagtgaaacgcaactacctgacgcttattggctactggcgcgaagcccgccgctga

SEQ ID NO: 258309 - DNA, 438 bp, Klebsiella pneumoniae
gtggtcagcgatattcttcatcaatcagcatctcaacggcgggccgcatggctggcgctgtttgcgatcgcgctgatcgtggtggcgccgttgatctcagtcgctttgcaaaaagatccgatgagcggaatgcaccacgcaatgatgacgatggcggaagatgcgccatcacatcagatggcgatgatgcacgccgacgcttcgacgccgcaacgctcgcacggcgtaccgctcgatcatgctgaagcctgtggctactgcgtgctgttagctcacgtgccaggcctgattttcgcgctgatgctgctgcttgtcatggtgcttcgacgccagcgggtccctgttagccgaccagtacacaaacactggcattactttccctggctttatcctcttacccgagcgccgccgcgtccgtctgctttcccccttacataa

SEQ ID NO: 258310 - DNA, 1371 bp, Klebsiella pneumoniae
atgactacctgcatctcgcgcgcggcatggctgaacctgctgcggcgtcttcatttctatatcggactgtttatcggaccgtttatttttgcggcggctctgaccggtacgctatatgtcgccactccacagctggaaagctggctctatcagaatgcgcttcgcggtacgctcagtggagaaaaacagccgctcagcgcgcaaattaccgtagcaacagaggctatacagggaaacctgcgcctgcatgcggtacgcccggggatacaggctggcgatactacccgagtgatgtttattgacccgaaccttggcgagtcggaaacgcgggcaatttttgtcgatccggtgacgttaagcgtgaaaggagatctgccggtttacggtaccagcggtattttgccgctgcgtcagtggattgattatgcccaccgctcattgctcctggggagcgttggccgcctgtacagcgagctcgctgcgtcctggatgtgggttgccgctctcggtgggatcgcgctgtggtcgatgacccgcccgcgtcgtcgcattaacaataagatgcagaatagccgccgcctgcatgtctctctcggatgggcattgctggtcggtatgctcatattctctgcgaccggtttaacctggtcacaatgggccggtggtaacgtcgataagatgcgcgccgcctttggttggctgacgccacaggtgaatacgcagctggaaagcgccgttccggcagttcacgattcgcatgcggaacatcatatgggaagcaagatgatgggcgaggcggcatcgccgctgcgcgtagaggagtttgacaagattctgctggccgcacgcgctgcggggttggatgccggcaagctggagattcgaccgccgtcgggccccgggcgcgcctggacggtaaatgaaatcgacagaagctggccaacccaggttgatgctgtcgcgatcgaggggtcaacgatgcggatcgtggaccgtacgcatttttccgactttccgctcatggccaagctgacccgctggggggttgatttccatatgggaattttgttcggccttgttaatcagctattgcttatcgcgttcggaaccgcactctgcgtgatgatagtggtgggataccgcttgtggtggatccgccgcccggcgcgcgcggcggctaacccggccaatacgttgatacaggcgtggtttggattagcatggcccgctcgtctgctgactgccgttattgcggtgttgttgggggtagcgctgccgctaatggggggcagcctcgcgctatgtctcgccgttgattatctgcgctggcgcgcagcaacggcgatgttagaggctaaatcagtcgaatag

SEQ ID NO: 258311 - DNA, 2130 bp, Klebsiella pneumoniae
gtgaacgatcagggagccgaagaccaacgtcaggctttgaaaaaatttaccgtcgatctaaccgaacgtgccgagcagggtaagcttgacccggtgattggccgtgatgaagaaattcgtcgaacgattcaggttctgcagcgtcgtaccaaaaataacccggtgcttattggtgaacccggcgtaggtaaaacggccattgttgaaggactggcgcagcggatcgtcaacggtgaagtaccggaaggattgaaggggcgtcgggtcctggcgctcgatatgggcgcgctagtggcgggtgccaagtaccgcggtgagtttgaagaacgcttaaaaggcgtgctaaacgatctcgccaagcaggaaggcaacgtcatcctgtttatcgatgagctgcacacgatggtgggcgcaggtaaagcagacggagccatggacgccgggaatatgctgaaaccggcgctggcgcgtggtgagctgcactgcgtgggcgccacgacgctggatgaatatcgccagtacattgagaaagacgccgcgctggagcgtcgtttccagaaagtgttcgttgcggaaccgacggttgaagataccattgcgattttgcgtggtctgaaagaacgttatgaactgcaccaccacgtgcagatcactgacccggcgattgtagcggcggctacgctgtcccaccgttatatcgccgaccgacagctgccggacaaagcgattgacctgatcgatgaagctgcatccagcatccgtatgcagattgactcaaaaccggaagagctggacagactcgatcgacgcatcattcagctcaagctggaacagcaggcgctgaagaaagagtctgatgaagccagcattaagcggttggatatgctgaatgaggaactggcggataaagagcgtcaatattcagtcttagaagaagagtggaaggctgaaaaagcgtcgctctccggcacccagacgattaaggccgagctggaacaggctaaaatcgcgattgagcaggcgcgtcgcgtcggcgatctggcgcggatgtccgagctgcagtacggcaagatcccggaactggaaaaacagctggcggcggcaacgcagtctgaaggcaagacgatgcgcctgctgcggaataaagtcacggatgcggaaatcgcggaagtgttggctcgttggacggggattccggttgcgagaatgctcgaaggcgaacgtgagaagctgctgcgtatggagcaggagctgcatagccgcgttattggtcagaacgaagcggttgaagcggtatcgaatgcgatccgccgtagtcgtgccgggttatccgatcctaaccgtccgattggctcgttcctgttcctcggtcctactggggtaggtaaaacagaactctgtaaagcgctggctaactttatgtttgacagcgacgatgcaatggtacgtatcgacatgtcagagtttatggagaaacattccgtttcacgtctggttggggcgcctccgggatacgtcggttatgaagaaggtggctatcttactgaggcggtccgccgtcgtccttattccgtcatcctgctggatgaagtggaaaaagcgcacccggatgtctttaacattctgctgcaggtactggacgatggacgtttgactgacgggcaggggagaacggtcgacttccgcaatacggttgtcattatgacctccaacctcggttcggatctcattcaggaacgttttggtgcgctggattacagtcacatgaaagatctggtgctgggtgtggttagtcaaagcttccgcccggagtttatcaaccgtattgatgaagtggttgtcttccacccgttaggtgaaaaacacattgcttctattgcgcagattcagctgcagcggttgtataaacgactggaggagcgcggctacgaagtccacctctctgatgaggcgctgaagctgctgagcgaaaatgggtacgatccggtttatggcgcacgtcctctgaaacgtgctatccagcagcagatcgaaaaccccctggcacagcagattctttccggtgagctgataccaggtaaagaagtgcagctggtcgtgaaaaatgaccggatagtggcagtgcagtaa

SEQ ID NO: 258312 - DNA, 849 bp, Klebsiella pneumoniae
atgacgctgctaccctggcatcccccctacgactggcaatggatgtttcattttcttgaggcgcgtaccgtgcaggggattgaaacttttgtcgacaacagctactgccgcagctttgccctcaatggccacgccgggctgatcgcggtgacgccggatgacgccgcgcagggcatgcgggtgacgctttccgccgggctacagccggtcgcggaagagtgcctggcgcgggttgcgcgcttatttgatttgtcctgcgacccgcagcggatcgccctgacgctgggaaacctcgcgctgccaaggccggggctgcgcctgccgggatccctggatgcgtttgaacaagcggtacgcgcggtgctcggccaactggtgagcgtggccatggcggcaaagctgaccgggaaagtggtggctgccttcggggaaccgttgaccgatgcgccgggcttttatctgttcccgagcgcgcagcggctggcgcaggccgatccgctggcgctgaaggcgctgggtatgcccctgcggcgggcggaggcgctgattcacctggcgcgggcggccatcagcggcgaacttcccctccgggcgccggataatatcgacgctggaataaagcagctgcagacgctgcccggcattggccgctggacggcgaactatttcgcgctgcgcggctggcaggcgccggatatctttctggcggatgattatctgattaaacagcgttttcccggcatgacgccgagccggattgcgcgctacgccagccgctggcacccctggcgctcgtacgctttattgcatatctggtatacgcaaggctggtcgccggaggaggaatag

SEQ ID NO: 258313 - DNA, 867 bp, Klebsiella pneumoniae
  misc_feature (431)..(440): n is a, c, g, or t
atgataggtaataataaaactgcagagaaagactctgatgagatcgacttagggcgtttaattggtgagttaatagatcatcgtaaactaattatatctattacggcgctgttaacactctttgcgcttgtctatgcattatttgcaacacctgtttaccaagcagatgcaatgatccaggttgaacaaaaacaggcgaatgccattttaagtaacctgagtcagatgctgccagacagccagcctcagtcagcaccggaaatagcactgttacaatcaagaatgattttaggaaaaactgtcgacgacctcaatcttcaaactagggtgaaagaaagccatttcccaatatttggggcaggatgggctagattaacaggggaaaaagcaaactctatttccgtatcaaggttttatgtcgcggttgaagnnnnnnnnnnaggtgatgatgatgttgtaaaagcaaaaattaccattgtagattcatcgcattacgtattatcgataaatggttttgaattaaaaggtactgttggcgagttagttgatggccatggcatttctatcaaattagattcaattgatgctccggcaggaactgtatttgatatttcttctgttacccgcttaaaagcaataactgatctacagcaagtattttctgttactgaccagggcaaagataccggtatactctctttaacagttatgggggacaacccagctttaataaaaagaatacttgatagtattagtgaaggttatttatcacaaaatattgcccgacaagcagcgcaagatcaaaagagtttagagtttttaaataggcaattacctcaggtaagaatggatttagatccctcttag

SEQ ID NO: 258314 - DNA, 294 bp, Klebsiella pneumoniae
gtggtgaccagcacgccgtcggagccggcgaccgatttcatgtacatcatgttttcaacgccgttgatcgcttcctccagcggcgtcgccacggtctcggcaatcactttcgggttggcgccgggatactccgcgcgcacctggacgctcggcgggacgacatccggatattcgctcaccggcagcagcgggatagcgattaacccggtgataaaaattaaaatcgacagcaccgcggcgaaaatcggcctgtcgataaaaaagcgggaaaagtccatgtcttggattctctga

SEQ ID NO: 258315 - DNA, 888 bp, Klebsiella pneumoniae
atgatcgaaatccgtgaaggtcgcggctgcgacggtccttggggcccgcacgccaagctgaagcttgaccatctcggtaaagaggttctcgaatcccgtctgccgggtattctggaactctctcgtacctttgctcacgtcgacccggtgaaagagccgattccggttatcccaacctgccactatatgatgggcggtattccgaccaaagtgagcgggcaggcgctgaccgttaacgagcagggcgaagacgtggtgattccggggctgttcgcggtaggcgaaatcgcctgcgtatcggtacacggcgcgaaccgtctgggcggcaactcgctgcttgacctggtggtctttggccgcgcggtgggcctgcatctgcaggagtctatcgccgaacagggcgtactgcgcgatgcgacggatgacgagatcgatgcttcgctggaacgtctgaaccgctggaacggcaaccgcaatggtgaagacccggtcgaaatccgcaaagcgctgcaagagtgtatgcagcataacttctcggtattccgcgaaggggacgcaatggcgaagggccttgagcagctgaaagcgatccgcgagcgtctgaaaaacgcccgcctggatgatacttccagcgagttcaacacccagcgcgttgagtgtctggagctggataacctgatggaaaccgcttacgccaccgcaatgtctgcgaactaccgtaccgaaagccgcggtgcgcatagccgcttcgacttcccggatcgtgatgatgaaaactggctgtgccattccctgtatctgccagagtcggaatccatgacgcgtcgtagcgtcaatatggaaccgaagctgcgtccggcattcccgccgaagattcgtacttattaa

SEQ ID NO: 258316 - DNA, 186 bp, Klebsiella pneumoniae
atgctgattctgactcgtcgagttggtgagaccctcatgattggagatgaggtcactgtgacagttttaggggtgaagggtaaccaggtacgtattggcgttaatgcccctaaagaagtctccgtgcatcgtgaagagatctaccagcgtatccaggctgaaaaatcccagcagtccagttactaa

SEQ ID NO: 258317 - DNA, 498 bp, Klebsiella pneumoniae
atgacagattccgaattaatgcagctgagcgagcaggtggggcaggcgctgaaagcgcgcggcgcgacggtgaccacggcggagtcctgcaccggcggctgggtcgccaaaacccttaccgatatcgccggtagttcggcatggtttgagcgcggttttgtgacctacagcaatgaagcgaaatcgcagatgattggcgtcagcgaagcgacgctgcttgagcatggcgcggtgagtgaaccggtggtcgtggagatggcgattggcgccctgcgcgcggcccgcgcggactatgcgatttcggtcagcggcattgccggaccggatggcggcagcgcggaaaagccggtgggaaccgtctggtttggcgtcgccagcgccagcggacagggcgtgacccggcgcgaatgcttcgctggagaccgcgagtcggtacgccgccaggccacggcctatgcgctaaatctcctctggcaacaatttctacaaaatacttga

SEQ ID NO: 258318 - DNA, 774 bp, Klebsiella pneumoniae
atgaaaccacgtcagcgccaggcagccattctcgagcacctgcaatcgcagggcaaatgctcggtcgaagagctggcgcaacacttcgacaccaccggcacgaccatccgtaaggatctggtgatccttgagaatgccggtaccgttatccgcacctacggcggcgtggtgttaaataaagacgaggccgacccgcccatcgaccacaaaacgctgatcaacacccataaaaaagagcggattgccgaagccgcggtcagctttattcacgatggcgactcgatcattcttgatgccggcagcaccgtactgcaaatggtgccgatgctcagccgcttcaacaacatcaccgtgatgaccaacagcctgcatatcgtcaacgccctctccgaactggataatgagcaaaccatcctgatgccgggcggcacattccgcaagaaatcggcctcttttcacggccagctggcggaaaacgccttcgaacaattcagcttcgaccgcctgtttatgggcaccgacgggattgatttaatcgccggcgtcaccacctttaatgaggtttatacggtcagcaaagcgatgtgcaatgccgcccgcgaagttatcctgatggccgactcgtcgaagtttggccgcaaaagtcccaatatcgtctgcggcctcgagagcgtagacaaactgattaccgatgccgatatcagcccggaatttaagcgggcgctggaagacaaaggcatcgaagtcattattactggagaacatcatgagtaa

SEQ ID NO: 258319 - DNA, 1053 bp, Klebsiella pneumoniae
ttggcgatcctattcatcctgctactcattttcttctgtcagaaactggtcaggatcctcggcgccgctgttgatggcgatatcccgaccaatctggtgctctcgctgttagggctgggcgtacctgaaatggcgcagctcattctgcccctgagcttattcctcgggctgctgatgacgctgggcaaactgtataccgaaagcgaaatcacggtgatgcacgcctgcggcctgagcaaggccgtgctggtgaaagccgccatgattctggcgctctttacgggcatcgtcgcggcggtcaacgtgatgtgggccggcccctggtcttctcgtcaccaggatgaagtgctggcggaagcgaaagcgaaccccggcatggcggcgctggctcagggccagttccagcaggccagcgacggcagcgcggtgctgtttattgagaacgtcaacggcaaccgcttcagcgacgttttcctcgctcagctgcggccgcgaggcaacgcgcgcccgtcggtggttgtcgcggataccggcgagctctcgctgcgtaaagacggctcgcaggtggtgaccatgaatcagggcacccgctttgaaggcaccgcgatgctgcgcgacttccgcattaccgacttcaaaaactatcaggcgatagtcggccatcaggccgtggcatccgatccgaacgataccgagcagatggatatgcgcaccctgtggcgtaccgataccgatcgcgcccgggcggagctgcactggcgcttcacgctggtcgcgacggtgttcatcatggcgctgatggtggtgccgcttagcgtggtgaacccgcgccagggccgcgtgctgtcgatgctgccggcgatgctgctctatctggtgttcttcctgctgcaaacgtcgattaaatcgagcggcggtaaaggcaaaatggacccgatgatctggatgtgggcggtaaacctgctctatttcgcgttggccgtgctgttgaacctgtgggatacggtgccgatgcgccgcttccgtgcccgttttaacaaaggagcggcgtga

SEQ ID NO: 258320 - DNA, 1083 bp, Klebsiella pneumoniae
atgcaggcgtttggggtacttgaccgttatatcggtaagacgattttcaacaccatcatgatgaccctgttcatgctggtttccctctccggcatcatcaagtttgtcgaccagctgaaaaaggccgggcagggcaactatgatgcgctgggggccggaatctacacgattctcagcgtgccgaaagatatccaaatcttcttcccgatggcggcgctgctcggcgcgctgctggggctggggatgctggcgcagcgcagcgaactggtggtgatgcaggcttccggctttacccgcctgcaggtggcgctgtcggtgatgaaaaccgcgattccgctggtgctgctgaccatggcgataggcgagtgggttgccccgcagggcgagcagatggcgcgtaactatcgtgctcagcagatgtacggtgggtcgctgctttccacgcagcaggggctgtgggcgaaagacggccataactttgtgtatatcgagcgggtaaaaggcagcgatgagctgggcggagtgagcatctacgcctttaacgaccagcgccgcctgcagtccgttcgctatgccgcgtcggccaaattcgataccgagaataagctctggcggctgtcgcaggtggatgaatccaacctgaccgatccgaaacaggtcaccggaacgcagacggtcagcgggacctggaagaccaacctgaccccggataagctcggcgtggtggcgctggacccggacgcactgtccatcagcggcctgcacaactatgtcacctatctgaagtccagcggtcaggatccgggccgctatcagctcaatatgtggagcaaaatcttccagccgctgtcggtggcggtgatgatgctgatggcgctgtcgtttatctttggcccgctgcgtagcgtgccgatgggcgtcagggtagtgaccgggatcagcttcggcttcatcttctacgtgctggaccagattttcggcccgctaaccctggtatacggcattccgccgattatcggcgcgctactgccgagcgccagcttcttcttgctgagcctctggctgatgatgcgcaaatcctga

SEQ ID NO: 258321 - DNA, 297 bp, Klebsiella pneumoniae
gtgtttaggcttcggcgcgtagtggtggacgtgttccagcacctgttcatagctgtgcggaccggtaatttccagcaccttcggatgcacttcgcggatctgatcttcttttgcgcccaggcagccggtgacgatcactttgccgttttctttcaacgcttcgccaatcgcttccagcgactcctgcacggcgctatcgataaagccgcaggtgttaacgataaccatatcagcgttatcgtaggagggaaccacgtcatatccttcggtgcgcagttcagtcaggatacgttctga

SEQ ID NO: 258322 - DNA, 1245 bp, Klebsiella pneumoniae
atgattacgcccggcaaaagaaactatatcttgttgagtcttttcgatttcctctacctcttcgcctggtcctcgaccatggcgttcttcgttatctggaccactcagcatctcgggattagcgcaaccaaaaccggtctgctctactcggtcaacgcctttatcgccctgctgatgcagcccttcttcggctttatttccgataagttcggcctgaaaaaacggctgatctggatcctggtcgccatgctgctgccggtaggcccgttctttatttatttgtatgcgccgctgctggtgcacagcttctggctgggcgcgctgcttggcggggtatacctggggattattttcaactccggctgcggagttatcgattcgtatattgataaaatttcgcggcgctaccagttcgaatacggccgggtcaggatgtggggatcgttaggctgggccgccgccgcgtggatcgtcggcaaatatatcgacagcaatccaaacctcgccttctggctggccagcgtcgccatcgttatcgcggcgatctgctttatgctgaccaaaatcgaactgaccgaagcggaaatgcaaaaaagcagcgcgctgaaagtttcgcacgccctggagctggccaagaacggccagttctggatgctgctggtcttcacccttttcgtcacgcaagtctatgacacctacgatcagcagttcgcccagtacttttctctgcagttttcgacgccggaagaaggcaatcgctggtacggcattctggcctccattcaggtatgcggcgagaccctgtttttatgcctgatgccgtggttcgtaaaccgcaccggcgcgaaatgggcgctgatcatcgccgggctgatcatgtcggtgcgtatcgtcggctccgcgattccgctgggtccggtgtggatcggcgcggtaaaaatgatgcatgcgctggaaaaaccgctgattttagtgtcggtgtttaaatttatcgccgccaacttcgacaacaagctctcctcgacggtctacctgctggtgctgttcgtcgcctctatcgccaccgccatttactcgccgctggccgggtatttgtacgacaccatcggctttgcgcatacctattatattctgggcggcatcgccgggctgtttacgctaatctcggtatttacgcttcgcgataatagagaaccgaccgcgccgggggctgcgccaggcgctggcgttgcgcaaagccattaa

SEQ ID NO: 258323 - DNA, 507 bp, Klebsiella pneumoniae
atgagctacacaacagtaatacgagtttggcctggcgaaaaatcagagactgctgaagagtttcgcaatgcatggggcagcggtcccgtaatctggaacgacatggctatccgttatctgagagcggccccttatggttatatggcatctatcgataagctatggcctctggccaattgggaggatatcccacttcatcaccgagctgtattagcaatgacatatgaccggatgtatgtcctcaaggagcattactcccgtgcagctgaatacatcaggctttaccttgctgatttccctccaaatgaagccactgtaaaccactggcctgctatcgctgaattatttgagagaaaccctgactgtccggcgatagggctatggctaacctcggtctgtgaagacccctttgctggcgaatgggatgatgaagcggaagagtattcgcagccagactggccgagatactggagtttgtttgatcatcttgatggatccagcatttga

SEQ ID NO: 258324 - DNA, 414 bp, Klebsiella pneumoniae
atggaaatcaaacacgagcacgttgaaatagttctgctggcctgggctgctgaagtcggccaggcatacgcagccaacgcgattactgaagaatacgtgcgctcaggtgggactgagcttcgcctggttccgggtaaggcgtgggccaatcagcaaaatatcttccatcgctggctgaagggtgagaccgaacagcagcgcgagaaaatccgtctgctgcttccgtcaatcctgcgcgttctgccgcgtgaaatccgtcatcgtctgagcatctacgacactatcgaacgtcgggcattgctggcggcccagcatgccatcggaacggctattgatgcgcacgacgacgctattgaagccatttacagcaaggcttatcagcctgtcgctgttgaagtaacgaaataccactga

SEQ ID NO: 258325 - DNA, 462 bp, Klebsiella pneumoniae
atgacaatcacactacaggcagtaaacgagctcattaagtcgcttgagtcagcgggagagctgtcaatcaaagagacaaaggttatggcgctggcgaaggcttaccagcagctggctgcggagaatgcggcgctgaagtcgtttggcgacacactccacgaaatcaaaagcagcctcgttggtggcggtcatgggcatatggcaaaagctgatatgcaggctcagagcgcggttatggatgtaatttttgatgcattcgacgctatcgaaactcccgccaccgacgtttacgtagccgggattaaggctgatggggttgctgctgctcttgaatcttgctccgattatctcgatacagactgcgttatggataggcttgatatcagctacgaagacgccgagaagcgaacctcagtagactggccccatgaacctccagacagttggtatcacttaaattag

SEQ ID NO: 258326 - DNA, 1260 bp, Klebsiella pneumoniae
atgacagagcagattacagagatcgataccctggtggtgggcgcgggacaggcgggcgtcgcgatgagcgagcatctgacgcatcacggcattccccacctggtgctggaaaaaaagcgcatcgctgaggcctggcgcagcggccgctgggattcgctggtggccaacggcccggcctggcacgatcggtttcccggcatgacctttcccggctgcgacgccgacagctttgtcgccaaagagcagattgccgactacttcgccgcgtatgccaaaacctttaatgcaccgatcaaaaccggcgttgaggtctttagcgcagagcgcttaaacggctgtccggggtttcgcgtcgaaacctcgctgggcgtgattgaggcgcagcgtattgtcgccgccaccgggccgttccagcgcccggtgataccggccatcgcgccgcaggatagcgcagtggagcaaatccattccgcgcactatttcaacccgcagcagcttgcggaaggcggcgtgctggtggttggtgcgggatcgtccggcgtacaaatcgccgaagaactccgccgggcggggcgcgcggtgtggctctccgtcggcgcccacgatcgcccgccgcgccgctaccgccagcgcgatttttgctggtggctgggggtattaggcttgtgggacgcggcggccaaccagcccggtaaagagcacgtgacgattgcggttagcggcgcgcgcggcggtcataccgttgactttcgccagctggcgcaccaggggattaccctggtcgggcaaacgcacggctttaccgagggtaaggcggtgttccgcgacgatctggcggacaacattcgtctcggcgacgcctcctatctggcgctgctcgacgctgcggatgagtacattgcccgcaacggactgaccctgccggaagagccggaagcgcgcttctttctgccagaccccgattgcctgacccagccgctcgccgaactcgacctggcaaaagcgggcgtgcgcagcattatctgggccaccggctacaccaccgattaccgctggctgaaggttaacgcctttaatgaacagcagcgcccgcagcatcatcgcggcgtttccagcgaaccgggcgtctatttccttggcctgccttggctctcccgccgtggctcaacctttatctggggcgtctggcacgatgcgaaatatatcgccgatcagattgccattcagcgtcagtatcaacgctaccaaccttcctgctaa

SEQ ID NO: 258327 - DNA, 570 bp, Klebsiella pneumoniae
  misc_feature (445)..(454): n is a, c, g, or t
atgaccctttcaatttccgccctgtgcccggagtcgggtcaactgggcattgcgattagctcatccagcattgcggtcggcgcccgctgcccgtggctgctggcgggcgttggcgcggtgtccagccagaacatcacgctgcccgcgctcggaccgcagatccttgccgggcttgaggcggggctcacgccgcagcaggccctgacgcaggcgctgggcgaagaccggtttagcgattatcgccaggtggcggtcatcgacgccagcggcgagagcgccgtgttcagcggcgaacatacgctcggcatcgggcgggtggcgcagggtgagaactgcgtggcggcggggaatatgctggccaacccgcaggtgattaccgccatgacgacggcgttcgaagccgccaccggcgaactggccagccgcctgattgcggctctgcagnnnnnnnnnngctctgcaggcgggcatcgatgcgggcggcgaagccgggccggagcactcggcggcgctgaaagtggtggaggattacgcctggccggtggtggatttacgcgtcgactgggctga

SEQ ID NO: 258328 - DNA, 1170 bp, Klebsiella pneumoniae
atgagtaatcgcctgcgtgagatcctcgggcagctgctggcgtttgataccaccagccgcgagtcgaatctggcgctgattgcctggatcggcgactttctgcgcgcgcgcggcgtgacgtcgcagctgttttatgacgacgaagggcgcaaggcgaacctctatgcccgccttgggccatccggccccggcggggtgatgctctccggtcatactgacgtggtgccggtggatggccaggcgtggacggtgccgccgttcgcccttaccgaacgcgacgggcgctactacggtcgcggcagcgcggatatgaaaggatttatcgcctgcgtgctggcgtcgctggaggcgtttctggctgcgccgctgcggatgccgctgcatctggcattctcttatgatgaggaagttggctgtctgggcgtgcgcagcctggtggattttctccgcgcctccgccgagaaaccggcgctgtgtattatcggcgagccgaccgatatgcgcccagtctatgggcataaaggcaagctcgcggtgcgctgtcgcgtggaaggccacgcctgccattcggcctacgccccgcaaggggttaacgcgattagctacgcggcgaagctgatttaccggctggatgcgctgggcgaaagcttttcgcagcacctggaccgccggttctcgccgccgtcaggcacgctgcaggtggggacgatccgcggcggcgaggcgctgaatatcgttccgcaatcctgctggttcgactttgaaattcgctatttacccggtacccgtccgcaggtggtcaccgacgccctgggcgattatgcccgcgagcagctgcttccggcgatgcgcaaggtggcgcagtgcagcgacattcatttccagacgctgagccactatccgggtctgctgagcgacccgcagtcagcgttcgcccgctggctggcgcagtggtgcggcagcgatgatttcaccaccgtcgcctacggcaccgaaggcggcctgtttgacgaggcgggcgtcgcgacgcttatctgcgggccgggcagcatggcgcagggccatagggcggacgaatatatcagcatcccacagacggaacgctgtctggccatgctggataacctttgcgcctggatgcgcgccgatccctccgattcacttcgctga

SEQ ID NO: 258329 - DNA, 816 bp, Klebsiella pneumoniae
atgcaaaacccgtactccccgcttattgatcaacagaccgtcgaccgctggcagaccgacggcgtcgtgctactcaaaggcgtgttcacgccgtggatagacagcctgtcgcgcggcgtcgccgcgctgatggcgaaccccagcgaatatggccatgcgcgaacggtaatcccggaagacggttcggcgccgttttttcaggactattgcaactggcaacgaatcccggaatttcgcgatttcgtttttcagtcgccggcggcggagatcgccgcggtgctgatggggtcgcagacggcgaagtttttccacgagcacacgctggtgaaacagcccggcggcagtacggtgacgccatggcaccacgatcagccctattactgcgtggaagggcggcagaacgtgagcctgtggatcccgctcgatccggtagcggaggagatttcgctgcgctgcattcgcggttcccatcgctgggacgaggagttcagcccaacgcggtttaacggttcaaagctctattcccactcgcgttttaaagagctgccggatatcgatgcccatcaggaggattacgatatcgttagctgggcgctggaaccgggcgatgcggtcgcttttcatttccgcacgctgcatggcgccaggggtaattcaagcgcccgcgcgcggcgggtattttccgcccgttgggtaggggatgatgcgacattcgccgaccgcggcggcgtgacctcgccgccgtttccggggcttaagcttcgcgacggagagccgcttgtcgccgatgagtttccgctggtctggccgcggtag

SEQ ID NO: 258330 - DNA, 537 bp, Klebsiella pneumoniae
atggtcaccacacatgtttttatcgcggtcagtcttgatggttatatcgcccgacaggatgacgatatcgactggctgttgcagcgcgatgacccgacagaagatcacggctatgccgcattcatcgcggacaaagattggatcgttatgggtcggggcagctatgagaaggcgctgacctttgaccagtggccttacgatcgccccgtgctggttctctcccgacagctaaccgcgaccgccgtgcccgaggcgttgaaggacaaagtgcagttctcaagccgcacgccaggggaagtgcttgctgacctgacggtacagaacgcgcatcgcgtctatatagatggcgggaaagtaatacagtcgttcctgcgcgaagggctggtcgccgatatgattatcactaccgttcctgtcctgctcggttcgggaaaaccgctgttcggttccctgaccagggatatcgatttgactctgttatcaagccgtagctttccttcgggactggtgcagtcgcactatcggctgacgtcataa

SEQ ID NO: 258331 - DNA, 864 bp, Klebsiella pneumoniae
atgaaatctttactctctttgctcggccgttacgcgctgacgttaatcgcagtggcggtggcggctttcgtggcgtttattttctggaaacagtatgcgcagacgccctggacgcgcgatggccgcgttcgggcagatgtggtgcagattgcgccggacgtttccgggccggtaaccagcgtagcggtgcgggataatcagtgggttaaccgtggcgatgtactttacgccatcgacccgcgctggctaaagctggcggtgctcagcgcgcaggccgacgtcgaggcaaagcgtcatgagatggtgatgcgccaggatgcggccaggcgacgcgcccttatcaaaggggtcatttccagcgaggacatccagcaaacaggcagcgcagcgcgcgtcgcggcggccaattaccagggggcgctggcggcgctggaactggcgcagctgaatttatcccatgcgacggtgcgcgcaccggttgccggctacgtcacacatcttcggcttcgccccggcgattacgccacggcgggagagacaaaggtcgccgtggtcgatgcgcacagtttctgggtggtgggctattttgaagagaccaagctgcgtcatattcgcatcggcagcggcgcgcgcatttcgctgatggggtttgacccgctcattaccgggcatgtggagagtatcggccgggggatcgacgataacaatgacgcgacgggcgggctgggactgccggatgtcaatcccaccttcagctgggtgcggcttgcgcagcgtgtccccgtccgtatccagctagataagataccagaggggattgagctggtggcagggttatccgccagcgtttccattgtgccttaa

SEQ ID NO: 258332 - DNA, 216 bp, Klebsiella pneumoniae
atgatcaatgacatcaatatcggaggggtttttatccccggactgctgctgaccgcgctcattgccctggtctgtacgctgttactcgtgccgcttttctctgtcagcaggctgtaccgccgtctgcccttacgcccgctgcttgatgtctcaacctatatcgtgacctttttcctgctgttgcagggcctgaccacactggggttattcgcatga

SEQ ID NO: 258333 - DNA, 2040 bp, Klebsiella pneumoniae
atgaataaattaacttcccctcacagccattttttgcacgcgataagccgttggccaggccgcatggccacgcccgcgttgctaagcgacgcccatgccctgctctattcggtcaggagttttgccgccgcgatgctcgcctattacctcgccctggcgattggccttgaacgcccctcgtgggccatcattaccgtctatatcgtgtcgcaaacctcggtgggcgcctccctgagcaggagcctctatcgcctggcgggtaccgtggccggcgcgggggccacggtgttgattgtgcccacgtttgtgaatacgccgattttatgcagcgtgatgctgacaggctggatcaccttctgcctctatttgtccctgcttgaacgcacgcctcgcgcctatgcttttgtgctggccggttacaccgcaagcctgattggttttcccgccgtcgccgacccaggcacggtgtttaacatcgccatcatccgggtacaggagatcgcgatcggtatcgtctgcgccgcgctgattcaccgctacattctgcctacccggatatcagggttgttcaacagcaaattagcgcagacgcttggggccacgcggcagcggattgccgacacgctggcaggcaagtccgacgcgcagtcagaaccgctgcatctggcgctggcgctgcagtttctgcagggcatcagccaccacatcccgtatgatttcgctctttcggtaccggtccgccaggccaggaaagcgctccatgaccggctggcgcggttagtcattgtcaatgttgaattacgcgatcgtttgcaggcgatcgcgctgatgcccgctgatacgcggacgttgctggatgatgttcaggcctggctgacctgcgacgatagcggaaaatgcaacagcgcagccgatgcgctacagcaacgcggcgcgcggttagcgcagcggtacgccgcgcaggcgctgacctttgaagatgcgctgcaggtgaatttcttacgctacctcgctgagtcgattgccctcctgcagcagtgtgagcggctttcggaggccatccatcacgccagacccgcaacaatgcaggcggaagaccgtgcgacgaaagggtacgttttccatcgcgatcccctcagtgccgcccgaatggcgctgggcgcgtttgtcatcatcctgagcggctgtctggcatggatttattctgcctggccggatggcggcacggcggtgtcgattctgggggtttgctgcacgctgtttggcagtttcgacaccccggctccgcatattgtgaaatacattatcggctctttctggggcgtcgtaataagcctgctctatagcttcgccctgcttcctccgctcagcgacttccccgtactggcggcggtgcttgccccggcctatctgcttgccggatcgctacaggcgcggccccccaccacctttatggcgatggggatcaccctgacgctacctgtgctctgcgagctgggcgcgcgctacagcggcgactttgccgaggcggccaacaccgcgatcgccctgtttttggcgaccggctttgcggttatcggcatgagtctgctgcaaaccgtgcaggcggacgcggcgataaaccgtctgctgaaactgtgccaacgcgatattcgccgcagcgtgaacgacgcgtttagaggcgatgaaacgcgctggaccaatctgatgatcgaccgggccgccttgctgctgccgcgcttgccgcgcagcgggcggtcatccgcgcgggcgcttgaacacctgctgcgctttctgcgccttggcctctgcgtaatgcgcctgcgccgctgcgaaacgcccgccggcagcgatatccacgaggtgctttatccccttacccgcacaacggagaccgaagccttacgcgagcgcattgccgccatgacggagcgctgcttgcccgcgacggatgaacattcacgccagtttgtcgacaggctggtcgatctgcactgcgcgttgcgggcgcagaacgaggaaccgacgcatgatcaatga

SEQ ID NO: 258334 - DNA, 822 bp, Klebsiella pneumoniae
atgccatccagactcgcccataccctgtttgatcccgatagtacgccgagcccggccgtcgcgcggcatatcgatttcgttgattacgcggcagaagtgccggttcatactcaccgcaaaggccagctgatcgtggccctgtacggggcggtgatttgtcgcgcggaaaatgatatctggatagtgccgccagactgcgcggtgtggatccccggcgggatcccgcatagcgccaaagcgacctggaatgcgcatctcaactatttgtttattgaacccggcgccgccgcgctgccggagaaatgctgcaccctggcgatttcgccgctgattaaagagctcgtcgaccgcttaacgaatgaggaggttgattacccggcggagagccacgtcggccgattgatcagagtgacgctcgatgaacttgccgccatgccgcagcagaaattaagcctgccggtttcggcgcaccctaagatccgcgccatggcggatgcgctggtcagccacccagaggatcgcagcacctttaaagtttgggcaaaacggctggcgctcagcgagcgctcattagcccgcctgatgctgcgtgaaaccgggctgaccttcgggcgatggcgtcagcagctgcatttgattattgcccttcgggagctggcaagcggggtatcggtgcaaaacgtggcggctaatctgggctatgagtcggtcaacgcgtttatcactatgttcagaaaaacgatgggcagcacgcccgcgcactactttgccggtcgaagagcggcagagcccgcagtgacgcccatctttgataaggcgtga

SEQ ID NO: 258335 - DNA, 258 bp, Klebsiella pneumoniae
atgtacatcatgttttcaacgccgttgatcgcctcttccagcggcgtcgccacggtctcagcgatcactttcgggttggcgccaggatactccgcgcgcacctgcacgctgggcggcacgacgtcaggatattcgctgaccggcagcagcgggatggcgattaatccggtgataaaaatcagaatcgacagcaccgcggcgaaaatcggcctgtcgataaaaaagcgggaaaagtccatgggtcggattctcagataa

SEQ ID NO: 258336 - DNA, 363 bp, Klebsiella pneumoniae
gtgcggcagcagagattcgatatcgcgcaggatctcccgcgcctgctccagctggcccgccggcaggcgcgccttgcgcacgaggaagttcagcgcgcgctgggtatccatcagacagagtcgcaccttccagccgatatcttccagttccgccagcgtcgacagcgcttcgtcgtactcgtcgccctgatggccttccataatgacgcggctcagcttttccaggtcgctgtagatgttttcaatttcatccgccagctgctcgattttggtctcgaacaggtcgagcagcagttcgtaggcgttgccgtcaaccagcgtctggttacgcacgcgcatacggtagaggcggaaagcgggtag

SEQ ID NO: 258337 - DNA, 726 bp, Klebsiella pneumoniae
atggcaacattaactgcaaagaatcttgctaaagcctataaaggccgccgcgtcgtggaagatgtcagtctgaccgtgaattcgggcgagattgttggcctgctcggtccgaacggcgccggtaaaaccactaccttctatatggttgttggtatcgtaccgcgcgacgcgggcaacattatcatcgatgatgaagacatcagcctgctgccgctgcacgcgcgcgcgcgtcgcggaatcggctatttgccgcaggaggcctccattttccgccggctgagcgtttacgataacctgatggcggtattgcagattcgcgacgatctcagcaacgagcagcgcgaagatcgcgcgaaagagctgatggaggagtttcacattgagcacctgcgcgatagtctcggccaggcgctctccggtggtgaacggcgccgcgtcgagatcgcccgcgcgttggccgctaacccgaaattcatcctactggatgaaccctttgccggcgttgaccccatctccgttatcgatatcaaacgcattattgaacacctgcgcgacagcggtcttggcgtcctgataaccgaccataacgtcagggaaacgctggccgtttgcgagcgtgcttatatcgtcagccagggccacctgatagcccacggtacgccgcagcaaatccttgaagacgagcaggttaagcgcgtgtatcttggggaagacttcagactctga

SEQ ID NO: 258338 - DNA, 981 bp, Klebsiella pneumoniae
atgtcatcagttactacttcaggtactacccggtcggcttttagcttctcccgcgtctgggatcagttcggcatgctggttgtttttgcggtgctgtttattggctgcgtcatttttgtgcctaattttgcctcatttatcaatatgaaaggcctggggttggctatttctatgtccggaatggtggcctgcgggatgctgttttgcctggcatccggcgactttgacctgtcggtcgcctcggttatcgcctgcgccggggtgaccacggcggtggtgattaacctgacagagagcatgtggattggcatcggcgccggtctgctgctcggggcgctgagcggtttggtaaacggttttgtgattgcccgcctgaagattaacgccctgatcaccaccctggcgaccatgcagatcgttcgcggtctggcctatatcatctctgacggtaaggcggtagggattgaagacgagcgcttctttactctcggatacgccaactggtttggtctgccagcgcctatctggctgaccgtagcctgcctgattgtcttcggcctgttgctcaataaaaccaccttcggccgtaataccctggcgattggcggcaacgaagaagctgcgcgtctggcgggcgtgccggtggtgcggaccaagatcattattttcgtcctttccggcctggtttctgccgcggcaggcattatcctggcttcccgtatgaccagcggtcagccgatgacctcgattggctatgagctgattgttatctcggcctgcgtgctggggggcgtatcgctgaagggcgggatcggtaagatctcctacgtggtggccgggatcctgatcctggggacggtggagaacgcgatgaacctgctgaacatctcgccgttctcgcagtacgtcgttcgcggcgtgattttgctggcggcggttatctttgaccgctacaaacagaaagcgaagcgcgccgtttaa

SEQ ID NO: 258339 - DNA, 1584 bp, Klebsiella pneumoniae
atgaaaacacgtaaaatcggtttggttaactaccttgcctatggatcgggcgatttccttggtgcggggacaaccgcacttacagcagcatggctgctctacttctacaccaccttttgcggtctttcccctatcgaagcgacgcttatttttgccaccgccagggtgctggatgcggtgatcagtccgctgatgggcttcctgacggataactttggctcgacctggctggggaaacgttttggcagacgcaagttcttcatcctgctcggcatcccctgcgtatttagctactccatcatgtgggtaggggatatggggttctggtactacctgctgacctatctgctgtttgatattgtctacaccatgattctggtgccgtatgaaacgctggtgccggaaatgaccgatgattttaaacagaaaacaaaattctccggcgcgcgtatttcaatggcccagatgtcagcgattctggcttcgttcctgccgggcgtgctgctgactatcttcggcaaagacaacgccgtttctttcttttacgccagcctggtgttctcggtactgtgcgcgatgatgctgacatttgtctggttctttacctgggaacgcccgcgtgaagagtggacggaagccgcgctacgcgctgaagaggagaaacaaaacctgacgctgtctcagagccttaaccgcctgtttattgagttaagttcgaccctgcgaattaaaatttttcgtcagcatctgggcatgtatctgggaggctatatcgcccaggatgtgttcaatgcggtctttacctactacgtggtgtttgtgttgatgcaggaagcctcgatggcctccaacctgctcggtaccatggcaatcttccagtttatcgcggttatcgccatgatcccgctgtgcattcgcttcgggccggcgccatcgtaccgcatggtggtggtgctgttcggcctgagttcgctctcctacgcggtgctgtactacgctggccttagcgatgtttattcgctgctgctgctgatatccgcggtggctggcctggggcgcggcggcatcaactatgttccgtggaacacctacacctatattgccgacgtggacgaagtgatcaccggccagcgccgcgaaggcatcttcgccgggattatgaccctgacgcgtaaggcgtcccaggccggcgcggtgatgctggtggggatcatcatgcagatgtcgggctttgtctccgggcagaaaacgcagccctatgaagtgagccataccattctgctgatcctcagcgtcggtactttagtggtgctggcctgcggtttcctcgtgtccctgcgctttaagctcaatctgcaaacccacagcgtcctgcgtgcggaaacgctgaaaatgcgtgaatcaggccgcgctcagccggaactggcaagcgccgaggatcgtgaagtggtggagatgctggccgggatgccgtacgacgccctgtggggaaacaacaatattggttatctgaatcggaataaacccgccgcgccagcgctgaagcagcgttcagccatgaattcgacatataacagaggttaa

SEQ ID NO: 258340 - DNA, 1017 bp, Klebsiella pneumoniae
atgattgatttcagcaacttttatcaattgattgccaaaagcccgctttcgcactggctggagacgctgccggcccaggtggcggcctggcagcgcgacgcgctgcacggcaaataccgggaatgggaacgggccgtcgagtttctgcccgagtttgcgccctaccgtctggatctgctgcacagcgtcaccgccgagagcgaaacgccgctcggcgaaggccagcgcctgcggattgaaaacctgctgaagaatctgatgccgtggcgtaaagggcccttctccctttacggcgtgaatatcgataccgaatggcgttccgactggaagtgggagcgcgtactgccgcacctttccgatctgaccgggcgtaccatccttgatgtcggctgcggcagcggataccacatgtggcgcatgattggcgccggcgctcatctggcggtgggcatcgaccccacccagctgtttctttgccagtttgaagcggtgcgaaaactgttgggcaacgaccagcgcgcgcatctgctgccgctgggcattgagcagcttccggcgctcaacgcctttgataccgtcttttcgatgggcgtgctgtatcaccgccgctctccgctcgatcacctgtggcagctcaaagatcagctggttcccggcggcgagctggtgctggagacgctggtcgttgaaggcgacgaaaataccgtactggtgccgggcgaccgctatgcccaaatgcgcaacgtctactttatcccgtccgccgccgcgctgaagcagtggctggagaagtgcggatttgtcgatgtgcgtattgtcgatgcgtgcgtcacttcgaccgacgagcagcgccgcaccgagtggatgaccaccgagtcgctggccgatttcctcgatccgcgcgatagcagcaaaacggtcgaaggctatccggccccgctgcgcgcggtgattattgccagtaaaccggaaacgcagcagtcgttagcggcgaaaaaaaaccgtagccagggctaa

SEQ ID NO: 258341 - DNA, 264 bp, Klebsiella pneumoniae
gtgctgtcggaaaaattcagcttcgaagatgacaacgtcggcgaactcttgttcaacatgcatcacgacttcaaacgcgctaacggctacagcgagctggaaatcagccaaaagcgcagcatgctggaaaacgtgatgctcaccgattccgtggaaacccacaaagcgcgcctgcgtaaggccggtttcgaacatgccgagctgtggttccagtgctttaacttcggatcgttaatcgccgtaaaatccggggacccggcatga

SEQ ID NO: 258342 - DNA, 1266 bp, Klebsiella pneumoniae
gtgaccatctcattaaatattatgtctgacaactccaccttttctccggttctgacgagccgggagcgtaccgctgtacctgcaaaatctctgagtttcattgaaggcgtgtcgatgatcgtcggcaccaatatcggcgctggggtgctatccatcgcctatgcctccagcaaagcgggctttctgccgctgctgttttggctgatcgttgtcggtagcctgacaaccgttacgatgctctacgtcgcggagtcgacgctgcgcacgcgtaagcatctgcagcttagcggcctgtcgcagcgctacgtcggccgctttggcgcgctgatgatgttcctctccgtttgcgtcaacagcgtcggcgcgctgacggcttatatgaccggcagcggtaaactcctgcattcgttattcggcatctcgccggccctcggtagcgcgctgttttttattcccgcggccggagtgctttatcttggcctgaaggcgattggccggggtgaaaaattcattagtatcggcatggtcgtcatgatcgccattcttgtcgccgccacgttgctgcaagagaccgccagcgtggggtatttactcgacggtaactggctgtatatggtgccggtatttaacgtcgtcgccttctgcttctccgcgcagtatatcgtgccggaaatggcgcgcggtttcgctgataaaccggagaaactgccgaaggccattatggtggggatgctgttaaccttttgcctgctggcgctggtcccgctttcggtgattgcgttaagcgggttggataatatttctgatgtggcgaccatttcctggggcagggcgctcggcgagtgggctttcttctcggcaaatctctttgcgctctgcgcgatgctgacttcctattggggactgggcggaagcttcctgaccaatattttcgatcagtttcgcctgggcaacgacgagcagccgttcaaacgctttaaggtgctgctggtggtcgccgtgccgccatttattctggcctacagcgggatggtgtccttcgtgaacgcgctctattttgccggggtatttagcggggtgattttgtccatcatgccgatccttatcctgaaaggttcgcggcggcagggggatatcactcccggctggacctgcccggcgctgataacgcacccgttcatccagatcttcatcgtattgctctatctttgcagcgccgtctacgccatcgcttctgcctttggctatctgcccgcgggctggtag

SEQ ID NO: 258343 - DNA, 1098 bp, Klebsiella pneumoniae
atgaagggtaaagcgttactggcaggatgtattgccttaatcatgagcggtacggcaatggccgaagatatcaaagtcgccgtcgttggcgcgatgtccggtccggtagcgcagtacggcgaccaggagtttactggcgctgagcaggccattgccgatatcaacgctaaaggcggcatcaaaggcaataagctgcagatggtaaaatacgacgacgcctgtgacccgaaacaagcggttgccgtcgctaacaaagtaattaacgacggtatcaaatacgttatcggccacctgtgctcttcttccactcagccggcgtctgatatctatgaagatgaaggcgtgctgatgatcactccggccgccaccgcgccggagctgacggcccgcggctatcacctgattctgcgcactaccggtctggactccgatcaggggccaaccgctgccaaatatatcctggagaaagtgaagccgcagcgcatcgcgattgtccacgacaagcagcagtacggcgagggtctggcccgcgcggtgcaggacaacctgaagaagggcggcgccaacgtggtgttctttgacggcatcaccgccggtgagaaagacttctctaccctggtggcgcgtctgaagaaagagaacatcgacttcgtctactacggcggctaccacccggagatggggcagatcctgcgtcagtctcgcgccgctggcctgaaaacgcagtttatggggccggaaggggtagcgaacgtgtccctgtctaatatcgcgggcgcttctgcggaaggtatgctggtgactaagccgaagaactacgaccaggtgccggcgaacaaaccgattgtggatgcgatcaaagcgaagaaacaggatccgagcggcgcgttcgtgtggaccacctatgccgcgctgcagtcgctgcaggcaggtctgaatcagtcagaagatccggctgaaatcgccaaatatctgaaaggggctacggtcgataccgtaatggggccgctcacctggaacgagaagggcgacctgaagggcttcgagttcggcgtgtttacctggcatgctaatggtacggcgaccgacgccaaataa

SEQ ID NO: 258344 - DNA, 279 bp, Klebsiella pneumoniae
atggccggttttggagtcggtgtaataaccggagacggtaggcacgaactgcgtttcatcaaactgaatgcccgcatcgctgaacacctgatagaccggctttatcgccttagaggccatcatcgtcgcggtgccgacctcataaacctgcaggatagccggcgcgttgccggtacggaaggcggcgatgccggcgctcaggctctgttcgtagttgcctttgtataccggaacaattttgtagtccgggttggctgcgttgaaacgttgcgccagtga

SEQ ID NO: 258345 - DNA, 258 bp, Klebsiella pneumoniae
atgacgattgtagagaggctaccgctggaagagataccacaggagttacaacaagagtatttactggaatacctgttggaattttacctggggttttatgaaggatttcaggaagggaaacgagaagaggcgttgcgtattgctcgttcatgtctggaacagggatttgagcgcgagctggtgcaggtggtttgtgagctgtcggatgacgacctgaagatgctgcaaacgcaggtcgcagcatctcctgcccgataa

SEQ ID NO: 258346 - DNA, 873 bp, Klebsiella pneumoniae
atgcaccaacgacctcatttagctaagcaaacgatcgatgcacgtttgcttaaccagctaaatacaaaaacgcagagtaaaacggagaagttatcgcacagcgaaaaattagcttatatcaacgatgactactgtgagataacgcgtaattacacttcattttatgggatgaacatcctgggcattgtgcttttcttgcctgttgttattttgtgttttgtgggtattttattttccttatatgatataacattcaattttgaacgacatgttgaaagctggaattccaggtcgggcgattatcttttactatgttttggattttttatttcatttttcatgacgtttattttcgcagccatcgtaaactattttatcttcgcgccccagcattatccggttcgttttaatagaaaaaccggcaaggtttatgtttacgattacgtgatgtatagtatcacttataaattaacctatactttctggtggcatcatcctttttataaacgaactaaacctgaatgcaaagagtatgactggagccagattcaagccatcagtatatattcacgcaataagcactcatcatactccactattcgctgcgtcgtttatgactccagcatcagtaccactatgatcgattcctttaacctgatatcgacggacgcgggtacggatgcgctgtttatgcctaactacaagctgtggttatggattagtaattatatgaaatttaacgatgagttattagatatgtccgttaacacgaaaccaggtatttatggacgcgaagtgaagtggcctgatgatatggataagaaatctaaagcatcatctttgaatgagtacagtaaaatctgctctgaataa

SEQ ID NO: 258347 - DNA, 1620 bp, Klebsiella pneumoniae
atggctcattgtgcccaatccccctcttttcttttgcatcaggtcacctgtcagtttgcgacgggagattcgctttttggtccgctgaatttatcgctggaaggctccctctgcgggcttgtcgggcgcaatggcgtcggtaaaacccggctgttgcgtttgctggcgggcctggactcgccgtcgagcggccatatcgaacgtatggtttcggtaagctacgttgctcagcagcatgctttgactcctgatacgacgctggcggaatggctaagcttcgaattcgttttttctgctctggcgcgtcttgaacgaggcgaagggcgagttgacgatctcgaacgtcttgatggcttttgggatcttccggatcgtttgaatgcaggcttcctggccgctggcttaggggaattttctcccgcacggcccgcctcttcgctgagcggcggcgaaagagtgaaggcgcagctctgcgcggcatttttgtccggtgcggattttctcctgcttgatgaacccaccaaccatctcgaccgacaaggccgggcgtggttctatcagcagcttgagcaatggcgcggtggcgcgctgatcgccagccatgaccgcgagctgctggcccagatgccgcgcatcctcgagctgacgcctgcagctttgcgtagctacggcggcaactatgcggattatcagcagcagcgtgagctggagcagcaggcggctcgcgccgcgctggagcatgctgtcattgaacggcggcgtactcgcgcaaggatgcacaaagagcacgatgcctgtctgcggcgctccgcgcagacgttgcgtactatcgacacgctaaatatcgcttcattcgagcgggtagcttacaaaggcgcggcaaaagagcgccccggaacccttaagcgccagcatcgtgaacaacgtagcgcgctaaatgatgcggtggttcaggcgcgtgagcgggtagaagaggacaatccggtgatgtttactctgcccggtagccaggtcgctgcgggaaaacaggtactggagctggaagcgttgcggctggcgtatgcgcctatggcgccgctggactggcgcatggatgggccgatgcgcgtggcgctacggggtcccaacggctgcggtaagacgacgttgcttaaaacgctgctgggcctggagccgccgctttcaggacgctgccgcttatcggtaaacgcggcgtatctggaccagcatctgacccagcttgatctgtcattatccgcaatggcgcacctgaatctcggcgatacgcctttggaagagggcgtgctgcgcagccaactggcgcagctacagctgggggcggacaaagtccatctgccgctatcggcccttagcggaggagaacgcctgaaggcggcgctggcctgcgtgctctggcggcgggaagccacgcagctactgctgctggatgagcccaccaatcatctcgacctggcgtccacgcaggcaattgaaacagcgctggcgcaatttcccggcgcgatgctggtggtgtcgcatgatgacgcctttttacaggctctgaagctgacccactgtctggaatggcgggaagacggatggcgctttgagcggcgataa

SEQ ID NO: 258348 - DNA, 213 bp, Klebsiella pneumoniae
atgtccggtaaaatgactggtatcgtaaaatggttcaacgctgacaaaggcttcggcttcatcactcctgacgatggttctaaagacgtgttcgtacacttctctgctatccagaacgaaggctacaaatctctggacgaaggtcagaaagtttccttcaccatcgaaagcggcgctaaaggcccggcagctggcaacgtaaccagcctgtaa

SEQ ID NO: 258349 - DNA, 2151 bp, Klebsiella pneumoniae
atgaaaaaaatcacgagcgtttgcccttattgcggggccggttgcaaacttaagctggtcgtcgaaaacaataagattatccgagccgaagccgctgatggcgttaccaaccaaaatcagctgtgcctgaaaggctattacggctgggattttctcaacgacacccagttgctgacgccgcgtctgcagcagccgatgattcgctaccagaaaggcggcaagttcaccccggtaagctgggatgaagccatccgctatacggcgaaaaaactgcgtgaaataaaggagaagcatggcccgcgcgccattatgacgaccggttcatcgcgcggtaccggcaatgaaaccaactacgtgatgcagaagttcgcccgcggggtgctcaacaccaataacgtcgactgctgcgcccgcgtctgccacggcccgtcggtcgccggcctgcagctggcgctcggcaacggcgcgatgagcaactcgattagcgatattgagaactcaaaatgcctgctggtctttggctataactgcgccgactcccacccaatcgtcgcccgccgggtgattaaggcccgcgaaaacggggcaaaaatcatcgtctgcgacccgcgtcgtatcgaaaccgcccgcatcgccgatcgccatctgcagctcaataacggcagcaacatggcgctggtcaacgccttcgctcacgtcctgctggaagaagatctgtataaccacgactacgtcgaccgctttaccgaggggctggatgcctatcgtgagatggtgaaagactattcccctgaagccgtcgaaggcatcgtcggcgtcccggccgctgaaattcgccaggcgatgcgcatgtttgccgccgcgccttccgccaccattatgtggggcatgggcgtcacccagttcggccaggcggtggacgttgtcagagggctggcgagcctcgcgctgttaaccggcaacctcgggcgcgccaacgtcggcgtggggccggtacgcgggcaaaacaacgtccagggcgcctgtgatatgggcgtcctgccgaatatgttccccggctaccaggacgtcaccgacgccggcgttcgcgccaaattcgccaacgcctgggggattgatccggcgagcatggacgaccaggtcggtacccggatcaccgaagtgccgcacaaagcgctgaccggcgagatcaaagcctactacatcatgggtgaagatccgctgcaaaccgaagccgatttgggtctggtgcgtaaagggattgaggcgctcgattttgtggtggtgcaggatatctttatgaccaaaaccgccgaaatcgccgatgtgctgctgcccgccacctcctggggggaacacggcggcgtctttacctgcgccgaccgcggcttccagcgctttgagcaggcgattatcgccaccggtaacgttaagcgcgactgggaaatcatcagcctgctggccagcgaaatgggctatccgatgcattacgataataaccagcagatctgggacgaaatgcgcgaactctgcccgctgttctacggcgtcacttacgagaaaatgggcgatatgaaccacgtccagtggccgtgcccgacgctggatcatcccggtactccgtggctgtataaagataacctcttcgatacgccgaccggtaaaggtcagctgttcgccgccccgtggcgggcgcctgccgagacgccggatgaagcgtatccgctggtgctgtgtaccgtgcgcgaagtcggccactactcgtgtcgttcgatgaccggcaactgcgcggctctgcagtcgcttgccgatgagccaggacgggtgcaaatcaaccgcgccgacgcgcagcgcctcgggatcgccgaccagcagctggtgtgggtcagctcgcggcgcggcaaggtgattacccgcgccgacatcagcgatcgcattaatgaaggcgcggtgtacatgacctatcagtggtgggtcggcgcctgtaatgagctgacgcaggataatctcgacccaatctcgaaaacgccggaaaccaaatactgcgcggtgaaggtggaggctatcgcggatcagcgctgggccgaacagtatgcctggacaagctatagcgagatgaaagcccgcctgaaagcggcggtgaacgtgtaa

SEQ ID NO: 258350 - DNA, 723 bp, Klebsiella pneumoniae
gtgattcacattaacaatctgcacaagcgcttcggcgatagccacgttctgcgcggcatcagctgcgatatcaaaccgcaggaagtggtctgtattatcggcccgtccggctccgggaaaagcaccttcctgcgctgcatgaacgcgctggaaaccgtcagcgaaggcgaggtggaggtgaacggctttgccgcccacgatcgcgcgaccgatctgaataagatgcgggaaagcgtcggcatggtgtttcagcgttttaatctgttcccgcacaaaacggtgctggaaaacctgattatggccccgatgaacctgcgcggcatggcgcgcgcggaggcggtgcgtctggcggaagagctgctggcgaaggtcgggctgagcgacaagcgcgacgcctggccctccagcctctccggagggcagcagcagcgggtggccatcgcccgcgcgctggcgatgaagccgtcgattatgctgttcgatgagcccacctcggcgctcgatcctgagctggtgggcgacgtgctggaggtgatgaaaaacctcgccagcgaagggatgaccatggttatcgtgacccacgaaatgggctttgcccgcgaagtggccgaccgggttatctttatcgaccagggcatcattcaggaagagggcaaaccggcgcagatctttagcgcgccgactaacccgcgcaccgccgcgtttttaagtaaagtgctgtaa

SEQ ID NO: 258351 - DNA, 900 bp, Klebsiella pneumoniae
atgaaaatggcggttaagagagagaaggggcgggttgacctgttcggcgaacgttttcgcgcccgcgcgcatcagctttcgccgcgtctgctggcggtggcgagctatatcaacgataaccgggaagcggtgctggagcgcacggccatggaaatcgcgagcgcgaccaacacctcggacgccacggtggtacgcgccatccaggcgctcggcttcgccggactgcgggaactgaagcagaccatggaacgctggtttggcccatcggcgacctcgtcggaaaagatgatttcaacggtgagcgcgctctccagcgatgtccattcgagcattgattttgtccttgaggggcatcagcgggcctgcgaagtgctgtcgcgacctgacaaccgcgcggcggtggctcaggcggtggcgctgctgaccggcgcgcgccaggtgggcattttcgggatcggcgcctcgggcatactggcggaatataccgccaggctactgagccgcatcggcctgccttcgtacgtgatgaaccgcaccggctttagcctcgccgagcagttgatcggcctgcagcgcggcgatgtgctgattatgatggggcaaaagtcgccgcaccgggaggggatgactaccctgcgcgaggcccggcgcctggggatcccgacgatcttgctgacccaggcgctggactcccgctttagccagcaggcgcaggtggtgattgaggtgccgcgcggcggcgataacgggcgggtgccgctgcacgggacggtgctggtatgcctggagatgatcgtgctgtcggtggcctccaccgcgccgcagaagacggtgaaatcgatgaagcggatcaatgaattgcatcgggccatcgggaaatccggcggtaaacgaagctaa

SEQ ID NO: 258352 - DNA, 1053 bp, Klebsiella pneumoniae
atgaaaagcgccgcccgtcgcgccggttttcggccgcttgcctgcggtggccggcattttttgctgcggcccgcgacgttaaaaatcgctgccggcatgctgctcgttatcctgctgctggcgctgtttggcctgacccgcggcagtttcccgatgccttccggtaccctgtttcgcgcgctgctgggcgcggaaaacgtcgccgaacagccgcgttttatcctgtttgatatccgcctgccgaggctgttgatggcgctgctgtgcggggcgatgctcggcctcgccggcgcggcgatgcagagcattacccgcaacggtctggcggaccccgggcttatcggggtgaaggagggggccagcattgtggttctggcgctggtgctgttctttccggcagtgggcgtcatctggcggccgctggcggggatgctcggcggcgtgctggtggcgctgctggttctggcgctggcccgcgactgttcgcgcccgcgctttattctcatcggcatcggcgtctcctggacgctggcggcggcggtcggcatttttatgaccaccgccgacgtgcgcgatgtacagacggcgatgatctggctggcgggcagcctgcacgcggcgacctggccgctgttggccgtcgctttctgctgggcgctacccggggcgatgatcctttttttgaccgccagggccgccgatgcggcgctgctcggcgaccgcacggccatcggcctcggggtacgtctgcagcagctcaccctgctgcgctttttcgcgccggtgctgctcacctccgccagcgtctcctgcgtcggtagccttggcttcgttggcctgatggcgccgcatatggcgcgttttctgctgcgcggcggccaggtggcgctgctctgcggcagcgcgttgatcggcgcgctgctggtgttagccaccgataccattggccggctggcgttcgcgccgctgcagatccctgcggggatcgtgattgcttttgtcggctgtccgttttttatcgttctgctctggcgtcgccgtgacgccctgtaa

SEQ ID NO: 258353 - DNA, 822 bp, Klebsiella pneumoniae
atgccacagcgggtgttgcctgcagagcaggggatcgtcctcgattccctgtcggccggatatggccagacgctaattgttgataatattcatctgaccatcccccacgggaaaatgacggtactggccggcgccaacggctcggggaaatcgacgctgctgtcgaccatcgcccggatgctcaagccgctgggcggctgcgtacgtctggacggcgaggtgattcatcagatgccgacccgtgaggtctcccggcggctggggattctgccgcaatcgccgctaacgccggaagggttgacggtgtttgaactggtttcacgcgggcgctacccctggcagggtctgatgcgtcaatggtccgaggccgatgaacgggcggtcgaagaggcgctaatgctcaccggcaccgccgaatttgcccatctagcggttgatagcctctccggcggccagcgtcagcgctgctggatcgcgatggccctcgctcagcaaacggcgacaattttgctggatgaacccactacctggctcgatctgcgctatcaggtcgacattctcgaactgctgcaaaccttaacccgcgatcacggccgcacggtggtcaccgtcctgcacgatctgaacttcgcggtgaactacgccgacctgctggtgtttcttaaaaaagggcagatcgccggggtgattaatgaacaggagatctgtacgccggagctgatcaaaactgtttttgacgtggacgtgcagatgtcgctcaacccgcagaccggcaagcccttttttatgccgttccgcgcccgtgaggagaaggcgttatga

SEQ ID NO: 258354 - DNA, 531 bp, Klebsiella pneumoniae
gtgactacaattgtaagtgttcgccgtaacggccatgtcgttattgccggtgatggccaggccacgctgggcaacaccgtaatgaaaggcaacgtgaaaaaagtgcgccgcctgtataacgacaaagtgattgccggctttgcgggcggcaccgctgacgccttcacgctgttcgaactgtttgaacgtaagctggaaatgcatcagggccacctggtaaaggccgccgttgagctggcgaaagactggcgtaccgaccggatgctgcgcaagctcgaagcgctgctggcggtggctgacgaaaacgcctcgctcatcatcaccggtaacggcgacgtggtgcagccagaaaacgatttgattgctatcggctccggcggtccctacgcccaggccgcggctcgcgccctgctggaaaataccgatatgggcgcacgcgatatcgcagagaaagcgttgagtattgcaggtgatatctgcatttataccaaccacttccataccatcgaagaattgacctccaaagcgtaa

SEQ ID NO: 258355 - DNA, 216 bp, Klebsiella pneumoniae
atgaaaaaagatattcatccgaaatacgaagaagttactgcttcctgctcttgcggtaacgtcatgaaaatccgttctaccgtaggtcacgacctgaacctcgacgtgtgcggtaaatgccacccgttctacactggcaaacagcgtgatgttgctaccggtggtcgtgttgaccgcttcaacaagcgcttcagcgtaccgggtaccagcaagtaa

SEQ ID NO: 258356 - DNA, 318 bp, Klebsiella pneumoniae
atggctgaatggagcggcgaatatatcagcccatacgctgagcacggtaagaagagtgagcaagtaaagaaaattacggtttccattcctctgaaggtgttaaaaatcctcaccgatgaacgcacgcgtcgtcaggtgaataacctgcgtcacgcgaccaacagcgaactgctgtgcgaagcgttcctgcatgcctttaccggtcaaccgttgcctaacgatgaagacctgcgtaaagagcgcagcgatgaaatcccggaagcggcgaaagagattatgcgcgagctgggcatcgacccggatacgtgggaatactaa

SEQ ID NO: 258357 - DNA, 723 bp, Klebsiella pneumoniae
atggggctggcgacggccaaacgggtggtggagaatggcggcagcgtggtgctggtgggcaatcgccgggaaaaggccgaacgggcgcgccaggcgctggcggcagcggggaaggtagatgttatcgtcgctgacctgacgagcgaggccggtatgcagcaggtaatggcgaacatcaatgcagagcatcaggatatcagcctgctggtcaacgccgccggcgtcttcttcccgaagccgtttatcgaacatgaaatggccgattacgatcggtatatgcatctcaaccgcgcgacgttttttatcacccgcgaggtggtgcgcaatatgctggccaacggcatcaaaggctcgattgtgaatatcgggtcgatgtgggcgcagcaggccatcggcgcgacgccgtcctcggcatactccatggcgaaggcggggctgcatgcgctgacgaaaaatctggcgattgagctgggcggcagcggtattcgcgtcaatgcggtatccccggcggtggtgcatacgccaatctatgaaggctttattcctgaagaggatgtgaaggcggtgatgaatagctttgacggcttccatcccattggccgcgtcggcacgcctgatgatatcgcgcagaccgtcgcttttctcctcagcgagagcacccgctgggtgaccggcgcggtttgggatattgatggcggcgtgatggctggtcggaatgcctga

SEQ ID NO: 258358 - DNA, 573 bp, Klebsiella pneumoniae
  misc_feature (6)..(15): n is a, c, g, or t
atgaannnnnnnnnncatgaaaatatcgacctgcgcctcaacgttacggaaaagctgatggatgtggcccacggcgaagcggatttaggcattcgctgcggccgcggcgactggcccggggtcgataaaacctggctgatggatgaggaggcggtgctggtgtgcagcccgcttatcgtcccggcagaaaaaatcgcctgcggcgactggctggcggcgcaaaagctaattcatgatgatacgccgcatcccggcgccagctttccctcatgggaggatgtgctggccgcggctcaggccccgacggcgcgcgatagcggaatgcatatcgactcaacgtcggcggttatccttgccgccctcagcgggcgcggcgtcgccctcgtccgccgggcgctggtaaaacagctcctcgccacggggcagctcgtccagctacagcccgcccgccgctggccgctcacctggtcctactacatcgtgacgccgcagcatgcggtcatgcgtccggaagtaaaggtgttttatgactggctgcttcacaatgtgctggcggaaaaaccgatgcgctga

SEQ ID NO: 258359 - DNA, 660 bp, Klebsiella pneumoniae
atgaaacgaacgatcgccgcgatagcctttttattgctatcaactgcggcacaggccggtattgtcatgggaggaacccgtgttgtttatcaggaagggaaacgtgaagccgcaatatcggtcaccaacgcggatactcattcaccttatctggtgcaatcgtgggtggaaaactatgcggaaaacaataaaagccgcgtgccttttattgtgacgccgccgcttttccgtctcgatcccgaacagcagaacgtattgcgtattaactatattggcggaacgctgcccaccgatcgcgaatccgttttttggctcaacgtaaaaagcattgcgcccacgaaaaaagatgaagtgaataagcttcaggttaatattaaatcaaaatttaagattttctatcgtccgaatggtctcccgggggagcctgccgatgcatggcgcaaggtgacgtttaaaatcgaaggttccagactggttgcccaaaacccgacgccctattttgtctccttttttgttatttcggttggcgcgacagacattcctgaacccggcatgattggcccccttgaccataaagagtggccgattactcattccggggtagttaaatggcgcgctattaatgacttcggtggtattacggattacgcgcaacagtaa

SEQ ID NO: 258360 - DNA, 705 bp, Klebsiella pneumoniae
atgccggtgcagggtgcggctgacgtactctttgccgcagccggtttcgccttcgatacacaaaccgatcccggcgttaagcagacgcagcagcttctccccctcgcgctggctggagaagagcagatcgatacctgggcgtggggtcaccgcgacgcttgcggtagcgggcgcgcgcagacggtaatagtagtgccgatccccggcggcgagcggcagcggtatgctgacggcggtttgccgcagccgtggaaaaagctgctggaaggtgagatggccgaactgttctgcgttgagcgagaattcgcgcatcgccagccggttggcggccgtcagaaccgcatccgtaaacaccagcagcagttcgtcgacgccgtcgagtttctccggctgaggatgcaggctcatcagccactgctgcggatgcagactctgcttaaaccacagatattctatttgcttcgcggcgcctttcacccatgccagcgttcgcgcgtgcggatagtgcgccgggccggagatatccagcaccccggcgatattgccatcggggctttgcagcggcacggcggcgcaataaagtctccggttgctggtcaggaaatgctggcggccatcgatttcgcagctgtcgtcaatcgccagcgcggtgccaatggcgttggttccgcgtccgctttcgctccacagattgcccggcgctaa

SEQ ID NO: 258361 - DNA, 1665 bp, Klebsiella pneumoniae
atgctgaagacaaaattactttcgcgtaaacgccatctcgccgttgctgttagcggggcattggcgctgtttgcctctgtgccgactcaggcctcaaccctgcggatcgccatgaccgccgccgatatcccgttgaccctcggacagcccgatcagggttttgagggcaaccgctttaccggcattccgctttacgacgccctggttgaatgggatctgtcgcagggagagaaacccagcggcctggtgccggggctggcgaccgagtggcacgttgacccgcaaaatcaaagccgctggattttcaccctgcgcccgggggttaaatttcacgatggttctgcggtcaacgccgacgccatcgtctggaacgtggataaggtgctgaataaagccgcgccgcagtatgcgcccggccagatcggcaacacgctgtcgcgcatgccgactctcaccggcgcggaaaagattgacgaccacaccgtggcgctgaccacctccgaaccggacgcgctgctgccatataacctcactaacctgtttatcgtgtcgccgaccgcgtggcagaagctgtacgacgcggtgccgtcgggcaccgacgataccgccgcgcgcagtaagcaggcgtggaccgaattcgccgcccacgcggtgggcagcggtccgttcaaaatggaaaaactggttccccgccagcagctgatcctcgataaaaaccccgactactggaacaaagatcgcattccgcgggtggataaagtggtgctgatcccgctgccggaagccaacgcccgcaccgcggcgctgctctcgaagcaggtggactggatcgaagccccggccccggatgcggtcgatcagattaaagcccagggctttaaaatctacgccaacacccagccgcacctgtggccgtggcaattctccttcgaagagggctcgccgtggaaagatattcgcgtgcgcaaagccgccaacctgtgcctgaaccgcgcggagcttaaaagctatctcggcggctatatgaccgaagcgaccggcgtctacgaggccggcagtccgtggcgcggtaaacctaccttccagatcaaatatgacccggataccgcccgcaagctgatgaccgaagccgggtatagcgccgggaaaccgctgcacgtcacggtcgccacctcggcctccggctccgggcagatgcagccgctgccgatgaacgagtacatccagcagagcctgaaaagctgcttctttaacgtcgatattaaagtcaacgaatggaacaccctgttcactaactggcgcctcggggcgaaagatccctccgcgaaagggatcgacgcgatcaacgttagcgccgcggttaacgatccctatttcggcatgatccgcttctccaccgcgaaggccttcccgccggtggcgaccaactggggctacttctcgaccccggaaaccgaaaagctggcggcggcggtgaagcacgcgtttaccccggccgaaatggataaagccgccggcgaactgcacgccgcgctggtcgatcaggtgccgttcctgttcgttgcccacgatgtcggaccacgggcgatatcgccagccgtcaccggagtggtgcagccgcaaagttggtttatcgatctcagtctggtgagcaaaaaagagtaa

SEQ ID NO: 258362 - DNA, 2067 bp, Klebsiella pneumoniae
gtgtcgctggcgctgaccctgctggcggtggtggtggtggtctcgctgtttctgcagagctggcgggcgacgctgatagtcgcgctggcgatcccggtttcgcttatcggtaccttcgccgtgctctatgcgctgggctacagcgccaataccctgagcctgttcgcaatcattctcgccctgacgatggtggtggatgacgccatcgtggtggtggagagcgtggaaagcaaaatggcggaggggctggcgcgcggcgcggcaaccgccgaggcgctgcggcaaatcgccgggccggtgatcgccaccaccctggtgctgctggcggtgtttgtgccggtggcgatgctgccggggatcgtcggcgagctctatcgccagttcgcggtgaccctatcgacggcggtgactttgtcgagcgtggtggcgctgaccctgacgcctgcgctgtgcgcgctgctgctgcgtccgcggccgcagcagccagccgccatctggcgcggttttaaccgcggtctggatacggtgcgcgatggctacgggcgtctggtcgggaggatgaatcgtcgcccctggctggcgctggcggcgacgacggcggcggccggggtggtggtgtttagcttcaccaccatgccgaagggatttctgccgcaggaagatcagggttatttctttgccagcgtacagctgcccgaagccgcctcgctggagcgtaccgaagcggtgatggcccaggcgcgcgagctgctgaaactgaatccggcggttgaggatgtgattcaggtctccggttttaatattctcaacggtaccagcgcttcaaacggcgggtttatctcggtgatgctgaaggactggcaccagcggccgccgctggaggcggtgatggaaaaagtgcagggccagctgatggggctaccggaggcgacgatcatgacttttgcgccgccgacgctgccggggctgggcaacgcctccgggtttaatttacgcatcttggcccaggccggacaatcgccggcggagctggagcaggtgacgcagcaggtgctgcggacggccaaccagtatccgcagctgagccgggtatttaccacctggagcagtaacgtgccgcagctgacgctcaccgttgaccgcgaccaggcggcccggctgaacgtaccggtggcgaggattttcagcagcctgcaaaccgcgtttggcggcactcgcgccggcgatttcagcattaacaatcgtgtctaccacgtggtaatgcaaaacgagatgcagtggcgcgagcgggcagagcagataagcgagctgtacgtgcgcagcgacagcggcgagcgggttcgcctgagtaatctggtgacgattacgccgacggtgggcgcgccgtttattcagcagtataaccagtttccgtcggtatcggtgagcgggtcggcggccgaaggcgtcagcagccggacggcaatggcggtgatggagcagattttacaagcgaacctgccccacggttatgattacgcctggagcggcatctcctggcaggagcagcagaccggtaaccaggcggtgtggattgtgctggcggcggtagcgatggcgtggctgttcctcgtcgcccagtatgagagctggacgctgccggcgagcgtaatgctgtcggtgcttttcgccatcggcgggtcgctgctgtggctctggtgggccgggtacgccaacgatgtgtacgtgcagatagggctggtgctattgatcgcgctggcggcgaaaaacgcgattttgatcgtcgagtttgccagggcgaagcgcgaagagggaatgtcgatcgtcgacgccgcccgcgaaggggccacccgccgcttccgcgcggtgatgatgacggcggtttcttttatcatcgggattgtgccgatgatgctcgccaccggcgccggggcgcagagtcggcggattatcggcaccacggtgttcagcggcatgctggtggcgacggtaatcggcattttgtttattccgtcgctgtacgtgctgttccagcgcctgcgcgagtgggggcatcgccggatgtag

SEQ ID NO: 258363 - DNA, 225 bp, Klebsiella pneumoniae
atgtttaataagcaaatcatcgctgttgttgggccgctgctggttctgacgtcgttcaatagcctggccgatcccgggaacccgtcaattcgcgaacgtattgtcgatcaggttttaaaaccctgcgaaggtaaaaaagccggcgataaagtgctgatcgtcgaccatcgcggcggcaagcatgaagctatctgcaccctcgcggcggtgccgctgccggagtaa

SEQ ID NO: 258364 - DNA, 438 bp, Klebsiella pneumoniae
atgggccgcgataacgttttcccggagcgcattttcggctatgtccatccaaaatggcggactccggcgctgaacgtgatcatggtgggcatcgtcgcgctgtcggcgctgttcttcgacctggtcaccgccacggcgttgattaactttggcgcgctggtggcgttcaccttcgttaacctgtcggtgtttaatcacttctggcggcggaagggctttaacaaaacctggaaagatcgctttcactatctgctgctgccgatggtcggcgcgctgacggtgggcgttctgtggattaacctggaggcgacctcgctgacgctcggtctgatatgggcgggcctgggtttgctgtatctgacttatctgacccgccgcttccgtaagccgccgccgcagtttgacggggctaaagcggaacaggcctgggaatcgtaa

SEQ ID NO: 258365 - DNA, 1023 bp, Klebsiella pneumoniae
  misc_feature (932)..(941): n is a, c, g, or t
atggctattaacacctctctcgataacgcctctgaagcgggcaaaccgcggctgcgcaagtctctcaagctgtggcaggtggtgatgatgggcctcgcctatctgaccccgatgacggtttttgatactttcggcatcgtttccggcatcagcaacggccacgttccggcctcctatctgctggcgctggccggcgtgctgtttaccgccattagctacggtaagctggtacgccagtttccgcaggcgggatcggcgtatacctatgcgcagaagtcgatcagcccgcacgtcgggtttatggtgggctggtcttcgctgctggattatctgttcctgccgatgatcaacgttctgctggccaagatttatctttccgcgctgtttccggacgtgccgccctgggtatgggtggtgacgtttgtggccattctgaccgcggcgaacctgaaaagcgtcaatctggtggcgaacttcaataccctgttcgtgctggtgcagatctcaatcatggtggtctttatcgtgctggtggtgcaggggctgcataaaggggagggcgtcggtaccgtctggtcgctccagccgtttattagccagaacgcgcacctgatcccgattattaccggggcgacgatagtctgcttttcgttcctcggctttgatgcggtgacgaccctctccgaagagacgccggacgccgcgcgggtgatcccgaaagctatcttcctgaccgcggtctacggcggggtgatttttattgccgcctcgttctttatgcagctctttttccccgacattagccgttttaaagacccggatgcggcgctgccggagatcgccctctacgtcggcggcaagctgttccagtcgattttcctgtgcaccacctttgtgaataccctggcgtcaggcctggcctcacaccccannnnnnnnnnccacctttgtgaataccctggcgtcaggcctggcctcacacgccagcgtttcgcgcctgctgtacgtcatgggccgcgataa

SEQ ID NO: 258366 - DNA, 1419 bp, Klebsiella pneumoniae
atggaaaccaatatcgtagaagttgagaattttgttcagcagtcggaagagagacgggtcagcgcgttcacctgggaagtgaagcgctacctcgagcgttaccccaatacgcaatacgtagatgtactgttaaccgacctgaacggctgcttccgcggtaagcggatcccggtgtccggcctgagcaaactggagaagggctgctatttcccggcttcggtgttcgcgatggacattctcggcaacgtggtggaagaggcgggactcggccaggagatgggcgaaccggatcgcacctgcgtaccggtgctgggaaccttaacgccgtcagcggcggacccggaatacatcggtcaggttctgctgaccatggttgatgaagatggcgctccctttgacgttgagccgcggaacgttctgaaccggctctggcagcagctgcgccagcgcgggctgttccccgtggtagcggtagagctggagttctatttacttgaccgcaagcgcgacgcggaaggctacctgcagccgccgtgcgcgccgggaaccggcgatcgcaatacccagagtcaggtttactccgtcgacaacctcaaccactttgccgacgtgctgaacgaaatcgatgagatcgcccagctccagctgatcccggcggacggcgcggtggcggaagcctctcccggtcagtttgaaatcaacctccaccataccgataacgtgctcgacgcctgcgatgacgcgctggcgttaaaacgtctcgtgcgtttgatggcggagaagcataagatgcacgccacttttatggccaaaccctatgaagagcacgccggtagcgggatgcatatccatatcagcatgcagaacaacaaaggcgagaacgtgttggcggacgcggacggcgaagattccgcgatgttaaaacgcgcgctcgccgggatgattgacctgatgccggcgtcgatggcgctgctggcgccgaacgtcaactcgtatcgtcgtttccagccgggaatgtacgtgccgacccaggcgtcgtgggggcacaacaaccggacggtggcgctgcgcattccgtgcggcgatcggcacaaccaccgcgtcgagtatcgcgtggccggggcggacgccaacccgtacctggtgatggcggcgattttcgccggcatcctccacggtctggataatccgctgccgctacaggaagaggtggaaggcaacggccttgagcaggaggggctgccgttcccgattcgccagagcgatgcgctgtgggagtttatgcaaaacgatcacctgcgcgagcggcttggcgaacgtttctgccacgtttatcacgcctgtaaaaacgacgaattactgcagtttgagcggctgatcacggaaaccgaaatcgagtggatgttgaaaaacgcctga

SEQ ID NO: 258367 - DNA, 633 bp, Klebsiella pneumoniae
atggaaggttttaatgtgctcgtggcccatgatggggaacaggcgctggcccttctggacgacagcatcgatttacttttgcttgatgtaatgatgccgaagaaaaacggtatcgacacgctcaaagagttgcgtcagacgcaccagaccccggttatcatgctaacggcccgcgggagcgagctggatcgcgttctcggcctcgagctgggcgcggacgactatttgcctaagccgttcaacgatcgcgaactggtggcgcgtatacgcgcgattctgcgccggtcgcactggagcgagcagcagcagacaaccgaagccggttcaccgacgctggaagtggatgcgctgagccttaaccccggtcgccaggaagccagcttcgatggtctgaccctggagctgaccggcaccgagttcaccctgctctatctcctggcgcagcatcttggccaggtggtttcgcgcgagcacctgagccaggaagtattaggtaaacgcctgacgccattcgatcgcgcgatcgatatgcacatctccaacctgcggcgcaagctgccggagcgcaaagacggccacccgtggtttaaaaccctgcgcggacgcggctatctgatggtatcggcttcatga

SEQ ID NO: 258368 - DNA, 1374 bp, Klebsiella pneumoniae
atgattggaagtttaaccgcacgcatcttcgctattttctggctcacgctggcgctggtgttgatgctggttctgatgctgcccaagctggactcgcgccagatgaccgagctgctggagagcgagcaacgtcagggcatcatgattgaacaacacgtcgaggccgaactggcgaacgatccgccaaacgacctgatgtggtggcgtcgtctgtttcgcgccatcgataagtgggctccgccgggccagcgtttgctgctggttaccagcgaaggtcgcgttatcggtgccgaacgcaacgaaatgcagattatccgcaactttatcggtcaggcggataacgccgaccatccgcagaaaaagcgctatggtcgtctggaaatggtcgggcctttttccgtcagggatggagaagataactaccagctctatctgattcgccctgccaacacgtcgcaatctgacttcatcaatctgctgttcgaccggccgttactgctgctgatcgtcaccatgttagtcagcgccccgctgctgctgtggctggcgtggagcctggcgaaaccggcgcgtaagctgaaaaatgccgccgatgaagtcgcccagggcaacctgcgtcagcatccagagctggaagccggtccgcaggaatttttagccgccgggaccagttttaaccagatggtgaccgcgctggagcgcatgatgtccagccagcatcgtctgctgtccgatatctcccacgagctgcgcacgccgctgacccgcctgcagttaggcaccgcccttctgcgccgccgcagcggggaaagtaaagagctggagcgtattgagatggaagcgcatcggctcgatagcatgatcaacgacctgctggtgatgtcgcgcaatcaggccaaaaccgcgctggtcagcgaaacggtgaaagccaaccagctgtggggcgaggtgctggataacgccgcctttgaagccgaacagatggggaaatcgttcaccgtcgagtatccgccggggccctggccgctgtacggtaaccccaatgcgctggaaagcgcgctggagaatatcgtgcgcaacgcgctgcgctactcgcataccaaaatttcagtgagcttctcggtggataaagacgggattacggttaacgtcgatgatgacgggccgggcgtgagtcctgaggatcgcgagcagattttccgtccgttctaccgtaccgatgaggcgcgcgatcgcgagtctggcggtaccggcctgggtctggcgattgtcgaagcggcgattcaacagcaccgcggttgggtaaaagccgacgacagcccgctgggcggtctgcgtttaaccctctggctaccactgtacaagcgcacctga

SEQ ID NO: 258369 - DNA, 621 bp, Klebsiella pneumoniae
atgagttacacactgcctgccctgccgtacgcttatgacgccctggaaccgcattttgacaagcagacgatggaaatccatcacactaaacaccaccagacctacgtgaacaacgccaacgcggcgctggaaagcctgcctgaattcgcgagcctgtccgcagaagagctgattaccaaactggatcagctgccagcagacaaaaaaaccgttctgcgtaacaacgccggcggccacgctaaccacagcctgttctggaaaggcctgaaaaccggtaccactctgcagggcgacctgaaagcggctatcgaacgcgatttcggttccgttgacaacttcaaagcggaatttgaaaaagcggcggcgacccgtttcggctccggctgggcgtggctggtgctgaaaggcgacaagctggcggtggtttctaccgctaaccaggactccccgctgatgggtgaagctatctccggcgcttccggcttcccgattatcggcctggacgtgtgggaacacgcttactacctgaaattccagaaccgtcgcccggactacatcaaagcgttctgggacgtggtgaactgggacgaagccgcagcgcgttttgccgccaaaaaataa

SEQ ID NO: 258370 - DNA, 849 bp, Klebsiella pneumoniae
gtggcagctcagctgattcttcgcaaagatgaatttttcgcctctcccgctcaggcggtggcggtagcggatcgctatccgcaaaacgtcttcgccgagcacacccacgagttctgcgaactggtgctggtgtggcgggggaacggcctgcacgtccttaacgatcgcccgtggcgcattacccgcggcgatctgttctatatccgcgcggaagacaaacactcctacgcctcggtgaacgatctcgtcctgcaaaacgtcatttactgcccggaccggctgcggcttaactttgactgggcggcgcacattcccggcctgttcggtactccgtgggttccgcactggcggattggcagcagcggcatggcgcaggtcaggcaggtgattacccagcttgaacatgagagcagccgcagcgatgcgcaggccaataatatggccgagctgctgtttgcccagctggcgcttattcttcagcgctatcgctacgccaccgataatctggcggcgacgcaaagcgaagcgctgctcgataagctgctcaccgaactggcgggcagcctcaatcgtcctttctttctcgaccgtttttgcgagcgggaagggtgcagcgaacgcgcgctgcgccagcagtttcgtcagcagacggggatgaccatcaaccactacctgcgccagctgcgcatctgtcacgcgcagtatctgctgcagcataccgaacggctgattggcgaagtggcgatgcagtgcgggtttgaagacagcaattacttttcggtcgtgtttaaccgcgagattggtatgacgccggggcagtggcggcagcgcagtcgcaccgccgcctga

SEQ ID NO: 258371 - DNA, 762 bp, Klebsiella pneumoniae
atggtttcatcatccgtaacgaccccgcgcagtggcgtctactacttttcgcagggttggaagctgatcgggctgccggggatccgtcgatacgtattcctccctttgctcgtcaacattattctgatgggcggcgcattctggtggttgttcacgcgtctgggcagctggatcccctctttgatgagccatgttcctgaatggctgcaatggcttaactatctgctgtggcccatggtggtcatttctatactgcttgtcttcggctacttcttctcgacaatcgccaactggattgccgccccctttagcggcctgctggccgagcagcttgaagcgcgcctgacgggcgcgacgccgccggacgtcgggattttcggcatcatgaaagatgtgccgcgcatcatgaagcgtgagtggcagaagttcgcctggtatctcccgcgggccatcgttctgctgatcctctacttcattcccggtatcggccagaccatagctcccgtgctgtggttcctgttcagcgcctggatgctggcgattcagtactgcgattatccttttgataaccataaggtgccgtttaaaacgatgcgccaggcgctgcgcacgcgtaaagtgaccaatatgcagtttggcgccttaaccagcctgtttaccatgatcccgatactgaacctggtgatcctgcccgtcgctatttgcggcgcgacggcaatgtgggtcgactgctaccgcgacaaacacgcgatgtggaaatag

SEQ ID NO: 258372 - DNA, 996 bp, Klebsiella pneumoniae
atgatgcaggatttgcgtctgatattaatcattgttggcgcgatcgccataatcgctttactggtgcatggtttttggaccagccgtaaagagcgctcctcgatgtttcgcgatcgcccactgaaacgtatgaagtcacgcgacgatgaagagtcggaaggcgacgactttaatgacgatgttgaaggcgttggtgaagtccgggttcatcgggccagtcatgcgccgaatggcgttcacggggagcatgaagcacctcgtcagccgcagcaccagtatcagcctccttatgagcgtcaggcgcagcagccacctgtgcgcccggaagagcctgtccgtgcagcgcagccgccgcaacaacagcctgttcgcccgcaggccccggttcaacaaccgcatcacgccgtgccgcctcagcagtcggtaatgcagccggtacagcctccgcagccacagcaacccgttcagcatgtgcagcagccggttcaacaacccgctgtcgctccagagcctcagccgacgccagaacctcaggcccctgagccgcagcaggccgcgccgcagcctaaagagcgtaaggagacggtcatcgtgatgaacgtcgccgcgcaccacggttcgcagcttaacggcgagctgttaatcaacagcatccagcaggcgggtttcaaatttggcgatatgaatatcttccatcgccacctcagcccggacggcagcggtcaggtgctcttcagcctggccaatatggttaagcccggcaccttcaatccggacagcatggcggatatgatgacgcctggggtaactatctttatgcaggttccgtcctttggcgatgaactgcaaaactttaagctgatgctgcagtccgcgcagtacattgccgatgaagtcggcggcgtagtgctggacgatcagcgtcggatgatgacgccgcaaaaactgcgcgaatatcaagaccgtattcgtgaagtgaaagaggctaacgcctga

SEQ ID NO: 258373 - DNA, 888 bp, Klebsiella pneumoniae
atgtttactggcctctgcgcttttcctctgactccgttcaatcatcacggcgttgatgaaaccgcttttgctcgcattgttactcgtctcgttgacgcagctgtcaattctctcggcgtgctcggctccacgggaagttacgcatacctcagccgtgagcagagaatgcaggttgtccgacaggcaaaatcgcatgccggctcggtgccgatgatggtggggatcggggcggtgggaaccgatcaggttcttcgtctggcagacgatgcccagcgggcgggtgcgaacgcgctactcctgccggtgatggcttatcagcccctgtcagatgaggaaattttgactttttaccagaccgtttgtcgtcatgtctctgtacccgtttgcgtttacgacaatccggttactacccatatttctctgtccgatgagctcaaaagcgcgatagccgcgctgccgggtattgcctcaatgaaaatacccggacccgccagccatgaagtcgcgcaacgcgtgcagagcctgcggcggcagctcccggcggaggtgtcgattgggattagcggagacgccagcgcggccaatgggctgaacgccggctgtgcggtatggtattccgtgtgcggcggacttttcccgaacgttgcccaagagatagtggctgccgcgaggcggggcgaggcccagcgggcgacggcgctaagcgccaggctggagccgctgtggatgctgttccgcaagtatggcggaagcctgcgggtcactgccgccgcggcgacgatcctcggtatgtgcgctgaggattgcttaccgcgcccgctgttaccgctctcgccggaggcctttagcgagattgctgagacgctgcgccgtctgaaccttgagtag

SEQ ID NO: 258374 - DNA, 498 bp, Klebsiella pneumoniae
atgctaaaaaatgaaatgatcgaaaagctgaatgcgcagatgaacctcgaactttattcttctctgctttatcagcaaatgagcgcctggtgcagctatcacagttttgaaggcgccgccgcgtttctgcgccgccacgcgcaggaagagatgacccatatgcagcgcctgttcgactatctgaccgataccggtagcctgcccagcatcaccgctatcgcttcgccggttgccgaatatacctctctggatgagctgtttcgcgcgacctatgaacatgaacagttgattacgcagaaaattaacgaacttgcccatgcggcgatgaccagccaggattatccaacatttaatttcctgcagtggtacgttgctgaacagcacgaagaagagaaactgtttaaatccgttattgataaactgtccctcgccggcaaaagcggcgaaggcctgtattttattgataaagagctggcaacgctcgatacgcaaaattaa

SEQ ID NO: 258375 - DNA, 252 bp, Klebsiella pneumoniae
atgtctcaacatcttaccgaacacgacgaactggtttctgacgtggttgcctgccagttagtcatcaaacagatcctcgatgtcattgatattatcgcccctgtcgaggtacgcgaaaaaatgaccacccagctgaaagctatcgatttcgccagccacccggcgtcggctgacccggtgaccctgcgggcggtacaaaaggccatcgcgctgattgaactgaaattcaccccgcaggaagaagcgcactag

SEQ ID NO: 258376 - DNA, 1563 bp, Klebsiella pneumoniae
atggcaagatatacggcttcagcctcacaggggctgcagggaagaccgattttgttacgccatcagttagcctacggcggcgggaatttgctgggaagcggcgcactggcgatcagcggcgcatggctgctctatttttatacaaccttctgcgggctgacgctgatcgaagcctcctttatcttttccgtcgccagtattattgacgcaattagtaacccgcttatgggttatctcaccgataactttggcaaaacgcggctgggtaaacgcttcggtcgtcgccgcttctttttattgattggcattccgctgatgatgttctacccgctgctgtgggtagaaggcctcggcttctggtactacctgtgcacctacgtcgtctttgaaatcatttatacctcgattatggtcccctatgaaacattggcgaccgaaatgacagacgatttctcactgcgttcgaaactgaccggttacaaagcgattttcggcaaactggccaacttcctggcggcctttatcccgggacagtttatcctgctctatgggaaagaatccgcgaccccgttcttcctgaccgggctcacctacggcgtcattctcatcgtggccatctcctgcctgtggtactgcagttgggagcgtccgcgagaagaagaaatgagcaaaggaaagaaaaaggggctgctcagtacgctgctgatgctggcgaaagatatgcgctccacgttttatctgcgcgtattccgtaaacaccttggtatgtatctctgcggcttcggcgccgagtggctgtttgcgtcgatcttcacttacttcgttatcttcgtgctgcagcacgatccggcgatggtggccggcctcaacagtctgaactccattctgcagctggtatcaaccgccctgtttatcggcctgtgcgtgaagaaaggcttcagtaaaccttatattctggcgctgagcgtggttatctttgccgtactgctctacacctcgctgtggttcttccatctgccagcacacctggcaaccattcttatgtttggcattaccgtactgttcggcctgggcaccggcggcgtgtactacattccgtggaccgtttacacttttttggcggatgtcgatgaaatctataccggccgtcgccgcgaagggatctatgcgggagcaatgaccttctccggtaaaattttgcgctctatcatcgtcttttccatgggggcgatcctcagcttctacggattccagtcgaaggcgcatacgcagcctgaaagcgcggtcaccgcgattgcggttgtgttctgcgcgggggtgattctgctggctctggcagccattgtgttcagtaagcagatgaagctcgatcgtaaggcgcacctggtggtgttgcaggaggtcgcgcgcattaaggcaggtggtaagatcggcgatatcgcgccggaggttcgccttatcgtggaagatttagtcggtcatcgctacgaagagtgctggggcaacagcaagctgtttaaagatacccagaaaggcgccattcaaaccgccgtatcccactaa

SEQ ID NO: 258377 - DNA, 504 bp, Klebsiella pneumoniae
atggtcgttccacgaatgatccaaaagctaaataaccagatgaatcttgaattccatacctcaaatttatatctgcatttaagcgaatggtgtactcagcaccggttgaacggtaccgccacttttctccgtaaccgagcgcaagccagcataacgcagacgatgcgggtctttgattttatgaaaaaatcaggcgcctggcccgtggtcaaagcgcaagatacctatagcgctgaatgcacatcgcttgaagacctctttagcaaaaccgttgaggattatcagcagcgcagcagcatactctccagcctggcggaagaggcgaaggcgcaaagcgatgcgccaaccctgcgctttctgacgctgcttgcggaacaacaggatcgggatggcatgctgctggagacgattcttgacgaagtacgccatgcggaaaaagccgggaccagcgaacaacaaaccgatcgttacctgctcgatctggtcagcaaccagcgcggctaa

SEQ ID NO: 258378 - DNA, 519 bp, Klebsiella pneumoniae
atgattacatttaaagatataaagaacaaaaagacccagattaaggaagaaaaggctaaatataaagaactaatcaaaaactctataaacgaatttattaaaatatatattagctctctgcaattaccagctgaaactttcacattcaaggatggtcgtcagcatccttatgtgtttattttaaacaaggatctgatgccaactacgagcctttccttggatgatctgcacatagataaagttaatggcgcctcattcatattgcacacggctgttgacgatgaagcgccgtttcctagccccgtccagacttctattagtgtttatttcattgatggtaagctggagtacttattgcaaacaggtcacgttaacaacgatgtgtctcttttggtcaatgatgaatccgatcttcgtacgttctgcgagatagttaaagagtcaattattgcgagaattgaaagtgaacaaatcgggaaaaagacgctaaaagacgactcagttaatatttgggattaa

SEQ ID NO: 258379 - DNA, 837 bp, Klebsiella pneumoniae
gtgaacaagaagcctcttgaacaaatcgaaaatgtgacagatatcacaggttatcgccaggtatcgctctggaagcgccaaaatttgcaacatcctcagccagacgagttagctgaagaggtacccgttgcgctggtctataacggcatctcgcacgtggtgatgatggcgacgccgaaagacctggcgcagttcgccgtgggcttttccttatccgaagggattatcgaaaaccggggcgagatttatggtatggacgtccttcaggcctgtaacggccttgaagtgcaaatcgaactctccagccgccgctttatggggctgaaagagcgccgtcgcgcgctggccgggcgcaccggctgcggcgtatgcggcgttgagcagctcaacgatatcggcaagcccgtgcagccgctgccttttacccagacgttcgatctggcgaatctcgatcgcgcgctggcgcacctgcatgattttcagccgataggccgccttactggctgtactcacgccgcggcctgggtgcgcccttccggggatctcgcgggcggtcacgaagatgttggtcgccacgtggcgctggacaaactcctgggacaccgagcggagtcagaaggcgcctggcagaacggcgcggcactcgtctccagccgagccagctatgagatggtgcaaaaggcggccatgtgcggggtggaaatcctttttgcggtctctgccgccaccacgctggcggttgacgtcgccgagcgctgcaacctgacgctggtgggattctgcaagccgggcagggcgaccgtttacacgcatccgcagcggttaatcgcgggttaa

SEQ ID NO: 258380 - DNA, 714 bp, Klebsiella pneumoniae
gtgggtgatcgccaccacggtgccttcgaagtcgtgcaggaagcgttccagccaggccacggattccgcatccaggtggttggtcggttcgtcgagcagcagcatgtctggtttttccagcagcaggcggcacagtgcgacgcggcggcgttcaccaccggagagattggcgattttcgcatcccagtccggcaggcgcagagcatcggcggcgcgttccagctgcacgttcaggttatgcccgtcgtgcgcctggataatttcttcgaacttgccctgctgggcggcgagcttgtcgaagtcggcatccggctccgcgtatttggcgtacacctcgtccaggcctttcagcgcattgaccacttcggccaccgcttcttcaacagactcacgtacggtctgctccggattgagctgcggctcctgcggcagatagccgattttcaggcccggctgcggacgcgcttcgccttcgatatcggtatcgatgccggccataatacgcagcagggtcgacttaccggcgccgttcagaccgagaacgccgatttttgcgccagggaaaaagctcagggagatatttttcagaatatgacgtttcggcggaaccactttgccgacacgatgcatggtataaacgaattgagccacgttggacttcgcctcttttatatactcttcatccctcaggctagcttaatgcagccagaatga

SEQ ID NO: 258381 - DNA, 1359 bp, Klebsiella pneumoniae
atgttgaaatcaccactattctggaaaatgagcaccctgctggggtgtattttactgttatcgatcccgctgatgatcgtccggcagctgatcgttgaacgcgcggattatcgcagcgaagtcatcgaagctctggagaacagtaccagcggatcgcagaaactggtcgggccgctgatcgccattcccgtgaccgaggtattgacccgcattgaggataaaaaagaggtcacatatcaacgtcactggctgcattactggttacctgagtcgctggcgatagccggaaaacagaacgttgaatccagaaaaatagggatttatgaaggccaaatctggcacaacgatctggggattaaggcgcaatttgatgtttcccgtctggctgaactcagaaaagataatattacgttaggtaaaccggttatggtggtcggcgttagcgatgcacgcgggattggcaccattattgctccgaaaattaatggagaggcactgccggtggagcccggaatcggtatcagcggcagcggagagggaattcatatgccaatgccgctgttaactcctcaacaaaaaacgctggatgttgaattcacactcaacctgaacggaaccggaagcttctcagtcgcgccgctcggacgcaatagccaattacagctgaccagtaactgggcgcatcctggtttcctgggcgattttctcccggttagtcgtgaggtttccccatcaggttatagtgcccgctggcagagtagctggtttgcgaacaatatggcccggttttttatggacgatcgcgagattgagtggcgtcaactgcctgctttcaacgttaacgttacgacgccggccgatcggtaccagctgaccgatagggcaacaaagtatgccattctattaatctcccttacgtttatggcgtttttcgttttcgagagcctgactcagtgccgtttacacccgatgcagtatctgctggttggtttgtcgctagtgatgttctatctgatattactggccctgtccgagcatattggctttacgccgtcatggattgttgccagcctgataggggcgctgatcaatggggtttatctgcatgcggtgctgaagggatggcttaacagctttctttttgtctgcgcattgctgctgctggatggcgttatgtggatgctattgcgttcggaagatagcgcgctgctattgggaacgggagtgctactgctggcgctcagcgcgctgatgttcctgacgcgtcgcgttgactggtacacgctatctctcccgaagccaaaagagaggcagcccgagggcggtgatgatgacgataagttgaggatctggaaataa

SEQ ID NO: 258382 - DNA, 777 bp, Klebsiella pneumoniae
gtggtggtgcccagtcacgtcttcgggcaggttctgcgccagattaagccgctgatgcgccccgacgcgcgtctggtatgggcgacaaaaggtctggaagccgaaaccggacgcctgctgcaggacgtggcgcgtgaagcgctgggcgaggctattccgctggcggtgatttccggcccaaccttcgccaaagagctggcggcaggcctgccgaccgcgatctcgctggcgtctacggacccgcagttcgctgacgatttgcaaagcctgctgcactgcggcaagagcttccgcgtctatatcaacccggactttatcggcgtgcagctcggcggcgcggtgaaaaacgtcatcgctatcggcgctggcatgtctgacggcatcggctttggcgccaacgcgcgtaccgcgctgattacccgcgggctggttgagatgtcccgcctcggggaggcgctgggtgccgatccggagacctttatggggatggcgggcttaggcgatctggtactgacctgcaccgataaccagtcgcgtaaccgccgcttcggcatgatgctcggtcagggcatggacgtgcaaagcgcgcaggagaagattggccaggtggttgaaggctaccgcaataccaaagaggttcgcgttctcgcgcagcgtttaggcgtcgaaatgccaataaccgaggaaatttatcaggtattgtattgcggaaaaattgcgcgcgaggcagcattgaccttattaggtcgtgcacgcaaggacgagcgtagcaactaa

SEQ ID NO: 258383 - DNA, 225 bp, Klebsiella pneumoniae
atggcgaaaatcggcgacggcgtaccgcgtattattgacaaggccgtagattttatggcttcaagtcaggcttttatggaatatctgaaaaaatctccgcgtttgcagcatataccgccggatattccggctgataaggaagcgctatttctgcggcgtcttgagtattatcgtcagctttatcggccgacgtgcgaccagcaagagccagaatcagagcgttga

SEQ ID NO: 258384 - DNA, 1656 bp, Klebsiella pneumoniae
atgggcgttatcgtcggcgcggatatgccgatgttcctcggctccatgatcgccggcccgctgggcggctgggcaattaaaaaattcgacgtctgggtagacggtaagattaaatccggttttgagatgctggtgaataacttctccgcaggcatcatcggtatgatcctcgccattctggcgttcctcggcattggcccggcggttgaagtcctgtcgaaaattctggccgcaggcgttaacttcatggtggcgcacgagatgctgccgctggcgtctatctttgttgaaccggcgaaaatcctgttcctcaacaacgccattaaccacggtattttctcgccgctgggtattcagcaatcccacgagctgggcaaatccatcttcttcctgatcgaagctaacccgggtccggggatgggcgtcctgctggcgtatatgttcttcggccgcggcagcgccaaacagtccgcgggcggtgcggcaatcatccacttcctcggcggtatccacgagatttacttcccgtacgtgctgatgaacccgcgcctgattctggccgttatcctcggcgggatgaccggcgtgttcacgctgaccatcctcaacggtggtctggtctctccggcttctccgggctccatcctggccgtgctggcaatgacgccgaagggcgcctacttcgctaacatcgccgcgattgtcgccgcgatggccgtttccttcgtggtcgcagcggttctgctgaaaaccagcaaagtgaaagaagaagatgatatcgaagccgcgacccgtcgcatgcacgatatgaaagccgaatccaaaggcggcgcgactccgctggccgctggcgatgtcgcgaacgacctgagccacgtgcgtaaaatcatcgtcgcctgcgacgccggtatgggctccagcgccatgggcgcaggcgtgctgcgtaaaaaagtgcaggatgccgggctgagcaacatctccgtgactaactgtgcaattaacaacctgccgccggatgtggacctggtcatcacccatcgcgatctgaccgagcgcgcgatgcgtcaggtgccgcaggcacagcatatttcgctaaccaacttcctcgacagcggcctgtacaccagcctgaccgaacgtctggttgcggcgcagcgccatactgacaacgaagagaaagtccgcgatagcctgaaagacagcttcgacgcggctgacaccaacctgttcaaactcggcgcggagaacatcttcctcggccgtaaagcggcgaccaaagaagaagcgattctgtttgccggcgagcagttggtgaaaggcggctacgttgagccggaatacgtccaggcgatgctggaccgtgaaaagctgacctccacctatctgggtgagtccatcgcggtaccgcacggcaccattgaagccaaagaccgcgtcctgaaaaccggcatcgtcttctgccagtatccggaaggcgtgcgcttcggcgaagaagaggacgaggtggctcgcctggttatcggtatcgcggctcgtaataacgagcatattcaggtcattaccagcctgactaacgcgctggacgatgagtcggtgattgagcgtctgacgaaaaccaccagcgttgatgaagttctgacgctgctgaaagggtaa

SEQ ID NO: 258385 - DNA, 231 bp, Klebsiella pneumoniae; identical to SEQ ID NO: 187113

SEQ ID NO: 258386 - DNA, 1245 bp, Klebsiella pneumoniae
atgagtcattctacaagttctaatttaccggctaaatcaccaatgcagcatgcacaagagacatttgacctcgtcaagtctcacgttcatcaattgggtggatggcgtaatgttctgtccttttatcctgaatttcatgaggcgttagaaaaagcacctcgctccgtaaaatgcccgtttacaggcgacggtaaaacgaaatttagatttaaagaccgttcactggaaagtgttcatgctatacatgaagattatccacataatgcattcattgatggcattgatttaattgctgaactaaagcaggttagtaaaacgcaggctgcaaaagacattctggaaatgatcggtgtttctaaggacagaaagttgaatgaagcagaccgcgttaatatcgttctttatgagaaaaaagcttcttctttctctgatattggagaagaggaaagatttaatcgcataaagaaattagaggctgtatacaaatatactaacattgcgactcccgattctttagtagctcgatatctttcagggcgcggaattaagaggattctcacaaagttaccagcaagcctggggttaaatccaaaaatgcgttactggcatggtgttaataaacctgccagctttcaccccacgatggttgctatctttaatgataagttaggtcgcaattgcactatccataaaactcatcttagtgatgatgggcttgtaaaagcagatgttgaaaacccaaagttaatgatgaaaccggtctatcagatgaatggtggctcgatccagttgtttaaaccaacctatgatgaaatgtctaaggcttggtttttgggtatcagcgaaggtatagagaatgcgttgtcggtaactgaggcaacttcaataccatgctgggcatcttcaagttctacgtttatggaaatgctcgaaattcctgatcattttatgcctccttctgattgcgatttcatcgaattgacgatttgggcagataaagatcgggttaatccaaatacaggtaatgctgccggagaaactgctgcacaggttcttaagaaccgaatggaaccattattcgctgcacgctatcctcatgcgaatgtccatgtacacattttcttaccagaaattgatattcctgatggtaagaaaggtgtcgactggaatgatgtgctaatactcaatgggacagaagcttttcctggtaaacttgaagaaaagtttttcgacctgattaagtaa

SEQ ID NO: 258387 - DNA, 540 bp, Klebsiella pneumoniae
atgaacaatatttctgcaattgatattgaatctgtattcacctgggtaaaagataacgtcattttgaagcattcctccactcttgttaatacaccgtggtatgactacgacatagaggcagatttgcgcttaatcaagcaagccttaatcaatggtaactctgaatttatctacgttgttcgcgatcatggcaccatgttgcttttgttatctgaatttcactcctccatggcacttgattgggatggtagtgaggactttgcatattatcattgtaaaatgtttagcatgcagagcgttcgtctcacaaagcaaactgctggtgttctgttagatcgagggcctttacttaagtcttttagcggtggcaacaaaaacacctatctgaaagagattttagattttgttaataataaaggttttaactccgatcccgcacggtcactctttgactgccttcacatcggtgaggagttaaaccttccctcaatgaagaacttcattgcgcgagttgaaaaccatcttcgctgcttaaattaa

SEQ ID NO: 258388 - DNA, 219 bp, Klebsiella pneumoniae
atgaactacagacatgaatgctatggcctagaaaagttacttttggccgatgatgatttccttctctacctttttggtggggacaatgctgaagctttacgtacggacttgaaattgcgttatgcagccggtgaacgacttatcacaacgcaaaattgtccagacttttcacctgtctggggttgccctgggcatgaaagagagtgtgttgatgagtaa

SEQ ID NO: 258389 - DNA, 609 bp, Klebsiella pneumoniae
atgagtaacccgtatgacctttcaatgtattcattactggttgtaatggtcattttggcccttgtttcaacgtggtatgcaaaagaccacaaaattaacttttatttgttccttctcagcatagttacttttgttgctttattggctgtcgggcttatcaactggttcgttgaaggctcagtttatggtgctttaatcacaagtgcaggtatcatttgcctcagcatgaccagactgagactgttagtttatcgctatagcgttaaggccagtgttaaaagcatcgtatcttcggttactgatggtagaagggtggttttcattgctcacgataatttagacctgagagaagtcgtcttatccttgttcagccatcacttaccaacacaatcacgcgtggtacgtggtcctctgggtttcggaatggataatgatattgatttcataaaacaacataacctttctgatcaggggtacctggttatcttcttgaaccaggaagattcatacacatggttaaagctcatcgcagatggtgcaccagaaaaggcagttgcttttaattttgattatattccagatctggagagcaaacatgaaaacgaatga

SEQ ID NO: 258390 - DNA, 243 bp, Klebsiella pneumoniae
atgaaaacgaatgatgtgcatggcgcagctgacggcttgccgatgaacacgcttgtcattgacacagcaacagcacgtcgttttgaatgtgtaaaagagagggtacgtagactcgggttcaataacatatccgaccctgaaattattgacgctatcctgtctgaaataacaacagctgatgctgctggtattattatcgagtacaaattaaaaaatacaaaacctttgctctcgatagattag

SEQ ID NO: 258391 - DNA, 300 bp, Klebsiella pneumoniae
atgggcccaaaggcccagggccagctcctatgctcatttagttttaatgttgatgagacctatgtggcagataccggggaaggtcccaggattatgaaagccgaaatgatgaacgcggttatgcagattgttcctgactttatcgagcttacggatcgtcaaacccatgcaatcagggaagaagtttccgtgtttgatcgagtttgtgcaatgcgccttaccggtggtcacgggagctcaaggtcgctgtgggagaacgatatcctcccacgcatgaagagccatagccaattacagtga

SEQ ID NO: 258392 - DNA, 408 bp, Klebsiella pneumoniae
atgggtaaagtgcacagtatcggaaacattacctggaagaactacgaaagtgcatcgtttaaagcctatgccggtatcggggcaattttaagccttggactcattacagcgacggtgcgtaactatgaaatcctgcagatgacggttccgtattcatggtatctctactttacggcattctggctactttatccgtccttcaggatctctttcagcgaaaacgccgggcgaatgtttatttcgtggggatttttcggcctgaagctgataacgattaaccggcctgtccctgctggttactggctcgtgtcgatggagaaaacacgataccggttgattcgggtgtgtcaggacggacgccgcctgccgctatggctgacattcagaactttacctgaattcatttaa

SEQ ID NO: 258393 - DNA, 960 bp, Klebsiella pneumoniae
atgaatactgacttcgcacattacaatgaagagcaactacgcaaactcgatgagctgcacagtttactccaggatagcgagatcggatcagcttaccttgcttcgctcccggagccacgaagcatggaggagtatcatcccccgcaggaaattaaggtgactcactcggtgcctggcctcgacaccctggtggacatctaccggcagcagcgggttgataaaggcctggcggaaaatgaaccttattcaaccaaaatcacccgtaaataccccgggtttattgtcgtcaataataatcatgacgaagtgttggcgctggtaggagaaatcaaccggctacgggataagtttgctgatgcggtcaaaagtatcactcaatacagagactcccggtcagaaattctgcatcaggtttgcccgtggctggtgaccctgcaggtatcccgtaacatccgcatcgtgactgagaaaattcgtactctcggttttacctggcaaattccggtcgttcataaattcacccgcctggaaacggttattgatcgcttacgcagggaactaacggcactacagcctgatatcaggctgacaatacaggatgttaagcgactgaagcaggagcgtagtgaggaaatcatgatgctgtcgttgctcaatgaagaggtcagtcatgaagatgagcagctgaggaggtttcgcatcatccgggaaagtaactttcctgctgttaacgtcaatatcaggtacaccagtccacatgatcctgatgacgtgtccggaccgtacaaactcaacttcagagcccctttaccgttaattttgttcagtgagccgagccgttttaacccgttaaaagattacgaaaaaggtgaaaggcagaagcgcggtaatgttgatgaaaaatatcgatctgtcctgccacgaattgggctggtggaagtgattaaggagtcggcatga

SEQ ID NO: 258394 - DNA, 756 bp, Klebsiella pneumoniae
atgagccggattttaaccggtatttgtcgtgcggacccggccaacaggctttacgaggtcgcggtcagtcggggaatatcgtttgtgaacgcgaaggaacgtttccgggttcagatcagttttaaaaatgctatgacgcaaccgagtgaagacagatttctggctgagttactgacagttcatcatttcctctcggatccctccattctgtggcatatggagaaacaggtttatgccagcaccaccttatgggccagtacatcggcctggctgcctgatatatatcagcgcaaagccagtacgcccggcgtggtaaagatcatccggtatatgcatgctctgttcccgggactcaacacatcggtggaaaccagtgagcagggctacgggcaggctctgaccagcacgagtcttgaagtcccttcctggcctgcgatgccacagtttgactgcgaactgggtaaagtccagatcacgatgggagggatgattcgttacacagaaaccatgagcaataaaaattgcagaaacccacttgcactgatgatgaagagtttcaggaaagggatgatccccgtagataaactgccagagagcaagacagcaagacttttgccactcgatatgaataccgctggtgaggtattttctcacaccacctggccgagatatcgctatgtgtttgttaccggcgagggcggcattaagaaactggtcaatgtggtcaggctgagattaaaacccctggaggaataa

SEQ ID NO: 258395 - DNA, 324 bp, Klebsiella pneumoniae
atgaattatgcaatatttatggtcgtaaccgccctgtgtgcgtatggccttaattttttgacaagcaaaatcggggccgatgcgagccagaataatcggggcgacggcacggaagggatggccttacggtgtatcatttcatttattctgcttctcgtggctttatttttgcccatcaaaccggcagtgattcatctgggggtggaatttgctgcactggtaaatttcattgcctgtgtggttctttacaccctggcgggtatcaaggtaaaacggagattaaaaaaacaacggaaagccgaaaaggcagaccagaaacgctaa

SEQ ID NO: 258396 - DNA, 252 bp, Klebsiella pneumoniae
atgtgcacctgttacaatatgcgtggctgttctttctttaatctctccatttacttttatctgctcacgagtagtaatggttcgtttattattcattgtccctccggatggaatgtaaaaggaatggctattacgcttgtgttcgccttggttgtgagtggggaaaagtttcaggcagaacaacacagtcaggaaactcaaaactcagtgcttttcagaatggatgcagactcatttctcccgtcattgtga

SEQ ID NO: 258397 - DNA, 1062 bp, Klebsiella pneumoniae
atgaaacgcaatgcacgaaagtggatcccatttggttttgataaagacacaaataaaatcgttgatattgccagtgttgaaaatggtctttcgtgcaattgtatttgcctcatctgtggcacctctctcatagccagacagggacaaagtaaaaaatggcatttcagccactccacggatgttaaaggcgtttgcagtgaactgaccttacaacatctaaaaaaatacattcagatgaagatacaggagaaaaaatttctggctcttccacaccttttgcacggtaaggaaaaaggtgttgtaacacttaaaaatatcaccgctggtgggattgtatgcgggctgaatgctgaccttatcgggcagtgtaatgacacaactatcgggatcttcatcaatgatacagctgaggacatccagccaaatccagacctgttagcccagaccggccaactggcgctggttgagatagatgcggttcgaatagaaagcatcgtcgctccataccgggagaaaggagaaggcataaagctgatggttgcggtagaaaagttacttttcgtttctgaggaagcgaaaaaatggatctaccatccaatgatgaaaacggttaagcctgatgccttacaccagtacaagagggagttcaccagcagcggtaatcagcttctttcgttgatcccgcatgaactgccgataagcatgaatgtattaccgttgtcaccatctctgcagtggcatcatttaaggtgcaccataaaccttctctgtggtttaagccgcgccgatatacctccaggaagtaaagcgtttgacgagttggtatattttatcccacgtctgcttgaagcttcagaatctatcaatgtcccggcatacgaacggtggtacgacttttttttacgtaagagaggtgatggtgaactgaatgaggctgaaatggcattcatagggttcatcatcaaaataatcaactggaacatgtctatccatcaactgcctggcttcgatgacaaacaggcctttcatgactggtttctcctcaatgaccggagcaagtaa

SEQ ID NO: 258398 - DNA, 414 bp, Klebsiella pneumoniae
atgagttttttaaaagaatttcgcgaatttgcgatgcgcgggaacgtggttgatttggcagtcggtgtcatcattggtgcagcctttggtaaaatcgtatcgtcgttagttgccgatattattatgccaccgctaggtttactcattggcggaatcgactttaaacagtttgctgtcacgctacgggacgcccagggagacatcccagcggtcgtaatgcattatggcgtattcatccagaacgtcttcgattttattatcgtggcgtttgccatttttatggcaatcaaactgatgaataaattgaacagaaaaaaagaagaaaccccggcagcaccaccggccccgaccaaagaagaagtcctgcttagcgaaattcgtgacctgttgaaagaacaaaacaatcgttcttaa

SEQ ID NO: 258399 - DNA, 1125 bp, Klebsiella pneumoniae
atgacgccgagggaaatttggttacgtttgatgagagtgagcagcctgtatggagaaggtgctatcagtgctgcacgccagctatgttcatctccgacgctagagcgagaagagttgcgtgcccgtggtttgaatctggcgcaatcgaagcatttcctcggtgttaaccaatgcgaaatcgatgccacgctgcaatggctggagcggcccaattgctatttactgactgccgaagatccgctttacccaccccaactgcgggcgattgtcgactttccttgcgctcttttagtatgtggagatcctgcgctactcagtagccggcagctgtccgtcatcgggagtcggtcgcactcgtggtatggcgctcgttggggaaaactatttagcgaagctttagcgcgttatggcattacgatcacgagcggtctggcccttggcattgatggtattgctcatcgtggtgcgctggaagggaaaggtaaaacggtggcagttttagggaatggcttaggagagatctatcctcgtcgccatcaggcgttagcggaacagataattaacggtggcggagccgtcatttctgagttcccgctgtttactccgcccctgccgggcaattttccccgtcgtaaccgaattatcagtggcctaagcgccggtgtgttggttattgaagctgcgctgaaaagtggctcattagtgacggttcggtatgcgctggagcagggaagggatgtatttgctctgccagggccgattggcagcccgggttcagaaggtcctcattggctcatcaagcagggcgcgattcccgtaacagcccctgaagatatcgtcgaatactggcgagatgagctaccgtatattcttcctgagccagatgaggtaaataattgcggtaatcggccttctgtagcattgccatttccagagctcctggctaacgtaggagatgaggtaacacctgttgacgttgtcgctgaacgtgccggccaatctgtgccagtaaccgtagcccagctactagaactggagttagcaggctggatcgcagctgtacccggcggctatgtccgattaaggagggcaagccatgttcgacgtactgatgtatctgtttga

SEQ ID NO: 258400 - DNA, 258 bp, Klebsiella pneumoniae
gtgaaccaggctattcagtttccagacagagagatatgggatgaagcgcatcaatgtatcgcttttccggcattagttaacggcatgcagcttacctgcgccttaacgttaacggtgctcaagaagcgttttggcggtgaagaacccgcacaatggctggccgcttttcgtgaacatcgctgggatctggaagatgaagcccaggatctcattctcgaccagcgggaagatgctcagggttgggtctggctttcctga

SEQ ID NO: 258401 - DNA, 213 bp, Klebsiella pneumoniae
atgtcgctgcttttggcggctcatgcgcagacgttcggcgcgaataataattttcagatcgctcagcgcggtatcaaaatcatcattcacaatcaggtaatcatattccgcgtaatggctcatttctgcaactgcctgcgccatacgtttcgcgataacctcttcgctgtcctgaccgcggccgcgcaggcgacgatcaagctcatcttttga

SEQ ID NO: 258402 - DNA, 459 bp, Klebsiella pneumoniae
atgatgaaaaaaatcgacgttaagattctggacccgcgcgttggtcagcaatttccgctgccgacctatgccacctccggctccgccggacttgacctgcgagcctgtctcgatgacgccgtagagctggctcccggcgcaaccactctcgtgccgaccggcctggcgattcatattgctgatccttctctggccgcggtcattctcccgcgctccgggctgggccataagcacggtgtcgtactgggtaacctggtcggtttgattgattctgactatcagggccagttgatggtttccgtctggaaccgcagccagcagagcttcatcatcgaacccggcgagcgtatcgcgcaaatggtgtttgtgcctgttgtgcaggcggaatttaacctggtagaagattttgacgccaccgatcgcggcgaaggcggcttcggtcactcagggcgtcaataa

SEQ ID NO: 258403 - DNA, 1215 bp, Klebsiella pneumoniae
atgatgagtctggctggtaaaaagatcgttcttggcgtgagcggcggcattgccgcctataaaacgccggaactggtgcgccgcctgcgtgaccgcggcgcggatgtccgcgtcgccatgacggaagccgcaaaagccttcattacgccgttaagcttacaggcggtgtccggttatccggtatccgacagcctgctcgacccggccgccgaagcggcgatgggccatattgagctggggaaatgggctgatctggtcattcttgcccccgccaccgccgacttaatcgcccgcatcgcggcaggcatggccaacgatctcgtctcgacgatctgtctcgctacgccgtcgccggtcgccgtcgtgcccgccatgaaccagcagatgtatcgcgccgccgccacccagcataatcttggcgtcatcgccgcccgcggcctgctggtatggggcccggacagcggcagccaggcctgcggcgatattggcccagggcggatgctcgacccgctgaccattgtggatatggccgcgcagcatttctctcctgtcaaagatttgcaacatctgaacatcatgattaccgcgggccccacccgcgagccgctggatccggtgcgttatatcaccaaccacagttctggtaagatgggcttcgcgattgccgccgccgccgcgcgtcgcggtgcgaacgttacgctggtgagcggccctgtttcgctgcctacgccgccgtttgtacacagaattgatgtcaccacagcactggaaatggaagccgcggtgcaaaatagcgcgtctcaacagcagatttttattggctgtgcggcagtcgccgactaccgtgcggtcgccatcgccgaagaaaaaattaaaaaacaaggtgatgaattaaccctgaaaatggttaaaaatccggatatcgtcgcaggggtcgctgcgcttaaggccaaccgcccttacgtcgttgggtttgccgccgaaacaaataatgtggaagaatacgcacggcaaaagcgagcccgcaaaaatcttgatctgatttgcgccaatgatgtttcacagccaaatcaaggatttaacagcgacagcaatgcattacaccttttctggcaggagggagataagcgcttaccacttgagcgcaaggaactcctgggccaattattactcgacgagatcgttacccgttatgatgaaaaaaatcgacgttaa

SEQ ID NO: 258404 - DNA, 153 bp, Klebsiella pneumoniae; identical to SEQ ID NO: 188553

SEQ ID NO: 258405 - DNA, 351 bp, Klebsiella pneumoniae
atgtcgaataagacactgacagcgaatgacgatactgctgagccctggtggggcttgagtcgtaacgtcatcccttgttttggcgcacgtatggtccaggaaggtaatcgcctgcattacctggctgaccgcgccagcataacaggtcagttcaatgaagcggatttactccatcttgaccaggcattcccggtactgctgaagcaggtggagctcatgcttaccagcggcgaactgaatccccgacaccagcattgcgttacgctctatgcaaaggggctgacctgcgaagctgatacgctgggctcctgcggttacgtttatatcgccatttatcccacccaaagctaa

SEQ ID NO: 258406 - DNA, 261 bp, Klebsiella pneumoniae
atgcccggcttcatcctgcactttcgccagcagaatcgctttgcgcctaagggtcggcgcgcgagcgatccagttgccttccggcagcatgccgacaatttccgagtgcgcgtgctggcctatctggcggatcagcgttttacggtaggcttccggcatccagtccagcggttcgatggccgtctcctgtgcaatgcgctgctcaaagcgttgttcttctgtcacgtcatcacctttatgattccaacaaattcggtttaa

SEQ ID NO: 258407 - DNA, 2046 bp, Klebsiella pneumoniae
atgcagcagttagccagctacttgtccggcacgtggcagaccggccggggccacgcgcgcaccatccatcatgccatcagcggcgacgcgctctgggaagtcaccagcgcgggtctggatatggcgcaggcgcggcgcttcgcgattgagcgcggcggcaaagcgctacaggcgatgacctttattgagcgcagcgcgatgctcaaagcggtcgccagacatctgctggaacagaaggcggcgctgtacgccatctccgccgaaaccggcgccacccgcagcgatagctgggtggatatcgaagggggcattggcacccttttcacctacgccggtctcggcagccgcgaactgccggacgataccctgtggcccgaagatgagctgatcccgctgtcaaaacagggaggcttcgccgcccgccacgttctgacctcgaagtccggcgtggcggtgcatatcaacgcctttaactttccctgctggggcatgctagaaaaactggcgccaacctggcttgccggcatgcccgccatcatcaaaccggccaccgccaccgcgcagctgacgcaggcgatggtcaaaatgattgtcgacagcgggctggtgccggagggcgcaatcagcctgatctgcggcggcgcgggcgatctgctcgaccatctcgatagccaggatgtcgtcacctttaccggctcggctcgtaccggacagcagctgcgggtgcaccccaacctggtcgcaaagtccattcccttcaccatggaagcggattcgctgaactgctgcgtgctcggtgacgacgtcacgcctgagcagccggagttcgcgctgttcattcgcgaagtggttcgagagatgacggcgaaagccgggcaaaaatgtaccgccatccggcggattatcgtgccacaagcgcaggtgaaagcggtgagcgatgcgctgattgcgcgtctgcaaaacgtggtggtcggcgacccggcgcaggaaggcgtaaaaatgggcgcgctggtgaactacgagcagcgtcaggacgtacaggataatgtcaaccgtctggtagccgccggatgcgacgtgctgctggggggccaggccgatctccgcgccgccggggccttcttcccgccaacgctgctgttctgcccgcagccggatgaaaccccggcggtacacgccattgaagcgtttggtcccgtcgcaaccttgatgccctatcagaatattgagcacgccatgagcctggcgcgggccggtgaaggtagcctggccggtaccctggtgaccgctagcggcgaactggcgcgggcgtttattctcggcgccgcccgcacccacgggcgtattcagatactgaacgaagcctcttccgcagaatcgaccggccacggctccccgctgccgcagctggttcacggcggcccggggcgcgccggcggcggcgaagagctgggcggcctgcgggcggtgaagcactatatgcagcgcaccgcgattcagggcagcccgacgatgctcgcggcaattggccaacagtgggtacgcggcgcggaggtggtggaagaccgcattcacccgttccgtaaatatttcgaagagatccaaccgggcgacagcctgctgactccgcgccgcacgctgaccgaggcggatatcgtcaacttcgcctgcctgagcggcgatcacttctacgcccatatggataagattgccgccgcggagtcgattttcggcgagcgcgtggtgcacggctatttcctgatttccgctgctgccgggctgtttgttgacgccggagtcggtccggtgatcgccaactacgggatggaaaatctgcgctttatcgagccggtgaagccgggcgataccatccaggtacgcctgacctgcaagcgcaaaacggtgaaacgccagcgcagcgcggaggagaaagcgaccggcgtcgtcgagtgggcggtagagatttttaaccagcaccagcaggcggtagcgctctactccatcctgactctggtggcccgccaacagggggattttgcggagtaa

SEQ ID NO: 258408 - DNA, 2259 bp, Klebsiella pneumoniae
atggcgattctttccccccgcaagacggctctggcgttggctgtcgccctgttttgcgcctggcaaagcccggctttcgcccacggcggcgaagcccatatggtcccgatggataaaaccctgcaggattttggcgcggacgttcagtgggatgactacgcgcagatgtttaccctgattaaagacggcgcttacgtgaaggtaaaaccgggggcgaaaacggccatcgtcaatggaaaaaccctggagctgcaggtgccggtagtgatgaaagacggcaaagcgtgggtttctgatacctttatcaacgacgtgtttcagtccggtcttgaccagactttccaggtggaaaaacgcgctcacccgctgaactcgctgtcagcggcggaaatcagcgcagcggtcgccatcgttaaagccgcggcggatttcaagcccaatacccgattcaccgagatctccctgcgcgagccggataaaaaagcggtgtgggattttgccctcaacggcacgccggtcaacgccccgcgcaccgccgacgtgatcatgctcgacggcaagcacgttattgaggcggtggtggatttacagaataaaaaggtcctttcatggacgccgattaaagacgcccacggcatggtactgctggatgatttcgccagcgtgcagaacatcatcaacgccagcagcgagtttgccgaagtgttgaaaaaacacggcatcgacgacccgagcaaggtgattaccaccccgctgaccgtcggctacttcgacggtaaagatggcctcaagcaggacgcgcggctgctcaaagtagtgagctatcttgacgttggcgacgggaactactgggcgcacccgattgaaaacctggtggcggtggtcgacctcgagcagaagaagatcatcaaaatcgaagaggggccgacgatcccggtgccgatggcggcccgcccctatgacggccgcgaccgcgttgcgccaacggtgaaaccgctggagatcattgagccagagggcaaaaactacaccatcaccggcgatatgatccactggcgtaactgggatttccatctgcggatgaactcccgcgtcgggccgattttgtctaccgtgacctggaacgacaacggtaaaaagcgccaggtgatgtatgaaggatcgctcggcgggatgatcgtcccctacggcgacccggacgtgggctggtattttaaagcctatctggattccggcgactacggcatgggcaccctgacctcgcctatcgtccgcgggaaagacgcgccgtccaacgcggtgctgctggatgaaaccatcgccgactataccggcacgccaaccactatcccgcgcgcgatcgccatcttcgaacgctacgccgggccggagtataagcacctggagatgggcaaaccgaacgtcagcaccgagcgccgcgagctggtggtgcgctggatcagcaccgtcggcaactacgactacatctttgactgggtatttcacgaaaacggcaccatcggtattgatgccggggcgaccggcatcgaagcggtcaaaggcgtacaggcgaagaccatgcacgacccgagcgccaaagaggatacccgctacggcacgctgatcgaccataatattgtcggcaccacccaccagcatatctacaacttccgcctcgatcttgacgtcgacggcgagaacaacacgctggtggccatggacccggaagtgaagccgaataccgccggcggcccgcgcaccagcaccatgcagatcaatcagtacactattgctagcgagcagaaagcggcgcagaaatttgatccaggcaccattcgtctgctgagcaataccaccaaagaaaaccggatgggtaacccagtgtcgtatcagattatcccctacgcgggcggcacgcatccggtcgccaccggggcgaaattcgcccctgatgagtggatttaccatcgtttgagctttatggataaacagctgtgggtcacccgctaccaccccaccgagcgcttcccggaaggcaagtaccctaaccgttcgattcacgacaccggcctcggccagtacgcgaaagatgacgagtcgctggacaaccatgatgacgtggtgtggatcaccaccggcaccacccacgtggcccgcgccgaggagtggccgattatgcctaccgagtgggcgcatgcgctgctgaagccgtggaacttctttgacgagacgccgacgctgggcgagaagaaacagtaa

SEQ ID NO: 258409 - DNA, 333 bp, Klebsiella pneumoniae
atgtcgctttacgatctcaaaaccgaagcgcaggcattgccggagtcctggcactcccggatcctgggccgcgttggggcaacgaatctcaaagtcctgcgcatggatgcccactcagtcgctgaggaggtgcatgaatatgacgagggattactggttattgacggtcgtctggaactgagcgtacaggagaaaaaaatctccgtcgcgcccggccagctttatatagccaaagcgggcattcctcatacggtggaaggcggcagctttggcaccctggtgattatagatttaccagacagcggcttcagcggcgtatcccctgctgattaa

SEQ ID NO: 258410 - DNA, 606 bp, Klebsiella pneumoniae
atgaaactctattacgccccggatacctgttcgttatcgccgcacatcgtgctgcgcgaactgcaacttgagtttgaactggttagagtcaacaacagaagcaagatcaccgctgatggtcgcgacttccgcgccattaaccctaaagggtatgtcgccgcccttgaactcgatgatgggcagatactcactgagggtccggccatcgtgcagtacctcgccgacctaaaaccagaatacggcctggcgccgcgcgcggacagttgggctcgggtgcgtctgcaggaatggcttaactttatcaccagtgaaatacacgctggctcggcaccgttgttcaaccccgcgctgcccgaagaggtcagagcgatttttcgtgagaagctgttccgacagttcgattttcttcaggcgactctcaacgaaaaaatctatctgactggccccactttcagcgtggctgatgcctacctcttcactgtgctgggctggtgtaaattcttctcaatcccactggatcgctggcctgggctattggcgtacagggaaatgatcaatgcccgtcctgcggtacaggccgcattactggccgaggcgtcgctttaa

SEQ ID NO: 258411 - DNA, 177 bp, Klebsiella pneumoniae; identical to SEQ ID NO: 188388

SEQ ID NO: 258412 - DNA, 912 bp, Klebsiella pneumoniae
atgacacataccgcagaattcctcgtctttggcgccaccgggcagcaaggtggcgcagtggcccgagcgttacggcgggccggacgtcaagtccgcgctttcgtacggaatccgcatagcgaagtggccagagcgctgacgacagaaggaatcacgctcgccatcggcgacttgttcgacctcgcatccattgaccgtgcaatgtcgggtatccagggcgtatttagcgttcagaccagttctccggcaggcgagataagcgacgagcaggaggttatgcagggaaaagccattgccgatagcgccctggcggctggtatccgccatctcgtctattcttcgtccggggcggctggaaaagccccaaccggcatggggcactttgacagtaaatcgacaattgaagattaccttcgcgccttgccgctctccacgaccatcacgcgcccggcaagctttatggaaatgatgctgctgcccggcatgggactaaacagcggccattttttcttcttcatgcaacgccatcaggcgatgcagatgattgcgctgcaagacctggggcgcattaatgcccagattctttgtaatcctgaacgttatcgggggcagactctggaactggccagccaggcgttgaccggtgaagacttgcagcgtgctttctcagatgccgccggtcatcctgttcattatcaccgctttcctgacgagctgttagcgcagaacacttttcttcgccagctcacggcgttggtagacaatggcattgtcgcaggctcggcggatataccgacgcttgaacaggagttcggtatgatgatgacgctggaacaatggttggcagggccagcaaggcagagctttaacgcggcgcttaacgccccacaggccaatcttatcctgcgatag

SEQ ID NO: 258413 - DNA, 285 bp, Klebsiella pneumoniae; identical to SEQ ID NO: 188390

SEQ ID NO: 258414 - DNA, 396 bp, Klebsiella pneumoniae
atgtttactcatatgcgtattgctaaacccgtcgccaatctcgaaagatcatttctgatgtacagcaaggggttaggtctgcataagattgctgaattcaacgatcatgacggtttcaatggaataatgttagggaggggagacttagactggcacatagaattcactttttgccgaaaccatcccgttcaacctttacacacagaagaggatttactcgttctttattactctgaagaaaaagaatgggatacggcctgtgaaagaatgatcggtgctggctttagaatgaccacgtcattcaatccttactgggatgcgaacggaaggacatttgttgaccttgatggatatagggtggttatacaaaacaaggcgtgggtattgccccaataa

SEQ ID NO: 258415 - DNA, 261 bp, Klebsiella pneumoniae
atggccaccggcaaacaccatcaccgccagcgtgacaaccccgatagccagccacagggagcggttatcatcgctgaccatcatgttgtcgccgatcatcccccagcccatgaccgggataccgaccagcagggcgacgatcgcctgccagcggaagcgcttcatggtggcgacagcggtttcctgctgacgctcgcggcgttcgaggtcgtcttcgatggcttccgcgccgtagcccgctttctctacggcctggactaa

SEQ ID NO: 258416 - DNA, 555 bp, Klebsiella pneumoniae
atggcggccgacacgctgttggttctcggcgacagtctgagcgccggttatcgtatggcgggcaataccgcctggcctgcgctgcttaacgataagtggcagaccaaaacgccggtggtgaacgccagcatcagcggcgatacctcgcagcaggggctggcaaggcttccggcgctgcttaagcagcaccagccgcgctgggtgctggtggagctcggcggtaacgatggactgcgcggtttccccccgcagcagacggagcagacgctgcgtaccattcttgagcatatcaaagcggcgaatgcccagccgctgctgatgcaaattcgcctgcccgccaactatggccgccgttataatgaagcctttagcgcaatctatccggcactggccaaagagtttgatattcctctgctgcccttttttatggaagaggtttatctgaaaccgcagtggatgcaggacgatggaattcaccccaatcgagacgcccagccgtttatcgccgactggatggcgacgcgtttggctcccttagttaatcatgactcctga

SEQ ID NO: 258417 - DNA, 141 bp, Klebsiella pneumoniae
atgcagaagggcataaaagagggcaaacgcgccgcgcttcttagcgtcgcgaaggccatgctcgaacgggatattgatgcggcggcggtgatggaaatgaccggtctgacgtccgacgatttgcagcagctccgtcattaa

SEQ ID NO: 258418 - DNA, 792 bp, Klebsiella pneumoniae
atgcctgtttttgctctactcgctcttgtcgcctactccatcagcctcgcgctgatcgtccctggcctgctgcaaaaaaacagcagctggcggcggatggcgattctttccgcaactattgcgttgatttgtcacgccttcgcgctagagtcacgcatttttcccggcggcgaaagcgggcagaacctcagtctattaaatgtgggatcgctggtcagcctgatgatctgtacggtgatgaccatcgtcgcttcgcgtaatcgcggctggctattgctgcccattgtctacaccttcgccttaatcaacctcgcgttcgcgacctttatgccgaacgagtacatcacgcatctggaaaccacgccggggatgttggtccatatcggcctgtcgctcttttcttatgctacgctgattatcgctgcgctttacgctctgcagctggcgtggattgattatcagttgaagaataaaaagttgaccttcagtagcgaaatgccgccgctgatgagcattgaacgtaaaatgttccacatcacccagataggcgtggtgctattaaccctgacgctgtgcaccgggttgttttatatgcacaacctgtttagcgcggaaaacattgataaagcagtactgtctattattgcgtggttcgtttatatcgtcctgctttggggccactatcatgaagggtggcgcggacgccgggtcgtctggtttaacgtgactggcgcagggctgctgacgctggcctactttggtagccgcgtattgcaacagttcatgagctaa

SEQ ID NO: 258419 - DNA, 1368 bp, Klebsiella pneumoniae
atgtttgataatttaaccgatcgtttgtcgcgtacgctgcgcaacattagcggccgcggacgccttactgaagacaatattaaagataccctgcgcgaagtgcgtatggcgctgctggaggcggacgttgctctgcctgtggtacgtgacttcatcaaccgcgtaaaagaaagcgcggtaggtcatgaagtcaacaaaagcctgaccccgggccaggagttcgtcaaaatcgtgcgcaacgaactggttgccgcgatgggcgaagagaaccaggcgctggatttagccgcgcaaccgccagccgtggtgctgatggccggtttgcagggggcgggtaaaaccaccagcgtcgcgaagctgggtaagttcctgcgtgaaaagcacaagaagaaagtgctggtggtttccgctgacgtctatcgccctgcggcgatcaagcagctggaaacgctggccgagcaggttagcgttgatttcttcccgtctgacgtaggtcagaagccggttgatatcgttaatgccgcgctgaaggaagcgaagctcaaattctacgacgtgctgctggtggataccgccggtcgtctgcacgttgatgaagcgatgatggatgagattaagcaggttcatgcgtctctcaatccagtagaaaccctgtttgttgtcgatgcgatgaccggccaggatgcggcgaacacggcgaaagcgtttaacgaggccctgccgttgaccggggtcgtgctgaccaaagtggacggcgacgcccgcggcggtgcggcgctgtcgattcgtcatatcaccggcaagccgattaaattccttggcgttggcgagaaaaccgaagcgctggagccgttccacccggaccgtatcgcttcccgtattctcggcatgggcgacgttttgtcgctgatcgaagatatcgaaagtaaggttgaccgtgcgcaggctgaaaagctggcttccaaactgaaaaaaggcgacggttttgatctcaccgatttccttgaacagctgcggcagatgaaaaacatgggcggtatggccagcctgatgggcaagctgccgggcatgggacagataccggacaacgttaaatcgcagatggacgataaggtgctggtgcgtatggaagccatcatcaactcgatgacgctgaaagagcgcgcgaaaccggaaattattaaaggttcgcgcaagcgccgcatcgccgcaggctgcggaatgcaggtgcaggatgtgaaccgtctgctcaaacagtttgacgatatgcagcgcatgatgaagaagatgaagtcgaaaggcggcatgatgaagatgatgcgcggaatgaaaggtatgatgccgcctgggttccccggggggcgatag

SEQ ID NO: 258420 - DNA, 549 bp, Klebsiella pneumoniae
atgagcaagcaacacaccgcacaagcacctgttgaaccgattgtattaggcaagatgggttcttcctacggtatccgtggttggctcagagtgttttcctccaccgaagacgccgaaagcatttttgactatcagccctggtttatccagaaggcgggtcagtggcaggttgttgagctggaaagctggcgccaccacaatcaggatatcgtcattaagctgaaaggcattgacgatcgcgatgcagcgaatcttttgactaattgcgaaattgtcgtggattcatcgcagctgcctgcgcttgaagagggtgactattactggaaagacctgatgggctgccaggtagtgaccactgaaggctatggtctcggtaaagtcatcgatatgatggaaactggatctaatgacgttctcgtcatcaaggcaaacctgaaagatgcatttggtatcaaggagcggctggttccgttcctcgatgggcaggttatcaagaaagtcgatctcgctactcgtactatcgaagtagattgggatcctggtttttaa

SEQ ID NO: 258421 - DNA, 246 bp, Klebsiella pneumoniae
atgatttggtactctttgtcggtcagggtttgcgccggcgccacggtgatggagtcgccggtatggatgcccatggcgtcgaagttttcgatagagcagacgatgatgcagttgtcgtttttatcacgcaccacttccatctcgtactctttccagccgattagcgattcatcaatcagcagctcgttagtcggcgagagatccaggccgcgttcgcagatttcttcgaactcttcacggttgtag

SEQ ID NO: 258422 - DNA, 249 bp, Klebsiella pneumoniae
atgaaacatccgctagaaacgctcctcagcgccgccggcattttgctgctggctttgctctcctgcctgctgctgccggcgccctcgctgggcctgacgctggcgcaaaagctggtggcgacattccatctgatggatctcaaccagctttataccctgatcttttgcctgtggtttttagcgctgggcgcggttgaatatctgctgctgcgctgggtctggcgtcgctggttttccgttgagcgctag

SEQ ID NO: 258423 - DNA, 702 bp, Klebsiella pneumoniae
gtgcttctcaatccccgccatcatctggttgatgtggccgagctcggtctcctgaccggttgcggtcaccacgccaacgccgccgccggcgctgatggtggtgccggagaagagcatattggtacggtcgcccagcggcagttcgccttccagcgcgtcggtggttttatccaccaccgtcgactcgccggtgagaatcgcttcttcaacccgcagattatggctctcaatcaggcgcatatcggcagggacgcggtcgcccgcgcgcagaatcacgatatcgcccggcaccaggtcgcgggtgggaatggtttcatgcttgccgccgcgctgcacgcgcgcgtcgctggagagcatattgcggatgccctgcagcgatttttcggcgttgctctcctggatatggccgatcagggcgttgatcaccgtgacgccaaggatgacgagcgtatcgacccagtggcccatgaccgcggtgagcgcggcggcggccagcaggacaaaaatcagtacgtcattaaaatgggcaaggaagcgcagccaggccggcttgccttttttctccggcaaggcgttggggccgaaggttttcaaacgctctgcggcttcggcggcgctgaggccgctggcatggcttttagtctgcgccagcaccgcatcaaccgtctgctgatatgcgcggcgtggcgcgacatcccctga

SEQ ID NO: 258424 - DNA, 1608 bp, Klebsiella pneumoniae
atgagtatttccttgaaaaaatcagggatgctgaagcttggtctgagcctggttgccatgaccgttgcagcaagcgtacaagcgaagaccctggtttattgttcagaaggttcgccggaaggctttaacccgcagctcttcacctctggtaccacctatgacgccagctcagtgccgatttataaccgcctggtagaattcaaaaccggcaccacggaagtgattccgggcctggctgagaaatgggaagttagcgaagacgggaaaacctataccttccatctgcgtaaagacgtgaagtggcaggataataaagattttaaaccgactcgcacgctgaacgccgatgacgttgtcttctctttcgacagacaaaaaaataccaacaacccgtaccataaagtgtctggcggcagctatgaatactttgaaggcatggggttacctgacctgattagcgaagtgaagaaagtggacgataataccgtccagttcgtgctgacccgtccggaatcgccgttccttgccgatctcgccatggacttcgcctctattctgtcaaaagagtatgccgacaacatgctgaaagccggtacgccggagaaagtggacctcaacccaatcggtaccggcccgttccaactgctgcagtaccagaaagactcccgtattctctataaagccttcccgggctactggggcgccaagccgaaaatcgatcgcctggtcttctccatcacccctgatgcttccgtgcgctacgctaagctgcagaaaaacgaatgccagattatgccgtacccgaatccggcagacatcgcgcgcatgaagcaagacaagaacatcactctgctggagcagccgggcctgaacgtgggctacctctctttcaataccgagaagaagccgctggatgatgtcaaagttcgccaggcgctgacctacgcggtaaacaaagaagcgattatcaaagccgtttaccagggcgcaggccaggccgcgaagaacctgatcccgccgaccatgtggggctataacgacgacattaaagattacacttacgatccagagaaagcgaaagcgctgctgaaagaagccggtctggaaaaaggcttcaccatcgacctgtgggcaatgccggtacagcgtccgtataacccgaacgcgcgccgtatggctgagatgattcaggctgactgggctaaagttggcgtccaggccaagatcgtcacttacgagtggggtgaatacctgaagcgggcgaaagcgggcgaacaccagaccgtcatgatgggctggaccggcgacaatggggatccggataacttcttcgccaccctgttcagctgcgcggcggcaaaagacggttctaactactcccgctggtgctacaagccgtttgaagatctgattcagccggctcgcgccaccgatgaccacaacaaacgcattgagctgtacaaacaggctcaggtcgtgatgcacgatcaggctccggcgctgattgtcgctcactccaccgtctatgagccggtgcgtaaagaggtcaaaggctacgtggtcgatccattaggtaaacaccacttcgataacgtctctatcgaataa

SEQ ID NO: 258425 - DNA, 1020 bp, Klebsiella pneumoniae
atgttgcagttcattctccgacgtttgggacttgtcatcccaacatttatcggtattacccttctcactttcgccttcgttcatatgatccccggcgacccggtgatgattatggcgggcgaacgtggtatttcccctgaacgtcacgcgcagctgctggccgaaatgggcctcgataagccaatgtggcagcagtacgtcaactatatttggggcgtgatgcacggtgatttgggcatctcgctgaaaagccgtattcccgtctgggaagagttcgtgccgcgctttaaggccaccatggagctgggcgtctgcgcgatgatttttgccatcatcgtcgggatcccggtgggtgtgctggcggcggtcaaacgtggctctatcttcgaccacacctccgtaggcctcgcgctgaccggctattccatgcctatcttctggtgggggatgatgctgatcatgctggtgtcggtacagcttaacctgacgccggtttccggacgtatcagcgataccgtcttccttgacgataccctgccgctgaccggatttatgctgatcgataccgcgatttggggcgagccgggcgactttattgatgcggtgatgcatatgatcctgcccgccgtggtgctggggacgattcccctggcggtgatcgtgcgtatgacccgttcgtcgatgctggaagtgctgggcgaggattatatccgtaccgcgcgcgcgaaaggcctgacgcggatgcgggtgattgtcgttcatgctttacgcaacgcgatgctgccggtggtcacggttatcggcctgcaggtcggtacgctgctggcgggggctatcctgaccgaaaccatcttctcctggccgggccttggccgctggctgattgatgcgctgcagcgccgcgactatccggtggtgcagggcggggtgctgctggtggcgacgatgattattctcgtcaacctgctggtcgacctgttgtacggcgtggtgaacccgcgtatccggcataagaagtaa

SEQ ID NO: 258426 - DNA, 558 bp, Klebsiella pneumoniae
atgaaccattatgatgatttgcagcgcttcaaggaaaagacgcggacacacagtctaaaattcaaggacctctcatcagaagccgccgccggtgaaaaaggggattgggttattctcaatcaacttattcccgcggaggaagagtcttctttggcaatggggggatcggtctccctacctgtgccgcagcgggttcctgccgatatgtttcatcaggtggagcgcgctgtcgttcaaaccgcccctgcgccatctgcggcggcgccagcgttgagtatcccgccttccgcgccgcagcctgttcccgtgacggacaggatggccgtagtgcccgcggcgccggaaagcgcgcccgcggctgaacccgcttccctggcgacggtttctcgacctgctgctcagccgatacctgtccctccggccaggcctcgtccggcgatagcgccgacggcggaagggtttgcccatctctttgcgacaaaaaccgcagagccggtagcaaaagataaagatcagtcactgaaatcactcctggagaggatcgcgacatgccgttga

SEQ ID NO: 258427 - DNA, 132 bp, Klebsiella pneumoniae
atgctcagcaggccaaaaatatactgcttttggctgtccatcggggtgatcaccaccagcacggcaatcggcgaaagcaccagtaccagcaaccagaaaagcgtctttttcattcagcagccctgcaattaa

SEQ ID NO: 258428 - DNA, 243 bp, Klebsiella pneumoniae
atgcggcgtctgcaccagcgccagcatcgggtcgttgaggaatccgcccaccgtcgcctgcaggaagacgcgggttgccacgtggtcgcagtcaaacacgcagataagctcgccgtgggtcagcgtcatcgcgtggttgaggttgcccgccttggcgtgtttgttgtcgttacgggtgatatacccaaccccaacgtcggcggcgaagaccgcaaattcattgcgcttcccgtcatccagtaa

SEQ ID NO: 258429 - DNA, 2085 bp, Klebsiella pneumoniae
atgtcgtatacaccgatgggcgatcttgggcagcagggtctgtttgatatcacccgcattttattacagcagccggatctggccgcgctgagcgagacgctgaccggcctggtgcagcagtccgcgctcgccgaccgggcggcgattattctgtggcattccggcaaccatcgcgcgacaaggcacgcctgcgacgatgccgggcatccggtgagctatgaagatgaaaccgtcctcgccaacggcccggttcgtcgtctgctgtcccgaccggatgcgctgcattgcgatagcgccacctttgccgagacctggccgcagctggcccgaagcggactctatcccacctttggctattactgcctgctgccgctggcggcggaaggccgcatcttcggcggctgcgaattcatccgcgatgacaaccggccatggactgaaaaagagtaccagcggctgcacacttttacgcaaatcgtcgccgtggtgaccgagcagatccagagccgggtcagcaataacgtcgattacgacctgctgtgccacgagcgcgataacttccgcatcctcgtggcgatcaccaacgccgtgctctcgcggctggatatcgacgagctggtcagcgaagtggccaaagagatccaccgctacttccgcatcgatgccattagcgtagtgctgcgcagcaaccgcaaaggcaagctcaacatctactccacccactacctcgacgccagccatccggtgcacgaccagagcgaagtggatgaagccggcaccctgaccgagcgggtcttcaaaagtaaagagatgctgctgctcaatctgcacgagcatgacccgctggcgccgtacgaaaaaatgcttttcgagatgtgggataacaaaattcagaccctgtgcctgctgccgttgatgtccggcaataccctgctcggggtgctgaagctggcgcagtgcgatgagaaagtgttcaccaccaccaatcttaagctgctgcggcaaatcgccgagcgcgtctcgatcgccatcgacaacgctctcgcctaccgcgaaattcagcgcctgaaagagcggctggtcgatgagaacctcgccctgaccgaacagctcaacaacgtggagagcgagtttggcgaaatcattggccgcagcgaggcgatgaacagcgtgctcaagcaggtggagatggtggcgcacagcgacagcacggtgctgatcctcggcgaaaccggcaccggtaaggagctgattgcccgcgctattcataatctgagcggccgcaatagccggcggatggtcaaaatgaactgcgcggcgatgcccgccgggctgctggaaagcgacctgtttggccacgagcgcggcgccttcaccggcgccagcgcgcagcgtatcggccgtttcgaactggcagacaaaagctcgctgtttctcgatgaagtgggcgatatgccggtggagctgcagccgaagctgctgcgcgtcctgcaggagcaggagttcgagcgtctcggcagcaataagctgattcacaccgacgtgcgcctgatcgccgcgaccaaccgcgatcttaagcagatggtcgccgatcgcgaatttcgcagcgatctctactatcggctgaacgtcttcccgatccacctgccgccgctgcgcgagcggccggacgatattccgctgctggtgaaggccttcacctttaaaatcgcccgccgtctgggacgcaatatcgacagcattccggcggaaacgctgcgccttctcagccgcatggagtggccgggcaacgtgcgtgagctggaaaacgtcattgagcgcgcggtgctgctgacccgcggcagcgtgctgcagctctccttgccggagatgaggccggagatgagcatcgagccgcagccgctggcggcagaagtgctgccggaggaaggcgaagatgaataccagctgattgtccgggtgctgaaagagagcaacggcgtggtcgccggaccgaagggcgcggcccagcgtctgggattaaagcgcaccactttgctttcgcgcatgaaacggttgggcattcataaagaccagctgcagtag

SEQ ID NO: 258430 - DNA, 1011 bp, Klebsiella pneumoniae
atgaaaagcgttcagttagcccacggtagcggcggtcaggcgatgcagcagctgatcggcgacctgtttatgcaagctttcgccaacccctggctggcggagcaggaggatcaggcgcgtctcgatctcacccagcttagcgcgcagggcgacaggctcgccttctccaccgacagctacgtcatcgatccgctgttttttcccggcggcaatatcggcaagctggcggtgtgcggtacggccaacgatgtggcggtgagcggcgcgctgccgcgctatctctcctgcgggtttattctcgaagaggggctggagatggccaccctcgaagcggtggtgaacagcatggcgcagaccgcccgggaggccggtatcgccattgtcaccggcgataccaaagtggtgccgcgcggggcggcggataagctgtttatcaataccgccgggatcggcgtgatccccaccggtattcgctggggggcgcagcagattagcgccggcgacgtgctgctggtcagcggtacgcttggcgatcacggggcgactatcctcaacctgcgcgagcaaatggggctggacggcgcgctgtccagcgactgcgcggtgctgacgcccttgattcagacgctgcgcgacgtcgctggcgtgaaagccctgcgcgatgccacccgcggcggggttaacgcggtggcccacgagttcgccgccgccagcggctgcgggattgagctgtatgagaataagctgccggtgaacgagaccgtgcgcggcgtgtgcgagctgctggggctggacgcgctgaattttgccaacgaaggcaagctgttgatcgccgtcgcccgcgaagcggcggaaagcgtacttgcgcatttacggtctcatccgttaggccgcgatgcggcgataatcggcgacgttgtggcgcgcgcgggcgtgcgctccatcggcctgtacggcgtcaaacgtacgctggatcttcctcacgccgagccgctgccgagaatttgttaa

SEQ ID NO: 258431 - DNA, 252 bp, Klebsiella pneumoniae
atgttcccggttaaaattttaatgaagcgcaatcgcacagattggcttttgatggtgatttccgggaacaatttaatgataaacttcatggcgacactattcgttggcaagcccgacggggctttaagcataaaaagttgtacaggcgcaaccggcgtctgcatccagggcgcggagtataccactattgggcgcttttcacctggcattgcgcgttatttgattaaccgcgcgacttcgttaccatattga

SEQ ID NO: 258432 - DNA, 1179 bp, Klebsiella pneumoniae
atgttaaacggcatgaaacccttatcccgctccctgcgctggggcatggtcggcggcggcggtaccagccagattggctacagccaccgttgcgcggcgctgcgtgataacgtctttactttgctggccggcgcgcttgatatcgatgccgagcgcggccgtcaattcggcgagcagctcggcatcgctcctgagcgctgctacgccgattataaaacgctgttcgcggaggaggccaaacgccccgacgggattgaagccgtatcggtgacgacgccgaataatactcacttcgctatcactaaagcggcgctggaagccgggctgcacgttatctgcgaaaaaccgctgtgctttaccgccgacgaagcgcgcgaactgctcgcgctgagtaaaaagcagaataaaattatcggcgtcacctacggttatgccgggcaccagatgatccagcaggcacggcagatgatagccgaggggatgctcggcgagatccgcattatcaatatgcagtttgcccacggttttcataatgaagccgttgagctgcaagcggaatccacccgctggcgggtcacgcccaaatatgctggccctagctatgtgctgggggatctggcgacccacccgctatttattgccgagacgatggtgccgaatctgaacatcacccgcctgatgtgcgcacgtcaaagcttcgtcaaatcccgcgcgccgctggaagataacgcctttgtgctaatggaatataacaacggcgccgtcggttcactgtggaccagcgcggtcaacagcggcgcgatgcattcacaaaaagtccgcgtcattggcgaaaaagccagcatcgaatggtgggatgaacgcccaaatcagctgagctacgaggtgcagggcgaaccggcgcgcgtactggagcgcgggatgccctatctcagccagcaggcgctggcggatgaccgcattggcggcggtcaccctgaagggctgttcgaagcgtgggccaacctctatcgccgctacgccatcgccatcgacgccatggatcgcggtgaccgggcattcctcgagaccttctggtatccggacgtggaagccgggctgcacggcgtttactgggttgagcagtgcgttaaatccgccgacgcgggcggccagtgggttgactttaactgccattaa

SEQ ID NO: 258433 - DNA, 426 bp, Klebsiella pneumoniae
atggccaacccggaattactggaagaacagcgtgaagaaacgcgtctgattattgaagagctgctcgaagacggcagcgatccggacgcgctgtataccattgagcaccatctctccgccgatgatttcgaaacgctggagaaagtggcggtagaagccttcaagctgggctatgaagtgactgagccagaagagctggaagtggaagagggcgataccgttatttgctgcgatatcctcagcgaatccgcgctgaatgccgagctgatcgatgcccaggttgagcagctgatgacgctggcggaaaaatacgacgtggaatacgacggctggggcacctactacgaagatcctaacggggaagacgaagaaggcgatgacgacgaagatctcgttgatgaagacgacgacggcgttcgccactag

SEQ ID NO: 258434 - DNA, 1005 bp, Klebsiella pneumoniae
atgtccgcgttttatcagaagcattttttaaagttgcttgattttactcctgcagaaattaccgccctgcttgaactggcggccaggctcaaagctgataagaaaaacaatatcgaaattcagcatctcaccggcaaaaacatcgcgctcatcttcgaaaaagactctacccgcacccgatgctctttcgaagttgccgcatttgaccagggcgctcgcgtcacgtatctcggaccaagcggcagccagattggccacaaagagtcgattaaagacaccgcccgcgtgctgggacgcatgtacgacggtattcaatatcgcggtcatggccaggaagtggtggaaactcttgccgaatatgccggcgttccggtctggaacggcctgaccaatgaattccaccctactcagctgctggcggacctgctgaccatgcaagagcacctgccgggcaaagcctttaaccagatgaccctggtctacgccggcgacgcgcggaataatatgggcaactccatgctcgaagccgccgcgctgaccggtctggatctgcgtctggtcgcgccaacggcctgctggccggaagagaagctggtcgagcagtgccgggcgctggcgcagaaaaacggtggcaatattacgctgaccgaagatatcgccgcgggcgtgaagggcgctgactttatctataccgacgtctgggtatcgatgggcgaagccaaagagaagtgggcggagcgtatcgcgctgctgcgcgcgtatcaggtgaatagcgagatgatggcgctgaccggcaatccgcaggtgaaattcctccactgcctgcccgcgttccacgacgaccagaccacgctcggcaaacagatggcggcggagtacggcctgcacggcgggatggaagtgaccgacgaggtatttgaatccgcggccagcatcgttttcgatcaggcggaaaaccgcatgcataccatcaaagcggtgatggtggcgacgctgggtaagtaa

SEQ ID NO: 258435 - DNA, 363 bp, Klebsiella pneumoniae
atgtatcaatcgattaatattgctcagaaattcactctctttaccgagcaatggcagccgaaggtggtggccgaaatgaatgattatcagttcaaggtggtcaggatcctcggcgactttatctggcatagccatccggaaacggatgaaaccctgattgtgctggagggcgtgctgcgtctggattttcgcgatgagcatctgttgctccaggccggcgaaatgatcgtggtgcctcggggcgttgagcataaaacctcggcggaaaccgaaaccaaacttatgctgatcgagccgcgcggcgtcctgaataccgggcatgagggcggagatcggaccgcggtgaacgacgtctggatttaa

SEQ ID NO: 258436 - DNA, 807 bp, Klebsiella pneumoniae
atgccacaacagaaacgtgcggattgggtccgcctggcccagtcgcccgcgcatattgagcgtgtcgaagccttcttcggcggccacggttatgagcctcaccggcatgatacttacgccattggccaaacgctcgccggcgtacaacgctttcactatcgcggcggcctccagcacagcctccccggtgggacgatggttttgcaccccgatgaagtccatgacggcgaggcagggaccgaggaggggtttcgctaccggatggtgtacattgagcccgcgctgattcaaaagatccttggcggcaggccgttgccctttatccccgggggaatatccagcgatccgcgcttgctgcacgccgcgctgccgttgctgaaagacgtcaatgcccacttcgcgcctctggaggaggaggacgcgctgtacgatctggcgcagaccctggccgccgtcggcggccagcgctttcgacgccgggccttcgattaccccgccgcggaaagggcccgggagtatatccacgcctgttttgcgcagaacatcaccctcgacactctggcgaacgtcagcggcagagaccgctggagcctgagccgcgatttcagggcgctgtttggcgccagcccctggcgttatgtgatgatgaggcgcctcgaattttgccgccagcggatgctggcaggggataatctggcggatatcgcagcccacgcgggctttgccgatcaaagccatatgacgcgccagttcatcagccgctttggcctctctcccggccgctggctgaagtttgtccgcccctga

SEQ ID NO: 258437 - DNA, 1230 bp, Klebsiella pneumoniae
atgaaagcgtcaatgttatccccatcgctaatagacccggaaacggttatgccgcgtagcctggtgtggctgtttgctctcgccagcgggttgagcgtggcgaacgtttattacgcacaaccgctgctcgacgcgctggcgcgagattttgccatcagtgacgccgcgattggcggggtgattgcggcgactcagattggctgcgcgatggcgttgctcttgctggtaccgctgggcgacagagtcaatcgccgccgcctgatagcgacgcaggtttttctgttgatcgctgcgctgacggcggtgagtctggcgtccaccaccgtgatgctgttgggcggcatgcttgccgttggcctgctgggtaccgcgatgacccaggggttgatcgcctataccgccagcgccgcttcgccccatgaacagggacgcgtggtgggcgccgcgcagagcggagtctttatcgggctgctgctggcgcgggtattttcagggggcgtaagcgatctcttcggctggcgcggggtatacatctttgccgctttactgatgctgggcattgcgctgccgctgtggcgtcggctgccggtgttagcggtagcgtcgacccccctgagctacccgcgcctgttggcatcgatgctgactctgctgcgtcaggaaaaagtgcttcaggtgcgcggcgtgctggcgttactgatgtttgccgccttcaatatcttctggagcgcgctggttttgcccttgagcgctccgcccttcggcttttcgcatacggagatcggcgccctgggcctggtgggggctatcggcgccctggcggcggggcgagccggtaaatgggccgatcgcggatacgggcagcgcaccagcgccgtggccctggtcatgttgttggtggcctggtggccattatcgctgatggcatggtcgccagcggcgctgttggctggcattgtgctgctggatctcggcggtcaggcgctgcatgtcaccaatcaaagcatgattttccgtacccgacccgaagcgcacagcaggctggtcggtctgtatatgctgttttatgcgcttggcagcggtttgggggcggtcagtacgaccgcggtatatgcgcgcgcgggatggcagggcgtttgcctgctgggggcatcggtcagtctgctggcgctgctgttctggttgatgactcggggcgtgatgaccaaccataacggtggtgaagggtag

SEQ ID NO: 258438 - DNA, 447 bp, Klebsiella pneumoniae
atgcctgcgcgtgaaaaaatgaaaaacgaaacctgccccgtcgcccgaagcgtggatattatcggcgatcgctggtccttgttgattgtgcgcgacgccttcgatggtatgcgccgctttagcgatttccagcgaagcctcggtatggcgcgtaatattctctctgaccgtctgcacaaactggtaaattcaggtatcctcacgacgcaagccgcctcggacggcacggcttatcaggaatacgtactgacggcaaagggggagcgtttgttccctgtggtggttgcgctacgccagtggggagagcagcatctgtttgcccctgacgaaccccattccgtcctgatcgataaacgtacgctgcgcccggttcccatgatgtcgcctgcggccgaagacggactcgtcctgacgcctcacgagactgaggtacaaaaaatcaaataa

SEQ ID NO: 258439 - DNA, 1467 bp, Klebsiella pneumoniae
atgaaagggctactgcggcatattctgccgctgtcgttgcgcgtccgctttctgctggcaacggccgccgtggtgctggtgctatcgctttcctatggcatggtcgcgctggtgggatatagcgttagcttcgataaaaccaccttccgcctgctgcgcggcgagagcaacctgttctatatgctggcgaagtgggaaaacaacactatcgaagttgatattcccgataacctcaatatgcagagccccacggtaacgctgatttacgacgcacacggccagctgttgtgggcgcagcgcgatgttccgtggctcgtcaagcgtattcaacctgactggctcaaaaataacggctttcatgagattgaggccgacgtagacagcagcagtatgctgcagcacaacaatcatgagattcagcaacagctggacgccatccgggaagaggacgacggctccgagatgacccactcggtggcgatcaacatctatccggccaccagcaccatgccgcagctcagtatcgtggttgtcgacaccattccggtggagctgaagcgctcctatatggtgtggagctggtttatttacgtcctggcagccaacctgctgctggtgatcccgctattgtgggtcgcggcgtggtggagcctgcgccctatcgaatcgctggccaaagaggtgcgcgaactggaggagcatcaccgcgagatgctcaacccgaacaccacccgggagcttacgcggctggtcagcaatctcaaccgcctgctgaaaagcgaacgcgaacgctatgataaataccgcacgacgctgaccgacctcacccacagcctgaaaacccctctcgcggtgatgcagagcacgctgcgttccatgcgcggcgagaagctgagcgtcaacgaagcagaaccggtgatgctggagcagattagccgcatctcgcagcagattggctactatctgcatcgcgccagcatgcgcagcggcggttcgctgctcagccgcgaactgcaccccatcgctccgctgctcgacagcctgacctcggcgctgaacaaagtctatcagcgcaaaggcgtgaacattaccctggatatctcgccggaaattagctttgtcggcgaaaagaacgattttatggaagtcatgggcaacgttctcgataacgcctgcaaatattgcctggagtttgtggaagtctccgttcgtcagaccaacgacaatcatctgcatattctggttgaagatgatggcccggggatcccggcaacaatgcgcagcgcggtgttcgatcgcggccagcgcgccgatacgctgcgccccgggcagggcgtgggtctctcggttgcccgcgatatcgttgcccagtacgacggccgtatcctggccgaggacagccttctcggcggcgcctgcatggaagtgatttttggccgtcagaccctcgaagataaagagagctaa

SEQ ID NO: 258440 - DNA, 897 bp, Klebsiella pneumoniae
atggttcagcgtattgctatggctccgcaggggccggaattttctcgttttgtgatgggctactggcgtttgatggactggaatatgtccgcgaaagcgctggtgagctttgttgagcaacacctggatctgggcgtcaccactatcgatcacgccgatatttacggcgactatcgctgtgaggcggcatttggcgaagcgctaaagctggctccgcatctgcgcagccggatggaaatcgtcaccaaatgcgggatagccactaaagcgcgggcggaaaacaccatcggccactatattaccgaccgcgaccatatcgttctcagcgccgaacagtcgctgcgtaatctggcaaccgaccatcttgatctgctgctaatccatcgtccggacccgctgatggatgcggatgaagtcgcggaggcgttccttgccctccaccatagcggcaaagttcgccacttcggcgtatctaactttactcccgcccagtttaccctgctgcagtcgcgcctgccgtttacgctcgcgaccaaccaggtggaaatttccccggtccatcagccgctgctgctggacggtacgctggatctgcttcagcagctgcgtatccggccgatggcctggtcctgcctcggcggcggacgtttatttaacgatgacagcttccagccgctgcgcgatgagctggcgcgcgttgctcaggagctaaatgcggagagcattgagcaggtggtgtacgcctggatcctgcgtctgccatcgcagccgttgccgatcatcggctcaggcaaaatcgagcgcgtgcgctccgcggtggttgctgaaaagctaaacatgagccgccagcagtggtttcgcattcgtaaagcggcgttaggctacgacgttccgtaa

SEQ ID NO: 258441 - DNA, 198 bp, Klebsiella pneumoniae
atggcctgggcgttaagcttcacccgcaccgccgggcgctggccgccggcgagggtcaccagaccgacgccggaaacctgggagatcttctgcgccacccgggtctccaccatgtcctcaacctgggtcatcgggatggcggaggaggtgacggcgagggtcatgatcggcggatccgccgggttcaccttgctgtag

SEQ ID NO: 258442 - DNA, 303 bp, Klebsiella pneumoniae
atgatcatcaccaccagggcgatggccagcatcagctcaaactgggtgtcgcgcaccgaggcgcggatgttggtggtccggtcggagaggacctgcaccttcaccgatttcggcaggctctcggtgagctgcggcagcatctggcgaatgctgttggcggtgtcgatgatgttggcccccggctggcgctggacgttcatcacgatggcccgctgctggttggcccatgccccgagccagctgttttcggccccttgttcgacgctggcgacatcgccgagccggatcggcgccccgttctga

SEQ ID NO: 258443 - DNA, 1059 bp, Klebsiella pneumoniae
atggcaggcgtgaatgaggctgccgcccgcggcgtggagtgggaggccttgctggtggagatgcagagcctgctgcaccgtattgcgatggttcagctctcgccgtcggcgctgggcgcggatatggccgcgattgagctgcgtatgcgcgagctggcgcggacggtgccgccaaccgatgttcagctgtactatcaaacgctactgattggccgtaaagagctcccgtacgccccggacagacgaatgggggtcgaaatgacgcttctgcgtgcgctggctttccatccgcgtatgccattaccggaaccggaggcgccgccgatgccggccattcaggccgcacctgtccagcaggccgttccggaatccgcaccgccgccgccgaatttgccgcagaccaccagccaggtgctggcggcgcgcagccagctgcagcgtagccagggagcgcccaccccaaaaaagagtgaaccggcagccgcttcccgcgcgcggccggtgaataacgctgcgctggaacgactgagttcgattaccgagcgcgtacaggcgcgtccggctgcggctgcgctggaaaaagccccggcgaaaaaagaagcctatcgctggaaatcgacgacggttgttgaaaccgtaaaagaagaagtggcgacgccgaaggcgctgaaaaaagcgctggagcatgaaaaaacgccggaactggcggcgaaactggcagtcgaagcggtcgaacgcgatagttgggcggcggaagtcagccagctcgcggtgccaaaactggtggagcaggtggcccttaacgcctggaaagagcaggagggcaatcgcgtctgtctgcatctgcgtccgatgataatcccgcgatgcgcacgccgcttgagtggcggcaggcaatttatgaagaaaagctcgcgcaggcgcgtgaagcgattattgcggataataacattcagaccctgcgtcgattcttcgatgcggacctggatgaagagagtattcgccccatttgatcgcaagtctgacttgcggtcagcatccttaacgatgacttactga

SEQ ID NO: 258444 - DNA, 816 bp, Klebsiella pneumoniae
atggcgaaagtcgccgaagaagcgggcgtctataaagcgacaaaacatccgataaagacgttttatctggctatcaccgcaggtgtcttcatctctatcgcttttgttttctatattaccgcgacaaccggcacggccgggatgccattcggggttgccaaactgattgggggcatctgcttctcactgggtttgattctctgcgttatttgcggtgccgacctgtttacctcaaccgttcttatcgttgtcgcgaaagccagcggaagaatcacatggggtcaactggcgaaaaactggctcaacgtctatgttggtaacctgattggttgcttactgtttgtattgctgatgtggctttcaggcgaatatatgactgccaacggtcaatggggacttaacgttctgcaaaccgccgaccacaaaatgcaccatacttttgttgaagccgtgtgcctgggtatcctggcaaacctgatggtctgccttgcggtatggatgagttactccggccgtagcctgatggataaagccatgattatggttttaccggtggcaatgtttgttgccagcgggtttgagcatagtatcgcgaacatgtttatgatcccgctgggtatcgttatccgcgactttgcaagcccggaattctggaccgcagttggttcaactccggaaagtttctctcacctgaccgtcatgaacttcatcactgataacctgattccggtaactatcgggaacatcatcggcggtggtctgctggttgggttgacatactgggtcatttacctgcgtggcgacgaccatcactaa

SEQ ID NO: 258445 - DNA, 303 bp, Klebsiella pneumoniae
gtggagtggcagagctacgtcaaagaaggcgtgctgagccgcatcgacctggcctggtcccgcgatcaacaacaaaaagtctacgttcaggacaagctgcgcgagcagggggccgaactgtggcgctggattaacgacggcgcccatatttatgtctgcggcgatgccaatcgtatggcaaaagacgttgagcagaccctactggaagtgattgccgaatacggcgcgatggacgccgaagcggcggacgaatttttaagtgagctgcgcgttgagcgccgttatcagcgagatgtctactaa

SEQ ID NO: 258446 - DNA, 1713 bp, Klebsiella pneumoniae
atgagcgaaaaacatccaggcccgctggtggtcgaaggtaaactgactgacgccgagcgcatgaagctcgaaagcaactacctgcgcggcaccattgcggaagatttgaacgacggcctgaccggcggttttaaaggcgataactttctgctgatccgtttccacggtatgtatcagcaggatgaccgcgatatccgcgccgagcgcgcggcgcagaagctggagccgcgtcacgcgatgctgctgcgctgccgcctgccgggcggggtgatcaccactaaacagtggcaggcgatcgataaattcgccggcgataacaccatttacggcagcatccgtctgaccaaccgtcagaccttccagttccacggcattctgaagaagaacgtcaagccggtgcaccagatgctgcattcggtggggctggacgcgctggcgaccgccaacgatatgaaccgtaacgtgctgtgtacttctaacccgtacgagtctcagctgcatgctgaagcctacgaatgggcgaagaagatctccgagcacctgctgccgcgcacgcgcgcttatgccgaaatttggctggatcagaagaaagtcgccaccactgatgaagaaccgatcctcggccagacctacctgccgcgtaagttcaaaaccaccgtggtgatcccgccgcagaacgatatcgatctgcacgcgaacgatatgaacttcgtggccatcgctgaaaacggcaagctggtgggctttaacctgctggttggcggcggtttatcgattgagcacggcaataagaaaacctacgcccgtacggcgagcgagtttggctatctgccggtggagcacaccctggcggtggcagaagcggtggtgacgacccagcgtgactggggtaaccgtaccgatcgtaaaaacgcgaaaaccaaatacaccctcgaacgcgtgggggttgagacctttaaggcggaagtggagcgtcgggcgggcatcaagtttgagccgatccgtccgtacgagttcaccggccgcggcgatcgtatcggctgggtgaagggtatcgacaataactggcacctgacgctgtttattgaaaatggtcgtattcttgattatccggggcgtccgctgaaaaccggcctgctgaagatcgcgaagatccacaaaggcgaattccgcattacggcgaatcagaacctgatcgttgccagcgtaccggaagatcagaaggcgaagatcgagaagctggcgcgcgatcatggtctgatgaacgccgttacgccgcagcgcgaaaactcgatggcctgcgtgtcgttcccgacctgtccgctggcgatggcggaggccgagcgtttcctgccgtcgtttaccgataaagtcgaggcggtgatgagcaaacatggcgttggcgacgagcatatcgtcacccgcgtcaccggctgcccgaacggctgcggccgggcgatgttggcggaagtggggctggtcggtaaggcgccgggccgctacaacctgcacctgggcggcaaccgcagcgggacgcgtattccgcgtatgtatcgggaaaatattaccgagtcggaaatcctcgactcgatcgacgaactggtagggcgctgggcgaaagagcgcgaagcgggtgaaggcttcggcgactttacggtgcgtgcgggcatcattcgcccggtgctcgacccagcccgtgatttctgggaataa

SEQ ID NO: 258447 - DNA, 735 bp, Klebsiella pneumoniae
atgtccatactcgatctaaacgcgctgaacgcattaccgaaggtcgatcgtgttttgcagctggcggaaaccaatagccagttggaaaagctgagcgcggaagcgcgcgtcgcgtgggcgctggaaaacctgccgggcgaatacgtgctctcctcaagctttggtatccaggcggcggtgagcctgcatctggtcaatcaggtgcgtccggatattccggtcattctgaccgataccggctatctgttcccggaaacctaccagtttatcgacgagttaacggacaaactcaatctgaacctgaaggtctatcgggcgaaggagagcgctgcatggcaggaggcgcgctacggtaagctgtgggagcagggcgttgagggcattgaaaaatataatgacatcaacaaagtcgagccgatgaaccgggcgctgcaggagctgaacgcgcaaacctggtttgcgggtctgcgccgcgagcagtccggcagccgcgcccacttaccggtgctggcgatccagcgcggcgtgtttaaggtgctgccgatcatcgactgggataatcgtaccgtctatcagtatctgcaaaagcacggcctgaagtatcacccgctgtgggatcagggctatttgtcggtaggggatacccacaccacccgtaaatgggagccggggatggcggaggaagaaacgcgcttctttggcctgaaaagagagtgcggactgcacgaagggtaa

SEQ ID NO: 258448 - DNA, 1059 bp, Klebsiella pneumoniae
atgttttccgcattgtgccgtcgcctgctccccctggcgttgggcgcaggatttgtcttctccgccgccccggcattcagcgccccgggcgaaaccgccaatgcccaggctcgtcatatcgccaccttttttcccggaagaatgaccggtacgccggccgagatgctgtcagccgattacctccgccagcagttcgcccagatgggttatcagagcgatgtgcgcagcttcaatacccgctacgtctataccgatagcagtcagcgtaaaaactggcataacgtcaccggcagtacggtgatcgccgctcatgaaggccaatctcgccagcagatcattatcatggcgcacctggatacctacgcgccgcagagcgataaagatgttgaaaataacctcggcggcctgaccctacaggggatcgacgataacgcgatggggttgggcgtcatgctggaacttgctgaacagttaaagaacgttcccacccgttacggtattcgcttcgttgccaccagcggcgaagaagaaggccggctgggggcacagaatctgcttaagcgcatgagcgatgcggaaaagaaaaacaccctgctggtgattaatctcgataatctggtcgtgggcgataagctgtactttaatagcggccgcagcacgccagcgtcggtgcgcaagctcacccgcgaccgggcgctgtttatcgcccgcagccacggcatcgcggccttcatcaatccagggctgaaccgggacttcccgaaaggcaccggctgctgtaacgatgccagcgttttcgataacgccgggatcccggtactgtcggtggaagcgaccaactggtcattgggcaagaaagacggttatcagcagcggggcaaatcacgcagctttccggacggcaccagttggcacaaccttcagttggataacctgcagtatattgataaagcgctgccggggcggattgagcatcgcggacgcgatgtgatgaaagtgatgctgccgctggtgaaagagctggcgaaagtcgaaaaagttcaaacggggaaatcctga

SEQ ID NO: 258449 - DNA, 1491 bp, Klebsiella pneumoniae
atgaaaataaatccgattctggctattgatggttataaagtttcccatcgcgtgcagtatccgcaggggactacgaaggtctactcaaactttactccgcgcagcgatcgttttttccagtcgccgcaggccgacggcaagctggtatttttcggcctgcaggggtttctgcagtggttcctggtcgatctgtttaacgaggcgttcttcgcccgcccggaagacgaggtcgtcaacgagtataagcaggtgatggacggctatctggggcgcgatacggttgggggggagcctgttcgtgctctgcatcggcttggctatttaccattgcatatcaaagcgctggatgaaggcaccaaggtgccgatgaaagtaccggtgctgaccatcaccaatacacaacctgagttcttctggctggtaaactatctggagacggtgctttcggcggagctgtggaaagcgtcaaccaacgcgaccatcgcccaccactatcgcctgatttgcgaacgctgggcggagaaaacctgtagcgatctgacgcaccttgatttccaatgtcacgacttttcgtttcggggaatgtccgggctgcacgacactgcgcagtcgggctgcggacatctggccagtttcaaaggtaccgatagcctgccttcgctgctgtatgcccgggattattacactcgcggtgacgatgagctcatcggcgccagcattccggccacggaacacagcgtgatgtgtatgggcgagcgcgagcgggaaattgaaacctttcgccggctgattaccgaagtccatccgcagggtttcgtctctatcgtctcggatacctgggattactggcaggtgctgaccgaatacacccgcgagctgaaggcgataattatgcggcgccaggggcgagtcgtattccgtccggacagcggcgatccggtggctattctgtgcggaacggcggctgacgacgacacccgcagcgagcgcagcgccgaggagaaaggctccgttgaagtactgtgggaaatcttcggcggtacgattaacgaaaaaggatacaaggtactggatccgcatgtcggcctgatttacggcgattccattactctcgccagagcggatgagatcctgcgtcgcctggaagcgaaaggctttgccagcgctaacgtggtgttcggcgtgggttcctttacctaccagtacaacacccgcgataccttcggcttcgcgatgaaggcgacctggggggaggtgaacggcgagggaagagccctctttaaggagccgaaaaccgataatggcctcaaacgttcggcgcgtggtctgctgcgcgtggaacgcgacgccgtgggggaactgcagctgtacgatgggcaaacgctggagcaggagcagcagggcgagttaaaaacgcgctttctggatggcaagctgtacggctatgcctcgctgtcgcagatccgcgcccggctggcggcgcagcgttaa

SEQ ID NO: 258450 - DNA, 870 bp, Klebsiella pneumoniae
atgagcgaaaaatttaccctggaactggatgatgaggcgtttacgcttgccagcggcgtctttcccgatggcgctgtgtggctgaaggtgaccgatccattaccgccttccgcccgtttgatgcgcatccgggcggttgctctgcgcgatatgaacgattttatgctgctggcgcagctggtggaggccgtgcgtcatgttaccgacgtggcgtttagccatctggaactgccgtggctgccgtgggcgcgtcaggatcgccatatggtgccgggagacagctttgctctgaaggtcttcgcccggcagcttaatacccttggctttgacaaagtcgtggtgcttgacccgcatagcgatgccgccgcggcggcagtcaataatatggttgcggttgcccagcagcactgtcttctgcagaacgccgccctgcgtcaggctattgctaccggggagctgatgctggtggcgccggatgccggcgcgctcaagaagattcaccctgtggctaaagcctgcggtgccggagagttcgcgatcctcggtaaagagcgtgaccttgccagcggcgcgttaaccggtttttccctgctggccggtgatgttgcaggtaaagcggtgcttatcgttgacgacctgtgcgacgctggcggcacctttatcggctcggcgcaggtgctccgcgcggcgggcgcccgcagcgtgagtttgtatgtgacccacggcgttttttctaaaggcgtagagcatttgctgaataacggcatcgatgccgtttacgccaccacctctttgacttcgcctgccctggctcacccgcagctggagcttatcgatatagacgccatctaccgcgcacattggggataa

SEQ ID NO: 258451 - DNA, 720 bp, Klebsiella pneumoniae
atgaccaccgatgccgaatacctcagccaatacgatgccagccgctttccctcgccgctggtgaccgtcgatagcgtcctgtttaccctgcatgaaggggcgctatgcgttctgctggttgagcgcgctcatccgccgcagcagggggcgtgggggctacccggcggctttatcgatctggcgcacgatgattcaacccgcgccacggcgctacgtaagctcacggaaaaaaccgggatttcaccgtcatggctggagcagctcgacaccttttccgggccggatcgcgatccgcgcggctggagcctgactatcgcctggtttgcgttaatctcatgggtagattgtcagccgcatatcgccagcgtcagcgatgcccgctgggtgccggtggcgcagctggatagctattcgctggctttcgatcatcaaaagatcatcgacgccggtctgcaccgcttacgccaaaaaacgatgtactctttactgccggtttactgtctgccggagacctttacccatggtcagctgctggaagccacggaaatcatccttggtcagccgattcaacgcaaaagcctgattcgccgcttcgaagcctccggaatgtttgaagagaccggggaaacagcggcaaccggcgcgcgcaaagcgcggctatggcggcgtaaacccggcgtcgattttcatctcttttcacgtaacctgctgaccgattag

SEQ ID NO: 258452 - DNA, 309 bp, Klebsiella pneumoniae; identical to SEQ ID NO: 190028

SEQ ID NO: 258453 - DNA, 615 bp, Klebsiella pneumoniae; identical to SEQ ID NO: 186908

SEQ ID NO: 258454 - DNA, 309 bp, Klebsiella pneumoniae; identical to SEQ ID NO: 186910

SEQ ID NO: 258455 - DNA, 693 bp, Klebsiella pneumoniae; identical to SEQ ID NO: 186911

SEQ ID NO: 258456 - DNA, 300 bp, Klebsiella pneumoniae; identical to SEQ ID NO: 186912

SEQ ID NO: 258457 - DNA, 318 bp, Klebsiella pneumoniae; identical to SEQ ID NO: 186914

SEQ ID NO: 258458 - DNA, 249 bp, Klebsiella pneumoniae; identical to SEQ ID NO: 186915

SEQ ID NO: 258459 - DNA, 1464 bp, Klebsiella pneumoniae
atgtatctgggtatcgatctcggcacatcggaagtcaaagcgctggtcattgatgagaacaatgaggttatcgccagccatagcgcgccgctgagtattcagcgtccccatccgcactggtcagaacagtcgccgcagtcatggtgggaggcgacggagtatttgatggccacgctgcgggaaaaatgcgcccagcactggccggctattaaagcgatcggcctttccgggcagatgcacggcgcggtcctgctggatgccgagggggaggtgattcgcccggccattctgtggaacgacacccgctgcgccgcggagtgcgcggagctggaagagatggcgccggagctgcatcaggtggcgggaaacctggcgatgccgggctttaccgcgccgaagctgctgtgggtacgccgccacgagccgcaatactttcagcgcaccgccacggtgctgctgccgaaagactatctgcgctaccggatgacgggtaagaaagtctccgatatgtcggacgccgccgggacgctgtggctggacgtggcgaagcgcgactggtccgattctctgctggataagtgcggcctgtcgcgcagccagatgccgaccctggtcgaaggctgcgaggtgtccgccacgcttgacccgcaggtggccgagcgctgggggctgaacgcctcggtagcggttgccggaggcggcggcgataacgcggtcagcgccatcggcgtcggcgcggtctcgccgggagacgcgtttatttcgcttggcacctccggggtgctgtttgtggtgaccgacgcctatcgtccggcgccgcagtcggcggtacacgccttttgtcacgttctgccgaatctgtggcatcagatgagcgtcatgctcagcgccgccggctgtttgcagtggttctgccgcctgaccggcaccacggaggtggcgctgctggaggagattgcccaacttagcgaggaggagaaggcccatgcgccgttcttcttaccctatctctccggcgaacgtactccgcacaacgatcctgacgcgcgcggcatgttctggggcatgacccactccagcctgcgcgcccagctcggctatgcggtgctggaaggcgtgagcttcggcatcaacgacggcctgcgggtgctgaaagagagcgggacgcggatcgaacaatgttcactggttggcggcggcgcccgcagcccgttctgggcgcagctgttggccgatattctcgatatgccggtggtgacccacaaagggggagaaaccggcggcgcgttgggcgcggcgcggctggcctgcctggcggcgggcaaaccgcttgccgccgtgtgtgaaaaaccggaggtctggcagacctggcgcgctgacccggtacgccatcagaccctgatgcgccgctacgcgcagtttaactccttgtatttaaatgatctgaactaccggcagcactaa

SEQ ID NO: 258460 - DNA, 1278 bp, Klebsiella pneumoniae
atgtctatcaataataaacagtggctcggcttacccctgaacctgctctggggatacatcgccattgccgtattcatgaccggcgacggttttgaactggcatttctctcgcattacatcaaagagctcggcttctctccggcgcaggcttcatttgcctttaccctctacggcctggccgcggcgctgtcggcgtggatctccggcgtggtggcggaaattattaccccgctgaaaaccatgatgattggcttcgtgctgtggtgcgtgttccacgtgctgtttctcgtcttcggcctcggccatgcgaactatgcgctgatcctcgttttttacggtattcgcggcttcgcgtatccgctgttcctctactcgtttatcgtggccattatccacaacgtgaaaagcgataacgccagctcggcgatcggctggttctgggcggtttactcgatcggcatcggcgttttcggcagctatattccgagctttaccattccgcatatcggcgagctggggacgctatggctggcgctggctttttgcgtcaccggcggcatcatcgcgctggcttccctgcgccatattcaaacgccgcgccatatgcagaacctgaccacccgcgagaagttttccgaactggggcgcgcggcgacgctgctctataccaaccgcaatattctgctgtcgagcatggtgcggattatcaataccctctcgctgttcggctttgcagtgattatgccgatgatgtttgtcgatgagctgggctttaccacctccgagtggctgcaggtgtgggcggtgttcttcttcaccaccattttctctaacgtgctgtggggcattctgggggaaaaactgggctggatgaaggtggtgcgctggtttggctgcatcggcatggcgctctccagcctggcgttttactacattccgcagcatttcggacataacttcgcgatggcgatgattccggccattgccctcgggatctttgtcgccgcgttcgtaccgctggcggcggtcttcccggcgctggagccgaagcacaaaggggcggccatttcggtttacaacctgtcggcggggatgtcgaactttctcgcgccggccattgcggtgattttgctgccgttcttcagcactatcggggtggtgatcgcctataccgcgctgtacgtggcggcctttttcctctgcgcgtttattcgcgtcgagcagccgggttttacccgcaaggaagcgccggccggcgagcaggtggagttctcttaa

SEQ ID NO: 258461 - DNA, 1155 bp, Klebsiella pneumoniae
atgaaaattgaatctgtaaatgtcaccgttttccagtatcccacgcgtcgggtttccgacagcgccgggcactcccatccgggagcggaaagcatggcgaaaatggcgatgctgaccattaccgccgatgatggcacccggggtttttcgtttgcaccgccggaagtggtacgcccgttcgtggtgaacaccttttttcgcaaggtgatggtggggcaggacccgtttaaccgcgagcgtatctggcaggatcttaaccactggcagcgcggcagcgcccatcagctgaccgagcgcgcgctgtcgtttgttgaacaggcgctgtgggacctgattggccgcaagcttaatatgccggtgtacaaactgctcggcggctatcgcgataccgtccccgcctacggcagcaccatgtgcggcgacgatctgccgggcggtctgtcgaccccggaggagtatgccgcctttgccgaaaagctggtcgcccgcggctataaggccatcaagctgcacacctggatgccgccgatcgcttttgcgcccaatccgaagatggacattaaagcctgcgcggcggtgcgcgaagcggtagggccggatatcgacctgatgattgacggctatcactggtacagccgcgccgaggcgctgtggattggcaaagaactggaaaaactcaacttcgcctggtttgaagagccgatggaggaggattcgatgtcctcctacgcgtggctggcggaaaacctgtcgattcccatcgtcggaccggagagcttcggcggcaagcaccatatgcgcgccgagtgggtgaaagccggagcctgcgacatcctgcgcgccggggccaacggcgtgggcggcattacccccaccatgaaggtggcggcgctggcggaatccttcggtatggactgcgaagtccacggcaacggcgcggcaagcctggcggtggtcggcgcgatccgcaactgccgctggtacgagcgcggcctgctgcatccattcctcgactacgatgagccggcggcctatctcaacagcattgtcgatcctatggatgaccagggctttgtgcatttgtcccagcgtccgggtctcggcgaagacattaattttgcctggatcgaagccaataccgttagccacgactga

SEQ ID NO: 258462 - DNA, 1623 bp, Klebsiella pneumoniae
atgaaaaaaaactccttactggcagcgtgcttactcgcgctcgccgtgtcgatggggagcggggcggcgttggcgaaaacgccgccggatcagctcatcatcggcatgaatatgaataacctgctcacccttgacccggcggcgatgaccgggaacgaagtggtggggatcgtggttaacctctacgactcgctggtggagcttgatcctgagcagctcaccaacgtcaggcccgcgctggcgaaatcctgggacatcagcccggacggtaaaaccctgacctttcatctgcgcgacgacgtgaagtttcactccggcaacccgctgaccgccgccgacgtggtgtggtcgatgcggcgtattttgcatctcaacctcgcgcaggcctcggtgtggaagtcttacggctttagtaagaaaaatatcgacggccaggtcagcgcgccggacagcttcacggtgcagatcgtgctgccgaaagataacgacccgcagctggttatctactcgctggcggcgctgggcaacctcggggtgctggacagcaaaacggtgcaaagccaccagcaagataatgactggggcaaccgctggctgaccacccatgaagccggttccgggccgttcacgctggaaacctggcaggcaaaagatgtgctgcgcatgaagcgcaatcctgactactggcgcggcgaggcgaaaatgagccgcgtggtgttgcgccacttccaggagtcgcaaaccctgcgcctgatgatcgaaaaaggcgacctcgatattgccaacaatatggcggtttccgacatcaacgccctgcgcggcgacccgcagctgaccgtcgacgcggtgcagcgcggcaccatgtactacgtggcgatgagcatgaaagaggcgcacttcgctaacccgaaagtgcgcgaagcggtgcgctatctgattgattatcagggcatcaataaagcgctgatgccgggctacggggtgctgcatcagcggccgattaaggcgggtatgccgtcaacgctgcccgatcctggctacaggctggacgtggcgcgggcgaaaaagctgctggcggaagcgggctatcccaacgggtttgacaccacgctgcgggtactcgcggatcagccgtttctcaatatcgccatcgccgtgcagtcgacgctgatgcaggcggggattaacgccaaaatcatcaccggcaccggtaaccagatttatggcgcgatgcgcgagcgtaaatttgacctgctggtggggcgcggcggcagcggcatggagccgcacccgcactccagcctgcgcgcgctggtctataacccggataacagcgatgaggcgcgcctgaccaacttccagggctggcgcaccggcttttacgacccgcagctcaattcgatgattgaccacgccctgctggagcgcgatgcgcaaaagcaggtcgccgattaccaggccattcaggcgcgctacgaccagctgatcccggcgttaattccgctttcgcagatggtcgattcggtggtggtgcgcaacgaggtgcgggagtatcagccgcacccctccgccaccacttttctgcgtgacgtctacaaaacccgcgaaggagagaaaggatga

SEQ ID NO: 258463 - DNA, 1038 bp, Klebsiella pneumoniae
atgagcaccgcaatccttgcgcccggctcacgcggccggcgcttatcaaaacggctgctgcaggtggtgattaccctgttcggcctgctgctgctgaccttcaccatcggccgcgttatgcccatcgacccggtgctggcgattgtcggcccggacgctgatcagagtacctatcagcaggtttaccagcagctggggtttgataaatcgctgaccacccagtttgggatctatttcgtcaacctactgcacggcgatctgggcaacgcgctgctgaccgggaaaccggtggtggacgatattatccgcgtgttcccggccaccatggagctggcgacgatggcgattctcgtcggcgccgggctgggcatcccgctgggcgtgctggcggcggcgcgacgcaacagtatttccgactatatggtgcgcattatcagcctggcgggctactcaacgccgatcttctgggtggggatgatggggctgctgctgttctacgcctggcttggctgggtgggcggcgccggtcgggtagaccttgggctggacggtatcgtaccgcggcgtaccggtttgatgaccgtcgatgcgctgctggcgggcaacgggcaggtgttctggaacgcgattaaccacctgattctccccgcctcgctgctcggctttcactcgctggcctacatcagccgcatgacccgcagctttatgctggcccagctgtcgcaggagttcattattaccgcgcgtgtgaaggggctgaccgagcgtcaggtcatctggaaccacgcgtttcgcaacattctcgtgcagctgctgacggtggtggcgctggcctacggcgcgctgctggaaggcgcggtactgattgaaaccgtcttctcctggccgggctttggctcctatctcaccggtagcctgctgctgggcgatatgaatgcggtgatgggttgcgtgctgctggtgggggtgatcttcgtgatgctcaacctgctctccgacatgctgtatcaattctttgacccgaggacaaaatcatga

SEQ ID NO: 258464 - DNA, 1236 bp, Klebsiella pneumoniae
atgccgcagcaggttccgacgcgtgcttttcacgcgatggcaaaaccgagcggttcggattgtaatctgaactgcgcttactgtttttatctcgaaaaacaggccctttatactcagcagcccgctttacgcatggatgatgcgacgctggagacttatgtccgtgactatattgccgccattgaaccgcaagatgaggtcgccttcacctggcaggggggagagccaaccctgatggggctggatttttatcgtcgggcggttgctttgcagaagaaatacggggccggacggcggattagcaacagctttcaaaccaacggcgtcctgctggacgatgaatggtgtgagtttcttgcgcgtcatcatttcctggttggtctgtcgcttgatggcccggcggagatccacaacgagtatcgcgtgaccaaaggcgggcgcccgacgcataagctggtaatgcgcgcgctgaagacgctgcaaaagcataatgtgcaatacaacgcgctggcctgcgtgaaccgcaagagcgcgcgcgaaccgctgcgggtctatgattttttgcgcagcgccggagtcgaatttatccagtttatcccggtagtggagcggcttgcagatgagcgggccgggcaggatggtctgatgctgcatggtccaggcgatttagagggccggataacggaatggtcggttcgtcctgaggactacggcgattttctgatagccgttttcgatcgctggatcaaacatgacgtcggcaaaatttttgtgatgaatatcgaatggacgtttgccagctttgtcggcgcgccgggcgcggtttgccatcatcagccgacctgcggccgatcgctggtggttgagcataatggggacgtctacgcctgcgatcattatgtctacccggagtatcgactcggcaatatgcgcgagcagagctttgctcagatggttgattctcccggacagcaggactttggcaaggataaatatgcgaagctgcccagtcagtgccgtaagtgtgaggtattgaaggcctgctggggcggttgtccaaaacatcgctttatgccgggcgataatggcgggccggggctgaactatttatgccctggttttcaccgttatttccgccacctgccgccgtacctgaaagcgatggccgacttgctggcgcgcggtcgccctgccagcgatattatgcaggcgcagctgatggtggtgaaaaagtaa

SEQ ID NO: 258465 - DNA, 1653 bp, Klebsiella pneumoniae; identical to SEQ ID NO: 190290

SEQ ID NO: 258466 - DNA, 1197 bp, Klebsiella pneumoniae
atgttgaaaattctcttactcttcgcgctgctgcttgccgggatcgttgttggcccgatgatcgccggtcatcagggctacgtcctgattcagaccgataactacaacattgaaaccagcgtcaccgggctagcgatcatcatgatcctcaccatggtggtgctgtttgccattgagtggctgctacggcgtattttccgcaccggcgcgcatacccgcggctggttcgtgggccgcaaacgtcgtcgcgcccgtaagcaaaccgagcaggcgctgctgaagctggcggaaggcgattatcagcaggttgagaagctgatggcgaaaaatgccgatcacgctgagcagccggttgtgaactacctgctggcggcagaagccgctcagcagcgaggggatgaagctcgcgccaaccagcatctggagcgcgccaccgagctcgccggcgacgacctgattcctgtcgaaatcacccgcgtacgtctgcagctggcgcgtaatgaaaaccacgccgcccgccacggtatcgacaagctgctggagatcacgccgcgtcatccggaggtcctgcgcctcgccgagcaggcctacattcgtaccggagcctggaattcgctgctggatatcattccgtcaatggcgaaagccgacgtcagcgatgaagagcaccgcgccgaactggaacagctggcgtggattggtctgatggataaaacgctggccgacggcggcagcgaaggtttgcgtggctggtggaaaaatcagaaccgtaaaacccgcagccaggtggcgctacaggtggcaatggcgaatcgccttatcgaaagcgacgaccatgataccgcgcagcagattattatcgatggtctgaaaaagcactacgacgaccgtctggtcatgccgatcccgcggctgaaaaccaataatccggaacagctggaaaaagtgctgcgtcagcagattaaaacggtcggcgaccgcccgctgctgtggagtacgctgggacaatcgctcatgcgccacggcgagtggcaggaagccagcattgcgttccgcgctgcgctcaagcagcgcccggatgcgtttgactacgcgtggctggccgataccctcgaccgcctgcatcagccggaagaagcggcgacgatgcgtcgcgacggcctgctgttaaccctgcaaaacaacccgcagcaataa

SEQ ID NO: 258467 - DNA, 1170 bp, Klebsiella pneumoniae
atgacggaacaacagaatcaatccgccgtggttgaagagaccagggaggccgtggacacgacgccacagccagaaaataacgtagaaaagaaaaacggcggcagtaaaaccagcctcgctctgagcgccatagctatcgctatcgccctcgccgctggcataggtctttatggcttgacgaagacccaggcgacccgccagagcgaagccagcgccgggctatccagccagatcgccgcgctgcaaaaagcgcaggaaaaccaaaaaagcgagcttgaaggcatcattaagcagcaggccgaccagctgacgcaagcgcagcgtcagcaggatgctctggcgaagaagctggaagaagtgcaggagaaggtcgcggtcatttccggcagcgacgcaaaaacctggctgctcgcgcaggctgatttcctcgtgaagctggccggacgtaagctgtggagcgatcaggacgtgacgaccgccgccgcgctgctgaaaagcgccgatgccagcctggccgacatgaacgatccaagtctgattagcgcccgtcgcgccatcaccgacgatatcgcctcgctctccgccgtaagtcaggtggactatgacggcatcattctgaaggttaaccagctcgccaaccagatcgataatttacgtctggcggacaataatgacgatgacaccccgatggattccgatagcgatgagctgtccagctccattagcgagtggcgggtaaacctgcaaaaaagctggcagaactttatggacagctttattaccgttcgccgccgagatgagaccgccgtgccgctgctggcaccaaaccaggacgtctacctgcgcgaaaacattcgctcgcgtctgctggtcgcggcgcaggccgttccgcgtcatcaggaagaaacctacaaacaggcgctggataacgtctcaacctgggttcgcgcctactacgatactgaagacgcgaccactaaagccttccttgaggatgtggataagctcagccagcaaagcatcaccatgaacgtaccagagagcctgcagagccaggcgctgcttgagaagctcatgcagacgcgcgttcgtaatctgatggcgcagccggctgaaacccaacccagcgcaccggctccagcctctgtccctgcgccacaaggagagtaa

SEQ ID NO: 258468 - DNA, 957 bp, Klebsiella pneumoniae
atgacggtaacaagcatgttagacaaagttttgagaattgccacacggcaaagcccgcttgcgctatggcaggcacattatgtgaaagagcgtctggaagcctgtcatccggggctttctgttgaactggtgccgatggtcacccgcggcgacgtgatccttgatacgccccttgcaaaagtgggcggcaaggggctctttgtgaaagagttagagctggcgatgctggaaggtcgcgccgatattgccgtccattccatgaaagacgtgccggtggaatttcccgcaggactggggctggtgaccatttgtgaacgggaagatccgcgcgatgcgtttgtctcgaatcactacgcttccattgatgaactgccgcacggcagcgtcgtaggcacatcaagtttacgccgccagtgtcagctggccgcagcgcggccggatctcaccatccgctccctgcgaggcaacgttggcacccgtttaagcaagctcgatagcggcgagtacgacgcgatcattcttgccgccgcagggcttaaacgtctgaatctggaagcgcgtattcgtcaaccgctgtcaccggagcaatctctgcccgccgtcggccagggcgctgtcggcattgagtgtcgccttgacgacgaatggaccaaagcgctgctggccccgctgaaccatacggaaacggccatacgcgtacgcgctgaacgggcgatgaacacccggcttgaaggcggttgccaggtgcctatcggcagctatgccgaactgatcgacggtgaactatggctgcgcgcgctggttggcgcgccggatggctcgcacacggtacgcggcgagcggcgcggtcgtccggaagatgccgaaacgctgggcgtctcccttgccgaagaactcctggataacggcgcgcgcgacattctcgccgtcgtttacgcaggagaagcgccacgatga

SEQ ID NO: 258469 - DNA, 987 bp, Klebsiella pneumoniae
atgaccattcacgcctggtctggcgagaaagagatctacagtaaaacgtattattccatcggcggcggttttatcgtcgatgaagaacatttcggcaaagagagcgccagcgaactcgccgttccgtatccgtttaaatccgctcaggagatgctgggctactgcaaacagaccggcatgtcgctctccggcatggtgatgcagaatgagctggcgctgcacagcaaaaaagagattgaagactatttcgccaatatctggcagaccatgcgcgcctgtatcgatcgcgggatgaataccgaaggcgtcctgcccggtccgctgcgcgttcctcgtcgcgcctcggcgctgcgacggatgctggttgccagcgataagctctctaacgacccgatgaacgtggtggactgggtcaatatgtttgcgctggcggtcaacgaagaaaacgccgccggtggccgggtggtaacggccccgaccaacggcgcctgcggcatcgttccggcggtgctggcctactatgaccactttatcgagcccgtcagtccggatatctatattcgttatttcctggcgtcaggggctatcggcacgctgtacaaaatgaacgcctccatttccggcgcggaagtgggctgtcagggcgaagtgggcgtggcctgctcgatggcggccgcgggcctggctgaaatccttggcgccagcccggagcaggtctgtgtggcggcggaaatcggcatggaacataacctgggactgacctgcgacccggtggcaggacaggtacaggttccgtgcattgaacgcaacgcgattgcctccgtcaaagcgattaacgccagccggatggcaatgcgccgcaccagcgagccgcgcgtctcgctggataaggtcattgagaccatgtatgaaaccggtaaagacatgaacgccaaataccgggaaacgtcgcgcggcggcctggctatcaaagttcagtgcgactaa

SEQ ID NO: 258470 - DNA, 969 bp, Klebsiella pneumoniae
gtgacgattgctattgtaataggcacacatggttgggctgcagaacagctgttaaaaacggcagaaatgctgctgggcgaacaggaaaacgttggctggatcgatttcgttcctggcgaaaacgcagaaacgttgattgagaagtacaacgcccagttggcaaagctggatacggctaaaggcgtgttatttctcgtcgatacatggggaggcagcccgtttaacgcggccagccgcattgtcgtcgataaagaacattatgaagtcatcgcgggcgtcaatatcccgatgctggtcgaaacgttgatggcgcgcgacgacaacccctcgtttgatgaactggtcgccctggcggtggaaaccggtcgtgaaggcgtgaaagcactgaaagcgaagccggtggaaaaggccgcccctgctccggttcaggctgcagcgccgaaagcggcagcgccattgaagccaatgggtccaaacgactacatggttattgggctggcgcgtatcgatgaccgtttaatccacggccaggtcgccactcgctggaccaaagaaactaacgtttcgcgcattatcgtcgtcagcgacgaagtggcggcggataccgtacgtaaaacgctgctgacccaggttgctcctccgggcgttaccgcccacgtagtagacgtggcgaagatgattcgcgtctataacaaccccaaatacgcaggcgagcgcattatgctgctgttcactaacccaacggacgttgaacgtgttgttgaaggcggtgtgaaaatcaccagcgtcaacatcggcggcatggctttccgtcagggcaaaacgcaggtgaataacgccatttcggtcgatgaaaaagatattgaagcgttcaagaagctgaacgcccgcggtatcgaactggaagcccgcaaagtttccaccgaccagaaactgaaaatgatggatctgatcggcaaggtgaaataa

SEQ ID NO: 258471 - DNA, 1014 bp, Klebsiella pneumoniae
atgcgcttccgccacttcttcgaagatctcggtcacgatgcggcccagaccccagctcttctcaacgtgaatgccgatgctttccgcaatggcttttgcagaatcgaagttatccagatcggccatctcggtttccggacggtatttcttgatcgcttcgcgcatggtcagcttttcaaacggcttgccgaaatcgaaggtctgatcgccgtaaggcacttcagtgtggcccagaacgtcctgcgccagggtgcggaacagggattcggtcagctcaatcagatctttgtagtccgcataggccatatagagttccatcatggtgaactctgggttatggcgaacggagatgccttcgttacggaagttacggttgatttcgaacacgcgctcgaagccgccgactaccagacgcttcaggtacagctccggcgcgatacgcaggtacatgtccagatcgagcgcgttgtgatgggtgataaacggccgcgcggaagcgccgccggggatcacctgcatcatcggggtttcaacttccataaagccgcggccgaccatgaactgacggatgcccgccaggatctgcgaacgcactttaaaggtgttgcgcgattcatcattggagatcaggtccagatagcgctgacgatagcgcgcttcctgatcctgcaggccgtggaatttgtccggcagcgggcgcagggctttggtcagcagacgcagttcggtgcagtggatagagagctcgccggtcttggttttgaacagcttaccgcgcgcggcaatgatgtcgccaaggtcccactttttgaactgctcgttgtagacgccttccgccagatcgtcacgggcgacgtacagctgaatgcggccgccaacatcctgcagcgtaacgaaggaggctttacccatgatacgacgggtcatcatgcggccagcaacggcgacttcaacattcagcgcttccagctcttcgttttctttagcatcgaagtcagcgtgcagttggtctga

SEQ ID NO: 258472 - DNA, 414 bp, Klebsiella pneumoniae
atgctcaaaccacagcacgctggtagcgccttcgctgaccacctgtttctcggcgttcggcagttcgcccaacagcggcgtcagcgcggcgcgcgcctggaaaccggcaacgcccagcagcacggattcatcatcggcggcgatcgtcaccttagagaacaccgcgtactttttcagttcggtcagctgcgcatcacgcaggctgcggcgttcaatccatgcaaaaccctcattgcggcggaaaacgcgcaggttgctccacatcttgcccttggcgtcacagtgcgcggcaagcagatgctgctcgtcggtcaggtggctgacgtcggcggtgatctgcccctgcagatatttttcgccatccggaccggtaatcgtcgccagcgcccagtcgtccagcgtcatcagcgttaa

SEQ ID NO: 258473 - DNA, 1491 bp, Klebsiella pneumoniae
atgtctcggcaatggttgacgctgatggcgattttgctggtttatattccggtggcgattgacgccaccgttctccacgtggccgcgcccacgctaagcgtagcgctgggcaccagcggcaacgagctactgtggattattgatatttattcgctggtcatggcaggcatggtgctgcctatgggcgcactgggcgataaaatcggctttaaacggctgctcctgcttggcagcggtatttttggctcggcgtcgctggcggcggcgttttccccaaccgcggagacgctgattgcctcccgcgcgctgctggcggtgggggcggcgatgatcgtcccggcgacccttgccggtatccgcagcaccttttcgcaagcgcaacagcgcaatatggcgctgggtctatgggcggcagtcggttccggcggcgcggcgtttggcccgctgattggcggcatgctgctggagcacttttactgggggtcggtattcctgatcaacgtgccgatcgtgctgttggtgatggcgattaacgccaaagtggtgccgcgccagcccgcgcggcgcgagcagccgctcaattttttccaggcgctgatcctcatcgccgccatcctgatgctggtgtttagcgccaagacggcgctcaaagggcaaatggcgctgtggttaaccgggctggtggcggtatcgggcgccgcgatgctgttctggttcgtgcgcaaacagctctcggcaacgcggccgatggtcgatatgcgtctgtttacccatcgcattattttaagcggggtgatgatggcgatgaccgcgctgattacgctggtggggtttgagctgctgatggcgcaggagctgcagtttgtgcatagcaaaacgccttttgaagccgggctgtttatgctgccggtgatggtggcaagcggtttcagcggaccgatcgccggcatgctggtgtcgcgtttggggctgcgcgaggtcgccaccggcggaatgctgctgagcgcgctgagcttcctcggcctgtcgatgaccgatttcagcacgcagcagtggcaggcatgggggctgatgacgctgctgggcttcagcgtcgccagcgcgctgctggcctccagctcggcgatcatggccgctgcgccgaaggagaaagcggcggcggcgggggccatcgagaccatggcctatgaactgggcgcgggcctgggcatcgctctgtttggcctgatcctgacccgcagctacacctcgtcaatcgtcctgccgcaggggatcgagggcgcggcggcggagcaggcgtcctcctccatcagcgaggcgattaagctggcgcagtcgctgcccgccattccggcgcaaagcctgcttgaggcggcgaaggcggcgtttattcactcgcacagtaccgtgctggcgacggctggcgtcctgcttctgctgctggcggcggggatctggcgaagcctggcaaaagcgcctgaactcaattaa

SEQ ID NO: 258474 - DNA, 1119 bp, Klebsiella pneumoniae
atgaccgcgaccattgaacgtattgaaagctggttggtagatatcccgaccattcggccgcataaactctccatgaccacgatgggctgtcagacgctggcgataatccgggttacccgctcggatggcatttgcgggattggcgaagcgaccaccatcggcggactcagctacggcgtggagagcccggaagccatcgtatcggcgataaaccactacctgacgccgttgctgaaaggtcaggcggccgataatttaaatgccctgaccagccgtatggacggcgcggttaaaggcaataccttcgccaaatcggcgattgaaaccgcgttgctggatgcgcagggtaaagcgctcggtctgccggtttcggcgctgcttggcggggcgctgacgacctcgctgccggttctctggacgctggccagcggcgacaccgagaaagatattgccgagggcgaaaagcttcttgcggagcgccgccatcaggcgtttaagctgaaaatcggcgcccgggcgctggagaccgacctgcgccacacgcgcgcgattgttgaagcgctgggcgaccgggccagcatccgcgtcgacgtgaatcaggcgtgggacgccaccgtagcggcaaaaggctgccgcgagctggcggcgatgggcgtggatttgattgaacagccggtcggcgctcaggataacgctgcgctggtgcgcctcagtcatcatattgacacggccattctggccgatgaagcggtggcgacccactacgatggatatcgcctggcgcagcaggggtttagcggcgcctatgcgctgaagattgccaaagcgggggggcccaatagcgtactggcgctggcgaaagttgcgcaagcagcgggaattgggctttacggcggcacgatgcttgagggaaccgttggcaccctggcctctctgcacgcctggtctacgctccccctgcagtggggcagcgagatgtttggcccgctgttgctgaaggacgatattgtcagcgtcccgctcacctttgccgagggcgaggtgacgctgccgcaaacgccgggtcttggcgttgaactggatgaagacaagctgcgcttctatagccgcaaaggataa

SEQ ID NO: 258475 - DNA, 135 bp, Klebsiella pneumoniae
atggtagggctgcaaaattggcattttaaagaacttttgtctgccgttaagagcaaaaaggaatataagatgctttttagccatccggagggaaaggttgttagccgcctgggcgtgtcgatttccagaaaatag

SEQ ID NO: 258476 - DNA, 645 bp, Klebsiella pneumoniae
atgccagttccagaacgtcccaaaatttaccacatcctgcatatcgatcggctacgttctgtcattgctgatgggctactctgcgatgaacaaatttcgcagcgtaacaatgcaggtactgtaattggcatgagcagcatcaagcagcggcgtcttacagaattaactctcaattgttatcctgacttatatatcgggcaatgtgtcccgttttacttctgtcctcgctcggttatgctctacttgatctatcgaggtaatcaccaggatcttggctatcatggtggacaggggcctgttttgcacctggaagccgatttatatacagtcatggactgggttgaacaaaatcggcaacgctgggcattcacgttgtccaatgctggggccgtttatgttgagtcgcattgccaaagggatcagcttgaccaactgaactgggaagcaattcatacatcgaggtggagtggcaacggtctgatggagccaaaacaggcggaatttctggttgaacgtcatttcccctggcatctggttgagcgtattggtgtacactcacgaaccatttaccaacaggtagccaatatccttccccctgatgggcattgtccgccgattgaagtgaagggagaatggtattattga

SEQ ID NO: 258477 - DNA, 873 bp, Klebsiella pneumoniae
atgttcggtgcggaactggttccggcgctggcgtttctggtcctgatgttttttgttcccgaatcgccgcgctggctcatgaaggccggtaagccggagcgtgcccgagccgcgctggaacgcattggttccgccgactatgccgacagaatattacgcgacatcgcgcacacgctggaaaaagataaccataaagtatcctatggcgcactgctggctccgcaggttaaaccgatcgttatcattggcatggttctcgccgtcttccagcagtggtgcggaattaacgtcatctttaactacgcacaggagatttttgcctcagcgggcttcgatattaacagcacgcttaaatcgatcgtcgcgacgggggttgtaaacctggtatttaccctcgccgcgctgccgctggtggataaaatcggccgccgtaaactgatgctgcttggcgcttcaggcttaacgctgatctatgtgctgattgccggcgcttacgccatgggaattatgggctggccggtactgttgctggtgctggcggctattgctatttacgccttgaccctggcgccggtcacctgggtgctactggcggaaatcttccccaaccgcgttcgcggactcgcgatgtctttaggcaccctggcgctatggattgcctgtttcttgttaacctacactttcccgctgcttaatgccgggctgggcgcggcgggcagcttcctgctgtatggcgtcatttgcgctgccggctatctctatattctgcgcaacgtgccggaaacgaaaggggtaactctcgaagccctggaagaacagctggcgcaacgccatacgggcgttaatgcggcgaagcaggagcagacgcgctaa

SEQ ID NO: 258478 - DNA, 603 bp, Klebsiella pneumoniae
atgaataactctctcctcccgccatcctcaacggcctggatgcgcagcactgaggccgctaccgccagattatcggcgatcacggtagcgctgcgcaccctgtggacaccgaccacctgcccggtggacttgctgccgtatctggcctgggcgctgtcggtagaccggtgggacaggagctggtcagcagagaagaaaataacagcaatccagcaatcctactggctgcatcgcagaaaggggacccgtgcagcagtacgccgcgtgatcgaagatatgggtttttctgccacattcgcggagtggttcgacgtcggcgaccaaccgggcacgttccggctcgaagtggacgttaacgaagttgggctgacaccgaagaccctggacgagctaaaccgcctgatcggtgatgcaaagccagtcagtcggcatctggcgcaaatgactattgcaaccaggtctcaggggagcgcatgggccggagcggtatccgttgacggggaaagcgtaacggtttacccgccggaatatacgccagatgacagcatttattacgacggcgaagcgcatttcgacggcaattattatttcagaggtaactaa

SEQ ID NO: 258479 - DNA, 1035 bp, Klebsiella pneumoniae
atggcttactcagtacagaagtcgcgcctggcgaaggttgcgggtgtttcgctggttctactcctcgcggcctgtagttctgactcgcgctataagcgtcaggtgagcggcgacgaggcctatttgcaggctacgccgcttagtgaacttcacgcgccagcagggatgatcctgccggttcaggtgggtgattataatattccggttgcaaccagcaccggtaacacaggcaaagccctggacatccgtccgccggcccagcctctggcgctggtcagcggcgcgcgtacgcagtttaacggtgataccgcaacgctgatggtggaaaacggtcgcagcggttcgctgtgggcgcaggtggcaagcatcgtgcagtcgaaaaactacactatcgctaaacgcgacgatgccagccagacgctgaataccgactgggtcgaatggaatcgcctcgatgaagaccagcagtaccgtggtcgctatcaaatctcagttaagcagcagggctatcagcaggcggtgatcgtgaagctggtgaatctggagcaggcgggtaaacctgttgccgatccggcttcgctgcagcgctacagtaccgccatgctgaacgtcatttccgaaggtctggatctgaacgccaccagcgcgcagaacgccgcgcagaaaaatgccggggcgaccttcgacgtgcagagcggcgctgatgataccggcctgccgatgctgatcgttcgcgcgccgtttaacctggtgtggcaacgcctgccgggcgcgctggaaaaagtgggtatgaaggtcaccgatagctctcgttctcagggcagcttctccgtcacctacaaaccgctttccgacagcggctggagcgatctgggcgctcgcgacccgcagctggtgtccggcgattataaactgcaggtcggggacctcgataaccgcagcagtctgcagttcatcgacccaaaaggtcatactctgacgcagtcgcaaaacgatgccctggttgccgtattccaggccgcattaagtaagtaa

SEQ ID NO: 258480 - DNA, 2001 bp, Klebsiella pneumoniae
atggatgaactgcgtcacctgacggcgcagatggcgcgcgaaggtattcgtcgtctgctggttctcagcggcgacgatgcctggaccctgcgtcaggcgcaaacagtacgtacggagctggccgcagacggactgtgggtcggtccgcggccgatgcctgaaccgtacgcctcgcctgctgccctgaaatcgctactgggccgcgaatttcagcacgcctttttcgatgcccgcgagggttttgacgtcgcggcgtttgccgcgttagccggtacgctgcgcgccgggagctggctggtattactcacgcccgacttcgcgcaatggccggctcgtcctgatgcggattctctgcgctggagcgacgctcccgaccccatctctacgccgaattttgtttatcgtttttgccaacagagtagtgcggataacgcgtccattctctggcggcagggcgaggagtgcgtggtgccggcgtttgccgcgcgtccgcgatggcgtcccgccgatggtcatccgcaggcggagcaggccgccgtgcttgccgaactgaccggtttccctcccggtattgcggcgctgaccgccgaacgcggacgaggaaagtccgctctcgctggaatgcttattcgccagctggcaggcgatgccatcgtcacggcaccggcgcgcgcggcgacggaggtcatggcggctttcgccggtgaggatttccgctttatggcccccgacgcattgctggcttccggctgtagcgccggatggctgattgttgacgaggccgccgctatccccgggccgctgctgcgccagcttgtctcccgcttcccaaggacgctattgaccaccaccgtgcaggggtacgaagggaccgggcgcggctttttgcttaagttttgcgccagctttgcgcatctgcggcagtttagcctgacggcgcccatccgttgggcgagcggctgtccgctggaggcggcgattgcgcggctgctgctgttcaacgacgagacctttcagcacgcgccaggcggcgatatcgcgctggaaagcgtcagccagcagagctggcggcgacagcctgcgttaccagaagcgatgtatcagctgctctccggcgcccactatcgcacgtcgccgctggacctgcggcgcatgatggatgcgccggggcagcattttacctgcgcccgcagcggcaaccgcatcgccggggcgctgtggctggtggaggagggcggtcttgagccatcccttagccaggcggtgtgggccggctaccgccgtccgcgcggtaatctggtggcgcagtcgctggcggcgcacggcggcagcccgctagcggccacgctgacagggctgcgtatcagccgtattgccgtgcatccggctcgccagcgcgaagggctggggcagcggctggtggcccaggcggcgtcgcaggctgcggagcgggattatctgtcggtgagtttcggctacacgcctgagctgtggcgcttctggcaacgctgcggttttacgctggtgcggctgggcacccatcgggaagccagcagcggctgttataccgcgatggcgctctatcctctcagcgaagcgggccagcggctggcaagcgaagagtccgcgcgtctgctgcgcgatgagttctggctgcgcgactggcgagatgagccttcgccgttgccggagcggaaagcgactattcttagtgaagaggactggctggaagtggcgggttttgcttttgcccatcgtccgctgctgacctcggcgggtagcctcaatcgcctgcttatacgggtggatctgccgcttccggcgctgcgggcccgcctgcagcagcaggatgagaccacggtttgccgaacgctaggtttatccggacggaaagcgcttctggtcaggctgcgcgaagaagcggcgcaggcgctatcaggcgtgaatgcggatcgtgccaacgccctgcgccagcaggttcaaatgctgcaatttttttaa

SEQ ID NO: 258481 - DNA, 942 bp, Klebsiella pneumoniae
atgggtaaggcggttatagcaattcacggcggggccggggcgattagccgcgcgcagatgacgccggcgcgcgagcgggagtacgtaacggcgctgtcggcgattgtcgatagcggacaaaaaatgctggcggccggggccagcgcgctggatgcggtaaccgaagcggtccggctgctggaggagtgcccgttatttaacgccggtattggctcggtatttacccgcgatagccgccatgaactcgatgcctgcgtgatggatggctgccgcttgcaggccggcgccgtggcgggagttcagcatttacgtaatccggtgctggcggcgcgcctggtgctggaacagagcccgcatgtgctgttgattggcgagggggcggaagcgtttgccgctgcccacggtatggaacgcgtcgataacagcctgttttcgacccccgagcgcttgctgcagctgcgtcaggcgcaggagggcggcgatatcgtgctcgaccaccacgccgcgccgctggatgagcggcacaaaatgggcaccgtcggcgcggttgcgctggatctgacgggtaacctcgcggcggcgacatcaaccggcggaatgaccaataagctgccgggacgcgtcggcgatagcccgctgccgggggcgggctgctatgccaataacgccagcgtcgccgtttcctgtaccggcaccggcgaagtgtttatgcgtacgctggcggcttacgatatttcggcgctggtggagtacagccatctcagcctgcaggaggcctgcgaaagggtggtgatggagaaacttcccgcgctgggcggcagcggcggcctgatctccgtcgaccgtgaaggcaacgtggcgctgccgtttaatagtgaaggcatgtaccgggcctggtgttatgcgggtgatacgcccacgattggtatttatcgcgaataa

SEQ ID NO: 258482 - DNA, 495 bp, Klebsiella pneumoniae
gtgtaccgccaggcggttggtatcgtaaatttgcccgtcggccagcggctggcccggcagctggagctcatcgccggtggagaacaccgccacccgcactttacgcaccacgtcaacctcggcaatgcccagcgaggcgatgaccggcagctcggcggcggtcaggcgggttcccgcggggaagacgaccgcgccatgagcgatatcttcgccgagacgacggatattctgcccgtttttcaccggggcaataaagcggatcccatcatcggtttgttcggtctgctcctgcatgaccaccgcgtcgcagccttccggtaccggcgcgccggtcataatgcggatacaggcgcccgcgggccagacgccgttatagggttgaccggcgaaggccttgcccgccaccggcagcgctgcgccgtcggcgagatccgccaggcgtacggcgtagccgtccatcgccgagttatcaaaaccgggaacgttgagcggtga

SEQ ID NO: 258483 - DNA, 300 bp, Klebsiella pneumoniae
atggcgacccttaaagaattaatggccaaacagagcccggaaagccaggcgcgtattgctgaaaaagtcgaagaaatgcgccaggctatcgcattaagtatgttaagggaagaactcaatatgtctcaggcagagctggctaaggcaatgggcgttaaacaacccaccattgcaaaaatggaacaggctgataacgacccgcgtttgtcaacgctgaagcgttatgttgtagcgctcgggggggaactcagtattgatgttaagctgccaaccggtaagcgaatcgcattccatctttga

SEQ ID NO: 258484 - DNA, 342 bp, Klebsiella pneumoniae
atgtgggatgttgaaacaacggaggttttcgacaagtggtttgaggcgcagatcgaagcgcttaaagaggatatgctcgccgctatggtgatcttatccgagtatggcccccaactcggaaggccgtttgcggatacagtaaacgattctgctttttcgaatatgaaagagctgcgcgttcagcatcgaggtagcccgatcagagctttctttgtatttgacccttctcgtcgcggcatcgtgttatgcgccggagataaaacagggttaaatgaaaagagattctataaagatatgatcaagcttgcagatgctgagtaccgtaagcaccttaatcagtaa

SEQ ID NO: 258485 - DNA, 453 bp, Klebsiella pneumoniae
atgatctggttaggactggccacgctgatagtggtatttgttgtgggatttcgggtgcttacctctgattcacgccgtgcgattcgccgtctgagcgaacgattaggcattacgccggtaccgctggaatcgatgatcgatcagctaggaaaaaccgccggtaacgagtatttacgctacctggaacggcctaatgaggcgcatttgcaaaatgccgcgcaggtgctgctgatctggcaggtcgctatcgtcgatggcagcgagcagaacctgcactactggtaccggttgatgaaaaagtcccgcctcggggcgccgattaccgaagcgcaaatccgcctcgcgcaaggtttccttcgcgagctggagccggaagtgagcgagctgcacgctttgcaggagcgctataacgcgctgtttttgccggaggatggcgtccactggctgcactga

SEQ ID NO: 258486 - DNA, 1392 bp, Klebsiella pneumoniae
atgctggccttcttaaaccaggtgcgcaagccaaccctggacctgccgctcgaagcgcggcgcaaaatgtggttcaaaccgttcatgcagtcgtatctggtggttttcatcggctatctgaccatgtacctgatccgcaaaaactttaatatcgcgcagaacgacatgatctccacctacgggttgagcatgacgcagctggggatgatcggcctcggcttttctatcacctacggtgtggggaaaacgctggtctcctactacgcagacggtaagaacactaagcagttcttgccgtttatgctgattctctcggccatctgtatgctcggcttcagcgccagcatgggcgcggggtcgaccagcctgttcctgatgatcgccttctacgctctgagcggcttcttccagagcaccggcggctcgtgcagctattcgaccattaccaagtggacgcctcgccgtaagcgcggcaccttcctcggcttctggaatatctcccacaacctcggcggcgccggcgcggcgggcgtggcgctgtttggcgccaactacctgttcgacggccacgtgattggcatgtttatcttcccgtcgattattgcgttaatcgtcggttttatcggcctgcgttttggtagcgactccccggaatcctacggcctcggtaacgccgaagagctgtttggcgaagagatcagcgaagaggataaagagacggaagagaacgccatgaccaaatggcagatcttcgtcgaatatgtgctgaagaataaagtcatctggctgctgtgcttctccaacatcttcctgtacgtggtgcgcatcggtatcgaccagtggtccaccgtttacgctttccaggagctgaagctctccaaagaggtggcgattcagggctttaccctgtttgaagtgggcgcgctggtcggcacgctgctgtggggctggctgtcggatctggcaaacggtcgccgcgcgctggtggcctgcgttgcgctggcgctgattatcgccacgctgggtgtttatcagcatgccagcaatcaatacgtttatctcgcatcgctgtttgcgctgggtttcctggtgtttggcccgcagctgctgatcggcgtcgccgcggtaggcttcgtgccgaaaaaggcgattggcgctgccgacgggatcaagggcaccttcgcctatctgatcggcgatagcttcgccaagctgggactcgggatgattgccgacggtacgccgattttcggcctcaccggctgggcgggcacctttgcggcgctggatgcggcggcaattggctgcatctgtctgatggccatcgttgcggtgtttgaagaacgtaaaatccgccgccagaaaaagacacaaactttgcagactgcctga

SEQ ID NO: 258487 - DNA, 1320 bp, Klebsiella pneumoniae
atgtttgcctttttaaaatccccgcccgatgctccgccgattaccgacaaacaggcgctggacgagcgctaccgctactggcgtcggcatattctgctgaccatctggctgggctatgcgctgttttacttcacccgcaaaagctttaacgcggcggtgccggaaatcctcgccagcaacgttttgacccgcagcgatatcggtctgctggcgacgctgttctacatcacctatgggctatcgaaatttttctccggtatcgtcagcgatcgctctaacgcccgctattttatgggcatcggcctggtcgctaccggcgtagtgaatattctgtttggtttttccacttacctgtgggccttcgcgctgctgtgggcgctgaacgccttcttccagggctggggctcgccggtatgcgcccgcctgctgacggcctggtattcgcgtaccgagcgcggcggctggtgggcgctatggaacacggcgcataacgtcggcggggcgctgatcccaatggtggttggcgcggcggcgctgcactacggctggcgaacggggatgatgattgccgggacgctggcgatcctcgccgggctgtttctctgctggcggctgcgcgaccggccgcaggcggtcgggctgcccgcagtgggcgactggcggcatgatgagctggagattgcccagcagcaggagggcgctggcctgacccgcaaagagatcctcaccaaatacgtgctgctgaatccctatatctggctgctctcgctgtgctacgtactggtatacgtggtgcgcgcggcgattaacgactggggcaacctgtatatgtcggaaacgctcggcgtcgatctggtgacggcgaattcggcggtcaccatgttcgaagtgggcggttttatcggcgcgctggtggcgggctggggctcggataaactcttcaacggcaaccgcgggccgatgaacctgattttcgccgccgggattttgttgtcagttggcgggctgtggctgatgccgttcgccagctacgtgatgcaggcggcctgcttctttaccgccggctttttcgtttttggcccacagatgctgatcggcatggcggcggcggagtgctcgcacaaagaggcggcgggggcggcaaccggttttgttggcctgtttgcctatcttggcgcatcgctctccggctggccgctggcgcaggtgatggagatctggcactggagcggatttttcgtggtcatcgccattgccgccggtatttccgccctgctgctgctgccgtttttaaacgcccaggcgccgcgagaagcgtga

SEQ ID NO: 258488 - DNA, 1503 bp, Klebsiella pneumoniae
atgaaagcctttttctcgcggctgctctcggttgtcggctgttgctttatcttttccgccgcgtggttttgcctgtggagcatcagcctgcacctggtggagcgccccgatcttgcggtgctgcttttcccctttggcctgcggcttggcctgatgctgcagtgcccgcgcggctactggccggttctgctgggcgcggagtggctgctgatcctctggctggcgcaggaagtggcgctggcgcacccgataatattgatgaccggaagcctcttgaccctgctgccggtggcgctgatttcccgctatcgccagcagcgcgactggctcaccctgctgcgtcaggggggcgcgctgatcgccgccgcgctgctccagtcgctgccgtggctgctggagggcaaagagggactgaacgcgctgctgctgaccctgaccggcggcctgacgctggcgcccacctgtctggttatctggcactatctcaccagcaccgtctggcggccgctggggccatcgctggtctcgcagccggtgaactggcgcgggcggcatcttatctggtacctgctgctgttcagcgtcagcctctggctccagctggggctgcccgccgagctctcacgatttacgcccttctgcctggcgctgccgattatcgctctggcctggcactacggctggcagggagcgctgatcgcgaccctgatgaacgccatcgcgctgatcgccagccagacctggcacgatcatccggtggatttactgctttcgctgctggcgcaaagcttgaccggcctgctgctgggcgccggaatacagcggctgcgcgagctgaatcagtcgctgcaaaaggagctggtgcgtaaccagcggctggcggaacgcctgctggaaaccgaggagagcgtgcgccgcgaagtggctcgcgagctgcacgatgatatcggccagaccattaccgccatccgcacccaggcggggatcgtccagcggctggcgccgaatagcgccagcgtcaggcagagcggccagctgattgagcagctttcgctcggcgtctacgattccgtgcgccgcctgctgggccgcctgcgcccgcgccagctggacgacctgacgcttgagcaggcggtgcgctcgctgatgcgcgaaatggagctggaggatcgcggtatggtcagccatctggcgtggcgtatcgatgagtcgctgctgagcgaaaaccagcgcgtcactctgttccgcgtctgccaggaggggctgaataatatcgtcaaacacgccagcgctaaagccgtcacgctgcaaggctggcagcaggagcagcggctgatgctggtgatcgaggacgacggctgcggcctgccaccgggctccggtcagcagggctttggcctcaccggcatgcgcgagcgcgtcaccgccctgggcggcaccctgaccatctcctgcacccacggcactcgcgtttgcgtcagcctgccgctgcgctacgcttga

SEQ ID NO: 258489 - DNA, 579 bp, Klebsiella pneumoniae; identical to SEQ ID NO: 187155

SEQ ID NO: 258490 - DNA, 309 bp, Klebsiella pneumoniae; identical to SEQ ID NO: 188766

SEQ ID NO: 258491 - DNA, 579 bp, Klebsiella pneumoniae; identical to SEQ ID NO: 187000

SEQ ID NO: 258492 - DNA, 546 bp, Klebsiella pneumoniae; identical to SEQ ID NO: 186999

SEQ ID NO: 258493 - DNA, 405 bp, Klebsiella pneumoniae; identical to SEQ ID NO: 186998

SEQ ID NO: 258494 - DNA, 570 bp, Klebsiella pneumoniae
gtgctgctggtaacgatccatcaccggctgctgcacctgcttgttagtcaccagagtaatttccggacgtttgtccataccgataccggtggcaacaacggttacgcgcagttcgtcgttcatatccgggtccagagaagtaccgataaccacggtggcgttatccgaagcaaatgcgcggatagtattacccacggtctcgaactcatccagacgcagatcgaagcccgcagtgatgttgaccagaacgccacgcgcgccggacagatcgatatcttccagcagcggagaagaaatcgccatttcagccgcttcttccgcacggtcttcgccgctcgccacgccggagcccatcatggcgtagcccatttcagacatcacggtacgcacgtccgcaaagtcgacgttcatcaggccaggacgggtgatcagttcagcgataccctgcaccgcgcctttcagcacatcgtttgcggcgccgaaggcgtcaagcagagaaatgccgcggcccagtactttcagcagcttgtcgttcgggatggtgatcagcgagtcgacgtgcttggatag

SEQ ID NO: 258495 - DNA, 204 bp, Klebsiella pneumoniae
atgaacttcatcgatcaaatagaccttgaagcggccgcgggccggcgcgtactggacgttatccagcagatcgcgggtatcttcgactttggtacgcgaggcggcatcgatctctatcagatcgacaaagcgcccctgttctatttcacggcagttatcgcagacgccgcaaggcgtggcggtgatgccggtttcgcagtttaa

SEQ ID NO: 258496 - DNA, 450 bp, Klebsiella pneumoniae
atggatagaaaatccccatctttatacgaaattctcactggaaatttcactggtgacctttctcttgacgttgtaaatgaggaagatcaggtcattctatcagtactagataacatccaacgtattttgaacgcccgggccggtaccgtatcccatctaccagattatggtttgccggatatgaccaaaatcctccagggtatgccgggtacagcccatgagctgatgggaaccctgtcagctgtactgctcaaatatgaaccacggttgcagaagattgacgtgattttgctcgaacaggatattcccggcgaactgcgctatgccattgacgcggaactgaaaggtatcgggctggtgcgctacggcaccgaatttatgcctgagggcagggtgcttatccgccacctgaaacagcagcagtacctggaagtccgttcctccctctag

SEQ ID NO: 258497 - DNA, 1341 bp, Klebsiella pneumoniae
atgactactcctcctgaatgccacctcaaaaccggcggcgacccgcgcacgcttgcggattacgcgcgccttcgcgatgaaatgaataaactgacccatccggcgcgcccggacgtcaactggcagcacgcggaaacactctgcctgtcgctgtttgagcacaacggcgtggaactgcagactgccgcctggtatacgcttgcccgaacccatcaggccgggctaaacgggctgaatgaggggctgacgatcctggtcgcgctggtctcccggcagtggggcaatgtgtggccgcagcagacggcggtgcgaatgaaaatactcagttcgctcagtaaacggctgcagctggcgatgcgtactctgccgctgacctctatagacctgagacagctttaccaggccgaagcgcacctggcggcgctggatgatgtactgcagcgcctggaactcaaacatgtcagccagcttgacgccctgtataccctgatgcacaacacggcggtgcggctggaagacagcgaaaataaagaggagaccgcgctgcaaacgggcgccgctatgcctgaaccttcctgcgccagcctccctgaaccgaccgtgcagatgaaatgggtctatgtcgccgagccggcaccgcggccggaagctgacgcggtaacggcattcccgccgtccgcgaagccctggaaaccttttgccgccgggatgctgaccatgctagcgctggccggagccgcggcgggaggatggctggcaatgcgtccgtccgaaacggcgctgcggcagtttaccgccatgcttaccccattacccgcggcgctttctgccgagcagctacggtcgctgcgacaacacacccctacgccggagacgggtataaaacaaacgcagcagcggctggcgcagcttttacagctaaaaccggactgggcgctggattatggcgaccatctggcgcagcaggcgctgacattatggccggaacaggcgaaaccgctggcgcgacaatggcaacagcaggtcagcgccgccgcgcttcccgcggagaatctcaacggctggcaccagggaatgacgcagctacagcagttgacgaaccggcttaacgcgctggatgagcagaagggggggtatatcacggtgagtgagctgaagtcggcggtgtttgccataacgcagtcgttcagccgggccgttccggcggaagagcagctgcggcagctgtcagaacagccgcacaatcagcctgggacttcggcgcagcagagccagacggaacagcacctgcagcaactgattgcccgctacgccgcgttgaaacaaaaaacggcggaataa

SEQ ID NO: 258498 - DNA, 1680 bp, Klebsiella pneumoniae
atgtctcttattcaaaaccctattttacgtgggtttaatgccgaccccagtattatccgcgtgaaggatacctactatatcgccaactcgacgttcgagtggttcccgggcgttcgtttacatgagtcaaaagacctggagcactggaatcttctcccttcgccattgtcaacaaccaccctgctgaatatgaaaggtaatccttcatcaggcgggatttgggcgccggcgctctcttatgcggatggtcaattttggttggtgtataccgacgtcaaagtcaccgaaggcgcctttaaagacatgaccaactatctgaccaccgcaaccgatattcgcggcccatggacggatcccatcaagctcaacggcgtaggttttgatgcttcacttttccatgacgatgatgggcgtaaatatatcgtgcagcaaacctgggatcatcgtgagtatcgccatccctttgacggcatcaccttaaccgaactggataccaggaccctgaaattaagaccagaaaccgcgcgtactatttaccgcggcactgccgttgcgctcgttgagggcccgcatctgtataaactgaacggctattattatctttttgccgcccagggcggcaccgtatttacgcaccaggaagtggttgcgcgttctaaaaccttagacgccaacagctttgaaaccgagcctggtgaggtcttcttaaccaacgtcgatacgccagacagctatatccaaaagcaaggacacggtgccttagtttctaccccaggtggggagtggtactacgcctcgctctgcgcgcgtccgtggaatcgcccgggtgagtcggtctacgatcctcgcggttggtcaacgctgggcagagaaacggctattcaaaaggtgtattgggatgaagatggctggccgcgtattgaaggaggccatggcggaaaaacgtttgttgagggtccaaaagatgccatttataccgaaagcccggaagaccatagccagcacgacgactttacaacggcgacgctcaatcgcaactggaataccctgcgggtgccgttcacagaaaaaatggggaccacaggcgatggcaagctaacgttaattggccagggctctttagcgaatacccacgacctgtcgctgattgcccgccgctggcaggctttctattttgacgcgaaagttaaagtcaaatttaatccatttaactaccagcaaatggcaggattaacaaactactataacgatcgtcactggagctttgtgttcattacctggaatgaaattaacggcaaggtcattgaattaggtgagaataaccgcgggaaatatacatcatatttaaaagatgacgctatcaaggtcccggaccatgttgaagaagtctggttccgcacgaaggtcaggaaagaaacgtatagctatgaatatagctttgatggggttgaattcactgaaatccccgtcaggttagatgccgcgatcctttcggatgattatgttctgcaaagctacggcgggttctttaccggggcgtttgttggccttgcggcagtcgactactccggttatgacgccagcgctgagttttatcatttcgattaccaggagctgggcgatacgttaatcgccagtgacgcttacagctgggaagccagtgagttacgtggttattag

SEQ ID NO: 258499 - DNA, 1455 bp, Klebsiella pneumoniae
atgagtaaaaacataatgcaaagccgccatgacgaatatcataaattaacgcgcggggaacgtattggttatggaatgggcgacttcgctcaaaacctggtttttggcacaataggcggctttctggctcttcacatgctgacggtaaataccatcagcacggcaacggctgggtttatatttctttttgtccgaatcatcaatgtcttttgggatccgatggtcggcacgtatgttgacaaaagaacgtcaaaagcaggtaaataccgtccctggctgataagagccggcgtgccgctggtgatcctttccgcgttactttttgctcccattcctggcgtccgaggttcagtcccttttgcttttatcgtctatttggctctggatttagtttattcggtggtgaatattccttatggttctcttaacgcgtccttgacccgggatccggaatcgattgataaactcaccagtacccgcatgatgctggccaatagcgcgaaccttcttgtctataccctgttcccgatgtttgtacaaatggcctcgccaaaagatcgtagccttaaggacaccggtttttttggcattgagctcaatctgggaaactataccgatccatcagcgaactacgcctggttcggcgtttactccgtttatatgctaatcggcgctgcggcgcttttcatctgctataaattcaccaaagaacgcgttgttgcgacggcagaacagactgccaacgtcaaaacgaccgatctgttccttgaacttaaacataatcgtccgctggttattctcgggctgtttttcatgctggcgtttaccttcatgtttttcatgaacacggttaacggctttttcaatcagtacgttgtgggtcattcagagtggatgggggccgtcggccttgtcgcctcgattccgggcattgccttccctattttctggcccaaactcaagaaaatttttggtaaaaaaggattcttccacatttttctggccatgtttattgtcggtgaattactgacttacgtctggtcacgggagggtatgcacgatgcgctttggcttgcttacatcgcgaccttcattaaacagtggggcttaacctcggcgaccggctttatgtgggcgctggttcccgaagtcatcgcgtacggcgaattaaaatctggcaaacggaatgcggcgatcattaacgcgattatggggctgtttttcaagattggttttactatcggcggcgctatcccgctgtggctgctggccgtctatggattcagtgaaaccggcgcccagcaaagcgccagcgctatcgacgggatcattatgaccgcggtgtggatccctatcgcgttagccattatatcgatgatcatcattcaggtttatcccatctctgacaaaaacgttaacgatatcaaccgtcagcttgatgagatacgcgtgtag

SEQ ID NO: 258500 - DNA, 453 bp, Klebsiella pneumoniae
atgcataaatccatattgcaggatgtaaagctctacatggccttcgacagtgaagaccattacatcatggcgaacaaagctgccggtagcgaccaatggttctgtactgactgccgttgccctttgaagctgtgtaacgatacaactggagaagaagtctggtttgaacatgctcccgatgatgagacaacgaaagcacaggcgacgggatgcggctatctgttagctgcaatcagaaaacgggttttcatgatgcgcttacgcacgatgattaacgaactggatgcgctggtagcaacgagatactggttttgtgtgtggtgccagtcgcactatcaaggggagaaacactgtaagacctgtaacacggggatttacagtatcagcaggggggattgggcttggaactatggtcagaaaggaaacacgctggatattgatactcccctgtaa

SEQ ID NO: 258501 - DNA, 600 bp, Klebsiella pneumoniae
atgactccaatgcaacgccgtagacaaaatgccgctatgtcagaagtcgcggttgccacgcataaacgatacctcggacgccccgaattacttaccggcattcagtctgcctggattaaatccctgctcactgtttggggggaaagcctccgaggagccactttcccccgcaagcctacaacgcattcgtgctggtgggccgtcaaaggggtcagatggtcagacaaagcacttgagcgtttcactgctgcgcttgaacaggcaaggagtgaggggtttcgcgggcctaatgccctgaagagggcacagataattttatggccaaagccagagactagcgtcatagacagcgctatcagtgatgatgatgctgattttgtggagaaatgtgtgctcgatgcctttgatgttaacgaccctgtttatattgttgggctgagctattacacgacgagaaaaaaaatatctgatattaccagggagcttcagaagatagccccatggctgacggcagaccaggcaagagagcgcgtgaaatggtgccttaagatatttcagggaagggcatttctatctgcacgcaaaaacctgaggagttag

SEQ ID NO: 258502 - DNA, 141 bp, Klebsiella pneumoniae
atgaatcatctcaccatagagaacatccgctaccgctggatgaagcttcgcctttgccgtcatcgcggcactgtattagttgactaccgcatcctcaaaaactttatacgcacctgtcagatccggggagagacagcatga

SEQ ID NO: 258503 - DNA, 642 bp, Klebsiella pneumoniae
atgacatatcaactcatttacgttgatccaccctggcaatacggcaataaaattagcaatggcgctgcggttaaccactacgacaccatgagccttgtcgaacttaagcgcctccctgtctggaatctggctgctgataatgccgttcttgccatgtggtacaccggcacacataccgaggaagcgatcgagctggcagaggcctggggttttcgaattcgcaccatgaagggttttacatgggtaaagcttaaccagcacgccgaacggcgattcaataaggcgctaactgaaggtgagttggtggatttcaatgatctgctgtcgatgttgaatagcgaaacccgtatgaatggaggcaaccacacgcgggccaatactgaagatctgctaatagccacctgtggcgccgggttggtaagagcgagcgcatctatcaagcaggtggtttattcctgcctgggtgagcacagcgagaaaccctgggaggttcgccgtcggctggaattgctgtacggcgacgttaagcgcgtggaattgtttgctcgcgaatcttggcccggctgggaccgctggggaaatcagtgcgagagttctgttgaaatgcattcgggaaaatttatcaccagggaggggatatga

SEQ ID NO: 258504 - DNA, 1053 bp, Klebsiella pneumoniae
atgacgccagcagcttactacaacgaaatcgacccatttgcagcgcagtggctgcgtaacctcatagccgccgagcatatcgccccgggcgaagttgacgaacggagtattgaagatgtcacacctgacgacctcagaggatttacccagtgccactttttcgccggtatcggcgtctggtcccattccctccgcctcgccggatggcctgacgatcgcccggtctggactggttcctgcccgtgccagcctttcagcgcggcaggcaaaggcgatgggtttgctgacgagcggcacctttggccccacttcttccatctcatcagcgagcgcagacctcagcatgtctttggcgaacaggttgctagcggtaacgcaaattcttggttcgaccttgtacaagcagacctggaaggagtgggatacgccttcgggcttgtgccgtttacgtcagcgagcatcggtgcgccgcacatcagagagcgagcttactgggtggcccacgccggtagccaatacgaatccacagccggagacgaagcgcggattgcaacatgtctccggagcggcacgattaacgggctggcagacaccagttgcgaacgactcgaccggatcaacccattgttacagtgggaagaatccagacggaacgccgaagatatgcctgaaacttcccggctccgtgttgctggcgggatgggtaactccaacctcgcgggactggaaggatacatcagggatgacagctcagcgggacggcaaagagagactggatcaactccctcgacaggcttacacggcaggccccttgaggttaacggtttttggcgagatgcggactggctcttttgtcgagatgggcaatggcgtccagttgaatccggcacattcccgctggttgcaaggtttgccaaaagcctgggacacggaaagtcctctttacgagcaatggctggccgcaaccgcacagtccgacttaagggttacggcaatgccataaacgcccaggctgcggcggctttcattcgcgcttacatgggggtcgcatga

SEQ ID NO: 258505 - DNA, 594 bp, Klebsiella pneumoniae
atgagagaccctcgtcgcagatgcaaagcacccggctgcggtgcctggtttaaccttacctattcgaatgtttactggtgttgcgaagagcataagagccagtaccttgcgcatcagcgcgagaaacaaaaggttaaggcacaaaacaggttaaaaaataaacccgttcaccatatccgccctgaaccaaagacggctgagaagcccctcagtcactggctggaagtcaccgagcgcgtggttaataccccttgccgtgaaactgcccttgctaatggggaggggtgcatttcctgcggaacccaccaggccaaaatctggcatgctggccattacagaaccgttgctaaagcctcccacctgcggtttacccgcatcaatatcaatcttcaatgtgatgactgcaacgtcggcaagtcagggaatatcaaagcttaccgggtcgggctggtggaaaaaatcggtgaagccgcagttcaggggcttgataacgacaaccgaattcaccgctggaccatcgaagagcttgaagccatccgcctgcaggcttacgccgacttacgcgcactgaaaaaaacgctggaggccgcatga

SEQ ID NO: 258506 - DNA, 168 bp, Klebsiella pneumoniae
atgaatacagacgagttaatagaggctatccgtattccgggtagttacgtgctcgatagccttcctgacggtaaatatatcctcacccctatagagccgggtgagataaaaaatactgaaacctctcacgaggaatgtaaaagcttcttccagcagggcagaagctga

SEQ ID NO: 258507 - DNA, 234 bp, Klebsiella pneumoniae
atgaaaatcgaagtaaccatcgacaagactaaaaaactgccagaaggggccattcccgcccttgaagttgagcttttgcgtcgcctgaatcagaactatgaagattgcaagctaaccattcgtcgcgccgggtcagatggcctaagtgtttacgggggtatcgacgacgataaggaaatcattgaggaaatactccgcgagacctgggaaagcgccgacgactggtttttctga

SEQ ID NO: 258508 - DNA, 270 bp, Klebsiella pneumoniae
atgcaaatgataaccagaaaaaagccagcctttaccgagctgtatcagactggagttctgacgcgcattgttgcagtaagaaacgcagatagcggaggctggcgactgtttggcctgtggagagataagcaaatcggggtatacgtagaggctgcgcgcggaggtgtccgtgaatgggcagggctggattacctggctaacttctgcggcagctgcggaatcagtttatgggaggttcactgcaaggtcgaatcaaagtttccgcaataa

SEQ ID NO: 258509 - DNA, 228 bp, Klebsiella pneumoniae; identical to SEQ ID NO: 186299

SEQ ID NO: 258510 - DNA, 183 bp, Klebsiella pneumoniae
atgactgatatcaccgcactggcgcagagcctgaaagcggcagcagagaatgctattgggcgcatgaacggctcgcagcatatccatatggtgagattatcgatatctctcagcatgaaggtgaacagattgatatcgatatcactgatctcaatgaattcaacaaagaagccaacccggtaa

SEQ ID NO: 258511 - DNA, 249 bp, Klebsiella pneumoniae
atgagcaggcatgacttcaggcgaccgatagctgagcacatctcaaacattcgctcagagctggcaaaagtaccagcagaaaagcgtcttcacgtcatagctgaggcgttgtacgacatgaacccgacaggagccgatgaggttcttagggcgtcctgtggctgctatgagtgggatatcagcatggactaccgcagcgccgacatccgttatgcagataaaaacaaacaggaggtgcagcatgactga

SEQ ID NO: 258512 - DNA, 1317 bp, Klebsiella pneumoniae
atggcagattatcagggtaaaaaagtcgtcattattgggctgggtatgaccggcctgtcatgcgtggactttttcatggcccgcggcgtgacgccgcgggtgatggatacccgcgttgcgcctgcggggctggataaactgccggaagccgttgagcgctatgttggcggtctgaacgaagactggctgttgacggctgacctgattgtcgccagcccgggcatcgcgctggcgcatccttccctgagcgcggcggcggatgcaggcgtagaaattgtcggcgatattgaactgttctgccgcgaggcgcaggcgccgattattgctatcaccgggtctaacggtaaaagcaccgtcacttcgctggtaggggaaatggcgaaggcggcgggtcttaacgtcggcgtaggcggcaatattggcctgccggcgctgatgctgctggatcctgagcgcgaactctatgtcctggagctttccagctttcagctggaaaccacttcgagcctgcgggcggtagcggcgacgatccttaacgtcaccgaagatcatatggaccgctatccgctggggctccagcagtaccgcgccgccaaactgcgagtttacgaaaatgcgcgagcctgtatcgtcaacgccgacgatgcgttaaccatgccggtacgcggcgctgacgatcgttgcatcagcttcggcgtagacgttggcgactatcacctgaatcgtcagcaaggggaaacctggctgcgcgttaaaggcgagaaagtgctcaacgtcaaagagatgaagattagcggccagcacaactacagtaacgccctggctgcgctggccctggcggacgccgcaggtttgccgcgcgccagcagcctgaaagcgctgacgacatttaccggcctggcgcatcgtttccagcaggtgctggagcacaacggcgtgcgctggatcaacgattctaaagccacgaacgtcggcagtactgaagcggcgctcaatggactgcagcttgacggaacgctgtatctgctgctgggcggcgatgggaaatcggctgatttcacgccgttaagccgttacctgaccggcgacaacgtccgcctgtactgctttggccgcgacggcgcgcagctggctgcccttcgcccggatgtcgctgtgcaaacggaaaccatggagcaggcgatgcgccagattgcgccacaggttctcccgggcgatatggttctgctatccccggcgtgcgccagcctcgatcagtttaaaaactttgaacaacgcggcgacgtctttgctcgcctggcgaaggagttaggttga

SEQ ID NO: 258513 - DNA, 1083 bp, Klebsiella pneumoniae
atgttagtatggctggccgaacatttggtcaaatattattcaggctttaacgtcttttcctacctgacgtttcgcgccatcgtcagcctgctgaccgcgctgttcatctctttgtggatgggcccgcgcatgattgcccgtctgcaaaaactctcctttggccaggttgtgcgtaatgatggcccggaatctcactttagtaagcgcggtacgccaacgatgggtgggattatgatcctgaccgccattgtggtctccgttctgctgtgggcttacccatccaacccctacgtctggtgcgtactgacggttctggtcggctacggcatcatcggcttcgtcgatgactatcgcaaagtggtgcgtaaagataccaaaggcctgattgcccgctggaaatacttctggatgtcggtgattgcgctgggcgttgcctttgcgctgtacatggcggggaaagatacgccggcgactcaactggtggtgccgttcttcaaagacgtcatgccgcagctgggcctgttctacgtcctgctggcctactttgtcatcgtcggaaccgggaatgcggtcaacctgaccgacggcctcgatgggctggcgattatgccgaccgtatttgttgccgccggattcgcgctggtcgcgtgggcgacggggaacatgaatttcgccaactacctgcatatcccttatttgcgtcatgccggtgaactggtgatcgtctgtacggcgattgtcggcgcggggctgggcttcttgtggtttaacacctatccggcgcaggtctttatgggcgatgtgggttctctggcgctcggcggtgcgctgggtattatcgccgtgctgctgcgccaggagtttctgctggtgattatgggcggcgtattcgtagtggaaacgctctcggtgattctgcaggtcggctccttcaagctgcgcggtcagcgcattttccgcatggcgccgatccaccatcactatgaactgaaaggctggccggaaccgcgcgtgatcgtgcgcttctggattatttcgctgatgctggtgctgataggcctggcgacgctgaaggtacgttaa

SEQ ID NO: 258514 - DNA, 318 bp, Klebsiella pneumoniae
  misc_feature (119)..(128): n is a, c, g, or t
atgaccgaccagggtctggatgaagtgaacaaggacaaaccgctgggcgcggtcgcgctgaaatccttccaggagaaactggaaaaagatccgcgtatcgccgccaccatggcgaacgnnnnnnnnnnggagaaactggaaaaagatccgcgtatcgccgccaccatggcgaacgcccagaaaggcgaaatcatgccgaacatcccgcagatgtccgccttctggtatgccgttcgtaccgcagtgatcaacgcagctagcggtcgccagaccgtcgaagcggcgctgaaagacgcacagtctcgtatcaccaagtaa

SEQ ID NO: 258515 - DNA, 510 bp, Klebsiella pneumoniae
atgttcaaaattcgtattgcagggccagaagatgcagccttgctcaacgaaatggccaatgccagctatcgccaccactttgcccatctctggcacaacgccgatgaactggagcactacctgcagcaagaatattccatggccgcgctggcgcccagcctggccgatccgcagtgctgttggttgattgcggaagccgcgcgccctgtcggctttgctaaatacgcctgtggtcagaatattcatcccgagggtccctccggcacgctgctgcataagctttatctgctgcccgacgccaccggacatcgctacggcgagcagattttccgcgccgtcgagacgcgagcaaaagagaagggtgaacgctggctatggctggaagtgctcgccgtgaataccagcgcccgccgtttttatgaacgccaggggatgcagcacgtgaaggatgtggcatttcattctgcaacccaggaaagcacactccatattctggctaaaccaatctga

SEQ ID NO: 258516 - DNA, 471 bp, Klebsiella pneumoniae
atgaacccactgaaagccggtgatattgcaccgaaatttagcttaccggaccaggacggcgaggaagtaaatttgaccgacttccagggacagcgtgttctggtttatttttatccgaaagccatgaccccgggctgcaccgtacaggcgtgcggtttacgcgataatatggacgacctgaaaaaagcaggcgttgaagtactgggtatcagtacggataaaccagaaaaactctcccgtttcgccgaaaaagagctgctgaacttcactctcctgtctgatgaagatcatcaggtatgcgagcagtttggtatctggggtgaaaaaacctttatggggaaaacctacgacggtatccatcgtattagcttcctcatcgacgccaacggcaaaatcgaacatgtgtttgatgatttcaaaaccagcaatcaccacgacgtggtgctgaactggctgaaagaaaacgcctga

SEQ ID NO: 258517 - DNA, 2031 bp, Klebsiella pneumoniae
atgaaacaattttctgggctctggcccgacattgtcggacgcgcagccgcgaatagcggactgcttgaacggctggtgaaggatgcgcagccggtacttcaggcagcggttcgcattccgcagtcaggcatcgccagctggaatctctattacttttgtccgcgccacggcgtacgcctgacgtggcgggcggatacgccctaccagcatgcctgcccggtcgatggggaaatatttagcggcgaaccgtgggacggcgcctggtggcgcgagatgaatggccgaaacgccagcgcctgtcagcagcttggcctgctatggcggctgaccggcgatacggcgtatcgcgataaagttcgcacgctgctgatgggttacgcggatgtctatcccggctatgcgattcacggcgatattcccaacaacgggccgggaaagatgaacgcccagacgctgtgcgaagccaactgcattctggaaatggcgctgggttatgactttattcgcgacagcctgccccccggcgagcagcggcacatcagtgaaaacctgctgtgctgtgcggccacgtttttgcgcgaccatcgtagtccgcagattcacaaccatgaagtcaaaatcagcgcggcgcttggcgtactgggtttcgtcctcgaagatgaagcgctgctggagtttgccgttaaccagccgtacggcctgcgctggcagctggaaaacggcctgctggcggaagggctttggttcgaaggttcgattcactatcactattacgcgctgcagggctttttcgccttcgagaagctggcgcgcggcacccgctggagcctgctggacggcccctggtatcaggcgatgctgaagttcccgctggcgctgctgctgccggacggcactttcccccgccttaatgactgcctcgccgggcaggaaaagctccatcaccgggatctgtacgagttcgcctggtttatctggcgtgacccgcagtacgccgcggtcctgcagtttaccgaaacggcgcccgatgagcgtgaaaccctactatggcgcgaacggtctctgccggaatcccccctggcgctcatcccgcagcagtcgctgtttgcgccgggcgcgggtctgacgctatggcgacggccgcagcaggcgctgctgattaagcacagtccctggggcggcgaacacgaccattacgaccggctggggctgatgctctggcatcgcgacggctggctgctcacggatatgggcaccaccggctacggcgcgaaaatgcactacgactactacaaaaacagcgccacccacaatacgctttgcgttaatcagagcaaccagcctccggccaatccgcaggtgctgggccggcatatggatgacgactttctgtggctggatagcgaggttgattggggcaaaccgccgccggagctcaacagccatagccgcgtcgaatgggacgctacggcctggcgggacgtgcgcttccgccgtcgcctgctgtggcttgaagatgtgctgatcgatctttcctccgtggagaacccgcatcgccagcagctcgactggacgctgcatctggcggcacaggcgctggaccagagcggcaccgcccggcccttttcgctcagcggcccgctgcggcgaatgaccgaagcaaccgtgacgccgctgaacggctgtcagccgcgccactttgcgcgcggcggcgataccgttgcgctctggctgtccggtgatggtgaactctggcaagggctggcgcccgataacccggcgattcgcaatcttagctatctggtcatacgcaatcacctgccgcaggcgcgttttgtgtgtctgtgggatctggcaaacagcgcgccgctgacggaagtgaacgtgcaccatacgccagtcggtacgcaaattaccttctggcgcggcgatcgcgtgacgcacgtgacgttgtacgacgagccagggaaacgacctgatgcgatccttccgctcgcggaaagcggcgtctcacctcagtacgcagagtaa

SEQ ID NO: 258518 - DNA, 180 bp, Klebsiella pneumoniae
atgtttgcaggtttaccttcgctgagccacgagcaacagcaaaaagcagtggaacgaattcaggagctgatgtcgcagggcatgagcagcggccaggccatcgctttggtggcggatgaactgcgcgcctcgcataccggagatcggattgtggcgcgctttgaggatgaagacgagtaa

SEQ ID NO: 258519 - DNA, 1356 bp, Klebsiella pneumoniae
atgttgtcccccgctatgctttccctgccctggcgtccggatgccgctgaagactattttagcccattaagttcacagccctgggcgatgctgctgcactcgggttttgccgaacatccgcataatcgttttgacattgttgtcgcccagccgcgcgcaacgctggtgactcgcggcaatatgaccgtcataaacgatggggaaaccgtctcaacctctgccgccgatccgctcactctcgtgcatcaacagctggcgcgctttaacctgcagccgcaggctcatccgcagctgccgtttctcggcggggcgctggggctgttcggctacgatctgggtcgtcgctttgaaaatctgccggcgcaggccgaggcggatatcgatctgccggatatggcggtaggcatttatgattgggcgttaatcgtcgatcatcagcgccgggaagtgtcgttattcagctatggcgatccgcaggcgcggctggcgtggctggaagcgcaggccgagcctgccgcggccccctttgccctcacctcagggtggcgctcaaatatgagccgcgcggagtatggcgaaaagtttcgccaggttcaggcttatctgcacagcggcgactgctatcaggttaacctggcgcagcggtttacggcgagctatcgcggggatgagtggctggccttccgtcagctaaaccgtgttaatcgcgcgccgttcagcgcctttattcgcctccaggagggcgccatattaagcctgtcgcccgagcgttttattcagctccggcaaggcgaaattcagacccggcccatcaaggggacgttgcccaggctggccgatcctgagcaggacgcgctgcaggcgcaaaagctggcgaactcagcaaaagaccgcgccgaaaacctgatgatcgtcgatttaatgcgtaacgatattggccgggttgctgtccccggtagcgttcgcgttcctgagctgtttgtggtggagcccttccccgccgtgcatcatctggtgagcaccgtgaccgccagactgcccgcgcatctgcacgccgccgacctgctgcgcgcggcctttcccggcggctcaatcaccggcgcgccgaaggtcagagcgatggagatcatcgatgaactggagccgcagcggcgcaacgcgtggtgcggcagcatcggatatctcagcttctgcggcaatatggataccagcattaccatccgtacgctgacggcctgccgggggcggatctactgctccgccggcggcggaattgtggccgatagcgaagaggcggcggaatatcaggaaacttttgataaagttaatcgtatcctgcatcaactggagagctag

SEQ ID NO: 258520 - DNA, 579 bp, Klebsiella pneumoniae
atggcggacagcgccctcgaacttgacgatttcctttcgcgttttcagcttctgcgcccgcagccgacgcgccacgcgctcaaccagcgtcaggctgcggtgctggtaccgattgtgcgccgcccgcagccggggctgctgctgacccagcgttcgccgctgatgcgcaagcacgcgggccaggtcgccttccccggcggcgcggtggataacagcgatgcgaccctgatcgccgccgcgctgcgcgaggcccacgaagaggtggcgatcccgccggagtcggtcgaggtgatcggcgttctgccgccggtcgatagcgtaaccggttttcaggtcaccccggtggtgggcattattccgcctgacctgcactatcacgccagccaggatgaagtcgccgcggtcttcgaaatgccgctggccgaagcgctgcgcctggggcgctatcacccgctggatatccatcgccgcggcaattcgcatcgcgtctggctatcctggtatcagcattattttgtctggggaatgaccgccggcattatccgtgaactggcgctacagataggctcccgcccttag

SEQ ID NO: 258521 - DNA, 147 bp, Klebsiella pneumoniae
atgctgcccctgggccagcagcaggcgtccgcgctcttcaacgtcgcggataaacgccggaatcgcgtcgatatcgaccgtatcgggctgattgcccgccagccccataataatggcgatatccgtgtggtggcctttgccggttaa

SEQ ID NO: 258522 - DNA, 354 bp, Klebsiella pneumoniae
ttgttccagctcccagtgaacgagatgcgcaatcacttccgtgtcagtctcggagacaaaaacgtagcctcgcgactgcaacagctcgcgcagcggctcatggttttcgatgatcccgttatgcaccaccacaatatggtcagaaacatgcggatgcgcgttaccttcagacggttcgccgtgcgtcgcccagcgggtatgggcaatcccggtaccgccgtgcaacggatgttcttccagtgcctgggccagcatctgtactttcccaaggcgacgaacgcggttcatatgaccttcgttatcgacgactgccagaccggcagagtcgtaaccgcggtattccagacgacgtaa

SEQ ID NO: 258523 - DNA, 300 bp, Klebsiella pneumoniae
atggctaatgcgcccggaaagggtatttttgatagcgttcggctgctcgtagatctctttttgcatgtagtggcgatagatacctttatcgcccgcatcgtactgcagattggattcgatgtccgggcgctgcacttcggcgccggatttatcaaagatagtcaccgaacggcgggtaacctcagcaatatcgccctcttcgaggaagataaagcggcgggtaaccggcagcagcgccagctgatcggaggcaatgaagttttcccccatccccaggccaatgaccagcgggctgcctga

SEQ ID NO: 258524 - DNA, 714 bp, Klebsiella pneumoniae
gtgatacgccagcagctgcagcggtacggtgtagaagattggcgcgataacctcttcaacgtgcggcatctcgatgatgtgcatattgtcgctgctggtgaaacccgcatcgccgtcagcaaagacgtacagctggccgccgcgggcgcgaacttcttcaatgttggatttcagtttttccagcagttcgttgttcggcgccaccaccactaccggcatctcagcgtcaatcagcgccagtggaccatgcttcagctcaccggcagcataggcttctgcgtgaatataggagatctctttcagcttcagcgccccttcgagggcgatgggatactgatcgccgcgtccaaggaacagcgcgtggtgtttgtcagagaaattctcagccagcgcttcgatacgcttatcctgcgaaagcacctgctcaatgcggctcggcagcgcctgcaggccatgcacgatctcgtgttcgatagcggcgtcctggcctttaaggcgcgccagtttcgccaccagcatcagcagaacggtcagctgcgtagtgaaggctttggtcgaggcgacgccgatttccgttccggcgttggtcatcatcgccagatcggattcacgcaccagagaggaaccaggcacattacaaatcgccagcgagcccagatagcccagctctttcgacaggcgcagaccggccagcgtatctgccgtttcgcctga

SEQ ID NO: 258525 - DNA, 588 bp, Klebsiella pneumoniae
atgaaagtagcaaaagacctggtggtcagcctggcctatcaggtacgtacagaagacggtgtgttggttgatgagtctccggtaagcgcgccgcttgactacctgcatggtcacggttccctgatttccggcctggaaaacgcgctggacggccacgacgtaggcgacaaatttgacgtcgaagtcggcgctaacgacgcgtacggtcagtacgacgaaaacctggttcagcgcgtacctaaagatgtatttatgggcgttgatgagctgcaggtgggcatgcgcttcctggcggaaaccgatcagggtccggtaccggtagaaatcaccgaagtgggtgacgaacacgttgttgttgacggtaaccacatgctggctggtcagaatctgaagttcaacgttgaagtcgtcgcgattcgcgaagcaacggcggaagagctggagcatggtcatgtacacggtgctcacggccacgatcatggccacgaccacgatcacgacggttgctgcggcggtcacggccatgaccatggccacgaacacggcaaaggcggttgcggcggtaacggcggctgcggttgtcattaa

SEQ ID NO: 258526 - DNA, 288 bp, Klebsiella pneumoniae
atgctccatacgctaagcacttccccctggcacgctgatatggcgacgatgcgccgtttgataaaagagggtgacgatcttctcctgctgtcggacggcgttatcgccgccatcgcggaagggcgtttccttgaaatcctgcaatctgcccccatttctatctacgctctgcaagaagatatcgaagcccgcgggctggctggtcaaattgcggacagcgtcatcagggttagctatactgagttcgtcagactgaccgtcaaacatgcgggtcagttggcctggtaa

SEQ ID NO: 258527 - DNA, 1107 bp, Klebsiella pneumoniae
atgagagttaatggacttacgaagggatttttcatcctgatcgtgctgatcgtcacccttgcttttttcgacgttctctccccctattattcagccattttatgggcagcaattctggcggtcatcttccacccggtgaagaacaaactgcgcgatcggatcggcgagcgcaacggcctggcggcgtttctgacgatagtgattatctgtctgatcgtgtttaccccgctggcgatcattctctcgtcgctggccttcgagctaaacgtggtttacaccaaactgcagcataacgatacccagttcccgaccgtggtagccagcctgtttgcgcacctgccggaatgggccaggagcttcctctcagagcatgaccttgatagcgcggaacaaattcagcgccagctttcggacgttgcgcttaaaggaggccagtacctggccggtagcgcattcctgattggtaaaggcacctttggttttaccattagcttcggcatcatgctttatctgctgtttttcctgctcaaagatggtccgtacctggtcaggctgatccttgaatccctgccgctatcgaatcacgtgaagcagcatcttttcgccaaatttgccgccgtcgccagggcaaccgtcaaaggtaccgtagcggtcgccctcgcgcagggcgcgcttggcggactggcgttctggatcgtgggtcttgatggcagcatcctgtggggcgcgctgatggcgtttctgtcgctgattccggcggtgggctcggcgatcatctgggttcctgcggcagtctatctcttcgcgaccggtcagctatggcagggagcgtttatcgttggcttttttgtgatcatcgtcggcctggtcgataatattcttcgccctctactggttggcaaagataccaaaatgccggactacctgatcctgatcaccaccatcggcggcatggaaatctacggcatcaacggctttgttatcggcccgctgatcgccgccctgtttatcgcctgctggaacctgctgtccggtcgcgatcacgcaggaaatatcgacgagcttgatgaggatttcttagaagagggtaaaaatcacgaggagtaa

SEQ ID NO: 258528 - DNA, 423 bp, Klebsiella pneumoniae
atgaaagtgaaaaaggttttactggttgcgtcgctggcggtttcttcgctattggcaggttgtacttccgagtcacagcgtttggcgaactgcgaggcgagggggatttcccgcgatacctgctacttagcggagcaaaatcgtcaggcctcgatgaatgcagcttatgagaagcaggcgttagaaaacgccgccgctgccgttcagcatagtcagagcgcgaaggtgaaaacccggcactttaacggcatggagattaaaggcaccagtaccggcttaagtattgatggtaaagcggcggcggtgattgagaaaaataaagacgcgaccgtttaccagcaggggctttacaactttatcgtttacgccaacggcaaaatagccgtcactcaggacggcgtgtttaaaggctacgccaaataa

SEQ ID NO: 258529 - DNA, 333 bp, Klebsiella pneumoniae; identical to SEQ ID NO: 172702

SEQ ID NO: 258530 - DNA, 792 bp, Klebsiella pneumoniae
atggttagaaaatgcgttttttgcggcattaactcagataaaaacagattaacaaaggagcatgtactccctaaatggctaaagaaaatagtccctcaggataaatggcattggtttatatcttcaaatagcacagatacccctaaacaaaggattgtgaatgggctaacaatatttgatgcaacaatttctgttgtatgtgagcaatgcaataatggctggatgagttcacagcttgaagagccagcatcaaaattattacctgcactaataaaagggaatgaaatccatttagataacgaccaaaaatatctaatatcattatgggccacaaagacggcgtttattagagtgctacttgatggcgacaatgttcttccagaatcttattatagggatattagaaaattaaaaatacctaatagtataaatgtaattttatgtagcagggttataggtagcactgatgttaggagtcgggtgttaagactaaaagacatttttaacggtcacgtatttgtttgcggcatagagataggatgtctactattaatcgtatcatcattcacaacagtagccgcagccggagataataatcaattaattttcagagataaactaccggcaagcaatgaaaaaatacatccgaacgataacagtgcatctatttttccattacactgcgagactgaccttgccatagatgaaatagtaaacccagcaattgagtttttatttcccattttccttgataacaaggtgtcaacaaaagattttaaaagtgagaaatga

SEQ ID NO: 258531 - DNA, 795 bp, Klebsiella pneumoniae
atgggcctgttaaaccgaataaaaatgctgtggcaagccgccgtcggctcgtcttattcctggcccgcgctggacatcaccctgcccggcgagcgctatctacatctggtcggcagtattcatatgggcacccgcgacatgtcgccgccgcccgccaggttattaaaaaagatccgccaggccgatgcgctgattgtggaagcggatattagcggcagcgaaacgccgttcagcaacctcccctcctgtccgccgctggcggaacgcctgagcccatcccagcttgcagaactgcaagatcgtgcgggagaaatgggtctgtctatcgcgttgttcgacaaccagccgctgtggcaggtggcgatggtattgcaggcgactcaggcgcaaaaattagggctaagagcagactacggcattgattatcagctgctgatggcagcgcgcgagagccatatccgcgtgatggagctggagggcgccgatagtcagattgcactgctgcgggatctgcccgacggcgggctggcgctgctggaagataccctcacccactggcgcacgaatgcgcgtctgctgcaggtgatgatcggctggtggctggaacagccgccgtcacaaggaacaacctcgctaccgaccacctttagccagtcgctgtatgacgtgctgatgcaccagcgcaacctcgcctggcgcgaaacgctgctggcgctgccgccggggcgctacgtggttgccgtcggggcgctacatttatacggggaagggaatctgccggatatgctgacgtaa

SEQ ID NO: 258532 - DNA, 1653 bp, Klebsiella pneumoniae
atgcaccttattaaacgaggcatcgcgctggcgctatttaccgcgttatcgctggggagcctgtcagcgcaggcttatgagcaggataaaacctataaaattaccatcctgcatacgaacgatcatcatggtcacttctggcgcagcgactacggcgaatacgggctgtcggcacaaaaaacgctggtggacggtatccgcaaagaggtggcggacgagggcggcagcgtgctgttgttatccggcggcgatatcaataccggcgtgccggaatccgacttacaggatgcggaacccgattttcgcgggatgaacctgattggctacgatgcgatggcggtaggcaatcacgagtttgataatccccttagcgtactgcgtcagcaggaaaaatgggcgaagttccccttcctctccgccaatatttaccagaaaagcaccggcgagcgtctgtttaagccgtgggcgctgttcaagcgcggcggactgaatattgcggttatcggcctgacgaccgacgatacggctaaaatcggcaatcccgagttctttaccgatatcgagttccgaaagccggcggaagaggccaaactggttatccaggaactgcagcagaacgaaaaaccggatgtgattctggccaccacccatatgggtcattatgacaacggcgcccacggctctaatgcgcctggcgacgttgagatggcgcgcagcctgcctgcgggatcgctggcgatgatcgtcggcggccactcgcaggacccggtatgcatggcatcggagaataaaaagcaggtggattatgtcccgggcagcccgtgcgcgccggacaagcagaacggtatctggatcgtgcaggcccacgagtggggcaaatacgtgggccgcgccgacttcgaattccgcaacggcgaaatgaagctggtgcactatcagctgatcccggtcaacctgaagaaaaaggtcacttacgacaacggcgagagcgagcgcgtgctctatacgccgcaaatccctgaaagcccgcagatgctctctctgctgacgccgtaccagaataaaggcaaagcgcagctgcaggtgaaaattggtagcgtgaacgcgcatctggagggcgatcgcagcaaagtgcgttttgtgcaaaccaatatgggacgtctgctgctggcggcgcagatggcgcgtagcaatgccgatttcgcggtgatgagcggcggcggagtacgtgactcgattgaagcgggcgatatcacctataaagacgtgatgaaggtacaacccttcggcaacgtgctggtgtatgtcgatatgagcggtaaggaagtgacggagtatctgaccgcggtggcgcagatgaaacccgactccggcgcctatccgcagtttgccaacgtcggttttgtggccaaagacggcaagcttaacaatttgaccatcaaaggtgaaccggtcgatccggcgaagacctaccgtatggcgaccctgagctttaacgccaccggcggcgacggctacccgcatatcgatactaagcccggctatgtgaataccggctttatcgacgccgaagtgttgaaagagtatatccagaaaaactcaccgctcgacgcggcagcctatgagccgaaaggcgaggtgagctggcagtaa

SEQ ID NO: 258533 - DNA, 1221 bp, Klebsiella pneumoniae
atggcaatgaatcagaccgcacaacccttatccggccctgctgctgcgccgcaaaaagcacgcacttcgtttcgcattctcggggccatcagcctctcgcatttgctgaacgatatgatccaatcgcttattctggctatctacccgctgctccaggccgagttctcgctgacctttgtgcagattgggatgatcaccctcaccttccagctggcctcatcgctactgcagccggttgtcggctacctgaccgacaaacacccgatgccgtggtcgctgccaattggcatgtgctttaccctgagcggtctggtgctgctggcgatatccggcagcttcgggatggttctgctcgctgccgcgctggtcgggaccggatcgtcggtctttcatccggagtcttctcgcgtggcgcgcatggcctccggcggacgtcatggcctggcgcagtcgatattccaggtcggcggcaacttcggcagctcgttaggtccgctgcttgcggccctgattatcgctccttacggcaaagggaacgtcggctggtttgtcctggcggcgctgctggcgatcgtcgtgctggcgcagatcagccgctggtatgccgctcagcaccgtctgaacaaaggtaaaccgaaagcggtggtggttaatccgctgccgaaaaataaagtcattctggcggttagcatcctgttaatgctcattttctcgaaatatttctatatggcgagcatcagtagctattacaccttttatctgatgcaaaagttcggattgtcggtacaaaatgcccagttccacctatttgcctttctttttgccgtcgcggcaggaacggtgattggcgggcctgttggtgacaagattgggcgtaaatatgtaatttggggctctatccttggcgtagcgccgtttaccctcgttttaccctatgcatcgctggagtggaccggtattttgacggtgattattggttttattctcgcttcggccttttccgctattctggtctatgcccaggagctgctcccggggcggatcggcatggtttctggtttgtttttcggtttcgcctttggcatgggcggccttggagccgcggtgctggggcttttagctgaccataccagtatcgaactggtctataaaatctgtgctttcctgccgcttctcggcattctgacgatatttcttcctgataaccgccaaaagtcgtga

SEQ ID NO: 258534 - DNA, 402 bp, Klebsiella pneumoniae
atgtccagagcggaattaatacgtgatattgaggcagttgtctcgggggcaggctttgagctaagcagctcagaagcaccaatgactttcaaaaaaaatgtaagctattcaggtctaatcgcaggcaaaaacgaaacagcccatttcctgttattcactaacacaggcaccattcaaataaccgccaaatggcaagaagtgagcggtaccgcaatagagaaactaggccacacagtactcgatgctcagcacactaagcatcagaactacttcgttgtttgtggtggtggcaaactggttacaagagctattgattacttaaatagccatcaatcattagctccgcgcctaagggcaatgcaggtgagagaactagaatctgctctggaagccataatttaa

SEQ ID NO: 258535 - DNA, 234 bp, Klebsiella pneumoniae
atggcattctatgaaaacaagcgttcagttcttgaaactgacaagcctgaacaataccgagtcctacgtgaaatcggcgatgtacctcccagtcccggcatttatgagtgccagacttgtaaatacgaagacgtcgtgaaccgggaatgcatcaagcttccaccttgctctaactgtaagaaaaaagggcatagcaataagtggaagctattggttaaagccactgataagtaa

SEQ ID NO: 258536 - DNA, 297 bp, Klebsiella pneumoniae
gtgattgggttagcctgtaccaccagaactaaccctaacaaatcgtacgcaaacgcggcgcttgagtaccacctcaagagcttttacaagcaagccactagatttgttggttgctacagtacaattttgatagcaaaaatcaacattcatgtggcgaaaaacaggaaatgcaccatgcagacagacgagtctcaggcatacatttttcgcccttacataacagtcaagggtaagcggatcacccgtccaaacggtgggatgtttaagataccagtaaaacgtgatcctaaaaaataa

SEQ ID NO: 258537 - DNA, 870 bp, Klebsiella pneumoniae
atgaaaaatattaggaatcaaagctttatagatgataggctctggtatatagaatggcttttgatgatgcgaggttggctatcccgtacagatttaatggaaaagtttgggattaaaggagctgcagctagtcgtgacattaagaggtataaggagcaggcgggggataatttatttttagatcatagggttaagaagtatgttgctgatctggataaatttaagcctatttacgaaacttcagaggacctcatcttttcgaaacttacagatctggatgagtctaggtctttaggggtagcgtatccgctgattgaaactatcccaagtttgtcggaaataaacccgaaagatataactggcattacccgtgcgattctgaatatgaatgtgctgaagattgcctattgctccatgacttcgggggcttctgagaagaaaattgttcctcattcaatgttccataatgatcttaaaacatacgtacgttgttacgatcttgggcgaaacagatttttagatcttgttgtagggcgaatccttgaagttaagggggaagatggggctgcgccagctgaattcctgagagaatttgatgatgattggaacacatacctttctttagagctggttgttcatcctcgcattgagcataagcaagctattgaaagtgatatgaaaatgattgatggggtgaagatcgttcaagtcagaaaatccctagcccagtattggttgcgccggtggtgtgttgactgttcagcaacagccaagatgactgataaggcttttcagctccacttacgtaatcatagtgttattgacggagttaacggtgcgttcccaggagtgaataaccatatggactga

SEQ ID NO: 258538 - DNA, 1029 bp, Klebsiella pneumoniae
atgcaagttctaaactcagctgcttttttagactgcttgtcgaagccgagagtcaagtcatatatcaattttttttaccctggagtggttcagccaaatgaaagcgatttggtttatatgtatcaatggaataatgaaatcagtgaaatattatggagattaatctccataatagagataaccatgcgaaataaaattcataaagagttaagtcggctatatttcaatgctccaaaagagattgtttcaaatggtgtttatataaatgaatttgtgaataataaagtgccgactgcgacaataggagatgctgattcttgtaattggtatcatgctataaattttaatggcgaagctttggtaaatataacaaaaagaactcatcataaaaagccaaataacaagtattataagaagccgtatacagtcacaccagatgatgttatttctggtttgacatttggtttttggcgattgatttttaaaaatctagggaatgcaggcgtttcctatcaatctataatatctgatgtgttcgttcactcacctttctacaaacaaaaagtaactcaatctcttgattttaaagtagattccagagtggcgatgattcattcatttaggaataggatatcgcatcatgagcctgtttggaagttaaaagatatgaaggaagaaaagattactccgatcccaggtaatgctaataatgttaatgttttaaagtttaaaccatcaaataaaaaagaggtttttgagcatttaacagattactataaaatgatgttggagtatctattgtggttggataaggatgttgcaaggagctttaaaagttcatggtggaatgaccgctttttctatgtttgctctgataaaggtgtaaatagttttctttgctcatattcatctgagtatgaattaactaagactcatttcaaaagaaatattaatcgaattataaaaaaagggaatgtgagaatcattactgataaatcaagaaaagcaatcattcttccagtgaagtga

SEQ ID NO: 258539 - DNA, 603 bp, Klebsiella pneumoniae
atgaatagcacgttactgccgccgtcctccactgcatggatgcgcagcacagaggccgccacggcgaggctttccgggataacagtcgcaatacgcacgctgtggacgccgaccgcctgcccggtggatttgctgccgtatctggcatgggcgctgtctgtcgatcgatgggataaggactggccgccagaacgaaaaatagccgttatacagcgctcttactggctgcaccgccggaaaggcacccgtgcagcggtgcggcgcgtgatcgaggacatggggttttctgccacgttcgccgagtggttcgacgtcggcgaccagccgggaactttccggcttgaagtggatgttaacgaggccggactgacgctgaagaccctggatgagctaaaccgcctgatcggcgatgcaaagccggtcagtcggcatctggcgcaaatgaccattgcaaccgggtctaaggggttcgcatgggccggagcggtaaccgttgacggggaaagcgtaacggtttacccgccggaatatacgccagatgacagcatatattacgacggcgaagcacatttcgacggcaattattatttcagaggtaactaa

SEQ ID NO: 258540 - DNA, 282 bp, Klebsiella pneumoniae
atggacctaatcaaccgcatctggaatggcgtgacgtactcctggtcaacgctactgaccagcatcggcgtcatgacgcaaaaagactggctggccgccattggcgtgctgatcggtattgcggccgccctgcttggtgagctgcatcgtcgccgcatggcgcgtattcaggaaaccaataactcattgctgaatgaactgatcgacgcgattcgtgacgacaccgagaaccgccaggacgtcaaagaactgatccgcaccatccgggaggcgccacgatga

SEQ ID NO: 258541 - DNA, 201 bp, Klebsiella pneumoniae
atgaaagtgcaggcattgcagggcgataccgtggatttgttgtgtcagcgccactacggcaccacgcagggcgtgaccgagaaagtcctcgccgcgaacaaagcgctggccggtcagatatttctcgacgccggacaggtggtggaactgccggaaatcagcactccagcgatacaggagaccgtgcagctatggacctaa

SEQ ID NO: 258542 - DNA, 498 bp, Klebsiella pneumoniae
atgagccttgtagccggtcgcactgttaccccctctgcggaggatgtgccggacactgacgacggtggcgagaaagtcaccgccgggacgttctggccggaaatcgccctgagcgatgtgcgcatggaaatgcgcatcaatggcgcggtgacgacctcacgcctgaaacaggccgtgatcgagggcgtatcgcacaccctcgaccagcttgccgactggcaggccgtacagctggccgcaggctacaccgaactctctgatgttccggcggcaaaagttaacggcgaaagtgtgaaggtgcatcgcttccgtcgggcggtattcagcattgcacgcgcgcacatcctcggtactaaccgggacgtggacaccactggcgaagcaggggagaagcgcgcagcttcactggcttcacaggctgacgatatgtggcgcgatgcacgctgggcgatatccgacattcgcggtgccgtgcgtaattctgcggaggcattctga

SEQ ID NO: 258543 - DNA, 807 bp, Klebsiella pneumoniae
atggaaaaatatacgattaatggaatagtggaatttactccgcaacgtagcgttttaatactcattgctgacgagacgaaagcggtatcattaaatatgccggccagccgctgtctgttgctgcttattcagcaggatggcaaaaacgtagcccgtgaaacctttttcgaggaagtgtggataaagcatggtgcccaggtgaccagcaacggtttctatcagaatatttccctgctgcgccgcgcatttaaggaactgggcgtcgaggaagatattattattacggtgccgagagtgggcgtcaggctggaggcgacattaacgatgacggaatttcagccggacgaggcggaaaagacgccggtcgcggaggaacaacgcccgcacgttgacgagcctgggcataaggaggtcgctgctgcgagtgtgccgggaaaaaagcggttaaggccgcgaagctctcttctgtgggggcttgcggcgctgttgagctgtctggtgggcggttttgttgcgtggtacacagaattcgactcttatttgcaaagttatgtgcccattaatgctaaattttcgcaacaatgtcatttttttgccaataatgatgtggtagatcacgttcggcatacgacttttatcaatcgtagcaaatttgattgtgaaaaatattcgtggatttatttgacgctttatcctgggggagcccgcgtttcggtgattagctgtcagcaaaaatttagtcaatggcgtgataatcaatgcctcaccaaatattacattaaggaggtagtcaatgcgccggcgtga

SEQ ID NO: 258544 - DNA, 483 bp, Klebsiella pneumoniae
  misc_feature (460)..(469): n is a, c, g, or t
atgcgccggcgtgaaattaactggttaatcactatcgtatttatcggcatattaactggggtagcaataaaatcctggcaatactggcagcgcaaccattttcagtgtagcggggagctgcggctatttagcgcaggttaccagggcgatatttcgttacgctatgtatttgatagcagccgcgggctggtgattgttcgcggggaaattacgccgccgcagggcgagtcgtttactattaatcagaacatctggtttagctttacccgcgacggccggcactacttcctgcgttcagaaaccgtctcggccagcatcggcgagaccgagcaggaggagcacataaagcgcatcctgccctcgtttttcctgcagccgcaggtgccgttttacctgaacatccagcggcttaacgagcgtacccggctgctgtataccagccgggcgccgtctttacttnnnnnnnnnnatccagcggcttaa

SEQ ID NO: 258545 - DNA, 1023 bp, Klebsiella pneumoniae
atgaagaaaatgttacgtttcatcctgctgttggtggtggtgctgggcattgccgcgggcatcggtatgtggaaagttcgccagctggcggacagcaagttgctgattaaagaagagactatctttactcttgccaccggaacggggcgcctggcgcttgggcaacagctgtatagcgataaagtcattaaccgaccgcgggttttccagtggctgctgcgcatagagcctgagctctcccattttaaagccggaacctatcgcttcacgcctgatatgacggtccgccagatgctgcagctgctggccagcggcaaagaggcgcagtttccgctgcgcttcgttgaagggatgcgggtgagcgattacctgcgccagctgcgcgatgcgccttacgtcaagcatacgctggcggatgatagctatgaaaccgtcgcgaaggcccttgatctcgagcatcctgactgggtcgaaggctggttctggccggatacctggatgtataccgccaataccagcgatgtggcgatccttaagcgggcgcatcagaagatggttgccgcggtcgataaagcctgggaagggcggatggagaatctgccgtatcacgataagaaccagctgctgacaatggcctcgattatcgaaaaagagacggcggtatcggacgagcgcgaccgcgtcgcatcggtatttatcaaccgtttacggatcggtatgcgcctgcaaaccgatccgaccgtgatttacgggatgggtgagagttataatggcaagttgacgcgtaaagacctggaaaccccaaccgcttacaatacctacgtcataaacggcatgccgccgggaccgatcgccgcaccgggcgaggcctcgctaaacgccgccgcgcatccggcgaaaacgccgtacctttattttgtcgcggacgggaagggcggacatacgtttaacactaacctggccagccataaccgctcggtccaggactatttgaaagtacttaaggaaaaaaatgcgcagtaa

SEQ ID NO: 258546 - DNA, 810 bp, Klebsiella pneumoniae
atgtttttaatcaatggcgctgaaagtgaaacgctcgcggtgaacgatcgcggcgtgcagttcggcgatggctgctttaccactgcgcgcatcctcagaggccaggttcaactgctgtcagcccatctggtccgcctgcagacgacttgtgaaaagctctttatcccctatgacgactgggcgctattagcgcaggagatggcgcgtctggcgcagcctcatcaggatggcgtgctgaaggtcatcatcactcgcggagcgggcggccgcggctatagcgccgcgggctgcgtcaatcccacgagaattctcagcgtgtcgcccaggccggcccactatctgcgctggcgcgaggaggggatttccctgtcgctgagccctgtcaggctgggacgcaacccttcactcgccggactcaagcaccttaaccggctggagcaggtgctgattcgttctcatcttgagcagacggacgccgatgaggcgctggtccttgacagcgacgggtggcttacggaatgctgtgccgcgaacgtattctggcgtaaaggatccgacgtctttaccccgcgcctcgatcaggcgggggtcaacggtattatgcgccagtacattctcgctaagctggcaccatcgccgtttcgcgttgtcgaagccaccatgcgtcccgaggcgttacgcgaagccgatgaggtcgtggtctgtaacgccttaatgccgctggtgcctgttcgccgctggaacgataaatgttggtccgcccgcgagctttaccattttttagcccctttgtgtgagctgtctgattag

SEQ ID NO: 258547 - DNA, 1032 bp, Klebsiella pneumoniae
atggatgccttcattcaatatggaattgtcgctggcattcaggccatgcaggattctggccttgaagtgacggaagagaatgctacccgcatcggcgccgctattggttccggtattggcgggcttggcctgatcgaagaaaaccacagttcgctggtaaaaggcggaccgcgtaagatcagcccattctttgttccttccacaatcgttaacatggtggccgggcatctgaccatcatgtttggtctgcgtggaccaagcatttccatcgcaaccgcatgtacttctggcgtacacaacattggtcacgccgcgcgcgttatcgcctatggcgatgctgacgcaatggtcgccggtggtgcggaaaaagccagtaccccgctgggcgtaggcggctttggtgcagcgcgcgcgctgtccactcgcaatgacaacccgcaggcggcaagccgtccgtgggataaagagcgtgatggtttcgtgctgggcgacggcgccggcatggtcgtgctggaagagtacgagcacgcgaagaaacgcggtgcgaaaatctatgctgaaatcgtcggttttggtatgagcagcgatgcctaccatatgacttcaccgccggaagatggcgctggagcagcgctggcgatggtgaacgccattcgcgacgcgggtattgacgcaagccagattggctacgtcaacgcccacggtacctctacgccggcgggcgataaagcagaagcgcaggcggtgaaatctgtcttcggcgacgctgccagccgcgtaatggtgagctcgactaagtcaatgaccggccacctgctcggtgcagcgggcgcagtagagtctatctactccatcctcgcgctgcgcgatagcgccgttccgccaaccatcaacctggataacccggatgaaggttgcgatctggacttcgtcccgcacgaagcgcgccaggtaagcggtctggagtataccctgtgtaactccttcggcttcggcggcactaacggctcgttaatctttaaaaaggtgtga

SEQ ID NO: 258548 - DNA, 699 bp, Klebsiella pneumoniae
atgaatgaaaccatagcattacgtcctgacagcagggcgtcggcaaaggacagcgttgttgattacacccttgcgtcgctggaggaacttgaacaactgcatccggctctgaatctgctggcgcacccatcaatcgctcagggtagccatgatttttttgtccgttgctatgacgctggcgtacggcatgcgcaggccggggccgctgaaacggtggcggctttacctgattcgctgacacatgagcagcaagggagcgggctactgtgtgcggctgccgggcgtctggaaattcttggtcagccgctgacgcacaatcgtctgtgcgacctcgccggtcagttctgtgctggcatggcggatgttgatagcgaaatccgcagcggtttctataccgtgcgcagcatatcgctgccggtttaccggcggctgctgcgggataagcattcatatggcatctgcctgcagcaggcgctgctgcatctgctggcctggaaaagtgattccccctgggcgcggcagcaggcccagcggttgctctggcaggggggagttctgggtgataacggcgagtttgcgctgatgacgctcgatgatgaactgcgggagcgccagtttgcgtggcccggattgtggtcgctgctggccgtgaccgggtttctggcgaaattcccggccgggccattgtttgctgattga

SEQ ID NO: 258549 - DNA, 1137 bp, Klebsiella pneumoniae
atgaaattgtacccaaaatcgccgaaaacggcaacaactagacgcgtttttaaattcagtgatagctacgctggcgtgtacacgtccagagagggacacaccattgaagcggatcatcgggctttaatggatgcaggcaaaaccaaaagaaaagccagtcgggttcctcacagtgacgcaaagcgtagaacgttcaaaaaaaaatccaaaagtatctgtctgaaaaaaacgcccggcacgccttacttcttcacgcttaagcctttaggcaatctggagccgggttatttccaaaaagcgatgacaaggctgagaagatacctgagagaaaacaacgcagaatacatatacatgcttgaatgggctgagtatgagaagactccgcacgttcatcttgtcgccaatatccacggaagcacgccagaagaggttgcggcgtttgcagatggggttatcaatcgctggttgaagagtataccgaagaatccagccaccagaatcaagcaggacgccagacctgttcatgatgctcccgggctttttggctacatatcgaagcagtcaccgtacgagttcaacgctagagcaatagcaacgggcgaagattggtcagtcgtcaccgttacaagttgctcaagaggatgggtagagttgatatacagcggcggcggtatgagttgcggggggtggaacgatgcaaggcgcgatatgagaaggctcgccacagccagaggcgcaaaatcatcgaagcgatctaggggcggcgatgcagagacaaaaagagctatatccgaagtatcgtcttttactgtatcggggttgccccgcgcagaggctgaacgtctattcatgaacgctgaggatagccagcagataaaggagcggcgattcatcatagagatgcgcgatttatatcgccaagcacatgagcaagggtctcaggaggcgaaggacgcaatcgagcgggtgttactcgatgagggctacgacatggcgcacatgttccatgtatgggagaagccacagatgagcaggacggagcgatacgcctcaagtgcccttttgaggctgctgtatgaacccaagataaagaaggcaaaggctttgaaagagatgaggtcgctgttaatagtatga

SEQ ID NO: 258550 - DNA, 417 bp, Klebsiella pneumoniae; identical to SEQ ID NO: 129191

SEQ ID NO: 258551 - DNA, 519 bp, Klebsiella pneumoniae
atgctggtggcgctgtcgctgctgcgtgaactggggccggtggtcgccgcgctgttgtttgccgggcgtgccggttcggcgctgactgccgaaattggcctgatgcgcgcaaccgagcagctctccagcatggagatgatggcggtcgacccgcttcgccgcgtgatctctccgcgcttctgggcgggggtgatttcactgccgttgttaacgattatttttgtggcggtcggcgtttggggcggctcgctggtcggtgtcagttggaagggcatcgatggcggattcttctggagcgcgatgcaaaacgccgttgactggcggatggatctggttaactgcctgattaagagtctggttttcgccattacggtaacatggatcgcgttatttaacggttatgacgctatccccacttccgccgggattagccgggcgacgacgcgtaccgtggtacatgcgtcgctggcggttctggggctggattttgtgctgactgcgctgatgtttgggaattga

SEQ ID NO: 258552 - DNA, 1311 bp, Klebsiella pneumoniae
gtgctgtttaccgccagcgccgtcggcagccaaaccacgctggcgcgcattatccgtatggtgcgccaggcgcagagcagtaaacctgaaatcggccagctggcggacaaaatctccgccgtgttcgtcccggcggtcgtggcgatagccctgttcagcgccgcaatctggtacttttttggcccggcgccgcaaattgtctacaccctggtgatcgccaccacggtgctgattatcgcctgtccgtgcgccctggggctggcgacgccgatgtcgattatctcaggcgtgggccgcgcagcggagttcggggtactggtgcgcgacgccgatgcgctgcagcgcgccagcaccctcgatacgctggtctttgataaaaccggtaccctcaccgagggtaaaccgcaggtggtggcgataaaaacctttaccgctatggatgaatccgccgctctgcgcctggcggcgtctctcgaacaaggctccagtcacccgctggcgcgcgccatcctcgacaaagccgcagaccaacgcctgcctgcggtagataatttccgcacgctgcgcgggctgggcgtcagcggcgaagccgaaggccaccgtctgctgctcggtaaccaggcgctgctgaatgagcacaagattgcaacggctgaaatagaagacgaaatgaccgcccaggcgtcacagggcgcgacgccggtactgctggcggtggatggtcaggcggcggcgctgttcgccatccgcgatccgctgcgcgaagatagcgtggcggcattagccaggctgcaccgccagggctatcggctggtgatgctgaccggagataaccccaccaccgccaacgctatcgccaaagaggcgggcattgatgaggtgattgccggagtgctgccggacggtaaagccgatgcgattaaacgcctgcaaagccaggggcaccaggtggcgatgatcggcgacggtatcaacgatgcgcccgcgctggcgcaggccgatgtgggcatcgccatgggcggcggcagcgatgtcgccattgaaacggcggctatcaccctgatgcgccatagcctgaacggcgtcgccgatgcgctggaaatcgctaaggccacgctgcgtaatatgaagcagaacctgctgggggcgtttgtttataactcgctgggcattccgattgccgccgggatcctgtggccgctgaccggaacgctgctcaacccggtggtagcgggcgcggccatggcgctctcttcgattaccgtcgtgagcaacgccaaccgtctgctgcgctttaagcccaaagcataa

SEQ ID NO: 258553 - DNA, 1251 bp, Klebsiella pneumoniae
atgcctgaacatggtcaatgcgggtggccggcaggctgcctgatgagcgcgctggcggggagctggatgctgttaagccagccggtatgggcggcgttctctatacccggctacgagctggtgtataacgcgccgcaggaaaccaccttacaggataatgatttacgtcatgccgccgaagtctggcagcagatgttcgatgcggcgcgcagccatatcgatctggcgcagttttatgtggcgaatgaaaaaggctctctgctggatggggttctggcacgtctgcgggccgccggggagcgtggagtaaaaattcgttttctgatggaggagaagggcgtgggcctttcaacgccggaaacgctgacggccctgaaagcgatcccgaacctggaattgcgggtgattccgttccatcggctgaccggcggtattgttcacgccaagtatctgctggtggatggcaaagaggcttttgtcggtagccagaattttgactggcgcgcgctggaacagatccaggagaccggtctgcgcatcagcgatccgcaaacggtgcagcagattcaggctattttcgatcaggactggcaagcgcaagctctgctggcggagagtaagccggtaccgaagccggcgcggcaggcggtagcgtcggccccgcagggcaattatctggttgccagcccgcgcgattataacccgagcggggtgattgattcgcaggtggcgctgccgcagctgctggcgagcgccaaatcgcggatccgggtgcaggtgatggactatgcgccgctggcgtggggagaaaaggggagccggcccttttatgcgcccattgataacgccctgcgcagcgcggcggcccgcggcgtacaggtggagctgatggtggcgaactggaacctgaaaaagccggaggtattctggctgaagagtctctctctggtgccaaacgttcagctaaaagtggtgaccatacctcccgccagccgagggtttatcccctttgccagggtggtacacagtaagctgatgaccatcgacggtacgacggcgtgggtcggaaccagcaactggagcggaggctatttcgataactcacgtaaccttgagctggtgctgaataatgcgtcgatggccgcgcgcgtggacgcgctttacagccagctgtggaatagccgctatgcggcaccgatcaaggtcgattttgattatccggttccgcatcctggccgtgagttcgaatag

SEQ ID NO: 258554 - DNA, 1761 bp, Klebsiella pneumoniae
gtgacaaagcgtccctcaaaggagtttggcggcttcgtcaaacaaacgctcggcagccataacctcagcaaaactttcgctcgtctggagaccggggagtacaacggttttagcaactggctctcgtactcgcatactgaagccaaaaaatggcgcggggaggggcgtaattattccgataagttcgaaatgaactcgctgtacgaggatggcaacggcaacagcagcaacctgatcatgaagtataaccgtcaggataacagcaactataataccctgagtaaagcgcagttcgaagaagacccgcgtcaggactactcgaccaccccggtctacaacagcaaaggtcaactgagcaaatattacaagctgaaccgtaatccgtttgaaaccttcaccctctcttttacccagcgcttacagctgcgcgataacctcgcgttgaccgttcagccctattactactggggtaacggcggcagctttaccggacaaacggcctcggtgctgtccaatacgtctgataccgccggacagtacgatctcagcaacctgacttccaatacctactaccggccttcgtggacccagacctggcggccgggcgttaccacgaaattgaagtgggatattaacgacgaacacagcctggatattggctactggtacgagcgcgcgcgtcagtcgcagacccagccgtttattagcattcaggacgatggcaacccggcgaacgtttccggcaaaccgggtggttccgatcaggttaaagatgcgaacggcaatacggtacagggacgtaaccagtacacggtgactcctgcgcacaaagtatggcttcaggacagctggttcgtgacgccagactggacgctggtgggcgggctggcttatcagtatgtagaacgtaaaggcgataataaaggcagcctgtatagcgctgcggaaaaacgccaggcgacctaccatgaattcctgccgaactttagcatcagctataagccggatagcgaaaatcagctgttctataacctgacgcgcaacatgcgtacgccacccaactacgtgctctacaacgtcggcgattcgatcagcaccaaacctgagctgagctggaaccacgagctgggctggcgttttcagcgcgaagatatgctgctgagcgcgacgctcttctatatgcgctataccgaccggcagatttcgaccaccaatgcggatggtgactacgaaatgatgaacatcggcagcgtggagagtaaaggtctggagctggagtggagcggtaagctgccgtacaacttcaactactacacctcttatacctacacccattccgaacaaaaagacaacattgtgagcaacggcggacatccgctgccaacagcgggcaaaacggtgccaaacgtaccgaaaaacatgcttaacgcgtcgctgggctatgacgatggtctctactacggcagcttcggcggcaaatacgtcagttcgttctacggcgatttgaccaacgacgaaaaaatcggcgggcgcacggtctttgatgtcgccgcgggcgtgcatctgccggtggataaaaagattgtcaaaagcgccaccctgcgctttggcatcgataacctgttcgataaacagtacctgacctccgtccgctcgacgacttttaacgcggcggcttacgacggcgtgaaggccagtaccccgtactacaacgttggcgaagagcgcacctttagcgtctcgctggaagcaaccttttaa

SEQ ID NO: 258555 - DNA, 1416 bp, Klebsiella pneumoniae
atgacagacctcccctccagcgtgcgctggcagctatggatagtggccttcggcttctttatgcaggcgctggataccactatcgttaacaccgctctcccctcgatggcgaaaagccttggggagagcccgctgcatatgcatatggttatcgtctcctatgtcctgacggtagcggtgatgctgcccgccagcggctggctggcggaccgcgttggggtacgcaatatctttttctgcgccatcgtgctgtttaccgccggctccctgttctgcgcccaggccgctactcttgatgggttaatactcgcccgcgtgctgcagggcgtcggcggcgcgatgatggttcccgtgggccgcctgacggtgatgaaaatcgtcccgcgcagccaatatatggcggcgatgaccttcgtcaccctacccggccaggtgggcccgctgctcggcccggctctcggcggaatgctggtggagtacgcctcgtggcactggatctttctgatcaacattccggtcggtattatcggcgccatcgccacgctgtgcctgatgcccaactacaccctgcaaacccgccgcttcgatctcttcggctttgttttgctggccgccgggatggcgacgctgaccctggcgctggacggcaacaaagggctcgggatctctcccctgtggctggcggggctggtggcggtcggcgtggcgtccattctgtactatttgcggcacgcgcgcggcaaccgcaacgcgctgtttagccttaagctattcaacaaccgcaccttttcgctcggccttggcggcagcttcgccgggcgcatcggcagcggtatgctgccgtttatgaccccggtgtttttacagattggcctcggctttacgccgttccacgccggtctgatgatgatcccgatggtgctcggcagcatggggatgaagcgcatcgtagtccaggtggtcaaccgcttcggctaccgtcgggtgctggtggcctcgacgatcggcctcgcgctggtcagcctgctgttcatggccgtcgccctcgcgggctggtactggctgctgccggtggtgctgtttatgcaggggatgatcaacgccagccgcttttcctctatgaatacgctgaccctgaaagacctgcccgacgatctggccagcagcggcaacagcctgctgtcgatggtcatgcagctgtcgatgagtatcggcgtgaccgtcgccggcatgctgctgggtttctacggccagcagcatatcagcgccgatgcgccgaccacgcaccaggtctttctctatacctacttaagcatggcggtggttatcgcgctgcccgcgctgatttttgcccgcgtaccggacgacaccacggtcaataccgtgattcgtcgccgtaaaaggagtgagtcttga

SEQ ID NO: 258556 - DNA, 1536 bp, Klebsiella pneumoniae
ttgaagttctggcgtcccggcattaccggcaagctgtttatcgcgatcctcgccacctgcatcgtgctgctgatcagcatgcactgggcggtgcgcatcagctttgaacgcgggtttatcgactatatcaaacgcggcaatgaacagcggctgacgatgctcggcgatgccctgagcgagcagtatgcccagcacggcagctggacgttcctgcgcaacaacgaccgctttattttccagctgctgaaaacctttgaacgcgacaacgacgaccgctcgccgccgggccgcggtatgggtcatggtccgagagatgagccgcacggtggccccggccccgaagagatgccgccggatgccgcgccggaccggccgctcgacggtccgcgcggcgatcgtggcgatcgcggtcccggccccgatatgcctccccacggctggcgcaccatgttctgggtggtcgatcaaaaagggcgcgtgctggtgggcccgcgcgagcgcgtgccgcaggacgggacccggcgcagtattatggtcgacggcgttgaggttggcgcggtcatcgcctcgccggttgaacgcctgacgcgcaataccgatatcaacttcgaccgccagcagaagcgcaccagctggctgattgtcgccctcgccacgctgctggcggcgctggccaccttcccgctggcgcgcggcctgctcgcgccggtcaaacgactggttgaggggacgcaccgtctggcggccggggatttttccacccgcgtcgccgccaccagcagcgatgagctagggcgtctggccaaagattttaaccagctggccagcacccttgagcgcaaccagcagatgcgccgggacctgatggccgatatctcccacgagctgcgcacgccgctggcggtgctgcgcggcgagctggaggcgattcaggatgggatcaggaaattcaccccggattccatcgcctccctgcaggcggaggtcgccaccctgaccaaactggtcgatgatttgcaccagctgtcgatgtccgatgaaggcgccctctcctatcagaaaagcgcggtggatatcatcaacctgctggaggtcgccgccggcgcgtttcgcgaacgcttcgccagccgcggactgtcgatcggcgtttcgctgccggaaagcgcgacggttttcggcgaccgggatcgcctgatgcagctttttaataacctgctggaaaacagcctgcgctataccgatagcggcggcggcctgcagattagcgccagccagagcggcgataggctaattctcgatttcgccgatagcgcccccggcgtcaccgatgaacagctggagcggctggttgagcgtttttaccgtactgaggggtcgcgcaatcgtgccagcggcggctctggtttaggactggcgatttgccttaacatcgtcgcggcccacggcggcactttacgtgtcggccattcgcctttgggcggggttagcattaaagtagagctacctctggaacgtaatttatcgagagacgtatga

SEQ ID NO: 258557 - DNA, 216 bp, Klebsiella pneumoniae
atgccggtaattaaagtacgtgaaaacgagccgttcgacgtagcgctgcgtcgcttcaaacgttcatgcgaaaaagcaggtgttctggcggaagttcgtcgtcgtgagttctatgaaaaaccgactaccgaacgtaaacgcgctaaagcttcagcagtgaaacgtcacgcgaagaaactggctcgcgaaaacgcacgccgcactcgtctgtactaa

SEQ ID NO: 258558 - DNA, 1764 bp, Klebsiella pneumoniae
gtgtataaaacggggcatatggctggacgaatcccacgagtatttatcaatgacctgctggcgcgcaccgacatcgtcgatctgatcgatgcccgggtaaagctgaaaaagcagggcaagaattatcacgcgtgctgtccgttccataacgaaaaaaccccctctttcaccgtcaatggtgaaaaacagttttaccactgctttggctgcggtgcgcacggcaacgctatcgacttcctgatgaactacgacaagctcgagttcgtggaaaccgtcgaagagctggccgccatgcataatcttgacgtgccgtatgaagcaggtagcgggcccagccagattgagcgccatcagcggcaaaatctttatcagctgatggatggtctgaacacgttttatcaacagtctctgatgcaacccgccgccgaccccgcgcgccagtatctggaaaaacgcggcttaagcagtgaggtcattacgcgctttgcgattggctacgcccctcccggctgggacaacgttttaaaacgttttggcggtaatcaagaaaatcgccagtcgctgattgatgcaggcatgctggtcacgaacgatcaggggcgcagttacgaccgcttccgcgaacgggtgatgttccccatccgcgataagcgaggccgggtgattggttttggtggtcgcgtgctgggtgatgccctgccgaagtacctgaactccccggagaccgatattttccataaaggccgccagctgtacggtctttatgaagcgcagcaggacaacgctgaaccgtcccgcctgctggtggtcgaaggctatatggacgtggtggcgctggcgcaattcggcatcaactatgccgttgcgtcgttaggaacgtcgacgaccgctgaccatattcagctgttgttccgggtcaccaatcaggtggtttgctgctacgacggcgaccgggctggccgcgatgccgcctggcgcgcgctggaaacggcgctgccgtatatgaccgacgggcgtcagctacgctttatgtttctgccggatggcgaagatccggatacgctggtgcgcaaagaggggaaagccgcatttgaagcgcggatggagcaggctcagccgctctccacgtttttgttcaacagcctgctaccgcaggtggatttgagcaccccggacggacgcgcgcagctgagtacgttagccttgccgctaataactcaggtaccgggcgaaacgctgcgcatttatctgcgtcaggagttaggcaataagctggggattttagacgatgcgcagcttgaacgtttaatgccaaaacagtctgaaaatggcatccagcgccctgctccgcagctaaaacgcacgaccatgcgtatactgataggactactggtacaaaacccggacctggccccgctggtaccgcctctcgaagggctggacccgcgtaaaatgcccgggcttggtttgttcaacgaactggttaaaacctgtttagcacagccgggcctgactaccggactgcttttagagcagtatcgcggcacaaatgaagccgcaacccttgaaaaactgtcgatgtgggacgatatagcagataaggatattgctgaaaaaaccttcaccgactcgctcaaccatatgtttgattcactgctggaactgcggcaagaagagttgatagctcgcgaccgcacgcacggtttaagcagtgaagaacgccgggagctctggactatcagccaggaactggccaaaaaataa

SEQ ID NO: 258559 - DNA, 834 bp, Klebsiella pneumoniae
ttgagtacgaacgcgatccatcatgacacgcatgctgttaaccaggtaatcaaactgcttcggcaccagacggaactgtttgaacacttcagacagcttgaggatctcttcctgcgctgcggcgtggctacgacctttcgctttgatggtgtcgcgggtcagttcgtactgcgtacgcagttcggcgaatttctcgcgcgccagctcagggtcgatgctgttgtcgtcatcgctgctgtcgtcgtcttcttcttcatcttcgtcttcgtcgtcatccatctcttcctgagagagttcagaaccgacgtgagtggcggttggcgccagatcttcttcagcgttcgggtcgacaaagccggtgatcagatcggacaggcgcgcttcttccgcttcaacgcgatcgtactgctccagcagataggtgatcgcttccgggtattccgcaaccgagcactggacctggttaatcccgtcttcgatgcgtttagcgatgtcaatttcgccttcgcgcgtcagcagttcgacggtacccatttcgcgcatgtacatgcgcaccgggtcggttgtgcgtccgatttcagactcaacgctggagagaacctgcgcggcagcttcttccgcatcttcgtcggtattgttgttcgtttcagcaagcaagagatcatcggcatccggtgcttcttccatcacctgaatgcccatgtcgttgatcatttggatgatgtcttcgatctggtcggagtcgacgatatcttccggcagatggtcattgacctcggcataggtcagatagccttgctccttaccacgttggacaagaagcttcagctgtga

SEQ ID NO: 258560 - DNA, 735 bp, Klebsiella pneumoniae
gtgatcggtattcatgtcgataccgaagcgcatacgcaggactttcgcttctcgggcggtcaggccagccagaacgtcatgggtggcggcgcgcaggctctcggtggtggcagagtccagcggcagctcgagggtgttatcctcgataaaatctcccagatgcgaatcttcatcgtcgccaatcggcgtttccatggagatcggctctttggcgattttcagcaccttacgaattttatcttccggcatcagcatacgctcggccagctcttccggcgtcggctcgcggcccatctcctgcagcatctggcgggaaatacggttgagcttgttgatcgtctcaatcatatgcaccggaatacggatggtgcgcgcctggtctgcgatagagcgggtgatcgcctgacggatccaccaggttgcgtaggtggaaaacttatagccgcggcggtattcaaacttatcaaccgctttcatcagaccgatgttgccttcctggatcaggtcgaggaactgcagaccgcggttggtgtatttcttggcgatcgagataaccagacgcaggttcgcttcaaccatctctttcttcgcacggcgggctttcgcttcaccgatggacatgcgacggttgatatcttttacctgctcaatggtcaggccggtctcttgctcaatttgctgcagcttcatcaggccgcgctggacgtcttcttttacgtcaagcagcttctctga

SEQ ID NO: 258561 - DNA, 912 bp, Klebsiella pneumoniae
atgtactatggatttgacattggcggcagcaagatagcgctgggcatatttgataaagcgcggcggctgcagtgggaaaaacgcgtcgccacgccgaaagagagctacgaagcatttttgcaggcggtagaagcgctggtacaggaagctgaccagcgctttggttgccagggctcggtgggcattggtattccgggcatgccggaaactgaagacggcacgctgtacgccgccaacgttcccgccgccagcggcagacggctgcgggccgatctgagcgagcgtctggggcgcgacgtgcgccttgataacgacgccaactgttttgccctctccgaagcgtgggacgatgaatttacgcaatatccgctggtgatggggctgatcctcggcaccggggttggcggcggtctggtgcttaacggtaaatcgattaccgggcatcgctatattaccggcgaattcggccatatccgcctgccggtggatgcgctggaagtggtagggcgtgattttcctctgacccgctgcggctgcggtcagctgggctgtattgaaaactatctttccgggcgcggtttcgcctggttataccaacacttttatcaacaatccttaacctcacccgagatcgtcgcgctctggcaacagggagacgcgaaggcgcgcgagcacgttgagcgctatctcgatctgctggcggtgtgtctgggcaatattttaacgattgtcgaccccgatctgctggtgcttggcggaggattgtctaactttactgcaataaccgaagggctggcgcagcgcctgccgcgacatctgcttcccgttgccagcgtgccgcgtattgagcgcgcgcgtcatggcgatgccggaggtatgcgcggtgcggccttccttcatctgactcaataa

SEQ ID NO: 258562 - DNA, 846 bp, Klebsiella pneumoniae
atgcagtcgcgccgcttacaccgattaagccgatttcgccgcaacaagcgccggttacgagaccgtttgcgccagcggattttcttcggcgaagataaggagacacctgaaacgatggaaaaaccaagagtcgtggtgctaaccggcgcgggcatttcggcggagtcgggaattaaaaccttccgcgccgctgatggtctgtgggaagagcatcgggtggaagacgtggcgacgccggaaggtttcgcccgcgacccggcgctggtacaggcgttttacaacgaccgccgccgccagctgcaaagccctgacatcgcgcccaatgcggcgcatcaggcgctggcgcggctggaagaggcgctgggcgaccatttcctgctggtgacccagaatatcgataatctacacgaacgcgcgggtaaccggcggataatacacatgcacggcgaactgctgaaggtgcgctgctcgtggagtgggcaggtgctggagtggaccggcgatgtgaccacggaggataaatgccactgctgccagtttcccgcgccgctgcgcccgcacgtggtgtggttcggcgagatgccgctggatatggatgaaatctacctggcgctggccgagtgcgatatctttatcgccatcggcacttccgggcacgtttatccggcggccggctttgtccacgaagcgcggctgcagggcgcccatacggttgagctaaacctcgaaccaagccaggtgggcagcgaatttgctgaaaagcactatggcctggcaagcgaagaagtaccgaggtttgtggaaaaattgctgcatgaggtcgccaggtcgacgccacgtctttga

SEQ ID NO: 258563 - DNA, 306 bp, Klebsiella pneumoniae
atggatagcccgttagtgatatctttcattatttttattgccgcagttggggttgggctgtggagtcagtattgcctgccccgtctttccgatagcctaaatatcctatttattatttgtttttttctcggtatcggatccgctgcttcatgtttgtttcatctgctctatctgctgttggtcggccagagcgcacagggcgatatcgccgcgttcggtacgcttattacgatagcagcgctctggaagccgctgaactatgtcaccgacgccgcaaataaacgtaagggaaagcgcaaagagtag

SEQ ID NO: 258564 - DNA, 141 bp, Klebsiella pneumoniae
atgctgagcccggaagtcgccaatgataaatcgctctacccggacgccgcgacgattcagaaaggcgaatggcagaacgatgtcggcagcgccagcaccctgtatgaagagtattatcagaaactgaaagcgggtcgttaa

SEQ ID NO: 258565 - DNA, 912 bp, Klebsiella pneumoniae
atgtggtctgaatactcgcttgaagttgtcgatgctgtcgcccgaaacggcagctttagcgccgccgcccaggaactgcaccgcgtaccctcggccgtcagctataccgtacgtcagctggaggagtggctggcggtaccgctgttcgaacgccgccatcgggatgtggaattaacgccggccggcgtctggtttttacaggaagggcgatctgttatcaaaaaaatgcagatcacccgccagcagtgccagcagatcgccaacggctggcgcgggcagctctccatcgcggttgataacatcgttaaacccacgcgtatgcggcagatgatcgttgatttttatcgccattttgatgacgtcgagctgatcgtctttcaggaggtgttcaacggcgtctgggatgcgctcgccgacggtcgcgtggaattagccatcggcgcgacgcgctccattccggtagggggacgctacgccttccgcgatatggggatgctgagctgggactgcgtcgttgcgagccaccatccgctggcaaaaatggcggggcctttgagcgatgacgtgttgcgcaactggccgtcgctggtcagagaggatacgtcacgctcgctgccgaagcggaccacgtggctgctcgataaccagaagagggtagtcgtgccggactgggatgcttctgaaacctgcctctccgccggactgtgcgtcggtatggtgcccgggcatttagcgcgtccgtggctggatagcggcgaatggacggcgctggagctggagaaccccttcccggatgccgcatgctgcctgacgtggcagcaaagcgacgcttcgccggcgctgctctggttactggattatcttggcgatagcgaaacgctaaaccgggagtggctgcgggcgccggaataa

SEQ ID NO: 258566 - DNA, 1185 bp, Klebsiella pneumoniae
atgcaacaacctgggaaaggatttttagtctggctggctggcctcagcgtactgggctttctggccaccgatatgtatcttccggctttcgccgccatgcaacaggatctgaatacttccgccgcctcagtcagcgccagcctgagcctgttcctggcgggctttgcgcttgggcagctcttctggggccccatttccgatcgctatggccgtaagccggtgctgctgagcggtctggctatctttgctgtcggctgcctggggatgctgtgggtgcgcgatgccggcctgatgctggcgctgcgctttatccaggctctgggggtttgcgccgccgcggtgacctggcaggcaatggtaaccgattattaccctgcgcaaagaaccaaccgtattttcgccgccattatgccgctggttggtttgtcgccggcgctggcgccgctgcttggcagctggctgctggtccacttcgaatggcaggccatttttgccgttctgttcgccattaccctgctgctgatgctgccggccctgcgcctgaagccagcgaataaaccgatcgtcagcgtccagcagaagctcaccttcctcgccctgctgcgctcgcgggaatatagcggtaacgtgctgatctacgccgcctgttccgccagctttttcgcctggctcacgggctcgccgtttatcctccatgacatgggctacggtccgaccgttattggcctgagctatgttccgcagactatcgcgtttctggtgggcggttatggttgccgcgcggcgctacaaaaatggcaggggcagcaaattcttccctggctgctggcgattttcgccgtcagcgtcgccgccacctggctggttggcctgcaggagaacgcgacgcttgttgggttgatgattccgttctgcgccatggcggtggtgaacggcggtatttatcctatcgtcgtcgcgcaggccctgaagccattcccgcaggcgaccggccgtgccgcggcgctgcaaaacactctgcagcttggcctctgcttcctgaccagcctgctggtctccacgctgattgccacgccgctgcaaacgaccaccagcgtgatgctggtttccatcgtgctggccggcataggctaccgcatgcagtataaagccgcgcatccggcaacagaatcgtcacatgcgtaa

SEQ ID NO: 258567 - DNA, 3387 bp, Klebsiella pneumoniae
atggcaaccctgcgtgaacttatcattaaagtttctgctaactctcagtcattccagaccgagatagcccgcgcgtcacgtatgggggctgattattataagacaatgcagaatggcggcaggcaggctgcggcctcagttcgggaaactcgccgttctgttgctgagctaactgaccagatggagtcagcaaaggctaccgcactgggattaaccggggcatttgctggagcttttgctacggggcatttaatatccctggctgatgaatggaattcagtaaacgcccgcttaaaacaggcatctcaatcaactgatgattttaccagctctcaaaaacagctgatggatatcagtcagaaaacgggcacatctttttctgacaacgctaatttattttcccgttcagcagcctcaatgcgggaatatggttacagctccagccaggttctggatattactgaggctatttctactgggttaaaactttctggcgcgaatgctcaggagtccagttcggtcatcactcagtttagccaggcccttgcgcagggtgtgctgaggggcgaagaattcaatgccgtcaacgagagcggcgacagggttatacgggcgcttgcggcaggtatgggagttgcgcgtaaagacctaaaatctatggcggatcaggggcagttaaccattgataaagtagtgccagcccttatcagccagcttggtaagctccggaatgaatatggtgagttgccgcagaccgtttcatcgtcggcaactaaagttgaaaacgcttttatgcaatgggtcggtggagctaatgaagcgagtggcgccacaaataccctgaccggattacttgatggcgtagccaacaatattgatcaggtcgccactgctgccggagcacttgttgccgttggcgcagcccgatatttgggaaatatggctcttggtgccagctctgcgacggctgggattattaacgctgcaaaaagtgaagtagctttagctgaagcccaggtaagagggacgcaggtttcgacagctcgcgcgcgtgctgcagtttatcgtgcccagcaggcgttggcagcggcgcggggtacagacgcgcaggtcgccgcagaaaaacggctttcactggcgcaggagtcacttaaccgtaatattcaggccagagtatccgctcagactgcactgaactcggttactgctgtgggttcccggctcatggggggagcattaggcctcgttggcggtattccagggctggttttgcttggtgctggtgcctggtacacgatgtaccagaatcaggagcaggccagattatccgcacaggaatatgcaaacaccattgatgcagtccgtgaaaagacaaaatcaatgaccctgcccgaagtttctgacaatgagaacaaaacccgtcaggcgctggatgagcaaaaccgtcttgttgatgcccaaacatcaaaagtaaaaagcctgaaggaagagatcgcgggctatcagtatgtcctgtctaaccccggaccaacaaccagtggcggtttcatgataaaccacctgacttcggtcgaagcggtcacccgtggtctggaagaagcgacttccgctcttgccgttgaacaggagaggttagctcagatgcaggctaagtctgagtcgatccagtcggtactggaggggatagagaacaggcgaatagcattaatccggcagcaggctgcagaacaaaattcagcttatcaatcgttattaatgatgaacggtgagcatacggaatttaaccgtcttctgggtctcggaaataatcttctcatggcccggcaggggctggtaaacgcaccagtacgcttaccacaggtagacctgacaacccagcaaacggctgcactggaaaaaagccgccgtgacctggcgctttcaaaactcaaaggtgaggacaaagaacgcgcacgactgggttacgctgcggatgaccttgggttaactaacgatcctcaatttcagaccggacggcaggagttgattaataacggtctgaatgaatggagaaacaaccaggaaaataaacccaagccaaaaggaaggcatgggaaaaccgaggcggagaaaaccgaagatacctatacccggctgattaaacagcaacgggagcaaattgctctttccagccaaaacactgaactggcaaagatgaaatatcaggttactcagggggaattatcttcgcttgaaaaatccaaaaaggaaacattgctgcacaatgctgcgcttattgatcagaaaaatatcgctgaacagttaaaaacattccgcgaaggtctggccgacagtaatgctgccgcccgggaaagggggaatatcgatttcctcggcgcgggacaaggggataaagtccgtgatcgaatgaaggaaatggcggatattcgcgctgattttctgaggcagcagcgtgatttacagcgtgatttcagtcgtgggcagatttccgaagacctgtataaaaagcaaacggaagcgcttaaaacagcgcttgccgaacgcctggatattcaggaggagtattacaaaaaaaccgatgaacagcagtcagactggcgggcaggggtcagcgattccctgatgaattatgccgatcaggcttctgatctgagttcaatggctgccactgcaaccagcgaaattctggatgccaccactaactctatttccaacaacctgacaaacgtcctgacaggcgctgcttcgtttaaagatgggatgtcgaatattttttcttccctgggcgaaacggtgattaaaacgctgatccagatggcaacacaggcgttgatcaccaaagcgattatggcgtcattcggcggcggagcgggagggttgttcggtagtctttttggcggtgccagcggtgcggcaagtagtggtaccgctattcaaagcgcgggagctaatttttcattcaacgctctcggaggcgtttacgattctccgtcactttctgcctacagcaacggcgtgtacagcactccccaatattttgcgtttgcgaaaggggcaggggtattcggcgaggccgggccggaagccatcatgccccttacccgtggcgctgatggttcgctgggggttcgtgctgtaggtcgtgagtcccctgcggtacagaacgcagcaagtcagattcaggcgcagccacggatagctgttagcgtggacgcacgaagcacgttcaccggcaaaccggatgacataacgatgcaggccgttgagcgaagaaataatgctcttgaacagcgaattgttaactctctaaccgccgagatagataacccacagaagaaattcggtcgggctatttattcaaatctccaatccaaaaaaccaagatag

SEQ ID NO: 258568 - DNA, 474 bp, Klebsiella pneumoniae
atggcagatattttctacccggatgaatacctgcccatgccgcttatggacgggtacgggtttaagcccatatcacctttgctgcgaacggagatgacgtccggtcgcgctcaacaacgaaggcgatatacctcaacacccactcaggcatcggttaaatggatttttaaaactgatgccctggcacaggtgtttgaggcgtttttcagggatgcgcttaaagatggtcagtcctggttctatctgaaacttcagactcccatcggggtaaagccctataaagccaggttcgtggatatttacgaagggccgacgctggtcgcgccaaaatactggcagtacagcgcaacgctggaattatgggaacgcccgttaccgccttcaggctggggaaattacccggaatggctggcgggccagtcgttactggatatcgcgctaaacagagagtggccgaagcatgacaattcttga

SEQ ID NO: 258569 - DNA, 2085 bp, Klebsiella pneumoniae
gtgggggatttcgcctggtacgaccatgttctgactaccagcctgctgcttggcaacgtgccggctcgtcatcagaacaaagacggatccatcgacatcgataccctgttccgcattggccgcggccgcgcgccgactggcgaaccggccgccgctgcggaaatgaccaaatggttcaacaccaactatcactatatggtgccggagttcgtgaagggccagcagttcaaactgagctggacccaactgctggatgaagtagacgaagcgctggcgctgggccacaagatcaagcccgtgctgctggggccggtaacctatctgtggctgggtaaagtgaaaggtgaaccgtttgaccgcctgaccctgctgaataccatcctgccggtttaccagcaggtgttggccgaactggcgaagcgcggcatcgattgggtgcagattgatgaaccggcgctggtgctggagctgccgccagcgtggctggaggcctttcaaccggcttatgacgccctgcagggccaggtgaagctgctgctgactacctattttgaaggcgttagcgacaatctcgcgaccattgctgcgctaccggtccaggggctgcacgtcgatctggtgcacggcaaagatgatgttgccgaactgcacaaccgcctgccggccgactggctgctgtccgcgggcttgatcaatgggcgtaacgtctggcgcgccgatctcaccgaaaagtatgcgcaaattaaagacctcgtcggtaagcgcgagctatgggtcgcgtcatcctgctctctgctgcatagcccgatcgatctaagcgtggagacgcgccttgatgcggaagtgaagagctggtttgccttcgcgctgcagaaatgcggtgagctggcgctgctgcgcgatgcgctgaacagcggcgatacagcggcgattaccgagtggagcgcgccaatccaggcccgtcgccattcgacccgcgtgcacaacgcggaggtggaaaaacggctggcggcgatcactgctcaggacagccagcgcgccagcccctatgaggttcgcgcgcaggcacagcgccagcgctttaacctgccgaaatggccgaccaccaccatcgggtcattcccgcaaacgaccgagatccgcggcctgcgcctggacttcaaaaagggtaaccttgacgccagtcattatcggacggggattgcggaacatattaagcaggcgatcgtcgagcaggagcggttaggtttagacgtactggtgcacggggaggccgagcggaacgacatggtggaatacttcggcgaacatctggacggttttatcttcacgcaaaacggctgggtgcagagctatggttcccgctgcgtgaagccgccggtggtgatcggcgacgtcagccgtccgcaggcgatcaccgtcgactgggcgaagtacgcgcagtccctgaccgacaagccggtgaaagggatgctcactggaccggtgaccattctgtgctggtccttcccgcgggaagatgtcagccgtgaaaccatcgcgaaacagattgcgctggccctgcgtgatgaagtggcggatctggaggcggcggggagcggcatcatccagattgatgagccggcgctgcgcgaagggttaccgctgaagcgcagcgactgggatgcctatctgcagtggggtgtggaagcattccgccttaatgctgcggtcgccaaagacgacacgcagatccatactcacatgtgctattgcgagttcaatgacatcatggactccattgccgcgctggacgctgacgtgatcaccattgaaacctcgcggtccgatatggagctgctggagtcgttcgaagcgttcgagtaccccaatgagattgggccgggagtatatgatattcattcgccaaacgtgccgagcgtggagtggatcgaagcgctgctgaagaaagccgcgcagcgtatcccggtggagcgactgtgggttaacccggactgcggcctgaaaactcgcggctggccggaaacccgcgccgcgctggcgaatatggtgcaagcggcgcgaaatctgcgccagtccgcctaa

SEQ ID NO: 258570 - DNA, 813 bp, Klebsiella pneumoniae
atgaccaccaccaagcaacctggattcgcacctgcagcttcaccacacgccgcaaccgccgttcatacgccggaagagcatattatcgccggagagacgtcgattccctctcagggtgaaaacatgccggcctaccacgcccgcccgaaaaatgccgacggtccgctgccgatcgttatcgtggtacaggaaattttcggcgtgcatgaacatattcgcgatctttgtcgccgcctggcacaggaaggctatctggctatcgcgcctgaattgtacttccgtcagggcgatccgaatgagtaccacgatatcccgaccctgttcaaagagctggtcagcaaggtgccggacgcgcaggtgctggcggatctcgaccacgtcgccagctgggcggcgcgccacggcggcgatgcccatcgtctgctgatcaccggcttctgctggggcggacgcattacctggctgtatgccgcgcataacccgcagcttaaagcggcagtggcctggtacggtaagctggtgggagaaaaatcactgaattcgccgaagcacccggtagatatcgccgtcgatctcaacgccccggtgcttggtctgtacggcgctaaagacgccagcattccgcaggacaccgtcgagactatgcgtcaggcgctgcgggcagccaacgccacggcggaaatcgtggtctatcccgaagccgatcatgcctttaacgccgactatcgcgccagctatcatgaagagtcagccaaagatggctggcagcggatgctcgcctggtttgctcagtatggcggtaaaaaaggctaa

SEQ ID NO: 258571 - DNA, 1587 bp, Klebsiella pneumoniae
atgacgctgcctttcaaaccccatctgctcgcgctgctttgcagtgccggactattagccgctgcgggtacgctctacgttaaaagccgggaaccgcaaacggcccccgagccacccgccgttgcgcagacggcgcagaccaccgccgccgctcggccggttaccgcaacctatacccccgcgcaaatagaccagtgggtcgcgccgatcgcgctctatccggacaatctcctgtcccaggtgctgatggctgcgacctatccgagtaacgtcgttcaggcggtgcagtggtcgcaggataatcccgcaatgaagggggatgcggcggtacaagcggtggcaagccagccctgggatcccagcgtaaaatcgctggtcgccttcccttccctgctcgcgttaatgggagaaaacccgccgtggatagaaaacctgggtaacgcatttctcgcccagccgcaggacgtcatggattcggtgcagcgcttacgcgccatcgcccagcagaccggaacgctaaaatctacgccgcagcagaaagtcatcaccgccacaaacgctgcggcaacgtcgacaaccagcacctcccgcagcagcagcgccgtgacatcctcccctcccgcccaggtgattaaaatcgaatccgccgatccgaacgtggtgtacgtgccggcctataacccttctgtagtttacggcgcctggcctaacacggcctacccgccggtctacctgccgccgcctccgggtgaacagttcaccgatagcttcgtcaaaggttttggctatagcctcggcgtcgccaccacctacgccctgttcagcagcatcgactgggatgatgacgatcgccatcatgacgatgacgatcaccaccacgatgatgatcatcacggcggctactcgcacaacggcgataatatcaatatcaacgtcaataatttcaaccatatcaccggtcagactctgccgggtaatcacgctaactggcagcataatccaacctggcgcggcaatattccgtacccgaacaacaacatcgcgcagcattatcatcagaccaatgttcccggcgggcttagcgctacccaacatcaacccgtcgatcgtaacgcgcagcgtcaggcggctatgactcagctacagcagcgtaccgggcctgcggctgccgcggataactcgcttgctcgcgcgccgtcccgcgatgcccagcgtcagctcgcatcgcagcagctgcaccaggtgacccagcgcaataactaccgcggctatgacgccacgccggcggttacacataacgccgtacaacagcagcatcgggaagcggtaaaatcgcaaattcagcatccaacggcgcagcagcaacagcgccgcgaacagctgcggaccgcaacgcccgcacaacgtcaacagaagctgaatgacctgcacgccaatgccctgagcggtaacgatatccgctctccttcctggcagtcgcagcaggcgcgcggcctgcagagccgtcatatctcgggtttaagcagcgagcagcgcagcgcggccagagaacagctttctgaacatcatgaactgcgccgccgctga

SEQ ID NO: 258572 - DNA, 795 bp, Klebsiella pneumoniae
atgaaaaaattattaacaatgactctgctggccctggcgcccgccatatcgttggctcaacagcagttttcctctccgcaacaggccgccagcgcgctggccgaggcgatcggcaagcatgatgaatcggcgctcaacgggctgctcggcgatagctggcagcagtttttaccgccggatggcattgcccctgacgccgtcgatcgctttcagcgtgactggaaagtgagccatcgtatcgttcagcaacaggatagcgcctggctggaggtaggtcaggaagcgtggcggctaccgatccccataattcaggataagagcggctggcgttttgatatggccgctgctgaagatgagatcctgactcgcgcgattggccgcaatgagctgtcagccattcaggcaatgcatgcttacgttgatgcccagcaggatttctatcgattaaaccacgcctgggcgcagaagattatcagcagcgatggcaagaaagatggcctctactggccagccgctcccggcgaagcccccagcccgttaggaccggcgtttagtcccgtagaacccggcgagggctatcacggctatcgtttccgcataattaaagacggcgagaatcagggcgccgccctgctggcatggccggtggaatggggaaagaccggcatcatgagctttatggttaaccagaatgatgaggtttatcaggctaatttaggtgatgaaacgcagatcaaggcgcgggcgatttctcagttttcgcctgactccggctggcaggccatccatcaatag

SEQ ID NO: 258573 - DNA, 435 bp, Klebsiella pneumoniae
ttggaatcgccacttggttctgatctggcacgtttggtacgcgtctggcgcgcgctaatcgaccatcgcctgaaacctctggagttaacgcagacgcactgggtcacgctgcataacattcaccagctgccgcctgaacagtcgcagattcagctggcgaaagccattggtattgagcagccgtcgctggttcgcacgctcgaccagctggaggagaaagggcttatttctcgccagacctgtgcaaacgatcggcgggcaaaacgtatcaagcttacggaaaaggccgagcctctgatcaatgaaatggaagaggttattggcaaaacgcgtgatgagattctggcaggcgtttccagagaagaagtggaaacgttgcttaatttaattcgtaaacttgaacacaacatcctcgatctccaggcaaaagattga

SEQ ID NO: 258574 - DNA, 1353 bp, Klebsiella pneumoniae
atgcgcgctaatataaaaagcttaccccaacggatatttctttacgctgccgtgtgtatccttgcgattaccatgcttaattacctcagcgactcgttaattcatcgtatacctacaacatcatccatgctttttcctgtactgacgatttcgctgatgacttttcatattatgattgcctgttttatgggaatgaaatatctgtgcgataaaaaacggctgtacctggttccgattaccttcgcctttgcctgctcggccatgctgatgctgggaacgataggcagctatcccgactggttgatttgcggacagggtcgcgccattaaccaaaatgacgcgctgattttttattttttccgcaacgtgatgatggccattttatttataacatcgattgttttataccgttttcgcaacatcaccctcagctcaggtaaaattcaccgaacggtactgacaggttgctttgtttttattgccgcagtgcttatattatcgtggattcattccagcaactccccgctgttgagtattgaattccttgacaatctgacctacacttttacgccgctgtggcataatcgtattggctggttattaattatcatatggtcagtaacgctgattttactgattagcctgactcaattgcgtaatatattctggtacagcggggcctttttttgtaccgcctatatatttacgttaatggttctactctcaacggcaggtgatagcagtcacgcctggaaccaggcgcgattctttgaaacgcttagcaccctgtttctgattttagtcctgctgtgcgatgtttttatgctctatcgcgaatcgaacgaaagatacgtccgctcttaccagaactcgattcgcgatcccctgacccggctgtataaccgcagctatttttatgacaccctgaatcaacgattgccgaaggtttccgcttcacaaccgctatcggtgatcgtctgcgacctcgatcgcttcaagcgcatcaacgacacctacggtcacgtgcagggcgataaggtgatccaatttgctgccagcgtgttgcagaacaacgtgcgccaggacgacgccgccgcgcgtatcggcggggaagagtttgccctgctgctggtcaatatcggcgcaaaggaagcgctggctgtcgccgaacgcatccgcctctccgtcagcgagaagcaggaaggattacccgaaagaatgactatcagcatgggggttttcacgacgcaggatacgcgtgtttcggcagaagagtgcgttaagcgcgcggataccgcgatgtacgaggcgaaaaacagcggtcgtaaccgcgttgtggtctggcatgaatag

SEQ ID NO: 258575 - DNA, 690 bp, Klebsiella pneumoniae
atgcgttattacctttctccctcgctcatgtgcatggacatgatgaaagtgaccgaacagctgcgctttttaaatagcaaagccgacaggctccacgtcgacgtgatggacgggcgctacgttaaaaatctggcgctatcggccagctttgtcgcgcagattcgtccctacacatcgcttcccatcgatgtccacctgatggtcgaagagcccgcctcgtttatcccggcgctaatagaagccggcgctgacgctatttcactgcatccggaaaccatctgccgggaagccttccggctcatcaatatgcttcgccaggcggggaaagcggtgggcatggtgctcaatcccgccacgccggttgagagcatccagcactatctgcatctgctcgataaggtcacggtgatgaccgtcgatccaggctatgccggtcagccttttattcccgaaatgctcgccaaaatcgcgcagcttcatcagctaaaagagacccgcgacctccacttcttgctggaagtcgacggctcatgcaaccgcaccacctaccgtgagctgctgggcgccggagcgcaggtattggtgatgggcagcagcggcttattccgcccggatatgccgcttgagcaggcctgggaaaaaatgtcccgcgatctgtccgccgcgctgcactcccccgagcgcgtataa

SEQ ID NO: 258576 - DNA, 294 bp, Klebsiella pneumoniae
atgaagagaatgaaaattgcgctttcgctggccgtctgtctggtgctccccagcgtggcgacagccgcaccgctctccgggctgaagtttgaacagcaaaagcagcagatagtgaaggatgtgaggaaaaactgccctaacagcagcgcgctggacgatacgcagtttgctaaccgcgtactggaatcagcggaaaataagactgccgtacaaagcgcgacgcgggcgctggataaaaacaacagcgccgcttaccagaaggccattagcgccatagcttgccccatgccctag

SEQ ID NO: 258577 - DNA, 942 bp, Klebsiella pneumoniae
atgtctacaatcaacgatgtatcacggttagctggggtgtcgaaagccacagtctctcgggtgttgagcggttcgcgcggcgtaaaggaagccagccgacaggcggtactgcaggcggcggaagagcttaactaccggccgaatatgatagcgcaatctttgctgagtcagactaccggctgcatcggcgtcatttgcgcccaggacaacattaatcaaaccaccagctatctctacgcgctggagaaacagcttagccagcaccagaagcatctgctgctgcgttttgccaacagccgcagcagagtgctgcattcgctggatgagttgacctgcggcctttgcgataatgtattaatcatcggcgcacggtttccgctcaatatcgaccggcccgacgtagtactgattgactgcctggaaagcgacggaacgaatagcattcagtttgaccacgccttcgcggcggaaacggcctgcaactatctgataagccaggggcggcgccagattgcgctgatccatccccaggccagcggctttgctgaccaggttttgctgggctataagcacgcgctggaaaagaattttctgccgttcaatcgcaacctggtttttctcgacagccattcgccgtccgtggcggtgcaggagctggtaaacaacacaaccaccctgaattttaatgcgttattggtggccaacgagcagcaggcgcagctggtggtgccgcagcttcaggcgtttaatcgcgcggtgccggaaaaagttatggtgttcagccttgcgggctcgttacagctgcccggtattccgaccattccggcgatagaatattcaatggacgcgatggccagccagatcgtcaactggctgaccgagaagacgcaaatactcggcagcagcccgctgcgcggggatttgatcattccgaaccgttga

SEQ ID NO: 258578 - DNA, 312 bp, Klebsiella pneumoniae
atgtacaagattatgctgtgctgctctgccggaatgtccaccagcctgctggtcagaaagatggttgatgccgcgaaggaacgtaatctgccggtgcagattgacgcctatggagtttccgaatttgacatgcagtttccgcaataccaggtggtgcttcttgggccacaggtgaaatacatgctgaaaaacttatctgagaaagccgctcccctgaatattccggtccagccgattaacaccatggattacggaatgcagcggggagataacgtcctggattatgccctgtcgctgattgcagcgcattaa

SEQ ID NO: 258579 - DNA, 1326 bp, Klebsiella pneumoniae
atgagttctctgtatcagtccatgattgccgtgatcgagcaatcaattaccccgctggcaggacgccttgggcagcagaaatacgttatcgcgattcgcgatggcttcactgccgcattgccgtttatgatcatcggctcattcatgctggtatttatctttccacctttctccccggataccacgaatggtttcgcccgcggctggctggatttctcccagcagtaccgtgaacagctgatgctgccgtttaacctcagcatgggcgtaatgacgttttttatttcggtgggaatcggcgccagcctgggacgtcagttccaactcgacccggtgatgtccggtctgctggcgttcatggccttcttactggttgccgcgccgtacgccgatggcaaaatctccacccagtacctctccggtcagggcatttttaccgccttgatcaccgccatctactccacccgcgtttacgcctggttaaagcagaacaatattacgattcgcctgccaaaagaggtgccgaccggcgttgcccgctcgtttgaaattcttatcccggtactggtggtgatcgcgaccctgcatccgctgaatctgtttatcgaagcgcagaccggtatgatcctgccgcaggcgattatgcacctgctggagcccctggtttccgcctctgactccctgccggcgattctgctttccgtcctgatgtgccagattttctggttcgccgggatccacggttcgctgatcgtgaccggcattatgaaccccttctggatggccaacctgtcggcaaaccaggccgcgctggcggccggtgcggcactgccgcatgtctatctgcaaggtttctgggatcactatctgctgataggcggcgtcggttccacgcttccgctggcgttcctgctgctgcgtagccgcgtaacccatctgcgtaccatcggtaaaatgggcattgtgccaagcttctttaatatcaacgaaccgatcctgttcggcgcgccgattatcatgaacccgatgatgtttatcccgttcgtctttgtcccgatgatcaacgccgttctggcttatggcgcgacgcgtctcggctggctcagccaggtggtttcgctgacgccgtggacaacgccggcgcctatcggcgcatcgtgggccgcaaactggacgttaagcccggtggtcatgtgcctgatttgtatggtgatgtcggcgctaatctatctgccattcctgcgcgcctatgaacgttccttaatgaaaactgaagttgaaaaagcaaaagccgcggttccggttgccgaaacggtcagccaataa

SEQ ID NO: 258580 - DNA, 303 bp, Klebsiella pneumoniae
atgattgaattagaagatgcggtaatggaaattatcgttaacgcgggacagtcacgctcattgtgttttgaagcactccattgcgcccgtaacggtaatatagatgaagcgcgcttactactgaatgaagccgatggttacgcccgtcgggcgcatcagatgcagacccggcttatcgagcaggatgccggcgaagcgcgccagccgatgacgttaattatggtccatgctcaggatcacttaatgaactcactgctcgcccgtgaattttcggaagagttaattcatttataccagcgttaa

SEQ ID NO: 258581 - DNA, 1677 bp, Klebsiella pneumoniae
atgaacgaaatgaccgtcaaagcgatcatcaccgccgactgctgctaccgcgtcgagggcgacagctacgagcctcagggtaacatctgcctggaaggcagcaacgagccggtgcagattaaagcgggcagcgtgctggaaacctatttgcgcaccatcgacctgtgtaacgacagccagatgattcaggacgagcgcggcctgtggggcattaccggcgggccaacggaaggggcgctgaaggtgctggcggcgaaagcgcggcttgcgcccgtcgacgcgcggctggtcgcgaagataccgttcgactcgcagtataaatacatggcgacccaccagaaaatgggcgacgtcgagcaggtgctgattaccggcgcgccggacgtgatttttgccctgtgccgccagcagttgagcaagcagggggcggtgccgtttgagcctcagtactgggaagaggagatggcgcgctttgcccgccagggcctgcgtatggtcgccgccgcctacaaaccggcccacgtcggcagcaccacgctgacccacgacgatctgcgcgaaggtctggtgttcctcggcattgccggaatgatggacccgccgcgtccggaagcgattgacgctatccacgcctgccagaacgcggggatccgcgtgaagatgattaccggcgaccacccgcagacggcgatgagcattggccagatgctggggatcaccaacagcagccaggcgatgaccggctaccagctggagcacatggatgacgccgagctggcgaaagccgccgttgagtacgatatctttgcccgtaccagcccggagcacaagctgcgcctggtgaaagcgctgcagggtaacggtgaagtggttggcatgaccggcgacggcgtcaacgacgccccggcgctgcgccaggccgacgtcgggatcgccatggggatcaaaggcaccgaggtgaccaaagaggccgccgacatggtcctgaccgacgacaactttgccaccatcgccagttcggtcaaagaggggcgtcgggtctacgacaacctgaagaagaccattctgttcatcatgccgaccaacctggcgcaggggctgctgattatcatcgccctgctggcggggaacatcattccgctgacgccggtgctgattttgtggatgaacatggccacctccgcgacgctctccttcggcctcgcgtttgaagccgccgagcgcaacgccatgaaccgtccgccgcgtaaaaccggccagcacgttatggacgccttcgccgtctggcgcgtcgccttcgtcggcacgatgattgccgtggctgcctttattctggaagcctggctggcgccgcgcggccacagcccggagtttatccgcaccgtcctgctgcagatgctggttaccgcacagtgggtgtacatgattaactgccgcagcagcgacagcttctcgctcaacatggggctgctgcgtaacaaaggcatctggctggtgagcggcgtactgctgctgatgcagctggtcatcatctacgtaccggtgatgcagacgatgtttggcaccgaagggctgccgccgcgctactggttcatcacgctggtcatcggtatcgcgatgttcctggtggtcgaagttgagaaacgcctgacccgtcgtttccgtaaaaccgcgtag

SEQ ID NO: 258582 - DNA, 1080 bp, Klebsiella pneumoniae
atgaacaagatcatccgctccgccctgctggcctgcggcctggcaggctacgcgctcgccgccgccgccgcgccggccgttccggtccgcgtcgtcaccgtggaacaagcgccgcacgccggcgaacggcaaatctccggccgcgtcgaggccattcactccgtcgatattcgcgcccgcaccgaagggaagattgtgcagcgccacttccaggatgggcagtacgtcaaccagggcgatctgctgtttacgctggatgacgcccagccgaaagccgcgctggcgctggcccaggccgaactgaagagcgcgcaggcgtcgctacgccaggcccagcagctgctgagccgctaccagcagctgatcaataaccacgcgatcggccgcaacgaccttgataccgcgcagatgcagcgcgatgtcgccgctgccgccgtggagcaggcccgggcgcgcattgccgcccagcagattacgctcggctacacccgcattacctcgccggtcagcggacgcgtcggccatagcccgtttcacgtcggcagcctggtgaaccccgccagcggcgtgctggtcgatgtggttcagctcgatccgattcgggtggcgttctcgctggatgaaaccgcctttttcgccaaagcggggcagcacacggatattgccgcactgaaggaagcgtggctcgcgcaggtggatgtcgatggacggcgtgaagacggcgttctgacctccgtcgataaccgtattgatagccgcaccgccagcgtggcgctgcgcgctgaattcgctaatccgcagcaccgtctgctgcccggcggcaacgtcaccattttcttccgcccgcggcagcttcaggagagcccgatgatcccggcggcggcgatgcagcaggacgcgcagggcttttacagctgggtgctgacggcggacaacaccgtgacgatgcgccgcttgacccccgcggggcagcaggggcagcagttcgcggtggcggaaggcctcctcccgggcgagcgcgtggtgacggagggcgcccagcgcctgcgtgacggcgcagccgttcagctgctcaactaa

SEQ ID NO: 258583 - DNA, 945 bp, Klebsiella pneumoniae
atgagtcgtcctcgtcgtcgcggccgcgatgtgcacggcgttctgttgctggataaaccgcaaggcgcatccagcaacgacgtgttgcagaaagtcaaacggctttataacgccaaccgggcagggcacacgggcgcgctggatccgctggcgaccggtatgctgccgatttgcctcggggaagcgacaaagttttcccagtatctgctcgattctgacaagcgctaccgcgtgattgcaaagcttggccagcgcaccgatacctctgatgccgatggccaggtggtggaagagcgtccgctggcttttagcccggagcagctggcagccgcgcttgacggcttccgcggcgaaactcagcagataccgtcgatgtattcggcgttgaaataccagggcaaaaagctgtacgaatatgcccgccagggcattgaagtaccgcgtgaatcccgaccgattacggtatacgaattgttatttattcgtcatgagggtagcgagcttgagctggaaatccactgctcgaaaggcacctacattcgcacgattattgatgatttaggcgagaaattaggatgcggcgcgcacgtcacttttctccgtcgcctggcggtcagtaaatatcctgtcgaacgaatggtgacgctggagcaactgcaggcgctggtcgagcaggccaatgcgcaggatattcccgccgctcagctgctggacccgctgctgatgccgatggacagtccggcttcggattacccgttgattaatattccggaaacctcagccgtctactttaaaaacggtaacccggttcgtacatcgggcgcgccgctacaggggctggttcgcgtcacggaaggcgcggaagagaagtttcttggtatgggtgaaattgatgatgaaggccgcgttgcgcctcgtcgtctggtggttgaataccctgcctga

SEQ ID NO: 258584 - DNA, 402 bp, Klebsiella pneumoniae
atggcgaaagaatttggtcgcccgcagcgtgtggcccaggagatgcaaaaagagatcgcaatcatcctgcagcgcgaaattaaagacccgcgtctgggcatgatgaccacggtttcaggtgtcgaaatgtcccgcgatctggcctatgccaaagtgtttgtgaccttcctgaacgataaagacgaagccgccgtgaaagcgggcatcaaggctttgcaggaagcgtctggttttattcgctcgctgctgggcaaagcgatgcgcctgcgtatcgtgcctgaactgacgtttttctacgataattcgttagtcgaagggatgcgcatgtcgaatctggtgaccagcgtggtgaaacatgacgatgagcgtcgtgtgaacccggacgacagcaaggaggactaa

SEQ ID NO: 258585 - DNA, 2061 bp, Klebsiella pneumoniae
atggctcaagaaaatgaaaagaactggactgaagcgccagaaacgcctgaagagaccactgactatcacgtaacgacttctcagcatgctcgtcaggctgaagacgacaacgatcgtgaagttgaaggcggtcgcggccgcggacgtaatgcgaaagcagcgcgcccggcgaagaaaggcaataaacacgctgaatcgaaagccgatcgtgaagaagcccgtgcggccgttcgcggcggtaaaggcggtaagcatcgtaaaggttctgctctgcagcaaggtttccagaagccggctcaggcggttaaccgtgatgtcattatcggcgaaaccatcaccgttggcgatctggccaacaagatggccgtcaaaggttctcaggtcatcaaagcgatgatgaaactgggcgccatggcgaccatcaaccaggtcatcgaccaggaaaccgcgcagctggttgccgaagagatgggccacaaggttatcctgcgtcgtgaaaacgagctggaagaagcggtaatgagcgaccgtgacaccggcgcagcggctgaaccgcgcgcaccggtagtgaccatcatgggtcacgttgaccacggtaaaacctctctgctggactacattcgttcaacgaaagtggcctctggcgaagcgggcggcatcacccagcacatcggtgcgtaccatgttgaaaccgacaacggtatgatcaccttcctggataccccgggccacgccgcgtttacctctatgcgtgctcgtggtgcgcaggcgacggatatcgtggttctggttgtggcggcagacgacggcgtgatgccgcagaccatcgaagctatccagcacgcgaaagcggcgcaggtacctctggtcgttgcggtgaacaaaatcgataagccggaagctgacctggatcgcgttaaaaacgaactgtctcagtacggcgttatgccggaagagtggggcggcgaagcgcagttcatccctgtatccgctaaagccggtaccggtattgacgatctgctgaatgctattctgctgcaggcggaagttctggagctgaaagcggttcgcaacggtatggcgagcggcgcggtgatcgaatccttcctcgataaaggtcgtggtccggttgcaaccgttctggtacgcgaaggtacgctgcataaaggcgacatcgtcctgtgcggtttcgaatacggtcgcgttcgtgcgatgcgtaacgaactgggtctggaagtgctggaagcgggtccatccattccggtggaaatcctcggcctgtctggcgtaccggctgccggcgacgaagtgaccgtcgtgcgtgacgagaagaaagcgcgtgaagttgcgctgtatcgtcagggcaaattccgtgaagttaaactggctcgtcagcagaaatctaagctggagaacatgttcgccaacatgactgaaggcgaagttcacgaagtgaacatcgtcctcaaagcggacgttcagggttctgtggaagcgatctccgactccttgctgaaactgtctaccgacgaagtgaaagtgaagatcattggttccggcgtaggtggtatcaccgaaaccgacgcaaccctggcggccgcatccaacgcgattctggttggctttaacgttcgtgctgacgcatctgcgcgtaaagttatcgacgcggaaagcctggatctgcgctactactccgtcatctaccatttgatcgacgaagtgaaagcagcgatgagcggcatgctgtctccggaactgaaacagcagatcatcggtctggctgaagtgcgtgatgtgttcaaatcgccgaaattcggcgccatcgcgggctgtatggtcaccgaaggtacgattaagcgtcacaacccaatccgcgttctgcgcgacaacgtggttatctatgaaggcgagctggaatccctgcgccgctttaaagatgacgttaacgaagtccgtaacggcatggaatgtggtatcggcgttaagaactacaacgacgttcgcgtcggcgatatgatcgaagtgttcgaaatcatcgagattcaacgtaccatcgattaa

SEQ ID NO: 258586 - DNA, 1137 bp, Klebsiella pneumoniae
atgggacagagtcaaaaattgaatacacaaccgcgttcgcgttctccgctggttcagctggcgggaattcgcaaaagctttgatggtaaaacggtaatatccgacctcaatctgaccatcaacaacggtgagtttctcaccctgcttggcccctccggctgcggtaaaacaaccgttcttcgtcttatcgccggcctggaaagcgtcgatagcggccgaatccatctcgaagatcacgatatcacccatatcccggcggaaaaccgccacgttaacaccgtctttcaaagctatgcgctgtttccgcacatgacggtgtttgaaaacgtcgcctttggcctgcgtatgcagaaaaccccggccgcggaaattaccccccgcgtccacgacgccctgcgtatggtgcagcttgacgcgtttgcccagcgtaaaccgcatcagctctccggcggccagcagcagcgcgtcgccatcgcccgcgcggtagtcaacaaaccgcgcctgctgctgcttgatgaatctctctccgcacttgattataaactgcgcaagcagatgcagaatgagctgaaggcgcttcagcgtaagctcggcatcaccttcgtcttcgtgacccacgatcaggaggaggcgctgaccatgtccgaccgcatcgtggtcatgcgcgagggtaaaattgagcaggacggcacgccgcgcgagatctacgaagagccaaaaaacctgtttgtcgccagctttatcggcgaaatcaacatcttcgatgccacagtcatcgagcggatcgacgagcagcgggtgcgcgccagcgtcgaaggccgcgaatgcaatatctacgtcagcttcgccgttgaaaaaggccagcggcttaacgttctgctgcgtccggaagatctgcgcgtggatgagatccaccacagtaacgatgccgatggcttgataggctatatccgcgaacgcaactataaaggcatgacgctggaatcggtggttgaactggaaaacggcaaaatggtcatggtcagcgaattctttaatgaagacgatcctgattttgaccactctctcgaccagaaaatggccattaactgggtagaaagctgggaggttgtgctggccgatgaagaacacaagtaa

SEQ ID NO: 258587 - DNA, 879 bp, Klebsiella pneumoniae
atgcgtatcgaagtgttactggatttaaaaactcgcctcggcgagagccctgtatgggatatcgagcagcaacgtctttggtgggtagatagcctcgacgggcgcctgttcgcctgtaacgcgcagggcggcgcgattaagagctgggacgtgcggcagaaaattggctctttcgccctgcgccagaacggcgaaggcgcggtggtagcgctacagaatggcgttcatctgctcgacttcgccagcggcgggctgacgctgctgcaccatccggaagcggaccggccctttaaccggctcaacgacggtaaagtcgatcgtcagggacgctttctgttcgggtcgatggatatgcgcgaagaggagccaagcggcgcgctatatcgcctggacgccgatctgtcactgcacgtgctgaagaaaaatatcatcgtctctaacgccccctgctggagcccctccggcgaaacgttctactttgccgatacctggacgggcgaaatctgtgcctgggactacaacaccgcgaccggcgatctctctggcgaacgtgtcttttgccacgtcgatcgcagcgaaggcggcgcggcggatggcgccaccgtggacagcgaaggctatctgtggaacgcgctggtctatgcgggcaagctggtgcgctacacgccggagggcgaggtcgatcgcatcattgagatgccggtgaaaaaagtcaccagcgtgatgttcggcggcgaaaacctcgacgtgctgtacgtcacctcaatggcgcagccgccgctaccgcgcttcccggaagataatcagctacgcggcagcctgttcgccatttacgacctgggcgtcaccggcgtagcggaacggcgctttgccggttaa

SEQ ID NO: 258588 - DNA, 567 bp, Klebsiella pneumoniae
atgaatgtatctgctacaattcttcttgccttcggcatgtccatggacgccttcgcggcctctattggaaaaggcgcgaccctccataaacctaaattttctgaagccctgcggacgggtctgatctttggcgctatcgaaacgctcaccccgcttgtcggctggggtttggggatgctcgccagccagttcgtcctcgaatggaaccactggattgcctttgtgctgctggtttttctcggcggtcgaatggttatcgaagggttacgcggcggcgatagcgatgagtgcgaagctccgcgccgtcacggtttctggctactggtcaccaccgctttcgccaccagcctggatgcgatggccgtcggcgttggcctggcgtttttgcaggtcaatattatcgccaccgcgctggctatcggctgcgccacgttgatgatgtcgacgctgggcataatggtaggacgttttatcggcccgctgctcggcaaacgggcggaaatccttggcggtatcgtgctgatcggcattggcgcccagatcctctggagccatttcgcaggctaa

SEQ ID NO: 258589 - DNA, 216 bp, Klebsiella pneumoniae
gtggtagaagtcgttaccctcacgagtacgttcacctacgcccgcaaacacggagtaaccggagtgctcgatcgcgatgttacggatcagttccatcatgtttacggttttacctacgcccgcaccaccgaacagaccaactttaccgcccttcgcaaacggacacatcaggtcgataactttgatgccggtttccagcagttcctgagagtttga

SEQ ID NO: 258590 - DNA, 354 bp, Klebsiella pneumoniae
gtggatagcccaacgctcttcttcgccgatgtcgcctttcatgtctaccggttggcccagtacgttcatgatacgacccagcgtggctttacctaccgggacttcgatcgggtgctcgaggtcttttacttccagaccgcgacgcagaccgtcggaagaacccatggcgatggtacgaacaataccgccgccgagctgctgctgaacttccagcaccagcttctcactaccattttgcacctcaagagcctcgtacacgcgcggtacggcatcctgagggaattcgacgtcgaccacggcgccgattacctggacaatttttccagtagccatcttgaatcctctacgaattaa

SEQ ID NO: 258591 - DNA, 1317 bp, Klebsiella pneumoniae
atgggtccgtacgctgacctcgccgaaggtatgaaggttaaatgtactggccgtatccttgaagttccggttggccgcggcctgctgggacgtgtggttaacaccctgggtgcaccgattgatggtaaaggtccgctggagcatgacggcttctccgccgttgaagctatcgcaccgggcgtcatcgaacgtcagtccgtcgatcagccggtgcagaccggttataaatccgttgatgccatgatcccaatcggtcgtggacagcgtgaactgattatcggcgaccgtcagacgggtaaaaccgctctggccatcgacgccatcatcaaccagcgtgattccggcatcaagtgcgtctacgtagctatcggccagaaagcgtccaccatttctaacgtggtacgtaaactggaagaacacggcgcgctggctaacaccatcgttgtggttgctaccgcatctgaatctgccgcactgcaatacctggcgccgtatgccggttgtgcaatgggtgaatacttccgcgaccgcggtgaagatgcgctgatcatttatgatgacctgtctaaacaggccgttgcttaccgtcagatctccctgctgctccgtcgtccgccaggacgtgaagcattcccgggcgacgtattctacctccactctcgtctgctggagcgtgccgcacgtgttaacgtcgaatacgttgaagctttcaccaaaggtgaagtgaaaggtaaaaccggttctctgaccgcgctgccgattatcgaaacccaggcgggtgacgtttctgcgttcgttccgaccaacgtaatttccattaccgatggtcagatcttcctggaaaccaacctgttcaactccggtattcgtcctgcggttaacccgggtatctccgtatcccgtgttggtggtgcagctcagaccaagatcatgaagaaactgtccggtggtattcgtaccgctctggcacagtatcgcgaactggcggcgttctcgcagtttgcctctgaccttgatgatgcaacccgtaagcagctggaccacggtcagaaagtgaccgaactgctgaaacagaaacagtatgcgccgatgtccgttgcgcagcagtctctggttctgttcgcggcagaacgtggttatctggcggatgtcgagctgtcgaaaatcggtagctttgaagccgctctgctggcttacgtcgaccgtgatcacgctccgttgatgcaagagatcaaccagtccggtggctataacgacgaaatcgaaggcaagctgaaaggcatcctcgattccttcaaagcaacccaatcctggtaa

SEQ ID NO: 258592 - DNA, 468 bp, Klebsiella pneumoniae
atgattttacgtgttttggctgtctcgatgattggttttacgcttgcaggctgcgtcagcagcagcggtctgtccggcgatgtttactccgcatccgaagccaaacaggtccagagcgtgacctacggcactattgtccatacccgcgcggtgcagattcagggcggagatgacagcaatgctatcggcgccatcggcggcgcggttctcggcggcttcctgggtaacaccattggcggcggcacgggccgctcactggcaacggcggcaggcgctgtcgccggcggcgtagccggtcagggcgtacagggtgcgatgaacaaaacccagggcgttgagctggaaatccgtaaagatgacggtaacaccatcatggtggtgcagaagcaaggcagcacgccgttctcggttggccagcgcgtggccattgccggcagcggcagccaggttacggtatccccacgctaa

SEQ ID NO: 258593 - DNA, 1125 bp, Klebsiella pneumoniae
atgaaatcaggccgctttatcggcgtaatgtccggcaccagccttgatggtgttgatgttgtcctcgcagcaattaatgaaaatatggtcgcccagcaggccagcctgacctatcccatccccattgctattaaagaagacattctggccatctgtcagggccagcagcttacgctatcgcagctggggcggcttgatacgcgtctgggacggctgtttgccgatgcggttcaggcgttgatgacgcaggaaaagttacaggcggcggacattatcgccatcggctgccatggccaaacggtctggcatgagcctacgggcgacgcgccgcataccctacagattggcgacaataaccagattgccgcgcgtaccggcgtgacggtcgtcggcgactttcgtcgtcgcgatatggcgctcggcgggcagggcgcgccgctggttccggcgttccaccacgcgctgctggcgcatccggtagagcgtcgaatggttcttaatattggcggtatcgccaacctctccctgctggcgccgggggtaccggtgcgcggctacgacaccgggcctggcaacatgctgatggacgcgtggatctggcgacagtgtggtaaaccctacgataaagacgcgcagtgggccagcgagggtaaagtggtgctgccgctgctgcaggatatgctaagcgatccgtggtttgcgctaccggcgccgaagagtaccggtcgcgaatactttaactacggctggctatcgcagcatctggcgcgttatccggggcttcgcgcccaggacgtgcagaccaccctggcggagctgaccgccgtcagcatcagtgaacaggtgctgctcagcgggggatgcgaacgtctgctggtctgcggcggcggcgcgcgtaatccgctgctgatggcgcgtctggcggcgctgctgccgggaacggaagtgtcgaccaccgatgaggcggggatcagcggtgatgatatggaggcgctggctttcgcatggctggcgtggcggacgcttgccggattacccggtaatctcccttcggtaaccggcgcgtcgcaggcttccgtgcttggcgcgattttcccggcaaatccgccgcaaaatcagagttaa

SEQ ID NO: 258594 - DNA, 360 bp, Klebsiella pneumoniae
atgccttcccggaccgggaaagtcgaaggcaaattaatgaaaaaaatacttattcttgcggtaccttttatgctcgcgggctgtagctactacaatcagtttgtcgagcggatgaatacggacactctggagtaccagtgcgaccagaagccgttgaccgtccatcttaatcatactcgccagcaggtcagctttatctacgataaccagcagctcaacttgcagcaggggttatccgcatccggagcgcgctataccgacggcgtttacgtcttctggtcgaagggtgataacgcgacggtctataaacgcgaccgtatcgtgctggaaaactgtcagctgcaaaccgccaaacgttga

SEQ ID NO: 258595 - DNA, 753 bp, Klebsiella pneumoniae
atgctggctgcagtaccacgcgccctggttgagcggttcttcctggcaccagacaaaatcatgcacgtgcgtatagggtttcagcgcttcctgtaccgcctggtgcgggaacgggtagagctgctctatgcgaacgatagcgacatctttttgctctttcttgcggcgctgttccagcaggtcgtagtaaaccttaccagagcacagcacaacacgcttcacggctttcgggtcgagatcgtcgatttcaccgattgccggctggaaggtgccgttcgccagttcgtccatgctcgacaccgccagcgggtgacgcagcagcgatttcggcgacatcacgatcagcgggcgacgcataccgcgcagcgcctgacgacgcagcatatggtaaacctgcgccggcgtggacggtacgcaaacctgcatgttctgctcggcgcagagctgcagatagcgttccagacgcgcggaggagtgctccggtccctggccttcgtagccgtgcggcagcagcatcaccagaccgcacatacggccccacttctgctcgccggagctgatgaactggtcgataaccacctgcgcaccgttagcgaagtcgccgaactgcgcttcccagatggtcagggtgcgcggctccgcggtagcgtagccatattcaaacgccagtaccgcttcttccgacagtacggagtcccagactttgaaatggccctggccgttgtggacgtgctgcagcggcgtataggttga

SEQ ID NO: 258596 - DNA, 1746 bp, Klebsiella pneumoniae
gtggcggtggaagaaggtcccgcgcccggagtcttcgccggacagacgcaccgaaatgccttcatcgaccagcgtagcgtaggcgaggttttccgcgccgccccagtcgaacagcttctcaccggcggccattgcctgacggtcgccgtagattttcgcgacgcgcgactgcatctcaacggcttccggcaccgtactgatgcgtttcgccagctcctgcagacgcttaggttcaactttatccgggtagctctcatcccactcgtggttgaggtacggggaccaggtaaaggagtgcatgttcatcggacgccactcctgcaccacgcattcgccggcatccagcgcgtcgcggtagaggttcacctgctcggtagcgtcttccagcgtcgcgaccttatcggcttccagcttgtcagcgtagattttgcgcggggtcggatgctttttgattttctggtacatcagcggctgggtcgcgctcggctcgtcggcttcgttgtggccatgacggcggtagcacaccaggtcgatgaagacatcgcgtttgaaggtattacggaaatccagcgccaggcgggtcacgaaagccacggcttccgggtcatcggcattaacgtggaaaatcggcgactgcaccatcttaccgatgtcggtgcagtacggagtagaacgcgcatccagcgggttggaggtggtgaagccaacctggttgttgataacgatgcgtacggtaccgcccacttcgtaaccgcgcgctttggacatgttcagggtttcctgaaccacgccctggccggtaaccgcggcgtcgccgtgaatagtgatcggcagaactttgttgctgctcggttcgtcgagacgatcgagacgcgcgcgtacggagccgataaccaccgggctgacgatttccaggtgcgacgggttaaacgccagcgccaggtgcaccagaccgccttcggtttccatatcggacgagaagcccatgtggtacttcacgtcaccggtaccaaggtgctctttatgtttaccggcgaattcgtcgaacaggtcctgcggttttttacccagcacgttgaccagtacgttcagacgaccgcggtgcgccatgcccagcaccacttcgcgggtgccgctcttacccgcgtggcggataatctctttgagcatcgggatcagcgcatcgccgccttccagcgagaagcgtttagcgcccgggaattttgcgccgaggtagcgctccaggccttccgccgcggtcagctcgctgaggaagcgctttttctcttcggcgctaaagctcgctttgcccgctaccgactcaatacgctgctggatccagcgtttttcttcggtagaggtaatgtgcatatattccgcgccgatggagccgcaataggtctgcttcagggcggagatcagatcgcccagcttcatcgtgtctttaccgatggcaaaagagcctacgttatagatctcctggaaatcggcctcggtcagatcgtggtaagccggatcgagatccgccactctctcttgctgccacaggcccagcggatcgagattcgcatgctggtgaccacggaagcggtatgcgttgatgagctgcaggactttaacctgcttcacattggtgtcagggtcggaaatcgaagaagtgtaacgcgaggcatccttcgccaggcggcggaaataatcacgcgttttggaatgaaattgatccggtttgactccggtgccaggtaa

SEQ ID NO: 258597 - DNA, 933 bp, Klebsiella pneumoniae
gtgacgcttaccgacttcatagtcgttaaagtcgtgcgccggggtgatcttcacgcagccggtgcccttttccatatcggcgtgttcatcgcccacaatcggaatgcggcggtcaaccagcggcaggatcacgaatttgccaataagatctttatagcgcgggtcttccgggttaacggccacgccggtatcgcccagcacggtttccgggcgggtggtggcaacgaccagataatctttaccgtcagcggttttcgcgccgtcggccagcggatagcggatatgccacatcgagcctttagactcgcggttttccacttccagatcggagatagcggtgcgcagtttcgggtcccagttgaccaggcgcttgccgcggtagatcagatcttctttatacaggcggacaaagacttctttgacggcgttggacaggccttcgtccatggtaaagcgctcgcgctcccagtccacggagttgcccaggcggcgcatctggcgggtaatggtgccgccggactccgctttccactgccagattttatcgataaaggcgtcgcgaccgtagtcgtggcgggttttaccttcttcggcggcaatcttacgctcaaccaccatctgggtagcgatacccgcgtggtcggtaccggcctgccacagggtgtttttaccctgcatgcgctggtagcgaatcatggtatccatgatggtttgctggaaggcatgacccatatgcaaactgccggtgacgttcggcggcgggatcatgatgcagaaggactctttgctttcatcgccgttagccttgaaatagccctgcttttcccagtgctcgtaaagcggctgttcgatatcttgggggttgtatgtcttttccattatttccaggttgccgtgttcaggttgaaaccagccatgcggtacgctttataa

SEQ ID NO: 258598 - DNA, 444 bp, Klebsiella pneumoniae
atgaaaaacgcaacgttctaccttctggacaacgacacacaacaagacggtctgagcgccgttgaacaactggtgtgtgacattgccgcagaacgttggcgcagcggcaagcgagtgctcatcgcctgcgaagatgagcagcaggccattcgtctggatgaggcgctgtgggcgcggccagcggaaagttttgttccgcataatctggcgggagaaggtccgcgcggcggcgcgccggtggagatcgcctggccgcaaaagcgcaacagtagcccgcgggatatactgattagcctgcggctaaactttgcagattttgccaccgctttcacagaagtgatagacttcgtcccttatgaagattctttgaaacaactggcgcgcgaacgttataaagcgtaccgcatggctggtttcaacctgaacacggcaacctggaaataa

SEQ ID NO: 258599 - DNA, 1458 bp, Klebsiella pneumoniae
gtggtcggcgtctttgaaccacggcgcctctcccccatcgccgaacagcttgataaaattagcgacggttatatcagcgccctgctgcgtcgcggcgagctggaaggcaaacctggccagactttattgctgcaccatgtgccgaacattctgtcggagcgcattctgcttattggctgcggtaaagagcgcgagctggatgagcgtcaatacaagcaggtcattcagaaaactatcaatacgctgaatgatactggctcgatggaagccgtctgcttcctgactgagctgcacgtcaaaggccgcaataactactggaaagtgcgtcaggcggtcgagaccgccaaagagacgctgtacagctttgaccagttgaaaaccaacaaaagcgagccgcgccgcccgctgcgtaaaatggttttcaacgtcccgacccgtcgcgagctgaccagcggcgaacgcgccattcagcacggtctggcgattgccgccggtattaaagcggcaaaagatctcggcaatatgccgccaaacatctgtaacgctgcctatctggcttctcaggcgcgccagctggccgatacctacagtaagaacgtcattacccgcgttatcggcgaacagcagatgaaagagctgggaatgaactcttatctggcggtcggcaacggttcgcagaacgaatcactgatgtcggttatcgaatacaaaggcagcccggcggaggatgcgcgtcctatcgtgctggtcggtaaaggcctgacctttgactccggcggcatctccatcaagccagccgaaggcatggacgagatgaaatacgatatgtgcggcgcggcggcggtgtacggcgtaatgcgcatggtggcagaacttcagctgccgctgaacgttgtcggcgtgcttgccggatgtgaaaacatgccgggtggtcgcgcctaccgaccaggcgacgtgttgaccacgatgtccgggcaaacggttgaagtgctgaacaccgatgccgaagggcgtctggtgctgtgcgatgtgctgacctacgtcgagcgcttcgagccggagacggtaatcgacgtggcgacgctgaccggcgcctgcgtgatagcgctgggccatcacatcaccggcctgatgtcgaaccacaatccgctggcccacgagctgatcggcgcctccgaactggcgggcgatcgcgcatggcgtctgccgcttggcgacgagttccaggaacagctggagtctaacttcgccgatatggcgaacatcggcggccgtccaggcggagcgattaccgcgggctgcttcctggcgcgctttacccgcaagtacaactgggcgcacctggatatcgccggtaccgcgtggcgttccgggaaagccaaaggcgcgaccggtcgtccggtggcgatgctgtcgcagttcctgctcaaccgcgctggatttaccggcgaagagtga

SEQ ID NO: 258600 - DNA, 474 bp, Klebsiella pneumoniae
atgacgcacggcccaggccacgccgtcgccaatcatgcggccaaacgggccgataaaagcgtgcgcgaggaagaccgccagaatcagcgaacagaccggtacgatcaccagatagagatagtcaggcacgatgcgtttcagccgcgtttcgataaagccgagcgccagtcccgccagcagggccgggataacctgcgcctggtagccgactttctcaatcgtgaacagaccaaagttccagacttccggcacctgctggcccagcaggtaggcgttcatcagctgcggagagaccagcgtgacgcccagcacgatgccgaggatcggcgtgccgcccattttcttgaccgcggaccagcagatgcccaccggcaggtagaagaagatcgcctcgccaatcagccacaggaagtcataaatagttttcagcgacgggtgcatctgcgccagcgtctggccgttgctcatcggtag

SEQ ID NO: 258601 - DNA, 162 bp, Klebsiella pneumoniae
atgccatttcatattttgccgcgcggcttttttggcctgctctttgtcggcgctggcctggccggtggtcgccagcagcgctttatagtagtcgccaacctcggtgccgatcaccacctggaactgtccggcgttggtaaagcagcccttcaccatgcgtag

SEQ ID NO: 258602 - DNA, 948 bp, Klebsiella pneumoniae
atgcaaaaccggctgaccatcaaagatatcgcgcgcttaagcggcgtcgggaaatcgacggtatcccgcgtgcttaataacgaaagcggcgttagcgaacgcactcgcgagcgagtggaagcggtgatgcagcagcacggattttcgccctcgcgttccgccagggcgatgcgcggccagagcgataaagtggtggcgatcatcgtcacccgtctggattcgctgtcggaaaacctcgccgttcagaccatgctccccgccttttacgcccagggctacgatccgattatgatggaaagtcagttctccccggcgctggtcgaggagcatctcggcatgctcgcccggcgcaatatcgacggcgtggtgctatttggttttaccggcatccagcaagagatgctcaccccttggcgggagacgctggtgctgctggcccgcgacgcgccgggcatcgcctccgtctgctatgacgatgaagggtcgatcaggatgctgatgcagcgtctttacgatcgcgggcatcgccatatcagcttcctcggcgtgccgcatagcgatgtgaccaccgggcagcgccgccaccaggcctatctcgatttctgtctgaaaaaacgcctcactcccctcgccgcgctgccgggtctgggcatgaaacagggctacgaaagcgtcgcagaggtgctatcggcagagaccagcgcgctggtctgcgctaccgataccctcgcgctgggggccagcaagtatctccagcagcagggaatcgatcgtctccagcttgccagcgtcggcagcacgccgctgatgaagtttctccacccggagatcctgacggtcgatcccggctatgccgaatccggacgccaggcggcacagcagctgatcgagcagatcgccggccaccgtgagccccgtcaaatcgtcattcccgccgtactgaattaa

SEQ ID NO: 258603 - DNA, 1011 bp, Klebsiella pneumoniae
atgaagttatttatggtttttcttattatgccaatgatgttgctgcatagcaaaatatgttactcttttgaagtaggggttggaacacatttatctggctttaatggtactcctcagggatatataaatttacttaaaaaatacaacatcacatctttcaggacagattatcattggagtgatgtggaaaaaattaagggtgtttatagtcctgctaataataaactggatgagttaattgaactggcggtagtaaataatattactcctgtattaattcttgattacggcaaccctctatatactgctggtaaaccaatatcaaagatgcaacaagaggcattttcaaaatacgcagcatggactgttaaccattttaaaaacaaagtgagagtgtatgagatctggaacgagtggcatttagaaaaaccgcgttatttatctcaaagcttatcatctgctaaagaatacgtagagttagtgcgtgctagttatactgaaattaaaagagtcgattcaaatgctatagtgattgccggttcattcaatcctactcagcctgatgaagttatttggcaggataaaatatttaaattaggtattcttgattatattgatggtgtatccttgcatacataccataatacagatcatacttttatgcctccatgtgaaaatttaacactcattgatgatatgcagaaaaaaatcgtggctataaaaggcaggaaaatacctgtttatattactgagattggtattagtgattattataaaaataccatatcagaatctgatatcgcgcaatttgcacgagattattttcttcaagcccgcaagcgagattatattcaaggtgtctggtggtacgattttattaatgacggcgatgatcgaaaaaatggtgagcacaactttgggattctcaataaagatttaagtgaaaaaagcactgcaccaatagtcaaaaatatattaagagaagcagagcataataatgacaacaaatga

SEQ ID NO: 258604 - DNA, 567 bp, Klebsiella pneumoniae
atgcgaaaccacttcgacgattttcgccggcgtcatcgcggtggtcagcgggacgatttcgctgcgtttgacgttcggatcgcacagcatattggccagcttgaccgaatccatcgccatcacttcttcagcgcggttcagattgatgccgtagcgggcgataaagtggtcgatcaggtcgaattcgcttaccggtttcccgtccagctcggttaccgcgccgttaacgattttaatcgacggtttcgggtcgttcgggctttccattgcgataaagccttcttcgatccactccttaacgaagccgtcctgattcacagggcgtttcgccagtgcttcaaatcttttcgatctcatgaatcagcctcgtgggtatcagatgtaggacgggcgatcgtttttcggttcagcaccgagggtcgcaagaacggttttgccgatttcgcgcgccgagatgaccgcctggcggaccgcgccggagtcgccggaaatcaccagaatggcttcgttactgaagctggtgccgtgcgccggggagctataggccacgacttcaacgttggctga

SEQ ID NO: 258605 - DNA, 813 bp, Klebsiella pneumoniae
atgagcagcaatgagctggttgaacagatcatggctcaggtgattgcccgtgtggcaacgccggaacaacaggccatccctactgaaaaccatccaatacgagagacggctatggcagaaaaaagctgcagtttaacggaatttgtcgggaccgccattggcgacaccctgggcctggtgatcgccaacgtcgataccgccctgctggacgcgatgaagctggaaaaacgctatcgctccatcggcattctcggcgcccgcaccggcgctggcccgcacattatggcggcggatgaagcggtgaaggccaccaacaccgaagtggtcagcattgagcttccgcgcgataccaaaggcggcgcgggccacggttcgctgattattttaggcggcaacgacgtttccgacgttaagcgcggtatcgaagtcgcgctgaaagagctcgaccgcaccttcggcgatgtttacggcaacgaagccgggcatatcgagctgcagtacaccgctcgcgccagctacgccctggaaaaagcgttcggcgcgccgattggccgcgcctgcggcatcatcgttggcgctccggcctccgttggcgtgctgatggccgataccgcgctgaagtcagccaacgttgaagtcgtggcctatagctccccggcgcacggcaccagcttcagtaacgaagccattctggtgatttccggcgactccggcgcggtccgccaggcggtcatctcggcgcgcgaaatcggcaaaaccgttcttgcgaccctcggtgctgaaccgaaaaacgatcgcccgtcctacatctga

SEQ ID NO: 258606 - DNA, 285 bp, Klebsiella pneumoniae
atgcaacaagaagcactaggaatggtagaaaccaaaggcttaaccgcagccatagaggccgctgatgcaatggtgaagtcagccaatgtgatgttagtgggctatgaaaagattggctccgggctggtcaccgtcatcgtgcgcggcgacgttggcgcggtaaaagcggccaccgatgccggtgccgccgccgcacgtaacgtgggagaagtgaaagccgtacacgtcatcccacgccctcacaccgatgtagaaaaaatcttaccgaagggaattagccaatga

SEQ ID NO: 258607 - DNA, 645 bp, Klebsiella pneumoniae
gtggccagccagttcgatgattttcgcttcccactctgcgtcgccttccagcgctttcagagcagaaccacgaacgatcggggtgtcgtcgcccgggaaatcgtactgagacagcagttcacgaacttccatctcaaccagttccagcagctcttcgtcatcaaccatgtcgcatttgttcaggaacacgatgatgtacggaacgcctacctgacgacccagcaggatgtgctcacgagtctgcggcatcgggccgtcagtcgcagcaacaaccaggatcgcgccgtccatctgcgcagcaccggtgatcatgtttttaacatagtcggcgtggcccgggcagtctacgtgcgcgtagtggcgagtcggggtgtcgtattcaacgtgagaggtgttgatggtgataccacgagctttttcttccggcgcgttatcgatctggtcgaatgcgcgagcggaaccaccgtaggttttagccagaacggtagtgatggcagcagtcagggtagttttaccatggtcaacgtggccgatagtaccgacgttgacgtgcggttttgtacgttcaaatttttctttagacacggctatattccttactatagtgctctccccttcggagagagcacgggacttaggttttaa

SEQ ID NO: 258608 - DNA, 2115 bp, Klebsiella pneumoniae
atggctcgtacaacacccatcgcacgctaccgtaacatcggtatcagtgcgcacatcgacgccggtaaaaccactactaccgaacgtattctgttctacaccggtgtaaaccacaaaatcggtgaagttcatgacggcgccgctaccatggactggatggagcaggagcaggaacgtggtatcaccatcacttccgctgcgactactgcattctggtctggtatggccaaacagtatgaaccgcaccgcgtaaacatcatcgacaccccggggcacgttgacttcactatcgaagtagaacgttccatgcgtgttcttgatggtgcggtaatggtttactgcgcagttggtggtgttcagccgcagtctgaaaccgtatggcgtcaggcaaacaaatataaagttccgcgcatcgcgttcgttaacaaaatggaccgcatgggcgctaacttcctgaaagttgttggtcagatcaaaacccgtctgggcgcgaacccggttccgctgcagctggcaattggtgctgaagaaggtttcaccggcgttgttgacctggtgaaaatgaaagccatcaactggaacgatgcagaccagggcgtaaccttcgaatacgaagatatcccggctgacatgcaggacctggctgatgaatggcaccagaacctgatcgaatccgcagctgaagcttctgaagagctgatggaaaaatacttgggtggtgaagaactgactgaagaagagatcaaaaaagctctgcgtcagcgcgttctgaacaacgaaatcatcctggtaacctgtggttctgcgttcaagaacaaaggcgttcaggcgatgctggatgcggtaattgattacctgccatccccggttgacgtacctgcgatcaacggtatcctggacgacggtaaagataccccggctgagcgtcacgcaagcgacgacgagccgttctctgcactggcgttcaaaatcgctaccgacccgttcgtgggtaacctgaccttcttccgcgtgtactccggtgtggttaactctggtgataccgtactgaactccgtgaaagctgcacgtgagcgtttcggtcgtatcgttcagatgcacgctaacaaacgtgaagagatcaaagaagttcgcgcgggcgacatcgctgctgctatcggtctgaaagacgtaactactggtgacaccctgtgtgacccggatgcgccgatcattctggagcgtatggaattccctgagccggtaatctccatcgccgttgagccgaaaaccaaagctgaccaggaaaaaatgggtctggctctgggtcgtctggctaaagaagacccgtctttccgcgtatggactgacgaagagtctaaccagaccattatcgccggtatgggtgagctgcacctcgacatcatcgttgaccgtatgaagcgtgaattcaacgttgaagcgaacgtcggtaaacctcaggttgcttaccgtgaagcgattcgcgcgaaagttaccgatatcgaaggtaaacacgccaagcagtctggtggtcgtggtcagtacggtcacgttgtgatcgacatgtacccgctggagccgggctctaacccgaaaggttacgagttcatcaacgacatcaaaggtggtgtaattcctggcgaatacatcccggccgttgataaaggcatccaggaacagctgaaagctggtccgctggcaggttacccggtagttgatatgggtatccgtctgcacttcggttcttaccacgacgttgactcctctgagctggcgtttaaactggctgcgtctattgcctttaaagaaggctttaagaaagcaaaaccagttctgcttgagccgatcatgaaggttgaagtagaaactccggaagagaacactggtgacgttatcggtgacttgagccgtcgtcgcggtatgctgcgcggtcaggaatccgaagtaaccggcgttaagattcacgctgaagtaccgctgtccgaaatgttcggttatgcaactcagctgcgttctctgaccaaaggtcgtgcatcatacaccatggaattcctgaagtatgatgatgcgccgaacaacgttgctcaggccgttattgaagcccgtggtaaataa

SEQ ID NO: 258609 - DNA, 396 bp, Klebsiella pneumoniae
atgatgaaactcaaagaaaaaatgacgccagcggagcttgccgagtgccttaatctcgcccggcaaaccattaaccgttgggccagagagcaaaactggcggacggaagccatacccggtgtgaaaggcgggcgcgctcgcgtgattgtcatcgacaaagcggtaatcgatttcctggcaaatatcccggcgctgcgccatttaacccttgataaccagctggcggaaccagtcgttaaatactttgtgaatgatgctgatacgatctggcgccagattgtcgagaccatgcacctgatgacccccgcagagcagttgcacctgcgcgatcttcttgcccgcgaagggatcagcgggtttctatcccggctgggtattgctgatgctaaaaaatag

SEQ ID NO: 258610 - DNA, 663 bp, Klebsiella pneumoniae
atggcagctgataaatcagcgccagacgacagttcagtgacagaacttccgctgaatatcgaggatttaagacgatattcacgccagcagaggcaggaaatcaccagcaggctcagaaaatccgcccgggaaagctcagatcaggccttcacgcgcaccgcgcgcggcctgcgcacgtcgattgatgacgaaagcgcgctggcatgggggccaaaagttaccgccgcgaaagacatgagcctgacgccggaagaggctgagcgccgctggcgcgaacagctgcagatcgaggcagagcggcgcgcggataactacaccgccgcggttgcggaatatcagaagaaaaaggacgaagccgcaatgcgccaggtgcagcaacaggaagcgacgcaaaagaacggcatctccgaaaaggcgatcgccagcatcggcgcacagctgcgtagctgccggatttttgtcagtgatgagattgtgcgatcagtcgctggcggcgcccgcgttcgccacggtggcggcctgctcgcggcggacaatggccggttgcgtgaagtgaaggtatggcgcgccggcgagaaagataaaccaacttccgaatatatggcagttcgtgacctggtcgcgcgctggaagaaagcagctaaacggaaaaacgagaggtaa

SEQ ID NO: 258611 - DNA, 531 bp, Klebsiella pneumoniae
atgaagcatttcagcactaaagccatcggatcagtcatcgccgaaatgaaccggcaggataaaaagtggggtgctgaccgcaatcagcatcctttcgcctggcaaaccatccttagcgaagaggtcggcgaatttagccaggcgattttgcatgatgaatttggcggccataagtcgggaacggcgcgcgaagagatggtgcaggttgccgccgtcgccctccagattattgaatactacgatcgccattgcgcgccagcaccggaaccagaagaggcccgccaggcactggccctgccggccatcccggcagggcgtgaaaaaatcggcggctgcgactggctggactggaatcagctgtccgcgctcggcctcctgatccgcattaacgctgaaatccttcatccgcttggcctggcaatattccgggatccggccttcggcagctctccaggcgcaatgatttctccagatggaaagtgggaatatgcgcccggcattcttgaggggcagcaagggaaaaaccactga

SEQ ID NO: 258612 - DNA, 417 bp, Klebsiella pneumoniae
atgagcgttagtgagctggaattctctacatatgtgaagaattcggaaactacatccttattgacagaaactgcattaagtgcgggttttttaagggatatattcgattgtcgacaggagtgtatggagagggctctgcatgccatcaatgccgcgaacatcgaaagcatcaaggatcttgataccagcatcgtagaaaacatagaaaaaattaagttgtttttaaaggtccttcaaaaacacaggctacaggagaaaatagacggatggagggtttggatcgagtttatttatgaaatggcagtcgtaactattaagcctgaaatttttacacatgagtatcagcagcagaacggttatgtttcaacggttgcacttatcgtggagaagtcaattaaagatattgcagatgcataa

SEQ ID NO: 258613 - DNA, 705 bp, Klebsiella pneumoniae
atggctaaactgaccaagcgcatgtccgtgattcgtgacaaagttgatgcgaccaaacagtacgacatcaacgaagccatctctctgctgaaagaactggctactgctaagttcgttgaaagcgttgatgttgccgttaacctcggcatcgacgctcgtaaatctgaccagaacgtccgtggcgcgaccgtactgccgcacggtactggccgttcagttcgcgtagccgtatttgcccagggcccgaacgctgaagcagctaaagctgctggcgcagagctggtaggtatggaagatctggctgaccagatcaaaaaaggcgaaatgaactttgacgttgttattgcttccccggatgcaatgcgcgttgttggccaactgggccaggttctgggtccgcgcggcctgatgccaaacccgaaagtgggtaccgtaacgccgaacgttgctgaagcggttaagaacgctaaagcaggtcaggttcgttaccgtaacgacaaaaacggcatcatccacaccaccatcggtaaagtggattttgacgctgataaactgaaagaaaacctggaagctctgctggttgcgctgaaaaaagcgaaaccgactcaggctaaaggcgtgtacatcaagaaaatcagcatctccaccaccatgggtgctggcgttgccgttgatcaggctggtctgagcgcttctgcgaactaa

SEQ ID NO: 258614 - DNA, 144 bp, Klebsiella pneumoniae
gtgtggctggcaacgaagcaaggcggctaccatttcgacttgaaaggcgacgagtgggtgtgcgatcgcagcggcgaaacgttctgggatctactggaacaggcggcgaccgcgcaggccggtgaagcggtgagttttcgctaa

SEQ ID NO: 258615 - DNA, 2304 bp, Klebsiella pneumoniae
atgctgacccaggaaccgccgaaaggcgagctgccgatcaccggcctttactccatgggcagtacttcttccgtcggccaaagctgctcttccgacctggatatctgggtttgccatcagtcgtggctggatagcgaagagcgccagctgctgcagcgcaaatgtagcctgctggaaagctgggcggcgtcgctgggcgttgaggtgagtttcttcctgatcgacgaaaaccgcttccgccataacgaaagcggcagcctgggcggtgaagactgcggctcaactcaacacatcctgctgctggatgagttttaccgcaccgcggtgcgccttgccgggaagcgtattctgtggaatatggtgccgtgcgaggaagaggagcattacgatgattacgtgatgagcctctacgcgcagggcgtgctgacgccgaacgaatggctggatctcggcggcctgagttccctgtcggcggaagagtacttcggcgccagcctgtggcagctatataaaagcatcgactcgccctataaggcggtgctgaagacgctgctgctggaagcgtactcctgggagtatcccaacaaccgcctgctggcgaaagatatcaagcagcgcctgcatgacggtgaaatcgtatcgtttggcctcgacccttactgcatgatgctggagcgcgtaacggtctatctgcaggctatcgaagatgaaacgcgcctcgatctggtgcgtcgatgtttctatttaaaagtctgcgagaagctgagccgcgagcgcgcctgcgtcggctggcgtcgcgaagtcgtcagccacctggtgaaagagtggggctgggatgaaaagcgtctgatgatgctcgataaccgggccaactggaagattgacgaagtccgtaaagcgcataacgagctgcttgatgcgatgatgcagagctatcgtaacctgattcgctttgcgcgccgcaataacctgagcgtttccgccagtccgcaggatattggcgtgctgacgcgtaagctgtacgccgcctttgaagcgctgccggggaaagtgaccctggtcaacccgcaaatttcgccggatctgtctgagccgaatctgacctttatccacgtgccgccgggccgtgccaaccgtaccggctggtatgtctataaccgcgcgccggatatggagtcgatcatcagccaccagccgctggaatataaccgttatcttaataagctggtggcctgggcctggtttaacggcctgctgacgtcacgcactcgcctgtttattaagggcaacggcattgtcgatttggctaaactgcaggagatggtggctgacgtggcgcaccacttcccgctgcgcctgccgtccccgacgccgaaagcgctgtatagcccgtgcgaaattcgccatctggcgattatcgtcaatctcgaatatgacccgacggcggccttccgcaatcaggtggtgcattttgacttccgtaagcttgatgttttcagcttcggcgaagagcaaaagtgcctgattggcagcatcgatctgctgtaccgcaactcgtggaacgaggtgcgaacgctgcactttaacggcgagcaggcgatgatcgaagcgctgaaaacgattctcggcaagatgcatcaggacgccgcgccgccggatagcgtggaggtcttctgctatagccagcatttgcgcggcctgatccgtactcgcgtgcagcagctggtttctgaatgcgttgagctacgcctctccagcacccgtcaggataccggccgctttaaagcgctgcgcgtttccgggcagacctgggggctgttcttcgagcgccttaacgtctcggtacagaagctggaaaacgccatcgaattctacggcgcgatttcgcataacaaactgcatggtctgtcggtgcaggtggaaaccaaccacgtcaggctgccgcaggtggtggatggttttgccagcgaagggatcattcagttcttctttgaagatgcggataacgataacggatttaacatctatattcttgatgagagcaaccgcgccgaggtgtatcaccactgcgagggcagcaaagaggagctggtgcgcgacgtcagccgcttctactcttcgtcgcatgaccgctttacctacggctccagctttatcaactttaacctgccgcagttttatcaaattgtcgacgtcgacggtcgcgaacaggtgatcccgttccgcagccaggtgattgccgccgccaccgcttcagccggtcaggatgctgcatcatcgccgatgctgcagcactattcctga

SEQ ID NO: 258616 - DNA, 1215 bp, Klebsiella pneumoniae
gtgcagacggtgatcggccgtctgcaaaacgcggtgagcggcatccccggcgtcgagctctatctccagccgacccaggatctgaccattgacaccaccgtcagccggacccagtaccagttcaccctgcaggcgaattcgctggatgcgctgagcaactgggtcccgcagctgctggcccggctgcaggcgctgccgcagctctccgacgtcagcagcgactggcaggataaggggctggcggcgtatatcaacgttgatcgcgacagcgccagccgcctcggcatcagcatggcggacgtcgataacgccctgtataacgcctttggtcagcgtctgatttccaccatctatacccaggcgaaccagtaccgcgtggtgctggagcatgatacccaggccacgccggggctggcggcgctggacaatatccgcctcaccagcagcgacggcgggatcgtgccgctcaccgcgatcgccaaagtcgagcagcgctttgctccgctgtcgattaaccatctcgatcagttcccggtcaccaccatttcgtttaacgtgccggacaactattcgctgggcgatgcggtcgaggcgattcttagcgccgagcaggcgctggacttcccgagcgacatccgcacccagttccagggcagctcgctggccttccagtcggcgctcggcagtaccgtctggctggtggtcgccgcggtggtggcgatgtatatcgtcctcggcgtgctgtatgagagctttattcacccgatcaccattctctccaccctgccgacggcgggcgtcggcgcgctgctggcgctatggctggccgggagcgagctggacgttatcgccattatcggcatcatcttgctgatcggcatcgtcaagaaaaacgccatcatgatgatcgacttcgcgctggccgccgaacgcgaacagggtatgccgccgcgcgaggcgatttatcaggcctgtctgctgcgttttcgcccgatcctgatgaccaccctcgccgccctgttcggcgcgctgccgctgatgctcagtaccggcgtcggcgcggagctgcggcgaccgctggggattggcatggtcggcggcctgatgctcagccaggtgctaacgctgttcaccacgccggttatctatctgctgttcgaccgcctgtcgctgtatatgaagagccgcttcccgcggcgtgaggaggaggcgtag

SEQ ID NO: 258617 - DNA, 360 bp, Klebsiella pneumoniae
gtgggcggcgcgctggcgcagagcgaagcgctggtgcgcgatatgcaggtcttcccgcctaaaatgcgcgccgaccttgagatcacccatggcctgattatggcggaggccgtgaccctggcgctggcggagtttatcggcaaagccgatgctcatcatcgcattgaggcgctgtgtcgtcaggcgctggatacgtcatgttcgctgcagagcgtactggaaaacgatccgcaggtcagtgaacatctctccgccgaccgcttaacccaactgctggatccgacgacggcgaccggcagctcggcactcttcgtgcgccaggttgtggcgcgctataaggaacaacttcatgaatgttga

SEQ ID NO: 258618 - DNA, 1335 bp, Klebsiella pneumoniae
atgaaagcccgatacaaaactattgtcgacagatacgcgcaggcgattcatcgcggacagatgccggccggaacccgtctgccgacccatcgtacccttgccgccgatgaacgcatctcgctggccacggccacccgcgtttatcgtgaactggaagcaatggggctggtcagcggcgaaaccgggcgcggcacctttgtgcgggatatctcgctgccgccggggcacggcgtcgatcagcagtcggtggcgggcgatgttatcgatctcaacttcaactatccttcgctgccggcgcagggggatgcgctgcgcgaggcgctcaggcggctggcgatggcgggggatattgaatctcatctgcgctaccagcctcatgccgggcggctctccgagcgcgaaactatcgcccgccatttgaccggtagccgctttgcgcccgacgcggaaaacgtgctgatcgtcagcggcgcccagcacgggctggcggtgaccgtgatgggccttctgcgccccggcgatgtggtggcggttgatgcgctgacctactcgggctttaaggccctggccgcgctttatcatctggaactggtggcgatcccctgtcgcgcggaggggccggatctgcaagcgcttcaccagctgtgcaggcagcggcgggtacgggcggtttataccatgccgacgctgcacaatccgctcggctgggtgctcacttctcgccagcggcaggcgctgacggacctcgcgcgcctgcatgacctgctgattattgaagataccgcatacgcctggctggtccgcaatccgccgccgccgctggccagctatgcgccggaaagaacggtttatatcaccggtttttcgaaaaacgtcgccaccgggctgcgcgtgggggcggttatctgcccgtcccgctatcggtctgagattgtacgcgccatacgggccacgacgtggaataccccttcgctgatgagctcgctgatctgcgcctggattgatgatgggacggttgcgcgttttgcggcgcagaaacgacgggatgcgcggctgcggcagtcgctcgcgcgtgagacgctcggcgcgcttccctttgtgagccatccgagttcgtacttcctctggctgcctctgggcgaggagagccgggccgatcggctggtgaaaatgctgatggatcgccatatttccgtgtcgaccgccgaaccgttttgcgctgccgcgaacgtgccgcaggcgctccgcatcgcccttggttcagtccccttggatagcctgcgcgcggcgctgctccaggttcgcgaagccgtggagtttgaacaataccgctag

SEQ ID NO: 258619 - DNA, 495 bp, Klebsiella pneumoniae
ttgctccagatccatgctcttcagcagggcctggatagcttccgcacccatcttcgcgtcaaattcgtcaccgaactcttccagcgcatccagatactgctcttcagtcaggatctgctggcgttccaggttggtcataccaccttcgataaccacataggattcgaagtacagcacgcgttcgatatcgcgcagcggcatatcgagcagcaggccgatacgggacggcagagacttcaggaaccagatgtgggcggtcggagacgccagctcgatgtggcccatacgctcacgacgcactttagtctgggtcacttcaacgccgcacttctcacagatcacaccgcggtgtttcaggcgcttgtacttaccgcacaggcactcataatcttttaccggcccaaagatacgggcgcagaaaaggccgtcacgctcaggtttgaacgtacggtagttaatggtttccggctttttaacttcaccaaaagaccatga

SEQ ID NO: 258620 - DNA, 1809 bp, Klebsiella pneumoniae
atgtacccgggcgaagcaggtatcgacatctataacctgaccaagtacacccgctcgaaccagaacacctgtatcaaccagatgccgtgtgtctctctgggcgagccaattgagcgcggcgacgtgctggctgacggcccgtccaccgacctcggtgaactggcgctcggtcagaacatgcgcgtagcgttcatgccgtggaacggttacaacttcgaagactccatcctcgtttccgagcgtgttgtccaggaagaccgttttaccaccatccacattcaggaactggcgtgcgtgtctcgtgacaccaagctggggccggaagagatcactgccgacatcccgaacgtgggtgaagctgcgctctctaaactggatgaatccggtatcgtttatatcggtgcggaagtgaccggcggcgatattctggttggtaaggttacgccgaaaggtgaaacccagctgacgccggaagagaaactgctgcgcgcgatcttcggcgagaaagcgtctgacgttaaagattcttctctgcgcgtaccaaacggtgtctccggtaccattatcgacgttcaggtctttacccgcgacggcgtagaaaaagacaaacgcgcgctggaaatcgaagagatgcagctcaaacaggctaaaaaagacctgtctgaagaactgcagatcctcgaagccggcctgtttggacgtatctacgcggtgctggtctccggtggtatcgaagctgagaagctcgacaagctgccgcgcgatcgctggctggaactgggcctgaccgacgaagagaagcaaaatcagctggaacagctggctgagcagtacgacgaactgaaacacgagttcgagaaaaaactcgaagcgaaacgccgcaaaatcactcagggcgacgatctggcaccgggcgtgctgaagattgttaaagtgtatctggccgttaaacgtcagattcagcctggtgacaaaatggcaggtcgtcacggtaacaagggtgttatctctaagatcaacccgatcgaagatatgccttacgatgaaaacggcacgccggtagacatcgtactgaacccgctgggcgtaccgtctcgtatgaacatcggtcagatcctggaaacccacctgggtatggctgcgaaaggtattggcgagaaaatcaacgccatgctgaaacagcagcaggaagtcgccaaactgcgcgagttcatccagcgtgcctacgatctgggtaccgacgttcgtcagaaggtagatctgaacaccttcactgacgaagaagttatgcgtctcgctgaaaacctgaaaaaaggtatgccgatcgcaacgccggtcttcgacggtgcgaaagagtctgaaatcaaggagctgttacagcttggtggcctgccgacttccggccagatcaccctgttcgacggtcgtaccggtgagcaattcgagcgccaggttaccgttggctacatgtacatgctgaaactgaaccacctggttgatgacaaaatgcatgcgcgttctaccggttcctacagcctggttactcagcagccgctgggtggtaaggcgcagttcggtggtcagcgcttcggggagatggaagtgtgggcgctggaagcatatggcgcggcatacaccctgcaggaaatgctcaccgttaagtctgatgacgtgaacggccgtactaagatgtataaaaacatcgtagacggcaaccatcagatggaaccgggcatgccggaatccttcaacgtactgttgaaagagattcgctcgctgggcatcaacatcgaactggaagacgagtaa

SEQ ID NO: 258621 - DNA, 1203 bp, Klebsiella pneumoniae
atgaatcaggcatttatctgtgatgcggtgcgcacgccgttcggtcgctttggcggtaccctggccaccctgcgcgccgacgatctggcggcgctgccgctgaaagcgctgctggaacgcaacccgggactcgatccggcgcgtattgatgatgtgatttacggctgcgccaaccaggcgggggaagataaccgcaacgtcgcgcgtatggcgctgctgctggccggactgccggaaagcgtaccgggcagtaccgttaaccgcctgtgcggttccagccttgatgcgatcggcatcgcagcgcgcgcgattaaaagcggcgaaactcaactgatgatcgccggcggcgtagaaagcatgtcgcgggcgccatttgtgatgggcaaggccgaaagcgcctttagccgcacgatgcggatggaagataccaccatcggctggcgcttcattaacccgcagatgaaagcgctgtacggcgtggattcgatgccggaaacggcggaaaacgtggcggacgatttcgccatttcgcgggcggatcaggatgcgtttgcgctgcgtagccagcagcgtacggcggcggcgcaggaggcggggcgttttgccgacgagctgatcgccgtctcggtgccgcagcgcaagggcgaaccgctgctctttagccgcgatgagcatccgcgcagcaccacggcggaagcgctggccaggcttcgcggcgtggttcgccccgacggtacggtgacggcgggtaacgcctccggggttaacgacggcgcctgtgcgctgctgctcgccagcgagcaggcgatggccgccaatgatttacagccgctggcgcgcgtagtgggcgtcgcgacggcaggcgttgcgccgcgaattatgggatttggcccggcgccggcggtacgtaaggtgctggcgcaaaccgggctaacgcttgggcagatggacgtcattgaactgaatgaagcctttgccgctcaggcgctggcggtgacgcgcgatctgggcctgcccgacgatgcggcgtacgtcaaccctaacggcggcgcgattgccctcgggcatccgctgggggcttccggcggtcgtctggcaatgaccgcagcgtatcagctgcgccgtaccggcgggcgctatgcgctgtgcaccatgtgtatcggcgtcggtcaggggatcgcgctgattattgaacgcgtttaa

SEQ ID NO: 258622 - DNA, 384 bp, Klebsiella pneumoniae
atgatgcgcggcggccatctcgatatctgcgtgctcggcgcctatcaggtttccgccagcggcgatctggcgaactggagcaccggcgcacccgacgcgattccggcggttggcggggcgatggatctggccattggcgctcgtcaggtcttcgtgatgatggatcacctgacccgcgacggggaatgcaagctggtagagcactgcacctatccgctgaccggcgttggctgcgtcagccggatttacaccgacctggcggtcatcgatatcagcgaaagcggcccggtggtgcgggaaatcttcaacggcctctcttttgaggaactgcagcgcatcactccggtgacgctgacttttgcacaactggcggaaagcgcgtaa

SEQ ID NO: 258623 - DNA, 1023 bp, Klebsiella pneumoniae
atggcgcaggaaatgagtataaaacgtgtattgttatccgatgtggcaaagctggccgggctgtcgaaggcgaccctgtcgcgctatatgaacaacagtattgtgctgccgcaggacaccatcgaccgcatcgaaaccgccattcgcgaactggactatcgcggcaatagcctggcacgccgtcttagcaaaggcggcagcgaaacgcttggcctggtgcttcccgatataaccaaccccttctttgccgaactggccgacgcagccgaagaggccgcttctgccagcggctacagcctggtgctgtgtatcacccgcaacaacccggaaaaagagtgccagttcattcgctggctggatacctgccaggtcgacggtctgctgttcaccaccaaccgccccgataatggcctgctgcgcaaggaagtccagcgtcacgaacggattgtcctgctggatgaagatattcccggcagtaaggtaccgaaagtgtttgccgataacgtccagggcgggcggatcgccaccgaaaaactgatcgccgccgggcatcgccatatcgctttcgtcggtggcccggacaagctgatgagcgtccgcgagcgctatcagggcttttgcaccgcgatggagcaagcgggcctgagctggccgcccgaatgggtgatgtatggcgactaccagcgcgagtttggccagcaagcgttgcggtacctgttcagccaacaggttcgccctaccgccgtcttcgctgccagcgactatctggtgctcggtctgctcgacggcttgcgcgccagtgggctccaggcgccagaggcgctatcgttagtcggcttcgatgacgccaactatgccgattttacccagccgcggatctccactatccgtcagcccgcccgcgaactgggccgcactgcggtgaacatcatgatgcgcctgctaaacgacgatccggatatccctgcggaaacccgcctgccggttgaatggattggccgcgactcgatcaagatttgttaa

SEQ ID NO: 258624 - DNA, 1488 bp, Klebsiella pneumoniae
atgaagccactgcttgaagctcgccaaatctgcaaacagttctccggcgtcaccgtgctgaagcagattgatttcacgctgctttccggccaggtacacgcgctgatgggcggcaacggcgccgggaaatcgacgctgatgaagattatcgccggcgtggaaacgcccgacagcggtgagcttgtcttcggcgaacgcgcgtttgcgcgcctcactcccgcccaggcccatcagcagggcgtgtatctggtgccgcaggaaccgatgttattccccaatctgacggtgcgggaaaatattctttttcgtctgccgaagcgggcggataacgagacccgcctgcgggaaaagcttcagcagcttaactgccagctcaaccttgaggcggcggccagcactctggaagtggccgatcagcaaatggtggagatcctgcgcgggctgatgcgcgacgcgcagatcctgatcctcgatgagcccaccgcctcgctgacgccgggggaaaccgaacgcctgtttcgccagatccgctctttacaggccctcggcgtcgggatcgtgtttatctcgcacaaactgccggagatccgccaggtcgccagccacgtttcggtgatgcgcgacggcgcggtggtgctgagcggggaaaccgcgcagtacggcgacaatcagctgatcggcgcgatgacgcccgtcagtcgcgatcgagccctgagcgacacgcaaaagctgtggctggcgctgccgggcaatcgccgtacccaggcgcaggatttcccggtgctgcgggtagaagatctgaccggggaaggttttatcgatctcaacctcgagatccgtgccggggagatcgtcggcctcgccgggctggtgggatccgggcgtaccgaattcgccgaaacgctctacggtctgcgcccggctcgcgccgggcgggtgtggctggagaaccgcgatatcagccgcgatagcacgcgcgccaggctcgccagcgggctggtctatttgccggaggacaggcaggtttccggattgtttctcgatgcgccggtgcgctggaacacggtgatgtttaaccagccgtcgctgtggcagcagaaccggcgcgaagcggcggtggtggagcgctatcaccgggcgctggggatcaaaatggccgatggcgatcgcccggtgcgtacgctctccggcggcaatcagcagaaggtgctgttggcgcgttgcctggaggctaacccgctgctgctgatcgttgatgagcccacgcgcggcgtggacgtttccgcccgcgccgatatctatcagctgctgaaaagcgtcgccgcgcagaacgtggcggtgctgatgatctccagcgatctcgacgagttcgtcggcctggccgaccgggtactggtgatgcatcagggcaggcagagcggcgagctggcgcagcaggcggtcagcgttgaccggatgatgaccctggccttcggagggcaggcatga

SEQ ID NO: 258625 - DNA, 1488 bp, Klebsiella pneumoniae
atgaacaaagaaattttggctgttgttgaagccgtttccaacgaaaaggcgctgccgcgtgagaaaattttcgaagcgttggaaagtgcgttagcgacggctaccaagaaaaaatatgagcaagagatcgacgtgcgcgtagaaatcgatcgcaaaagcggtgatttcgatactttccgtcgctggttggtggttgaagaagtcactcagccgacgcgcgaaatcacgctggaagctgcgcgctacgaagatgaaagcatgaatcctggcgattacgtcgaagaccagattgaatctgtcacctttgaccgtatcactacgcagaccgccaagcaggttatcgtacaaaaagtacgtgaagccgaacgtgcgatggtcgtcgatcagttccgtgagcacgaaggtgaaatcatcacgggcgtagtgaagaaagtgaaccgcgacaacattacgctggatctgggcaacaacgctgaagccgtgatcctgcgtgaagatatgctgccgcgtgagaacttccgtccgggtgaccgtatccgtggcgtactgtacgcagttcgtccggaagcgcgcggcgcgcagctgttcgtgactcgctccaagccggaaatgctggttgaactgttccgcattgaagtaccggaaattggtgaagaagttctcgaaattaaagcggcggctcgcgatcctggctctcgtgccaaaatcgccgttaaaactaacgacaagcgtatcgatccggttggcgcctgcgtcggtatgcgcggcgcgcgcgttcaggctgtctcgactgaactgggcggcgagcgtatcgatatcgtgctgtgggacgataacccggcgcagttcgtgattaacgccatggctccggctgacgtcgcatctatcgtggtagatgaagacaagcacaccatggatatcgcagtcgaagcgggcaacctggcgcaggccattggccgtaacggtcagaacgtacgtctggcatctcagctcagcggctgggaactcaacgtcatgaccgttgacgacctccaggctaagcatcaggccgaagcccatgcagcgattgataccttcactaaatatcttgatattgatgaagatttcgccacgctgctggttgaagaaggtttcgccactctggaagaactggcctatgtgccaatgaaggaactgctggaaatcgacggtctggatgaagcaaccgttgaagcacttcgtgagcgggcgaaaaacgcgctgaccacgctggcgctggccaaagaagagagcctgggagacagcaaacctgccgacgatcttttgaatctcgaaggtatggatcgcgctctggcattcaccctggccgcccgtggtgtttgtacgctggaagatctcgccgagcagggcattgatgatctggctgatatcgaaggcttgaccgacgagaaagccggagaacttatcatggccgctcgtaatatttgttggttcggcgacgaagcgtaa

SEQ ID NO: 258626 - DNA, 270 bp, Klebsiella pneumoniae
atggacgtcgaagacccgattacagtcgcttataacctggaagtctcttcccctggtctcgatcgtcccatgttcaccgccgagcactatgagcgtttcattggtgaagaagtttcgctggttttgcgcatggcggtacagaaccgacgcaaatggcagggccttatcaaagcggtagacggtgagatgatcacggtaaccgtcgaaggcaaagatgaagtgttcgcgctgagtaacatccagaaggcgaacctggttccccacttttaa

SEQ ID NO: 258627 - DNA, 915 bp, Klebsiella pneumoniae; identical to SEQ ID NO: 202606

SEQ ID NO: 258628 - DNA, 1023 bp, Klebsiella pneumoniae
atggcgcaggaaatgagtataaaacgcgtattgttatccgatgtcgcaaagctggcgggactgtcgaaagccaccctgtcgcgctatatgaacaacagtattgtgctgccgcaggacaccatcgaccgtatcgaaacagcgattcgcgaactggactatcgcggtaatagcctggcgcgccgtcttagcaaaggcggcagcgagacgctcggcctggtgctgcccgatatcaccaaccccttctttgccgagctggccgacgccgccgaagaggccgcctccgccagcggttatagcctggtgctgtgcatcacccgcaataatccggaaaaggagtgccagttcatccgctggctggatacctgccaggtcgatggcctgctgttcaccactaaccgccctgataacggcctgctgcgcaaagaggtccagcgtcacgaacgcattgtcctgctggatgaagatatacccggcagtacggtgccaaaggtgtttgccgataacgttcagggcgggcggatcgccaccgaaaagctgatcgccgccggacaccgccatatcgccttcgtcggcggtcccgacaagctgatgagcgtccgcgagcgctatcagggcttctgcaccgcgatggagcaggccggtctgagctggccgcccgaatgggtgatgtacggcgactaccagcgcgagttcggccagcaggcgctgcgttacctgtttagccagccgcttcgcccgaccgccgtcttcgccgccagcgactacctggtgctgggtctgcttgacgggctgcgcgccagcgggcttcaggcgccggaggcgctgtcgctggtcggcttcgatgacgccaactatgccgatttcacccagccgcgtatctcaactatccgccagcccgcccgcgaactgggccgcaccgcggtgaatatcatgatgcgcctgctgaacaacgaccaggatatcccggcagaaacccgcctgtcggtagaatggatcggtcgcgactcaatcaagatttgttaa

SEQ ID NO: 258629 - DNA, 471 bp, Klebsiella pneumoniae
atggtcaggccggtgaagaagctgatggactccgcctgcgccataccgggaatgacgtgtgggttaacgcgaatattcatctccgggtcggtacgcacttccggcaggttgaccacctgctgccagaaggtgccgccgagcaccgccgtctgcccggcgcgcaccacgccgagtcccaggcagccgagctggacgtcgccgccgcccatcaccaccggcgttcccgcccgcaaaccgctctgcgccgccgccgcgtcggtgactgcgccgagtacggtgccggtctcttttaccggcgagagaatatcggcccgcagtccggccatatccagcagcgccggacgccagtcgcggctgaacaggtcgagcatgccggtggtcccggcgttagaggggtcgaccgccagctcgccggaaagcttcgccgccagccagtcgctgatcatggtgatggtcgccgcgctgcggtaa

SEQ ID NO: 258630 - DNA, 1227 bp, Klebsiella pneumoniae
atgaagggaatgcaaaaaatccgcaggggtaagagcttcgcaggggtcgtgctttacgcattaaaaccagcttctcatcataaaaaagatccgatagtaattggcgggaacatggatggaagcgatgtcggagagttgattgcagaattcaatgcgactaaagcgcttcgtccagaagtcgttaaagcggtatggcacaattcgcttcgtttgcctaaaaacgaggcattgactgatgctcagtggtctgaaatagcagatgattacatgtctcgcatgggcttctctgaaacgcatctcagatgctacgtcctacatgacgacaaagatggccagcacatccatatcatcgccagcagagtttctcttgatgccggaaagctctacctcggcaggaatgagaacctggcaagcacgagaataattcagcaacttgaaagagattacaatctgacaagaaccaaaggaccgaaagcatctccagcagcgccctcacctaaaccgaagctcaaaaaatcccgtaatgagatgatgatagaaaagagaactggtgagctatgcccaaaaggaatcatccaaaatgcccttaacgaactgcttgataccaggcaatcgattaccgagttcgtgcaacagcttgtggcacaaaatatcaggccaatccctaacattgcctctactggacgcatgaacggcttctcattcgaatacaacgggattgctttcaaagcatctcaattgggaaaagggtattcctggtctgccttgcaaagcagaatcgactaccaaccggaacgtgataatgctttcctgtttgaactgaaagcatctgtcagtgaagcgccttgtacgttcatgactagagatgctcctgaaaccacaacaagagagattaacagccccatagaagcgcttatccatgttaaccatgctggtcaggatgaattcactaacgcatcagtcaaactgcttcacttagaagcaggtgcaggtgctaaagaagcccccgaccgaagctatgcaatttcagcgttcaggtggttggaatacatcccttacctagatgtaatttatcgtatgttgaaaaacctcaaaatcccaaccctcaaacgtcctcgaaaacacaaaaccatcactagcgtgagagtgttagagattatgcctctcccccaaaaaaacctcttcgaatcagcacctcaatccagaagagcttcgctatcgatgtaa

SEQ ID NO: 258631 - DNA, 1809 bp, Klebsiella pneumoniae
atgtacccgggcgaagcaggtatcgacatctataacctgaccaagtacacccgttctaaccagaacacctgcatcaaccagatgccttgcgtgtccctgggcgaacctattgagcgcggcgacgtgctggcagacggcccgtccaccgacctcggtgagctggcgctgggtcagaacatgcgtgtagcgttcatgccgtggaacggttacaacttcgaagactccatcctcgtttccgagcgtgttgtccaggaagaccgtttcaccactatccacattcaggaactggcgtgcgtgtcccgtgacaccaagctggggccggaagagatcaccgctgatatcccgaacgtgggtgaagctgcgctctctaaactggatgagtccggtatcgtttatatcggtgcggaagtgaccggcggcgacattctggttggtaaggtaacgccgaaaggtgaaacccagctgacgccggaagagaaactgctgcgcgcgatcttcggtgagaaagcgtctgacgttaaagactcttctctgcgcgtaccgaacggtgtctctggtaccgttatcgacgttcaggtctttacccgtgacggcgtagaaaaagacaaacgtgctctggaaatcgaagagatgcagctgaagcaggccaaaaaagacctgtctgaagaactgcagatcctcgaagccggtctgttcagtcgtatctacgcggtgctggtctccggtggcgttgaagctgagaagctcgacaagctgcctcgcgatcgctggctggaactgggtctgaccgacgaagagaaacaaaatcagctggaacagctggctgagcagtatgacgaactgaaacacgagttcgagaaaaaactcgaagcgaaacgccgtaaaatcacccaaggcgacgatctggcaccgggcgtgctgaagattgttaaggtatatctggccgttaaacgccgtatccagcctggtgataaaatggcgggtcgtcacggtaacaagggtgttatctctaagatcaacccgatcgaagatatgccgcacgatgctaacggtacgccggtagatatcgtactgaacccgctgggcgtaccgtctcgtatgaacatcggtcagatccttgaaactcacctgggtatggctgcaaaaggcatcggcgataagatcaacgccatgctgaaacagcagcaggaagtcgcgaaactgcgcgaattcatccagcgtgcttacgatctgggcgctgacgttcgccagaaagttgacctgaataccttcagcgatgaagaagttctgcgtctggctgaaaacctgcgtaaaggcatgccgatcgcaacgccggtattcgacggtgcgaaagaagctgaaatcaaagagctgctgcagctgggcgacctgccgacttccggtcagatcaccctgtttgatggccgcaccggtgaacagttcgaacgtccggtaaccgtgggttacatgtacatgctgaaactgaaccacctggtcgacgacaaaatgcacgctcgttccaccggttcttacagcctggttactcagcagccgctgggtggtaaggcacagttcggtggtcagcgcttcggtgagatggaagtgtgggcgctggaagcatacggcgcggcctacaccctgcaggaaatgctcactgttaagtctgatgacgtgaacggtcgtaccaagatgtataaaaacatcgtggacggcaatcaccagatggaaccgggcatgccggaatccttcaacgtactgttgaaagaaattcgctcgctgggcatcaacatcgaactggaagacgagtaa

SEQ ID NO: 258632 - DNA, 477 bp, Klebsiella pneumoniae
atgacaatagcgacctttgcattctttattatccatggcgggctattactcacgctttgttggcacgatctgcgctatggcttgctacccgataaatttacctgccctctgctgtggagtgggttgctttattatctctgtctgtcgccggccaatctggtacatgccgtctggggcgcgataggcggctatctggcctttggcttgatctattggctctacaggggaatacgcaggcgggaaggcatcggctacggcgatattaaatttctcgccgcgcttggggcatggcatgggtgggaagttttaccgcagctggttctcatcgcagctattctggcctgcgcggccgtaacggcgctgattttgtgcacgagaacaaggcagacgctacaccacccgctgccttttggccctttcctggccacagcgggtgtgttctgtggatggcagacgtttatcagtcagccactttaa

SEQ ID NO: 258633 - DNA, 477 bp, Klebsiella pneumoniae
atgaaaggtgatgtcaaaatcataagttatctcaataaattattgggaaatgagcttgtcgcaattaatcaatactttctccatgcgagaatgttcaagaactggggcctgatgcgcctcaatgatgtcgaataccacgaatctatcgatgaaatgaagcatgccgataagtatattgagcgcattttgtttctcgaagggatcccgaacctgcaggacctcggcaaactccgcatcggagaagacgtcgaggagatgctgcaatctgacctaaggctggagctggaaggggcgaaggatctacgcgaggccattgcctatgccgacagcgtccatgactacgtcagccgtgatatgttaatcactatcctcgcagatgaagaaggccatatcgattggctggaaaccgaattggacctgataggcaaaattggtttgcagaattatcttcagtcgcagattaaagtggctgactga

SEQ ID NO: 258634 - DNA, 144 bp, Klebsiella pneumoniae; identical to SEQ ID NO: 188793

SEQ ID NO: 258635 - DNA, 282 bp, Klebsiella pneumoniae
atgctcaagcagctggcgtacgttattgataaaaaaattcaccatatagctgtcttccagcacccggaacaggcagagcatcgccatctcgcgaaagtagtagatttgtcgctgcggctgcactttgctccccacctcaatcaccgaacgggcgaatcggatagcctcgcgaatatccggggcgttgtccgcctgcacgccaatcccgatatggtaatggctgatctgattgctgagaacaaactcgatgccccgcagcatcgtctcctggggttcgcatag

SEQ ID NO: 258636 - DNA, 1779 bp, Klebsiella pneumoniae
atggcgatgatccagctgctgctcggcaatatgggcatggcgggcggcggcgtaaacgccctgcgcggccactccaatattcagggtctcaccgacctgggactgctgtcgcagagcctgccaggctatatgacgctgccgagcgagaaacagactgacctgcaaacctacctcgccgccaacacgccgaaaccgctgttgaagggccaggtgaactactggggtaactacccgaaattcttcgtctcgatgatgaaggccttctttggcgataaagcgacggcggaaaacagctggggctttgactggctgccgaagtgggataagggctacgacgtcctgcaatacttcgagatgatgaaccagggtaaagtgaacggctatatctgccagggcttcaacccggtagcgtcgttcccgaacaaaaacaaggttgtcgcgtcgctgtcgaagctgaagttcctggtgaccatcgacccgctcaacaccgaaacctccactttctggcaaaaccacggggagtcgaacgacgtcgatccgacgaaaatccagaccgaagtgttccgcctgccgtccacctgcttcgccgaagagaacggttctatcgtcaactccggccgctggctgcagtggcactggaaaggcgcggacgccccggggattgcgaccaccgacggtgagatcctcgccggcatcttcttacgcctgcgcaagatgtacgccgaacagggcggaccggcgccggaaccggtgctgaacatgacgtggaactacgccacaccgcatgaaccggcatcagaagaagtcgcgatggaaagcaacggtaaggcgctggcagatattaccgacccggcaaccggggcggtgatcgtcaagaaaggccagcagctcagctcgtttgcgcagctgcgcgatgacggcaccacctccagcggctgttggatcttcgccggtagctggacgccggacggcaaccagatggcgcgtcgcgataacgccgacccgtcgggcctgggcaatacgctgggctgggcatgggcgtggccgctcaaccgccgcattctgtataaccgcgcctccgcggacccggcgggtaaaccgtgggatccgaagcgccagctcctgaaatgggatggcgcgaagtggggcggcgtggatattgcggactacagcgccgcggcgccggacagcgatgtcgggccgtttatcatgcagccggaaggaatggggcgtctgttcgctatcgataagatggcggaagggccgttcccggaacactacgagccgtttgaaacgccgctgggcactaacccgctgcacccgaacgtggtctcgaacccggccgcgcgcgtctttaaaggcgaccttgagcagatgggcaaagcggataaattcccttacgtcggcaccacttaccgtctgaccgagcacttccactactggaccaagcacgcgctgcttaacgccatcgcgcagccggaacagttcgtggagatcggcgagaagctggccaacaagctcggcatcgcccatggcgataccgtgaaggtctcctctaaccgcggttatatcaaagccaaggcggtggtgaccaagcgtattcgcacgctgaaagcggacggtaaggatatcgatactatcggtattccgattcactggggctacgaaggcgtggcgaagaaagggtttatcgccaataccctgacgccgtttgtcggtgatgcgaacacgcagacgccggagttcaaggctttcctcgtgaacgtggaaaaggcgtaa

SEQ ID NO: 258637 - DNA, 669 bp, Klebsiella pneumoniae
atgagcatctccgctacaaaaatcaggaaggaagaagctgaagctggtctttctgatgatcctcggcaaacgggaatcacaacacccaaatttgtgctgtctggtgaaacgttcacatttgttgagactttctctgccactgtcatcaactccgatccaggcaatggtcagatctgggtaaaaaccaacgctggggatgagaagcagatttccgactatggtatctcgttcagaagttcacacactatctataaatacgatcttcgccagtatagtgaggatggttcgtatgatgtgtataaagatgcacttatcgttaataagaacacgggtgaacatgaagtaaacttaaaaaggaaaacggttgtcatccccgcttttctgacaatgctgttccataatgcttccacagcatcatattacagagcaatgcctgtttcggaactgttcttcattgtttttattttactttgtgctgtagcacttatttcatttctcacattgccttggggctttaaagatggatatgtgtgggatgagcacaagtatatgtggctcacatatttcctatcaaggatcggaagcttcgcttgtatcaaatggattaaaagaagaagcgagagatttgatcatgaactcagaagtcttatcgatttagtaaaaagataa

SEQ ID NO: 258638 - DNA, 1287 bp, Klebsiella pneumoniae
atgacgacgaaatcgctaacgctttctttggatgaacaacagtcaattcctttgagtacggtctcggggaccctgggctacctcggcatggatattcgtccgctggcttccgccgggatatgcagtttcgaccccggttttgctaacaccgcaggctgtaagtcggccatctcgtggatcgatactgaaaagagcattctgctgcaccgcggctatccggtcgatcagctggcgcgccagtgcgacttcctggaagtggcgtggattctgctgcgcggcgatgcgcctgacgaagccagctatcaggacttcaaaaacacgattacccgccatagcctggtgcatgagcagattgcccgcatgtgcagcagctttcgtcgcgactcgcatccgatggccttaatgtgcgccctggtaggcaccctggcggcgttctatcacgatgtgctggacgttgaaaatcctgagcaccgcgcgctggccgccacccgcctgctgtcgaaaatgccaacgctcgcggcgatgagctataagttttcaattgagcaaccggcgcagtatccgcgcaacgatctttcctatgcggggaatttcctgcatatgctgtttgctattccggcggaacagtatcagctgaatccggtgattgagcaggcgatgaaccagatcctggtgctgcacgccgaccatggccagtgcgcatcgacgaccaccgtccgggcggcgggctcctccggggcgaatctctttgcctgcgtcgccgccgggctcgcgtctctgtggggaccggcccacggtggggcgaacgaagccagtatgcggatgctggaggagatcaacaccgttgatcaaattccggcgttcctgagcaaagcgaaacgcgacccgcagacgttccgtcgtctgggattcggtaactctcgctaccgtcatcttgacccgcgcgccgctattttgcgcgagacctgtcatcgggtactggaagagctggggatgtccgacatgccgttgcaggtggcgatggccctcgaagaggtggcgctgaccgacccgtactttgttgaaaatggcctgtcgccgagcgtggatttctatactgcggtgatcctcaaggcgatggggctgccttcatcgatgtttgtggtgattaccgccgtgggcagaacgcttggctgggtggcgcactggaacgaaatgcacgaagcgccgctgacgatttatcgtccgcggcagatttataccggcgaacagcggcgggattatgtttcacggcgtgaagggaaataa

SEQ ID NO: 258639 - DNA, 489 bp, Klebsiella pneumoniae
gtgggttttacccaggccggtgccgccataaaggaacagcgggttgtacgcgccgccggggttatccgcaacctgacgcgccgccgcgcgagccagctggttggatttaccttcgacgaagttatcaaacgtgtgttttacattgacgttagagcggtaggtcggttctgccggcgccggaacgttatcccagcccggacgcacgatcgtcggcgcaacgcgcgccgtctggatctgctgcgcgggcgctgcggccgcaacgcttaccgtacctctctgcatctgaacggctggcttagcgcctacctcaaaccgcagctgtggggcatccgcaccgcaaaaatcattgaggagtccattgatattattgaggtatttatcccttacccaatcgagcacaaaacggtttggcgcatacagtgccagcgtgttatcgctcaactccgcctgcaaagggcgtatccacatgctgaattctgtggctggtaa

SEQ ID NO: 258640 - DNA, 213 bp, Klebsiella pneumoniae
gtgaaaaaactcttcctgcgagcgctctttattagcgaaaaactgaatgtcatcgatcagcagggcatcaacggagcggtaatagcgcttaaattcttcaatagcgttgttttgcagggcttttaccatgtcctgtacaaagcgctcggagtgcatgtaaaccactttcgcattgggtttacgcgccacaattccgttaccaaccgcatgtaa

SEQ ID NO: 258641 - DNA, 1140 bp, Klebsiella pneumoniae
atgggtcgccagccatttaccgatcaccactttttgctgattgccgccggaaagggtctccaccgcctgccgccagctaaaggccttaacctgcaggcgcgaggcgtactcatccgccagccgccattcgcgggcatcgttaagcacgccgccggggttcagtttgctgagctgcggcaggctgatgttctgggcgatcggcagggcgataatcgctccctgcttctgccgctcttccggcacgcagacgataccggcgctgatggcgtcggcgggctggcgaaagcgcatcagtttgcccttcagcacgatatcgccggaagagggatgcgagaccccggagagcgcctgcatcagctcggtgcgcccggcgcccaccaggccgtaaaagccaagaatctcccctttgcgcaggctgaagctgatatgggcgaactcggtggggtggcagaggtcttttacctccagcaccgtttctcccggaatacagtcgactttcggataggtttgggtaatcgcgcggcccaccatcatcgccaccatccgctcttcggtgatgtcgttaatcgcgccggagctgacgtacacgccgtcgcgcagaatggtgtagtagtccgccagctcgaaaatctcatcgaacttatgcgagataaacaggatcgctttgccgtcctgcttcaggcgctcaacgatttgataaaactccagaatttcatgctgcgagagcgcggcggtcggctcatcgaggatcaccacctgggcttcaaaggagagcgcccgggcaatggcgaccatatggcgctgggcgatgctgagggttttcagcgtcgcgcgcgggtcaatctgcacctcaaggcgggtgagaatttcgctggctttgcggtgcatggcgggccagtcgagcttcttcagcaggccggtgtgcaggtactggccgacgaagatattttcggtgaccgagagttcgtcgaacagcacggtttcctgatgaatcgcggtgatcccgaccttgtgcgccgactccgggttcggcagttggatagggatcgctttatagagaatctcgccctcttcgggctgataaatgccggtcatcactttgaccagcgtcgatttccccgcgccgttttcgccgattaa

SEQ ID NO: 258642 - DNA, 714 bp, Klebsiella pneumoniae
atgggcaaactcggtaggatgacagagatcggtcacctccagcaccgtttctccgggggtgcagtcgactttcgggtaggtttggctgatcgcccggcccaccatcatcgacaccatccgctcttcggtgatgtcgcttatcgccccggagctgacgtacaccccatcgcgcaggatggtgtaataatcggccagctcgaagatttcatcgaacttatgcgagataaacaggatcgctttgccgtcctgcttcagacgctcaacgatgtgataaaactccaggatttcatgctgggaaagcgcggcggtcggctcatcgaggatcaccacctgggcgtcgaaagccagcgcccgggcaatcgccaccatgtgacgctgggcgatgctgagggttttcagcgtggctcgcgggtcgatctggacttccagccgggtgaggatctcgttggctctgcggtgcatcgccggccagtcgagcgttttgagcagtcccttatacagatactggccgacgaaaatgttttcgctgaccgagagttcgtcaaacagcacggtttcctggtgaatggcggtgatccctaccttatgcgccgactccggcgttggcagatgaatggggatcgctttatagaggatctcgccctcttcgggctgataaataccggtcatcactttgaccagcgtggatttccccgcgccgttttcgccgattaa

SEQ ID NO: 258643 - DNA, 186 bp, Klebsiella pneumoniae
atgatgatgaacgaggcaaacataatcacgcccacgaaagggtgcagaatacgcgccagctgcggggtgcccatgatgtgcatcagccagttgaaggacgggaagaaaaagcccagcccgctcaccgccgccagcacgaagcagaaggcggtgacccagtggttgatgcgttccggcgcggtgtag

SEQ ID NO: 258644 - DNA, 561 bp, Klebsiella pneumoniae
ttgcaggattgtggtattggctggctgcaaaaaatccgcaacgaagcggcgcaccgtcgcattaccggtgtgacgatcacttcgcgcaaccagaacaacgccattgtcgccgagggcacctacggcaacgtagcggctgcggtctatgacgccaaaaacagcctcatggatgaatggcataagcgcaaccctgacaacgtggtgattttgtccggcgatctgctgacaaccagcaatttcccgaccatcaacgccatgagtcagaccaacccgaacaccgaaatgctggccggtcagctgattgtggcgcaggaacgcgtaggcaacatgccgacctttatcgcgccttacatgccgggtaacgccatcctcatcacgccgtttaaaaacctctcgatctactaccagcgcggcggtctgcgccggacgatcaaagaggagccggaatacaaccgcgtggcaacgtaccagtcttcgaacgatgacttcatcgttgaagactacggcgccgtggcctttatcgacggcatcacctttgccgaagcaccgggcggcgagtaa

SEQ ID NO: 258645 - DNA, 885 bp, Klebsiella pneumoniae
gtgcatctgtacgatacgaccgaaacgctcacgtgcagctttcacggagttcaggatggtatcaccagagttaaccacaccggagtacacgcggaagaaggtcaggttacccacgaacgggtcggtagcgattttgaatgccagagcagcaaacggctcatcatcgctagcgtgacgctcagccggagtatctttaccgtcgtccaggataccgttgatcgcaggtacgtcaaccggggatggcaggtagtcaactaccgcatccagcattgcctgaacacctttgttcttgaacgcagaaccacaggttaccaggatgatttcgttattcagaacacgctgacgcagagcagttttaatctcttcttcagtcagttcttcaccacccaagtatttctccatcagctcttcagaagcttcagcagcggactcgatcaggttctggtgccattcttcggccagttcctgcatgtctgccgggatatcttcgtaagtgaaggttacacctgcatcttcttcgttccagttgatggctttcattttcaccaggtcaacaacaccggtgaacgcttcttcagcgccaatcgccagctgcagcggaacagggttcgcgcccagacgggttttgatctgaccaacaactttcaggaagttcgcacccatacggtccattttgttaacgaacgcaatgcgcggaactttatatttgtttgcctgacgccatacggtttcagactgaggctgaacaccaccaactgcgcagtaaaccattactgcaccatcaagcacacgcatggaacgttctacttcgatagtgaagtcaacgtgccccggggtgtcgatgatgtttacgcgatgcggttcatactgcttagccatacctga

SEQ ID NO: 258646 - DNA, 801 bp, Klebsiella pneumoniae
atgaccctggtcattaccaccggcggcatcgacctgtcggtgggttccaccctcgcgctggtcggcgcgctttccgctatcgccctgaacaactggggactgccgtggccggtggttttgctcggcggcctgttgctcggcggcatcgttggcgccatcaacggcttctttatcgcctatgagggcataccggcgtttatcgtcaccctcgccaccctggctgtggttcgcggcatcgcgctgctggtcacccagggctactcgatcccggttccggctgacagcctgtttacctttattggccgcgcgtgggttgtgggaatccctatgcctgcgttgatcggcattatgattctgcttatcgggcacatcgttctcaaccatatgcgttttggccgctacgtgacggctatcggcgccaacgccgaaggcgcgcgacgcagcgggattaacaccaaagcggtgaccatgaaggtctatatcatcagcggcatggccgccgcgctggcggggatgattatcaccgcgcgcctcggcagcggctcctccaaccagggcgaaggttttgaactgcaggtcatcgccgccgtggtgctcggcagtaccagcctgtttggcggcttcggcaccattatcggcacgctgctgggcgcgctgtcgattgcggtgattcagaacgggctgatcctgtcgcatatttcgccgttctacacccagatcgccaccggcactattatcctgctggctatctggctgaacacccgcattctcaaccccgcgcgctccgcggcaaaaggatag

SEQ ID NO: 258647 - DNA, 198 bp, Klebsiella pneumoniae
atggtcccgaatatcgcattattaggattgtgctatacagatgatattaaaatggtttttgtaagcaaaaagttcaatggtttatctagtgagaacaaaaaaatggccgttcctgtagaagtggcgatgcggtttaagcttacttcaactaaaaaatatgaggagtatgttaatgttatttatagccagtgggattaa

SEQ ID NO: 258648 - DNA, 414 bp, Klebsiella pneumoniae; identical to SEQ ID NO: 187062

SEQ ID NO: 258649 - DNA, 321 bp, Klebsiella pneumoniae
atgaagcaatctccggaagcgatcgattcaatgcaaaagaacaaatatatctctgcaacagcatctgaatatgaaagaatgaagttgataagaactgaaaaatttgttttttctgaaatcatgattcgtttcgaaaacgtacagcagatagtacgtctatatgtagaccgtaaaatggaactttgctttactacagaccctgctgacaggcgtaaaatctggagtcttattgaggacggatttacctacgcagaggctatcgacagagtgtatgaacaggaacaaattcaattagggctttccaaaaaattagttgcataa

SEQ ID NO: 258650 - DNA, 855 bp, Klebsiella pneumoniae
gtggttatcgccgccctggtcgtagtcgacgcgctggtagcccgcttccagccaggtggagtgcacatcgttccagaagtacatcggacggacgatggcgccgtagtttttacggttgtcggtgttgtccttgccgttgtcatagtcgtggaaggccagcagatattcgatctgcgcctgccgggtgaatttatgcagcccttcaaagctggcgtagatagcagtcaggtcatcggttttgttgtagacgctgttatccgagttatcggagtagcgcaggatcactttattgacgccgctgtcgttggtgtggctcagcaccagaccgccctgccaggcgtcgagacgttcgtcgctgtccaccgctttcgaatcgaagccgtagttggcgtatacctcaacgtcgatcggcccggccttgatgttgtgggttttggtggtcagggcgtagtggccgttatcgccggtaccggagccgccggtacaggtgatgcgcgacgggttggcctcgtcggccatcacttccgggctacaggactccacctgcgacactcccgccacgtcaaactgcacgccgccgatatcaaagtttttcaccccggcgccctggccatcgtggttcatccagaagtagtcgttgatcccctgctgcggacgctgatggaagtcgcggccggcccagatataagcgttggggttagattccagcacgttggtgacgccgacgtaggcttttttcaggttaacttcatcgctccagtggtcaaacatgacgttgatatcccagatagcgcctttactgctcttgaaggctttggttatctggaattcgccgccgttgccttcgttgcctaa

SEQ ID NO: 258651 - DNA, 294 bp, Klebsiella pneumoniae
atgatcggtattgttttgttgccgggtacgctcgttatagtggcgtttaagctcatcagcgaacgctttcgcgatcgtctctccgtgactcccgccggtttcagaaataacgccagcatcagtctgccgcacttccttgagggggtagaaaacgttaccgccgacaggcccgaaatcataagaagcgagccctttgacgaaagacgagccacgaggcgactgaccgagcatgatgttgcccatgtccgttgcgtcagggatggcgaagctacttccaccgccattgacaaatga

SEQ ID NO: 258652 - DNA, 390 bp, Klebsiella pneumoniae
gtgcgtctgcacttcggttcttaccacgacgttgactcctctgaactggcgtttaaactggccgcttctattgcctttaaagatggctttaagaaagcgaaaccagttctgcttgagccgatcatgaaggttgaagtagaaactccggaagagaacactggtgacgttatcggtgaccttagccgtcgtcgcggtatgctgcgcggtcaggaatccaacgtgactggcgttgtgatccacgctgaagttccgctgtctgaaatgttcggatatgcaactcagctgcgttctctgaccaaaggtcgtgcttcttactccatggagttcctgaagtatgatgatgcgccgaacaacgttgctcaggccgtaatcgaagcccgtggtaaataa

SEQ ID NO: 258653 - DNA, 858 bp, Klebsiella pneumoniae
atgcatttaagtagtaaatttaaaaggattgttaataaaaaccaacttagttttagcttctttttattcgaggaagatgaagttaaggagaaggtatataaacctgtggtttcatcttcaatcaatgaatctgatataggtgacgtatcaacctatgaatatcaggagcttgatgatttcgtttggtctgatgaacatatttccacattgttctataagttgatggaatcatcatttgtaactgttcagtaccatatagaccattccatggtttataaaatcgattcacatggttatcgatatttaacacctaaattaaaattggagttagactggtactgtactaaacaatttcaaatcgtgtgtcattactttggatatgaccccgatgaaattattctgtttataaagtcaaggctcttacttgaggtgcgttcaagagagtcaatgcaaaaccttatcaattcattaaacactgacaacttaacattttcacaccctattataggcccgctgaaatggtcagattttttggatccaggttattgcgactcaaggagatcgttaattataaaatggtcaatagcagacagattgaaactctttaaaaagattttcgacgagcaaatgctaatccttgaaaatttaagtgagaatggtgcatggacatgggatcgaattaaagattcatacgtcctaaaaactgaagccgttgattatattcagtggttatattcagatgcatgtaaagttatttctcatgcatacggatttgattacggattacttttaaacacttcaaaagccattatcaaaaacagactttactatacatatatgaaatggggttatttatga

SEQ ID NO: 258654 - DNA, 435 bp, Klebsiella pneumoniae
atgcgtttaaatactctgtctccggccgaaggctccaaaaaggcgggtaaacgcctgggtcgtggtatcggttctggcctcggtaaaaccggtggtcgtggtcacaaaggtcagaactctcgttctggcggtggcgtacgtcgcggtttcgaaggtggtcagatgcctctgtaccgtcgtctgccgaaattcggcttcacttctcgtaaagcgatgatcacggcagaagttcgtctgtctgatctggctcacgtagaaggcgatgttatcgacctgaacacgctgaaagcggctaacattatcggtatccagatcgaattcgcgaaagtgatcctgtctggtgaagtatctcgtccggtaactgttcgtggcctgcgcgtgactaaaggtgctcgtgctgctatcgaagctgctggcggtaaaattgaggaataa

SEQ ID NO: 258655 - DNA, 180 bp, Klebsiella pneumoniae; identical to SEQ ID NO: 75813

SEQ ID NO: 258656 - DNA, 321 bp, Klebsiella pneumoniae; identical to SEQ ID NO: 257108

SEQ ID NO: 258657 - DNA, 669 bp, Klebsiella pneumoniae
gtgcatagccagctgtttaaccagctcttcgctcgcgcctttagccgcaaccagaacgccgatacgcgcgccgtgctggtaagaacccagaacttcgccttccagagaagaaacgcgacggatgttgatgttctcaccgattttagcaaccagcgcaacgcgttcttcttcgaactgtgctttcagaacttcaacatcagtgattttgccagcaacagctgcgtccagaactttgttagcaaatgcctggaaaccaccatctttagcaacgaagtcagtctggcagttaacttccagaatgatgccgtaggtgccatcgattttagtaatgatcacgccgtcagcagcaacgttgcctgcttttttcgctgctttaatagcaccggatttacgcatgttttcgattgccagctcgatgtcgccgttcgcttcagtcagcgcttttttgcaatccatcatgcctgcgccagtacgctcgcgcagctcttttaccagggatgcggtaatttcagccattctttattcctcgggagatgtgatctgcccggttccaggaaccagacagatttgaaagtgaaaaaggggccgctaagaggcccctatttatacacggtactaaataagggtatgccttattattcagcttctacgaagctttcttccgcctga

SEQ ID NO: 258658 - DNA, 600 bp, Klebsiella pneumoniae
gtggccagccagttcgatgattttcgcttcccactctgcgtcgccttccagcgctttcagagcagaaccacgaacgatcggggtgtcgtcgcccgggaaatcgtactgagacagcagttcacgaacttccatctcaaccagttccagcagctcttcgtcatcaaccatgtcgcatttgttcaggaacacgatgatgtacggaacgcctacctgacgacccagcaggatgtgctcacgagtctgcggcatcgggccgtcagtcgcagcaacaaccaggatcgcgccgtccatctgcgcagcaccggtgatcatgtttttaacatagtcggcgtggcccgggcagtctacgtgcgcgtagtggcgagtcggggtgtcgtattcaacgtgagaggtgttgatggtgataccacgagctttttcttccggcgcgttatcgatctgatcgaatgcgcgagcagaaccaccgtaggttttagccagaacggtagtgattgcagcggtcagcgttgttttaccatggtcaacgtggccgatagtaccgacgttaacgtgcggttttgtacgttcaaacttttctttagacatcgattgtccctctaa

SEQ ID NO: 258659 - DNA, 267 bp, Klebsiella pneumoniae
atgggccgcacgctgggcgaactgcgacaaaccatgacagtcggcgaattccggatgtgggctgaatacgatcgtatcagcccaatcggagatattcgcggcgatattctcaatgctcagctggtatcagcggtttacggggcacagggcgttaaagtcaccattgaagatgctcagcttcagtggggcacagaagaggatgaggtaagcgacagcggcgatccctttgcagggctggaagcagcgctgctggctgcgtcagcatag

SEQ ID NO: 258660 - DNA, 219 bp, Klebsiella pneumoniae
atgatgtccgactttaatgacacaaagtgtgttcttattattaatcggctacgcgcatctgacactattatcggtgagttatcagctaaagccgttcgtgactataataaagatgatgcaaaaatattattacaaggaagagatgaaaataaaggggaatttttatcatcacaaagtagcatactgatgggcactaataacgaagtatctttaccatag

SEQ ID NO: 258661 - DNA, 564 bp, Klebsiella pneumoniae
  misc_feature (536)..(545): n is a, c, g, or t
atgagatatttatatgatgcaataggtgggtcattcgaccatgaggtatcttatccatgggtgacgtatcttttttctggcatgtccaaaaaagaagtagctgatttagtgcacgatactattgagtggcaaaataaccagcctatcgaaaaggtgacatgggtaagcccagcagatatggctggccgagctggtatcgtatcagtaacatggaaaaatggatttaggctggtcccagaaatgcagacattatataaaaacctacagcaggcaggagttgatgtttatgtcatttccgcttctgctttagatgtgataaaaagcatcgttactacagaaaaatatggtttttctgttcctgagtctcatgtctatgcaatgcatcccttatatgataaagaaggtagattgactcacagcctcgatccatactatccccagacgcaaggtaaaggtaaaaccgaaaccataaaaaaatttatacaacaacattacaaaaataccgggccaatattagttgctggcgatagcgaagnnnnnnnnnngaaggagatcaaaacatga

SEQ ID NO: 258662 - DNA, 201 bp, Klebsiella pneumoniae
gtgcatcagtttatgtccgagctggtcagccaggggctggcggtgattatggtgtcgtcagagctgccagaagtgatgggcatggccgaccggattatcgtaatgcacgaagggctgatggtcgccgaataccaggccggggaagcgacagcggaaactatcgttagcgcggccagcggcatcggccaggaggcggcatga

SEQ ID NO: 258663 - DNA, 171 bp, Klebsiella pneumoniae
gtggcctggtccttcgccatcggcgaagccttcaaggtgttgctgaccttcgcctttctggcgatggcgctggcggttttgaaagtggtatttttgccgctgatagtgacgtgggttttggtgctggtggtacaagttctggcgccagctgtaattaacaacaaagggtaa

SEQ ID NO: 258664 - DNA, 189 bp, Klebsiella pneumoniae
atgtccgaactggtcagccaggggctggcggtgattatggtctcttcggagctgccggaagtgatgggtatggccgaccggattatcgtgatgcatgaagggctgatggtcgccgagtaccgcgccggtgaagcgacggcggaaaccatcgtcagcgccgccagcggcattggtcaggaggcagcgtaa

SEQ ID NO: 258665 - DNA, 621 bp, Klebsiella pneumoniae
atgaaattgatacttgttcgacacgcagaaacagagtggaatttggaaggaattattcaggggcacagcgatagctccttgacctgtcggggtttgcgtgaaacatccgtcctactagcagcgtttagtgcaagtgagtatcaaatagagcgtgtttacgcttctccgcttgggcgtgcctggcaaatggggcaaagcctggctgaacactttcattgttcactgacggctgaaccggcccttaaagagcaggcctttggtcagtttgaaggtatgccgttagaactactcagacaaaaacatccaaactatgcaaatgcgttattcaggcttgatgcagagtattgtccacctgggggggagtcactggcgcatgcttctcagcgagttatgcgttttttacaaaacctggaagatacctcatcacatcaacaaacaatatgtattgtgtctcacgggcatgtcagtcagggcactctggcaattcttaaagaagggactgtcaatagtttccctcgctatgctcaccccaatgcaagttattctgttatcgacctgattaatggaaaatgtatcggcctaaagtgggggattgctacacatttacgtcacctgaattag

SEQ ID NO: 258666 - DNA, 639 bp, Klebsiella pneumoniae
atgaaaaatataaatgtgacagtgaaagaaacaggtgttgaatacaccgttgatggcaatcaaattaatctcaatacgcagtcagtggttctcttgcacgttaaacgtgaggatataagttcgtatacccgccaaggtaatgatcttgttctaaaactccataacggtgacaccgttacaattaaaaactttttcgttgtggatgagcatgggcagcacagtgatttggttcttatggatgatgagaccggcgcattatggtggttggaaggcgcgggtaccgatggagcacactattcgctgattagcgatctttcagaagtcatcgcgaccggtggcgcaggacaaagtattgctggttgggtcatggcgggcgcggctttgctgggcattgcggcgatgttcgccggcacctcaaacaaagaccaccactcttcggtctctgaaagcgactcagatgctgatagtgactcggactccgatagtgatacggattcggacagcgattcggactccgacagcgactccgattcggatagtgattcggattctgacagcgactccgattcagattcagattcagatagtgactggattggcccctatatttccatacactttttatcacttaacccatga

SEQ ID NO: 258667 - DNA, 462 bp, Klebsiella pneumoniae
gtgcggcagcagggattcgatatcgcgcaggatctcacgcgcctgctccagctggcctgccggcagacgggctttacgtacgaggaagttcagcgcgcgctgggtatccatcagacacaggcgaactttccagccgatatcttcctgctccgccagcgtcgagagcgcctcgtcgtagtcgtcgccctgtcggccttccatgatcacccggctgagcttttccagatcgctatagatgttttcgatttcatccgccagctgctcaattttggtttcgaacaggtccagcagcagctcgtaggcgttgccgtccaccatcgactggctgcgggcgcgcatgcgatacaggcggaaagcgggcagctcccgttcgcgcagggtgaacagacggccttcgcggatagtgaacgccacggtagagttaccggcgtgatcctcagcatcttcaaaaaagaaaaatga

SEQ ID NO: 258668 - DNA, 591 bp, Klebsiella pneumoniae
atgttaatgatggtgcaacctttacgggatgccattcatgcagcaaaagccgcggcaggtgaaggcgcaaaggtgatttatctttcacctcagggacgcaagcttgatcaagcgggcgtcagcgaactggcaaccaatcagaagctgattttggtatgcggtcgctacgaaggcgtagatgagcgcgtaattcagaccgagattgatgaagaatggtcaatcggcgattacgttctcagcggtggcgagctaccggcaatgacgctgattgactccgtttcccggtttattccgggggttctgggtcatgaagcttcagcaatcgaggactcttttgctgaaggattgctggattgcccgcactatacgcggcctgaagtgttagaaggtatggaagtaccgccggtattgctgtcgggaaaccacgctgagatacgtcgctggcgtctgaagcagtcgctgggccggacctggcttagaagacctgaacttttggaaaacctggctctgactgaagagcaagcaaggttgctggcggagttcaaaaaggaactcgcgcaacagcagcataaacatgatgggatggcgtaa

SEQ ID NO: 258669 - DNA, 255 bp, Klebsiella pneumoniae; identical to SEQ ID NO: 78625

SEQ ID NO: 258670 - DNA, 417 bp, Klebsiella pneumoniae
gtggaacaggcagatagccgactccaggcgcaggtccgcaaggtccaggtagaagcgcggcaaatccgccggcatacacagacctttatagatgttgaccagattggacaagctacaaacgtagaaatctttgtcttcctgcaggcgtttttcaatgcgacgacgcgcaataaacagacggcgctccatatcgcgcgggcgccagccagccggggcgttgacaaagatttgctcaatacggggcagcgaggagagggcgatttcaccgagcacgccttcgttggtcggcacatcgcgccagccgacaatcgacagggtctcaagctgaagttcttcttcaacgatgcggcgcgccgctttagccagctcaggatctttattcaggaacagcatcccaacggcgtagtttttggctaa

SEQ ID NO: 258671 - DNA, 495 bp, Klebsiella pneumoniae
atggtagatagcaagaagcgccctggcaaagatctcgaccgcattgatcgtaacatcctgaatgaattgcaaaaagatgggcgaatttctaacgtcgagctttctaaacgggtgggactttctccgacgccttgccttgagcgtgtgcgtcgtcttgaaagacagggttttattcagggctatacggcgctgctcaacccgcattatctggatgcatcacttctggtatttgttgagattactctgaatcgtggcgcaccggatgtgtttgagcaatttaacgccgcagtacaaaaacttgaagaaattcaagagtgtcatctggtttccggtgatttcgactatctgttgaaaacccgtgtaccggatatgtcagcgtatcgtaaattactgggcgagaccttgctgcgcctgccgggcgttaacgacacccgtacctacgtggtaatggaagaagtcaagcaaagtaatcgtctggttattaagacgcgctaa

SEQ ID NO: 258672 - DNA, 261 bp, Klebsiella pneumoniae
gtgtccatcgtcagcgacaacgttataaaaattgtggcatcacgcccgcttaccggcactgtaacaatcatgctcggtgacggaacggcgcatgcgggagtacacaacatcgctgacagcgacactgagatttcagaatacgtatgggagtctggtcttccaaatcagcccgctacggaaaacattgcttccctgaataacaaacattattcgctggcaaaccgtgcattaattcagaaaatcactgcgcaggaattttaa

SEQ ID NO: 258673 - DNA, 267 bp, Klebsiella pneumoniae
atgggtaagccaggcctcggcgatttgcttgccgacgcagaccaccggattgagcgaatatttcgggtcctgcataatcatggagatacgcttaccgcgtacgccgcgcatctgcgcttcgctaagatgccgcaggtcgaggtcggcaaactgcatccgggcggcggtgacgcgggcttttttcggatgcagctgcagcagcgcgcgcccaacggtggacttacccgaaccggactcgccgacaatcgccagcttttcgcgccctag

SEQ ID NO: 258674 - DNA, 204 bp, Klebsiella pneumoniae
atgaccaaacaagaatggattttacgactacggcgctgtacatcgaaggaaaccctggaaagggtaatagaaaaaaataaatattctctgtcagatgatgagcttgagcatttcaatgctgcggttgatcaccggctggcggaaatggcaatggggaagttttatgacaaaatacctgcaggcgtctggaaatatgttaaataa

SEQ ID NO: 258675 - DNA, 276 bp, Klebsiella pneumoniae; identical to SEQ ID NO: 135014

SEQ ID NO: 258676 - DNA, 219 bp, Klebsiella pneumoniae
atgatcgccccgattctggatgagatcgctgaagagtatcagggcaaactgaccattgcgaaactgaacatcgatcagaacccgggcaccgcgccgaaatacggcattcgcggtatcccgaccctgctgctgttcaaaaatggcgaagttgcagcgaccaaagttggcgcgctgtccaaaggccagttaaaagagttcctcgacgccaacctggcgtaa

SEQ ID NO: 258677 - DNA, 180 bp, Klebsiella pneumoniae; identical to SEQ ID NO: 75813

SEQ ID NO: 258678 - DNA, 348 bp, Klebsiella pneumoniae; identical to SEQ ID NO: 214251

SEQ ID NO: 258679 - DNA, 186 bp, Klebsiella pneumoniae
atggtggagcgctacgaaaacagcggtatccaggctgtgaaggtggtagccagcacttacgatttcatcacctggtgccaggcccatggacgtgatatcagtaccaaaagctgcaatgattacgcggtctccgaatcgggcctccaaatcctgcgcgacagagagtttgattggggagacgagtaa

SEQ ID NO: 258680 - DNA, 225 bp, Klebsiella pneumoniae
atgagcttcgctcacaacattgaactgagcaatgcgctgcttgatcagttcgctgatttcggtggaattcagttgcatgctccagtccccttaagactgcaagacgtctgcaaggcgctcaagacggccgcgtacgctgccatcaatgaccatatcacccgcacggatgataatacctgccataacagacttatcgattttgcaattcagcttaactttgcgtga

SEQ ID NO: 258681 - DNA, 258 bp, Klebsiella pneumoniae; identical to SEQ ID NO: 211207

SEQ ID NO: 258682 - DNA, 315 bp, Klebsiella pneumoniae
atggaaaaagcccgtcgcaatatgattaatgtcgcgctgaaccacggcaccctgcaacacccggttaaaggtgttcacacgggttctcgtgtattcatgcagccagcttccgaaggtaccggtatcattgccggtggtgcaatgcgcgccgttctggaagttgctggagttcataacgttctggccaaagcatatggttccaccaacccgatcaacgtggttcgtgcaactattgatggcctggaaaatatgaattctccagaaatggtcgctgccaagcgtggtaaatccgttgaagaaattctggggaaataa

SEQ ID NO: 258683 - DNA, 174 bp, Klebsiella pneumoniae; identical to SEQ ID NO: 210706

SEQ ID NO: 258684 - DNA, 123 bp, Klebsiella pneumoniae; identical to SEQ ID NO: 184536

SEQ ID NO: 258685 - DNA, 222 bp, Klebsiella pneumoniae
atgccggcgcaagaatccttccagatgattgaagcgaccaagggtattaacagttactacctgaccagcgacggcagcactatgagctaccgtacccgcgtgcgcacgccaagcttcgcgcacctgcagcagatcccggccgctattcgcggcagtctggtctccgacctgattgtctatctgggtagtatcgattttgttatgtcagacgtggaccgctaa

SEQ ID NO: 258686 - DNA, 201 bp, Klebsiella pneumoniae
atggcgcaggaacaggttgcccgccaggtcgagatggctaaggttcgcaaccagatgtaccacctgcttacgccagagcagcaagcggttttaaatgctaagcaccagcagcgtatggatcagttgcgtgaggttgcaaggatgcagaaaggctcagcgatgatgctttcgagtagtagcaacaccctgcaaccccagtaa

SEQ ID NO: 258687 - DNA, 180 bp, Klebsiella pneumoniae
atgcggcagggcgatcacgtcgccgcggctgcgttgggtcaggagcgatgccgcccgctggagcgacacgccaatggcgaagctgcccagactctggcccatctgggcaatctggcgcagcgaggcgccgccctgggtcaggggcgtaaaatccccttcaccgaggtggccatccattga

SEQ ID NO: 258688 - DNA, 174 bp, Klebsiella pneumoniae
atggcgtttaagctgctcgctcatccaggcatcaatgttaacaacttcaatacgcgccatctcctcacggctacacaaacgctggaggttggcgcgaatatccgccgccaggttacgggtgaaggttgtgaacagaacttttttaccgggtttatcggccaggcgttgggataa

SEQ ID NO: 258689 - DNA, 369 bp, Klebsiella pneumoniae; identical to SEQ ID NO: 225495

SEQ ID NO: 258690 - DNA, 222 bp, Klebsiella pneumoniae
atggactttaatgcgcttcaccagcaaaaccaacctttgttgcttgccaatgtctgggatgccagcagcgctcaggctgctcagcaggctggttatcaggcgctgggatcctccagcgctgctatcgccgcaatgttagggtatgaagatggcgaagagatgagttttgacgagctgttttatgtcgtctcacgatcaaaaccgttagcgaactgccgttaa

SEQ ID NO: 258691 - DNA, 198 bp, Klebsiella pneumoniae
atgactctggtaatcaccgatggagaattttggtggagctggcgggagttgaacccgcgcccgaaaatttataaccgcatgataaacaatgataaaaaatttagcgttttgctgcggatcctttacggctcctttgaggttccaccactgaccaacttgggtcgtttttcagtgttgccgtcatactccttcagatag

SEQ ID NO: 258692 - DNA, 354 bp, Klebsiella pneumoniae
atgcgcgaaatcggagagctgattacagcggagagagccgccactgttatatacgaaacattcggacacctggacgcgaagccgggggagcgacataaaggctggttcgtttttatcaacggtcagcatggcgatatggacgtggtgtacagcgactttccaacgtttggtgaaggccctggatatttcactgacagaggggacttcatctgggagttaattcgtgatgatggtccatgcgctgctgtcggcatctaccggttcgatggtgaatatcgcctgcccaaaagaaaaggtccggcccgtttcgttggtaaaaccacctgcattcagacattcggggaggctgagtga

SEQ ID NO: 258693 - DNA, 207 bp, Klebsiella pneumoniae
atgattaccgcaaccacgaacaacgacgaagctcctgatgttcgctgcactgtgtgcggcggctattacaaagccgatgatccggaaagtcatgaatgcgaggaggaagcacaatcccttaacgaaattgaatgtgatatctgcggtttcaaaagcacagacccggacggtgctcactactgctgcgaggataaatccgatgactga

SEQ ID NO: 258694 - DNA, 144 bp, Klebsiella pneumoniae
atgcagaagcagctgaatggcttggcgttactgaaaacgcattgtttaaccgcttacgtgccgatggtgatcaaattttccctctcggctgggcaatggttttacagcgtgctggtgggacgaatcatatcgccaatgcgatag

SEQ ID NO: 258695 - DNA, 198 bp, Klebsiella pneumoniae
atgagcaatttaaccgcaaataatcagcgatcgcaacttcgcgcgttgccggttcgtggtggcaaaggcgaggtcacgtattgctatgccgtaagagtacccggtggctgggaagaggtgaaccacagttttaccgagtgggctgtgggtgactatagatccagaggagtgaaaccgaatgactcagcaatcaattaa

SEQ ID NO: 258696 - DNA, 324 bp, Klebsiella pneumoniae
atgactaaccaacatttttctgctgacaatattgcttttgatttccctttcgacacgccgcttcaccggttgatcatggtttatatccaaattagtggaagcggtgacggtgggaaggaaaaactcatttcagacagtacgtttatcaagatttgttgctgcacttcttctgattttactgatgcagtgactttcctgcttgagaatggatttatcgcaaaatgcaattatgggatgcaattcggtgaagcgtgtagcgggtatgtaatcaccgtacccgatgagctacggagggcccatgagcgcactgattcaactacttga

SEQ ID NO: 258697 - DNA, 1161 bp, Klebsiella pneumoniae
atgagcgcactgattcaactacttgaccgtccgatcgcttataacccggcctttgcaaagctgaaagccgggaaaatcaaagcaggcccggttgctgctgtgtttctttcccagatggtctactggcataaccgcatggatggcggctggatgtacaaaacgcaggctgatatttccagtgaaacggcgcttactcgcgatgagcaagagactgcgcgcaaacgactggtagcgcttggtgttctggaggaagcccgccgcggtgttccggcaaccatgcattaccgcatcaatactgaacgcctggaaaccctgctaattgaaacggcgaagccagcgaagaaggttaccaaggagaaatccagattgcgggatgtccagaatgtggaaacgccgcaatctggattggtgcaatcccgcaaactagattgcggtgatgccgcaaacaagaatgtggaaatgccgcaaacaagtatgggggattcccccgaacaagcatgtggggatcccacaaactttcctacaggagattacacagagactactcaggagaatacacagggtaatttaaaacccccttgtccggttgctgtgcaacccgaccctgaagtcgtaattaccgataacgcgattgaggtgttaacccatctgaaccgggtaagcggttcgcgctaccaaaaatcaaaaacttctctggagaacatccgagggcgcttacgtgacggttacagcgtcagcgatctgcagttggttatcgactttaagcatgagcactggcgcaccaatgacgagcagtaccagtacatgcgccctgaaacgctgttcgggccgaagaaattcgagggttacctgcaaagcggtacccgttggaaccagaagggcaggcctaagcgtgaagattggggaaaaagtaaaaagcagtccgaacctcctaacagctacagccaggatgctggcgttgatatctctgcgcgtgaccttgcctggcgccgttaccacgaccttgaggctgacaacgagccgaagagcgaaattgaggtacaagtccgggctagggccgatcgcgatggtctgaaagcaaagggacatgaccatggtctggctcagtttggatggaacaatatctggtctgtagtggccaagaacggaggagcggcatga

SEQ ID NO: 258698 - DNA, 906 bp, Klebsiella pneumoniae
atgaatcttagtccttacagccaggcactggcgcaactgcgtgcccagaaagcgcattatttaaaagaggttggcgatcaatggcggacgccggatctgctgttctggggcgttaacgctatgtttggcccactggtgttggatctgtttgccgacgacagcaacgcaaaatgcccggcatggtataccgctgaggataatgcgctgatgcaggattggtcagctcggcttgaagaacttggcggagcaggctttggtaacccaccgtatagccgttctcagtaccacgaaaagcaggcggtcaccggcatgactcacatcatgaagtacgctgctgcacagcgtgagaaaggcgggcgctatgtcttcctgctcaaggctgcacctagcgaaacctggtggccggaagatgccgatcacattgtgttcattcgcgggaggattggtttcgatctacctacgtggtttattcctgctgatgataagcaaaatcccaccagcgcattttttgctggtgccattgttgtatttgataagtcttggcgcggcgagcgtttcagctatatccaccgtaccgagctggaagcgaaagggcgcgcatttatggcgctggcagagtttgctgcggggaggttcctgtcatcagtaccgccagtaccggagcctgaagttgttatccccgatgcggtatttactgcattggctgaagctgaatcccggatatggccactggaagttgggctggtgttcaatcaggttgaaggcgctgaggatctggagttgtcccagcagaacaagctaaaggcccacattaaccatttgtggctggagcgcatgcccaccagcgagatcatcaccgttgctggtggcttggtagggagtatgcagggggccgctcatgcgtga

SEQ ID NO: 258699 - DNA, 1971 bp, Klebsiella pneumoniae
atgcgtgagattattgtcgataattttgctggtggcggtggcgcgtccacagggattgagctggcgatagggcgtagcgttgatatcgcgattaaccacgacgagaacgcgatcgccatgcataaaaccaatcaccctgacaccctccattactgtgagtcggtgtttgatgtggatccggtcgcggcgaccggcggtaatcctgtcgctctcgcgtggtttagcccagactgtaggcatttctcaaaagcgaagggcgctaagcctgttaagaaagagattcgcggtctcgcgtggattgtcgtccgctgggctctggcgaagcgtccgcgcgttgtaatgttggaaaacgtagaagagttcaagacatggggtccattgctggaggatgaggcgcgtccggatccagcgcggataggggaaacctttggcgcattcgtcggcatgttatctacggggatcccggcagatcacccggcgctggcagaagcctgcgagtttctgtccattcctcccgatagtgagcaggcagcagctcttgttaacggtctcgggtacaacatcgattatcgcgagcttcgcgcctgcgacttcggtgcgccgacgatacgtaagcggttctttatggttatgcgctgcgacggtgaaactatccgctggccagctccgactcacggggatccgaaatcactggaagtgcaaagcggcaaacttgcagcgtggcgcactgcggcagaatgtatcgactggtctatcccgtgccagagcatttttgaccgtaaaaaaccgctggcagaaaataccctgaagcgtatcgcacgaggaatcgagcggtttgtgctgaataacccgacgccttttatcgtcaaatgcaaccacaccagcacccgtagttcgtatgactgtttccgtgggcaggatatcgatagcccactgcagaccattaccaaaactcacggatacgccgtagtgacgccgcatgttacaaaatttcgtaccggcgccaccgggcaagaatgtacagagccattaccgaccgttaccgcgggaagttcgcagcgcccgggcgggaatgggcatgcgctagggatagtgaaagcaacgttgataccgttcatcgctggcagtggcggcagtgagtatcaggcaaaaccacgcgcaatcaacaggccagcccacaccatcctgaaacaatcccgagcctgtttagtggcaccagttatagcacgtcaattcggtgccagcgtcggccacggagccgacgagccgagcgcaaccattacagcaggaggtggcggtaaatctcagctggtcaccacgtttctggcaaaacacttcggagggaattacaccggccccggcgcagcgatagatacgccaacgcataccgtgacgacaaccgatcaccatgccttagtaactgcccagattgttggtgtcggcgggcgggccggtcaaagtcgtcctcgtgatgctgatgagccattgcagactcttaccaccaaagctgatgcggctatggttacttcgcacctcgttcatcttcgcgggacctgcaaggacggtcgcagggttgatgaacccgttccaacaattacggctggtggccagcatgtcggagaggttcgagcttttctgatgaaatattacgggaacgaaaaaagcggtgtatcgctggatgagccgctgggaactgtcaccactaacgatcgttttggtctggtaacggttgagggggttgaatatcagatcgtcgatattggcatgcggatgttacagccgcacgagctgtacagggcgcaaggttttcctgcgggctatatcatcgatcaggattaccgcggcaaccgttacgccaaagacaaacaagtcgctaggtgcggcaacgccgtcccaccgccgttcgctgaagctctggtaagggcaaacctaccggaaatgtgtattcctgagcagagggaggttgcatga

SEQ ID NO: 258700 - DNA, 1059 bp, Klebsiella pneumoniae
atgagagctctgcttactcctgaagttgtgccgcgcttaggcgtggtactgcttaagccaggaaaggagctgatgcgtcttttccgcagcggtagggtgctggtggagtctgagccaaaaagcatggaagggctggcgactggccgaatccctgacgcgcgccagcctctggctgaagataaggcactggaagcctttttcaccagcgagaaagtcatcaatgccgctggaggtctgcaggggcttgagtactggcttcggcagaacatccgggaatgccagtatccgcattctgaatatcatcatcatgagcatgtaagtatgcgccatccacctggcgctatcatgctctgctggcattgcgaaaacctccttcgtgagcagaccaccgacacactcagtgagctggcgcgccgaaacgttatcaactggataatcgatactgccctgcagaatctgcaactgggccgggagcgggaactatcgctggcggagctatgctggtgggctgtatatgccggtgcagcagacgccatcacagagacaatggcgcagcgtggtctgcgccttccagctgagccgtttctatctgtgtataaagaaagcgacattgttccttcagtaccagccaccagcgttctgcaggagaaagtgaaacctgcaggagttgcgacgaagtgcaggaataacgaatacctgcagaccgagcagcaggcgaagattctggcgttaacagtggatcctgaatcaccggaatcgttcatgctgcgaccgaagcgtcgccgctggacctgcgagcagtacacccgctgggttaaaacgcagccatgtgcatgctgccgccgcccggcagatgatccgcaccatatcatcgggcatggtatgggtggtacagcaacaaaagcccacgacctgttcgtgttccctctgtgcagagagtgtcacgacaaactacacgctgatgtggcggcgttcgaacagaagcacggtacgcagctggagctgctgtttcgttttttggatcgagcgctggcgatcggtgtcattgtaaaagcgtag

SEQ ID NO: 258701 - DNA, 759 bp, Klebsiella pneumoniae
atgaatcttgaatcgttacctaaattttattccccaaaatccccgaagttgaacgatgtgacgcctgccaccggcgggacggctttaactattacagatgtgatggccgcgcaagggatggtttcagccaaggctcgcttcggattcaatctgtttcttgccaagatgaagatccaggacgctgaaccagctattcggcaattgattgagcatgccatgacgctgcgtaacccagttatggtcaaattgcctgaagccgttcgcatggagattgcggtctgcctggcctcctttgcgttcaatgactatgccagatcggcggcgagtaagggcgtgtgcccgcactgtaatggacagagggttatgcgtgtccgccgggatgtagagaagcacccgggcgttaaaggtgtccctacaatggttcgaaatgaagaagtggaggaggcttgcccccactgcggcgggaaaggagaagttagcactgcgtgccgggactgccatggacgcgggctggttctggaccgaaaacggactgaattatacctgaagccggtgcaaaaattgtgtgggcgctgcaacgggaagggatatagccgcctgccaacgactctgattaaagacagagttctgcgcctggtgcctgatatgaccaattaccagtggtacagcggttatgctgacgtgatcaatattctggtcacaaagtgttggcaagaagaaaccttcgcggagagaaagctgcgtgaagtcacacgttag

SEQ ID NO: 258702 - DNA, 195 bp, Klebsiella pneumoniae
atgcaaaatcatcaggatatgacggaaacggcccgcgtagtgtttaacgaattaagtaataaaccagccacggttggcgaaattgcacagaatacatacctgacgcgtgagcggtgccagttgatactgacgcagcttgtaatggcaggtttatcggattatcaattcggatgttataagcgcctccctgagtag

SEQ ID NO: 258703 - DNA, 1053 bp, Klebsiella pneumoniae
atgaaaaatactgtgaaaatatccagtgctgagctaatcaacgctgactgcctgcaatatctcccgtctatccctgataactccatagatcttatagttacggatccaccgtattttaaggtgaagccgaacagttgggacaaccagtggaaaggagatgaggattatttacgctggcttgatagctgcctggcgcaattctggagggtattaaagccatctggcagcatgtatctgttctgtggtcaccgtctggcctcagatatagaactcctcgtccgtgagcggtttaatctgcttaaccatatcgtctgggctaaaccttccggacgctggaatgggtgtaataaagagagcctccgttcatacttcccggcaacagaacgcataatttttgccgaccattatcaggggccatacaaaccaaaagatgatggctttgctgttaaatgcaacgagttaaagcagcatgtcatgaccccgttaattacatatttccgcgccgctagggattcccttggggtaacttcagctcaaattgctgccgcaacaggcaagaaaaatatggtttcccattggtttggccttagccagtggcagctaccgaacgaaaccgattatctgaagctgcaggctttatttcagcaaatagccctggacaagcattcgcgcaacgaactcgggaaaccccatcaccaattggtcgctacttggcaatcccttaatcgaaaatactccgaacttcagcaggaatatcagcgtctgcgaagaccgtttagtgtctccgtcacggtgccatataccgacgtctggacgcataaaccagttcagttttatccaggcaaacatccatgtgaaaaacctgccgatatgctgcagcagatcattacagccagcagccggccaggtgaactgatcgctgactttttcatgggatccggttctacgataaaggaagcgattaaatcaggccgtcgcgccattggtgttgagctggaggcggaaagatttattcagacatctgaagaaatcagaaggttaatagaaatataa

SEQ ID NO: 258704 - DNA, 354 bp, Klebsiella pneumoniae
atgaaaatgcccaataacccgagcaactggcctgatttgctggagttgctgcagagctggtggcgcggagatacgccgctgggcgcagtattgttttctttgcttatggctgggctgcgtattgcttattttggcggcggtggcggctggaagaagaaaactctcgaaattctactctgtggtgctctgacgctgacatgttcatccgcgctggagtatctcggattgcctaaaacactctctgtgactatcggtggcggtattggacttattggtgtggacaccctcagggcattcgcaatgaaatatttaggcagccggtttggtatcggcggcggagataaaaaggcttaa

SEQ ID NO: 258705 - DNA, 276 bp, Klebsiella pneumoniae
atgagccttgaatttataagcgggctggtagtcgttctgcttggcttaatcgctggcgcatttgggttaggccatgtccgcgggaccagcaaggcggaagccaaagccgaacagcagcgaaccaaagagaatgcagcagccatcgttgccgcagcagaacgtaaagcggaagtcacgaaagaggccagcaatgtacagcagactgttagccatatgcctgatgacgatgttgatcgcgagctgcgcgagcacttcacccgctccagtggtggttga

SEQ ID NO: 258706 - DNA, 240 bp, Klebsiella pneumoniae
atgaacatcaataatgttaacgccgcttcaatcttatgcgaacagcttagggaactcgaagcacaacgtgcaatcgtcgcgcgtggggaagggctaggtgtcacgattcagagtcgttatcaggatgatgcctttgttaatgcagtacgcagtagcatcactggtgagcttagccgacgcattggtgcggtaaagcatcagcttgctgaactcggtgtaacgtcatttaccaaagagtag

SEQ ID NO: 258707 - DNA, 201 bp, Klebsiella pneumoniae
atgactgacagagaaattgctttagaacaggctttaatcgcggttataggtgcctatagaaatgatggtggtgatgtagattctttaattcagcaatcgcaagggctgttacttggaaacactgaatatcgcttcgttgaacatccttatgtcacagaagcctgcactgaaattgagaaagctgccagttttaaaaaatag

SEQ ID NO: 258708 - DNA, 327 bp, Klebsiella pneumoniae
atggctaagaattacattcaggcaggcgcaactatcccgctcaaaaacgccgggagtgaagatgttctcagcggtgatccggttgttgtcggcagcatgattgctgtagcgattaccgatatcgcggcgggcgatgtgggggatggttttgccgaaggggtattcctgttacccaagctgcctgctgatgccgtgactgcggggacgaaagtttatcttaaagccggaaacgttcaattggatgaaaccgatgcggtactggccggggttgcctgggaggatgccgctgcaggcgtaaccgttctggaagtcaagattaatggctaa

SEQ ID NO: 258709 - DNA, 294 bp, Klebsiella pneumoniae
atggctaatgcttttgacaacctggctgccagaatggatacgttaacggcgaacaggctggggaggccggtcactatcaatggtgatgattatattgccgttgaaagtcatttgttgctggaaatgggccaagttgcaggggatggcattagtttggtcatctttactgttgattatcagccagcacgtggagacatggttacctataacgggcaggcttataccgtgactcgttggttacccttcaacagcaaaccgcaaatctggattgaggaggacataggtgacgattaa

SEQ ID NO: 258710 - DNA, 399 bp, Klebsiella pneumoniae
atgattcacccacaaatcagaaaagctgtgctggataaactgaagtcaacgatctccgggaaaacctcctggtacgacggtcgacccgcatttatcgcaccagaagagttaccggcagttgctgtgtatctgactgatgcaagaaccacaggtagcagtattgacgaggaggagtgggaggccgttttgcatatcgaggtctttctgaaagccacgtcaccagacagcgcactggataaatggatggaaacccgtatttatccggcaatggctgatcttcctgcgctggtaaatcttgtcgagaccatcagcgtaggaggatatgactatcagcgcgatgatgaggctgctacctggggatccgctgacctccagtattcattgacctatattatgtga

SEQ ID NO: 258711 - DNA, 396 bp, Klebsiella pneumoniae
atgacttatcttaataaagatatattaaacccagatggtgagaatattcatctttttgaattgtctgccttcagtcgtatgacatatattgagttcatggttgaagagcgaaaatcattaccgactgatgggcttccacctgatgaaaattttaaaattgcgaccttattgactatgcgcgatcaggccatgcttgttgctttatccttgagtgaggcagatgacgagcagcgcgaggggaaagatatctttccggaaattatgcgtaaatatcctccaggattactgggtagcgcggccttaatggtccgtatgctttcagggatggtccctcctgtcattaatgaaaccgaagagactatagaagaggatgcaccggatctggaaaagtcctga

SEQ ID NO: 258712 - DNA, 2697 bp, Klebsiella pneumoniae
atgtcccagccagtgggtgatctggtcgttaaaattgatggtgatagcgcaaagtttgatgaggaagttgctcatctcaataagcaactgagcgggttaggcagagcagcaaacgacagttcagcacaggttacggcagctttttcacgtcaagagcgcgctgctaagcgtgctggtatttcaatcgggcaatataaaaatgcgatgcgcatgctgcctgctcagttcacggacgtcgccactcagctggctggtggccagagcccctggctaatcatgttgcagcagggcgggcaggtaaaggattcctttggtggtctggtcccgacctttcgtgccttgctgggatcagtaacccctctggcgctgggtatcaccgcattgaccgccgcaggtgcggggatggggtatatctattataacggatcgtcaaccctttcagatttcaataaaacgctcacattatctggcaattctgcgggcctgactaccgacagaatgctggtactggcaaaatccggccagcaggccggacttacctttgatcaaaccagtgattccctgacggcattaattaatgctggggtcggcgctggtgcacgttttgatgaattaagccagtcagtagcgagatttactgctgtctcaggtgtcccggttgagaaggttgcagaagcattcgggaaactggctaatgatccgacatccggcctaattgcgatggcgcaacagtttcataatgtgacggccgagcagattgattatgttgctcaattgcagcgctcaggagatgaagcagccgcactgcaggcggctaatgatgcggcgacgaaggggtttaattcccagactcagagcctaatcgataacatgggtacgattgagcgctctgctgattcgttgaaacgcgcgtttaaatccatgtgggatgctgcactcgatctcggtcggccagataccgccggtgagatggcaagtaaggcagaagctgcttttaaacgggctgatgaaatatggaatctcaggaaaaatgatcgtcatgtgaacgatgaagccagagcccgttactggaacgatcgggaatcggcccgtctggcccttgatatggcgcagcagcaggctggtattgccaaagccagtgtggctgcggcagaaaaggaagcagaggcagaatctgataaacagaaatatgcggcccaggcgcaggcaaattatgctaaatcgcagaccgctcttgaaaaatatactgcccgtcagaatgaattaaataaggcactgaaagaaggacatatccttcaggccgattacgccattaatatggctgcagctaaaaaagaatatgaggcctccttaaaaaaaacacctaaatcaaaaggtttcaaggtctcagcgggcgatcgttcttctgatcaggcaaatgctgaaaccctgcagttgatgtccgagctaaaagtgttgcagcagcataaggaattgaacgacacaatcagtgctgagcggaaaaaacttcggaaacttgaggctgatttctcagtacttgaggaggcatcgaaaacccgtgcgctgagtaaagatgaacagtctttgcttgccagcaaggataaagttctagcccaagctgaagttaatgcaaaactcggcgatcagatcgtcgcccaggaacgtttaaacaagcttcaggataactcgttaaaatacgttacccagatgcaggaaaaaacggcggcactgacaaatagtgccggactgggtgatcgggacagtcaacgtaatctcgaaagagcacagttacgtcagggatggaaaaatcagggcggtactctggaggacgaaggttataaaaaagagctggaagctctggagggatactatgctgctcaggatgaaatgcgaggtaactggctggccggtgtcgagtcttcatggcaaaactatgcagatatggccaccaactataaccagatcgccgcagatgcttccagctctgtgctgaatggcgcgacctcaggtattcagcaagcgctatcgggaattataactcagtccgaatcggctggtgatgcccttaaaaacatgatggaaggttttggccagacggtcattcagacgctgacacaaatggcagcgcagtggttggtctatcaggcggttcagctcttggtgggaaaaacgactcaggcacaggccggaacggccgtatttgccaacgctcaggccactgcgcttcaggcacaactagccgcatatgcttctactgctgcaatccccgttgcaggccccgccatggctccttttgctgctgccacagcagccgcatttactgagccgatggtcgctgctattggtgcatattcacttgccggcatggcacatgacggcatcgataaaatcccggaaacgggaacctggttattgaaaaagggagagcgtgtaactacagcgggcacatctgcaaaactggatgctacgttagacctggttcgccagcaaagagcagcaagcagcgggtcggttgttgctgaattccataataccttcacaggtaaacctgacgataccaccatgcagatggttaaccagcaaatgcgggcgtctgaaaaaaggcttaagcagtactttacttctcaggtacagaatccaagtgaaaattacggtcgtgcacttaaagccgtctatccggggaggcgtatgaaataa

SEQ ID NO: 258713 - DNA, 483 bp, Klebsiella pneumoniae
atgacggtaattaaccggctgtatgcgtcatccggtcctgaagtcattattggcacacttcagattaatgtgggtgagcagtcgtattatctgtgtgaaggttatgaggacataaccgctatgaccgaggatggtgcggaggtgaagttttttgcctgcgcaatatcattctctcttccggcaaggaacgatgatggtacacaggatctgaagttttctttgtgtaatatcgatggtgttgtttctaccgctatacgtgaggccgccgataccttaaaggaaggtaccataatttttcggaagtatatttccactgatctttcgtcacccgctgaaccgccatctgtgatgccgattaagggcggctcctggaaaccggtagtcgttaacattacagccggctttaaaaacgtccttgattatgcctggccacgcaaccgcttcactttgccttatttccctggtctccgctacacccgatag

SEQ ID NO: 258714 - DNA, 381 bp, Klebsiella pneumoniae
atgctgaatattgataaatatctggctgtccgctggcagatgggcggacgggtttttcctgtgcttgattgctacggggttgttcatgaagtgcggcgcgatctcggactcactgactggcccgcttttgaaggcgtggtaaaagagggcgatgaaatgcacaccgcttgcaataacttccgtccaaacgttgttcgatgtgctccctgccctggtgcggttgccgcctgctatacgggaggagtaatcggtcatctcggtgtcgtggtggagttgggcggccagctgtatgtgatggagtgcaatccccgccgtaacgtgacgatcctgccgttgacgcgatttgagaagcagtatctgaaagtggagtattaccagtga

SEQ ID NO: 258715 - DNA, 3063 bp, Klebsiella pneumoniae
gtgactattcgtgtatacccatcccgtttaccgggcgaaccactggaaacgcatcagcatcgggtcatgacagttcacgactggatgtctgaaaatgtagaaaattatcgtccagatacgcggcaaagggttgcctttgaggtcaacaacgtctccatacctccgcaggaatggccgttctgtgtaattaatcctgatagtgatgtaagggtttatccgatacctggtgaagccgtatcgggttcggttatcgccgcctgggtcgctgcggccgtcgctgctgcatcagctatttacgccatcgttatgatgtctcaaatggacaaagggggatattcatccagtaatggtacgtcccttgatctcaatccggcaaaggccaatcaggcaaaattaggtgatcctattcgtgaggtgcttggtcgctcacggatatatcccgattatgtcgtgcagccggtaacccggtttcatcctgacgatccaacccgcatgaccgtagagatgatgttatgcctgggcatggggaatttcgctttcacaaatggcgatattcgcgtaggcgccacgccagtcacagccctcggcgattcattctcttataacgtttattcccccggtgcggatgtatcaggcgatcgccgtagtgaaaactggttcaacagtacagaggttggcgggacatcaagcggttcaggtctggatatggcccagacatcccccgattctgttgatattaatgccgacagtatggcagtttctggcgccacggtgaccttcaacgggcttgatgatgataatgacgacgacgatgacggtaatgccttgccggaatcgtgggtgaccggagccattgtaactatcgtagcgccaaccaattatctggtttcaacctcatcgggttatagcgttcttaccagcgatacgctggcggaaattaatccagtccccggaatgccagttacgctggaggttaacggcgcagaatatgatctggtgatcgcaacgtatacctcaaaacaggatgctgttcctggtgtcggtggaagcgcagcagcggttcgcggaaatgctgcgccgaccacgtacgatttttcagtagataatgcaacgctcacgctgctctggcaggaatccttctatatcgttccgctagtggataactacagcacgatgtcaggtttgctggctgaaattaacggcaggctgacaggctcgggattgattgcgcaggacgatggcggagtggtgcggatcgtggaaatttccagcccatggaaggggggaattatcgacgcaattttacccgcatctgttttcggtgatagccctgagtttacgctcgggacagcatcgagcggcgggagcccagcaataactgcaaacgttacgctggcttatggcggtgtaaccggagcggcattctccggaatcccggaaggttcgcagcggctttctctggctcatcgtgggaacgaatatcggattgctgatgctgacggtactacagcaacggttcagcggctggtggacggcgttatcgatcctacctggccgggtttttcaccgcgcacgatgatcgactaccaggctaccggtataaacgacaacgatacctggctgggaccttttcttgtgtgcccggagaatgaagtggttgacgccttcgaggtaaatttctcgtttccgtcgggtatctgtgggtttgacagcaaaggcaaaaagcggatcaggcattgcgagtgggaaatacagtaccgcgtgtatggtgctggtgccggatggacgagtaaacaaggcgtctatgctctgcaaaacgttaatggactcggttttactgagcggtttgagctgtcggtaccgggccttgttgaagtgagatgcagacggcgtaatgagcagggtagtaataatgcccgcgattcaatgtactggcaggcgctgcgtgggaggctactggcgcgaccttcttcttatgcgggtgtcaccctcatgggggcaaccgtcgagacaggcggaaaacttgcggcgcagtcagatcgacgtgtaaacgttgtagccacccggatttatgattccggcacatcccgaagcatttcaggcgcgctttatcatgttgggcgatcgctgggtcttgaaatggactcggcggcaatagacgcgctcgaaagcgcctggtggacgcccgacggtgaaacgtttgatttttcgacaggcgacagtatatccgcgctggaaatgttgcagaaaattgcgaatgccggaaaggggtatttcctgctgaatactcaaggtttagcgtccgtcgggagggaaggtattaagccatggaccggggccattaccccccatgaaatggtagaagaactccagacagatttcagtgcccctaacgacgatgattatgacggcgttgacgtgacctacatcaatggcgcgacatgggcagaggaaacggtacagtgccggacgccggataatccgacccctgtaaaaactgaggcgtttaccctcgatggcgtccttgatcagaatcgcgcttatcagattggcatgcggcggctgatgaaataccgcctgcagagactggttcacaagaccacaacggaaatggacgcgctttgctataacgttggcgatcgcattgtactgactgatgatattcctggtagtaacaccatctcgtgtctcatcgacgcgatgacaacagttgatggaatgacaacgtttagtgtttctgagcctttagactggtcattcgcaaatccacgggtatacatcagataccaggacggggcagcttcgggactgctggaagcttctccgggtggtgaccatcaggtcttagtgccgtatcagcttgagttcgaagggattcagattgatgatcctatcatcgaaccgccgcggttaatcttctgcagttcagagaaggatgtgtatcacgccattgtggcggaagttgccccgcaggatgacggcacatgcgaggtaactgcccgtcagtaccgtgatgatttctacgcttacgacgacgccacgtaccccggcaacgtctcgtaa

SEQ ID NO: 258716 - DNA, 387 bp, Klebsiella pneumoniae
atgaataaactgcgcggtatctttagtgaaacagccaaagtggctaggttgttaccgatggcatacgttgagtctatcggtcttgactatctagagatagaagatccagagagtgaaggtgactggctcgggcttccagatccgctagcgctggcaacgattaaaaattttgatgtcgacagcggggctttcaccttcagatatgttgttccttgtgaaaaaaataagaccgcagaatattttgagtcaaatatgattgtgttaaagagttcttctggatatgtgtttagaactgggggtaaggagtgtgtggttcaaaatccgttaaaagaaaaatctcttataccagttgtgaatttggccaagtccacggcaagaaaagtataa

SEQ ID NO: 258717 - DNA, 264 bp, Klebsiella pneumoniae
atgaaaacagaaggcgtcactataagcaataaagacattatcattgatgggaatgtatacaaagacgtggttttcatacagtgtaacattatcttttctggggagaaaaaggatagtgaaactggattgatgggatgtaaatttaagggctgcaaatggcattttacaggttctgctggttacaccgtttttttcctgaaaagcctaaaagaaaattttggaataaatggcgataaatttataaaaagcatttttgaaaattaa

SEQ ID NO: 258718 - DNA, 498 bp, Klebsiella pneumoniae
ttgtgtgataaaaagcccgcagcagtgggctttttttattgcttgctattcagcacattcattaacaaaggagtgaattccatgcctgatattgcttctataaatgctggtctgtcagcagtaaagcttgcctttggtatggctaaagaccttaaagatgcgtctgctgctttcagtgatgccgaagtgcggttaaaaataagtgatttatataatgcacttagtgaagccagaatcagcctcgcggaagcacaggtagaaatagtagagcttcaaactgaggttcgcagattagaaggaaagcttaaggaagctgatgaactggagttccgtgatggtttttattatcgtgtagttcctgttgatggtaaacctaacggccctttttgtcctaagtgctacgagggtcagaagaaaatatcatctgttagcgcggctacagggattcactctcacttcggaaaacaacactgtcatggctgtggaagccacttctga

SEQ ID NO: 258719 - DNA, 321 bp, Klebsiella pneumoniae
atggtagagatccctaccccgtcaagcggcgtgggtgaaaaaatcagagctatcagggatgcggaggggttaacaaggcagcaattctttgaattaactggaatacctgctggcacgcagaagtattacgagacaggaagagtggagagtattggtagcgatatcttgcttaagatcactcagcattcacgtttcgcaaaatacacgctctggctcatgactgataagaccgcccctcaagctggtcaaatcgcaccggccctcgcacacattgggccagagtcaactggatcagaccgctccgagaaacaaactggttaa

SEQ ID NO: 258720 - DNA, 594 bp, Klebsiella pneumoniae
atgtctaagcagcctttaccttgggactttcacccacaattaactgaagagcgtttaacaattattgctaaagaattgttaagggtcttaaatgacacatatgctcaactttcgaccaccttggataacaactatacacgttctacttgtacttttggtcgtcaatggcagttacttattgatttatgtttgagtggacagtacgactggcttcatctcaccaacgctggtttagacatcacttttacgatcgatacaattcctgttcgtttcttcactgatgatccggccaatcctaaaaaggatggtttttatcgtcgaaatcctgctgatcagctttttgctcctgaggtggacattcccgttttacatcgctttgttgttgagaaacccgaatttgagggtgaaggcgctaaagttcatttcattggttataacgctttggacgaagaagtatctaagtggacgtacaacgatgaaccaacaacagcattgttgcactctacggatgatacaccgccagagtctgttagaattgaacttgatgacattcgcccttctcgtcccgaaaaggaagaaaaagagagcgattga

SEQ ID NO: 258721 - DNA, 1113 bp, Klebsiella pneumoniae
gtgtttaacggttctaatttaagattggctcgtctgtatcacgagctatcactggagcaagtagctgagcgggtcgataagacccgccagtatattcagcggctggaatccggcacggctgttccaacacccgagcttgcgaataaattagctgccgtcttgctggtgatgcctcatttttttgaagagcaatggcagtctcctgtaaatgaagagatcgttcacttccgcaagcgtagttctacgagagtcgccacaaaaatggcgactctcgccaaagctgagctgtatcgacgacttattgaaatttttgaagagtatctggagttaccgcaagtaagatttcctgaactgaaggtggatactcaagaggatatcgaaaaagcagcggagaagtgccggactgattgggggctaggttttgggccgatcgataacatgactcgtcttgctgaaaagctgggagcgtttgtcacttcttttgattctgtttctgacgatgttgatgctctttctgttcctttgagccgcccatttatcgtaaggaatacagctaaaaagtcaccctgccgtcagcggtttgatatcgctcacgaggttgcacatttaattttacatgagggggtctctactggagacagggctactgagtcgcaggctaaccgcttcgcgtctgcattgcttttgccaagaacagctatggcgaaatattttccacgtccgattggtggtcgaatcgactggcaaggtcttagccagtttaaattaacgtggaaagtgagtaaggccgcgatcatttatagagcacatcaacttgggcttttgactgacgctcaatacaaaaccgccttttttggtctcaagcgaaagggtgaggctattgatgagaaagaagattatttgatcccttgtgagaagccagaactattcagtaaagcaatgaaatgcctgttaaatgatttgtccgtggatatcgaaacattagcccagcgtttgagcataacccctacgatgctcgcagaacttgctaatgatgacactttggtttctgcgtcatgtgtgaactctgagaatgtaatttcaatgtttgcgtatcgaatgaaaactgcttaa

SEQ ID NO: 258722 - DNA, 1059 bp, Klebsiella pneumoniae
atgaagaagcgcacctacaaaaacaatcacactgccagcagtggcggtgccggacagcctgatatttctgacgcgctcagaagcgatcctgcgctcagcgccttcacgtttgacgggccatattcggtaacagacggctatgatctgctggacagcatgtgctgcgtcgataacggccggtactacgagacgccaatagactggaaggggttaacccgtgcgttcgcgcaatccccgctacatcagtcggcgctttacttcaaacgcaatgtgctgaccgggtgctatatccctcatccgttactctcgcggcaggccttctctgcgtttgcgctggactggtttgtcttcggcaatgcctatcttgagcgtcgctctaatcgcctgggagagccgctcaaacttaagcatgttccggcgctgaacacgcgacggggaagcgatcttgatacctactggtttatccggcagtggaaagatgaatatgagttcaaggcgggcgaggtctgccacattatgaacccggacattcatcaggaaatctacggtatgccggaatacatgggggcgcttctgtccgccagcctgtcacattccgccgataaattccgcaaactctattacgacaacggctcccatgccggatgtattctctatgtcggttcggagaaggtggatcaggaaagcataaaggtggttcaaaaaacgctgtcacaggccagagggaaaggctccttcaaaaacgtcctgatccacgcgccgggtggcggcaaagacggcgtgcaactgttgccgttcagccagatatcggcaaaggatgagtttcttaacatcaaatcagcaacgcgcaacgatttgcgcgacgcgcaccgcatcccgccgcaactgatgggcgcaatgccggaaggcaacggatcgctcggtgatgttgagaaggccgcgcgtgtcttcgccatcaacgaaatgttgcccgtgatggaagcaatgaagggcgtcaatgactggctcggtcaggaagtgatccgctttaatccctacgctctactcaaagacgagtga

SEQ ID NO: 258723 - DNA, 1731 bp, Klebsiella pneumoniae
atgatacaggacgcttttgtacgtcagagggcaaaacaactttactggcagggctacccgccagcggagatcgcgcgtctgatggggattaatcagaacacaatttacgcctggaagaaacgcgatgaatgggatgaaacgccgcccgtccagcgcgtcagccagtcgatggatgcgcgcctcatccagcttacggataagaaagacaagaccgggggagacttcaaggagattgatctcctgacccggcaactgaaaaagctgtctgacggacaaccggcaggggccggcacgggcaaaaaaacgcgcaagcgcaagctgaaaaatcacttcaccgaagaacagatagtcgcgctgcgggagaaaatacttgattcgctttcgtggcatcaacgcgggtggtatgagcaacgccaccaccgaaaccgcatgatactgaagtcccgccagattggcgcaacctggtactttgcacgcgaggcgttgttggatgcgctgcgcgatgatgtgaaatacccgtaccagcgcaaccagatatttctgtctgcatcccgccgccaggctcaccagttcaggggattcattcagaagatggcggaagaggtggacgttgagcttaagggcggtgacaaaatagtactgagtaacggcgcagagctgcatttcctcggcacgtccgctgcaacagcgcagtcatatacgggcaaccttaagtttgacgaattcttctgggtcagcaacttcaccaacctgcgaaaggttgcaggcgcgatggcaacgctgaaggggctgacgcgtacctacttttccacgccgtcaggcgagacccatgaggcctacccgttctggacgggcgatcgctggaatgagaaacgcccgaaggcacagcgcaaagcgtttgatgtgggctggaaaacgctgaacagcgggctgttatgcccggataaaacctggcgtcagattgtcactttgaaggacgtgatagaccacggctgggaatataccgaccttgaagaaattcaggatgaaaacagtgaggatgaattccgcaacctgtacatgtgcgagttcgtgcgcgatggcgagtcagccttcaaccttaacgccctgattggctgcggggtagatggttacgacgaatggccggactggaaaccttttgcgtccaggccgatgggtaaccgcccggtctggataggctatgacgccaacggcagcagcggcaacggtgacagcggcgcgattagcgttgtggtgccgccactggtgccgggcggtaaattccgcacggtggaaacggaacaggtgcgcggccttgaatttgaagagcaggcgaaagttatcgaaaacttcaccttcaaatacaacgtgcagcatgtcggcatcgacgtgacgggcggtaacggtgaggccgtttaccagatagtgaagaagttcttcccgatggcaatgccctacaccatgtcaatgacgtcaaagcgcgcccttgtgctgaaaatgctacagctgatccgcgccggtcgctgggaatatgatcgcagtgagcgtgccctgatcaacgcctttaactctgttcgcaaggtaaagacgcctggcggattcatcacctatgacactgaccgctcgcgcggcgtcagccacggtgatttagcctgggcgaatatgctcgccattattaacgaaccgctgggccaggagagtggcagcggcgggtttgctatggagttctga

SEQ ID NO: 258724 - DNA, 837 bp, Klebsiella pneumoniae
atggctagcgcagctaaaccagcccgtaagaaattccgcgttgccgtctccggtgccaccgttgacgggcgtgaaattcgccctgagcaccttcgtgatgcagcagcaaactacagcccggacgtgtacggcgcacgcgtcaacgtggagcactatctttcgcctttccccggcagtgatttcggcgcgatgggggatgtgacggcgctgagtgctgaagatattagcgaaggtccgctcgccggacgcaccgcgctttacgccgagattgaaccttctgagcgcatgaagaagctgacggaggaaggtaagaaaatttactccagcatagaactgcacccgcagtttgcgcttaacggcaaggcgtatgtgatggggctggcgatgaccgataccccggcaagcctcggcaccgagcgtctgaagtttgccgcgcagcagcgtcagcaggttatgtccttcaacaatcagcagggtgaagccccgctgttcaccgatgccattgaggcagaaatcatcgaactggctgagcagcgcagcgatgagggtaaacagtggttcgcgcgcgtcatggggattatcggcaaaggccgtaaatctgatggtgagcaattcagccaggtgcgtgacgccgtggagaacgtcgcccagtcccatgccgatctgctggacagcttcaacgacctgagccgcgcccgcgagcaggacagccaggccattcagaagctgacctccgaccttgccgcgctgaccagcaagctgggcagcacagacgccaatttcagccagcgggaacccgcgagcggtggcgctaacgcgcaactggctgattactga

SEQ ID NO: 258725 - DNA, 858 bp, Klebsiella pneumoniae
atgttaacaccggcacaacgacattttcagaaggtcatggcagaacgccggggccaggcggatgaagaatccgatatccagcgcaccgcgcatgagcaaattctgcatcgcctgcgtatggacttgtcccgcctcagcggcgtgcagtccgaagaaaccaaagccgaaatgaagaaatccatgctgcctgaatacgagggatggattgaaggcacgctcgacggcgacagtgggcggcaggatgaagtcattaccaggctgatggtctgggcgattgactgtcgtgactatgcgcttgcgttgaggctggggcgctacgtggtacgccacgggctgacgctgccggataacttcaaccgcacggcagcgaccttcctgactgaagaaatgagcaagccactgttgacgctcgcggctgctgatgccgacgctgatttgtcgtccggtatcgcagtgcttgacgaagtggcgggaattgtcgccgacagtgatatgccggatgtggtgcgcgccaagttgtgcaaggcccgtggacttgcccgccgtggcgcgactgatatcacggccaaagcggaagcgctggcgctgttccgtgaggcgctgacgcgcaaccccaacgccggggtgaaaaaagagatcgcaacgcttgcccgtgaagttaagaagctgtctgcggatagcggcacgggtgaaggtgactcggccagcaccgacaaaactgacggtactgctgatcccgtccctgaaaaaagcgccaccgccagcgcagcaggtaaagcgacgacgcgtaaaaccacgactaagacggcaacaggcaaagcgacaaaacgcaagcctgccagccagaaaaagaattaa

SEQ ID NO: 258726 - DNA, 525 bp, Klebsiella pneumoniae
atgagcagccttgtggcaaataagcgcgttttgcctgccgacagcgatacgcccgatgttgatgatggtgataccaccgtcagtgccggggacttctggccggtgattaaactggccgatctccgtctggccgcgcgcatcactggcggcatcaccacgtccaggctgatgcacgtcaccacggaagcggtagcccatgtcaccgcgcagttgcttgactggcgtgccggtcaggtcaaagcaggttttcacacgctggaagatgtgccttcagtcctgccgtcaggtgatacggaaaagctggttatcaacggtgaaaacgtgaaggtgtaccgcttccgccgcgcagtctattcgattgccagggcactggtacttgaaggctatcgcgacgttgataccacggcgaaaggcgacaaagacgccgccgcacttgacctgcaacgggatgatctctggcgggatgcccgctggagtatcgctgacattcgcgacaccccgcgactctatgcggagctttgctga

SEQ ID NO: 258727 - DNA, 201 bp, Klebsiella pneumoniae
atgaaagtgaaggcattgcagggggatacggtggatttgctttgctggcgtcactacggcaacacgcagggcgtgaccgaaaaagtgttatctgccaatcccggactgagccagcaggtttttcttgatgccggtcaggagattgaactgccggaaatcgcgcacaaagcgacacaggagatggtgcagctatgggattaa

SEQ ID NO: 258728 - DNA, 303 bp, Klebsiella pneumoniae
atgggattaagtttctttcagcgcctgaatgactggctgacattcacgatgtcagcgatggtcacgagtatcggcgtcatgacactgagcgaaaagattgcgctggccggtcttcttgtcgggatggtttttggtgcacgtggatggctctatcgcgcccgcatcgaacgtgggcagaagcgtcgaaacgaattgattaaccagatccttgagcaggcagaacacaggcaaatgagtgagtcagagcgccgggcgcttgaccttctgcaacagaatgagccggaagatgaaacagcttattaa

SEQ ID NO: 258729 - DNA, 546 bp, Klebsiella pneumoniae
atgaaacagcttattaaaaaatgctccattgcggccattgttgcgctgggtatcacgctgagtacgggcgcgttgcgcaccacgcctgaaggccagcagaagattgctggttgggaagactgccggaatacgccctactactgcacggctggcgtgctcacggtcggaattggttcgacggggcgcgttgagaagcgggagtacagtgacagcgagatcgccggtcgatggattaacgatatgcggcacgctgaaaactgtattaaccagaattttgaaggcgggcatatgccacagtccgcctttgaggccatgacggatgccagtcttaatgtggggtgtactggcctgatgtggttcacggacagccagaagcgaaagcagcgcacgaccatctggaagaaggcgcaggcgcatgaatggcaggcgatgtgtaaccggctgacggactttgtgaacagcggcggtaaacgcagccaggggctggttaaccggagaacggattttaaggcgtggtgcctgcgtgacgtggaggctgttaagtga

SEQ ID NO: 258730 - DNA, 438 bp, Klebsiella pneumoniae
gtgaagattacagccattttatgtgcgctactggtgctgacctctggtggcctgctctggcagacacatcaacgcggtaaagactccgtccgcaatgaagcactttcccgcgaggtgaagagtaatggtgaggtgctggatgagctgcgggcgctgactgctgacgcccgcgaagtccttgcacagttgcgggcaaccgaacagcaaagaaacgccgagggagataagcgacgtgaaaacatgcgcgatgccatcaaagacgatacgtgtgccagtactgttgtgcctgcttctgtcagtaacagcctgcaacaccgtaccgccgcagccgcaaatgaaaatcgtgcacgaaccggtgccggaaagcctgacggcagcaacgccagcgccggaactgaccgccccggtaacgtggggcgcaatagctatctggagtga

SEQ ID NO: 258731 - DNA, 471 bp, Klebsiella pneumoniae
atgctgaaagctgactcactgcgcgagaccctgacccgcgctaacaaatggtgcagggccaatcctgaagccttcaccgtttttgtggaagaagggaatatcgagacgaccggcgaaacgccatcgtttatgtaccgctataccctggtgctgtttgtaatgaactttgccggtgatattgatgatttcacgctgccgttaatggcatggctctggcacaaccagcccgatctgctgctgaacccggagaagaaccggaacgttaaatttacgacccttatcaacaacgacgataccgccgacattctttttgaaatgccgctgcacgagcgcgtaaaggtcactctggacgcaaaaggcatccccagggcggagcatttaccggaacctaaaccgcgcataccgtcagcggacggcgactggagcaccatctttgaagatgtaacgtgggaggctgacgcgcatgagtaa

SEQ ID NO: 258732 - DNA, 639 bp, Klebsiella pneumoniae
atgagtaacgatctcttccgtgagctggatcaggtattcaacgacatactcgcgggcacctctcaggccggacgtgttcgcaccgcccgcgcggttggccaggcactgcgaaagagccagcagcagcgcatcaaagcacagcaaaaccccgaaggttcgccgtatcctgcccgacgccgcagggtgctgcgttctcagcagggtattgtgtttgtctggcagggtgagatccgccgcctgaaaaactggcatggaggccgggggaaatacgggcgcaccattaccggctttgacgaagagcgcaacgatattcgcacgttttaccgcagcgatattgagcgttacatcgagatcaatacgcgctcagtgcgccgcagcactgcgaagaaggtgccgatgtttcagcggttgcgcagttatcgctttctcaaaatgcgcgctgatgctggcggcacttccgtgggttatgacggcgtagccgcgcgcattgcgcgtgtgcaccagtacggcctgcgcgatcaggtcgggcccggtgcttttgctaaatatccggtgcgtgagctgctgggctttaccgctggcgatgagcggatgattacggaacagatggttaacagcctggggagtgccgcacgatga

SEQ ID NO: 258733 - DNA, 576 bp, Klebsiella pneumoniae
atgagcgctgaactgatccgcctgctggaaaatatcctacgtgtcggcgtcgttattgccgttgatgaagagagctggcgcgtgcgcgtgcaaagcggcgaacttcagaccgactggctgcgctggaacaccacgcgcgccggggcattcagtatatgggtgccgccttccgtgggtgaacaggtctggctgggctgtatcggtggcaacccagaaacggcggtcattatcggcagtctctacagcagtgacaaccctgcgccgggcagcagtctgaaagagattgtgctgacagcgccagacggtgcctctttacgctatgacgcggaggccagcgcgctggaagcccaaggcatgaaaacagcacatatcaaagcctctgccagcgtcacgcttgaaacgccgttggtggaatgcaccgaccatctgaaaacgcggacgttcgaattgacggaaggcggcacgatgaagggtgatgtgactcattctgacggatcgctttcgtcaaacggcaaggtcctgcacacgcacaaacaccctggcgacagcggcggcactacaggggcaccgctatga

SEQ ID NO: 258734 - DNA, 369 bp, Klebsiella pneumoniae
atgactgttcgttataccggcatgaacccggacggcacgggccagcttaccgataccgatcagctgtggaattcagtacgcgacatactgaccacgccgctggcaagccgggtgatgcggcgggattacggcagcatgatccccgatctgctggatgaaccgcaaaacgaagtgacgcgcctgcaatgtatgagtgcggcggtgatcgccctgacgatgtgggagccgcgtattgccctgaacggcatcaatatcagttattcaaaggatggtgctgtcaccgctgaactggtcggcattattaccgaaaccatgcagacggcaggcagtgcgctgacgctcaggagtggcagtaatggcaacagttga

SEQ ID NO: 258735 - DNA, 897 bp, Klebsiella pneumoniae
atggcaacagttgatttatcgcagctaccgcagccgcaaattatcgaagtgctggactttgaagtcattctcagcgaggtcaaagccgtcatgctggcggcattccccaaggaacagcaggcatccgttgccgccgcgctggagctggaatccgaaccgctgaacgtgatcgcccaggtggttgcctaccgtgaaatgatgctcaggcagcggattaatgacggcgcggcagcgtgcatgttgagtcatgccgtatcgtccgatcttgataatctcgcgggcaacctgaataccgaacgtctgatcatcaccccggagacggcaaccactgacgcagtaacggaaagcgataccgcactgcgtttgcgcgcacaggctgcgtttgaagggctgagcgtggcggggccaaccggcgcatatgaatattttgccaaaagtgccagcggcaaagtggcggacgctaaagcgatcagcccgtcgcccgccgtggtggtggtctctgtactgtctaccgaaggtgacggcaccgccagcgcggaactgctggcgacggtggataaggcgctgtctgctgatgataagcgccccgttgccgatcgtctgaccgttcaggcggcagagatcgtgaattatcagatcaatgcgctgctgtatttctaccccggccctgagtctgaacctatccatatcgccgcgcaggacgcgcttcagtcctggctgaatcaacagggcaagattgggcgtgacgttgcccgctcagctattatggcggcgctgcatgttcagggcgtgcagagggtggaactgctggagcctgccagcgatattgtgatcgccgatacgcaggcggcgcggtgtgagtcattcacgattgaggccgggggcaccgatgaataa

SEQ ID NO: 258736 - DNA, 615 bp, Klebsiella pneumoniae
atgaataacaacatgctgccgccttcggccagcggctttatgcgcagcacggagacggtgacggaacggcttaccgatattcctgttgatctgcgtaagctgtggaatccggacgaatgccccgctgatcttctgccttatctcgcctgggcgctgtctgttgaccgctgggataagaactggtcagaacagactaaacggcaggtaattaaagcctcctggctggttcaccgtcagaagggcactatttccgctttgcgccgcgtcgttgaacctttcggctttctgctgcgcgtgatcgagtggtggcagagcggcgaagaaccgggaaccttcaggcttgaaatcggtattcaggaacaggggattacggaggaaacctatcttgagcttgagcgccttattgacgatgccaagccgagaagtcgtcacctgactggcctgtccctttcgcttcagtcgcaggggtatatcgaagtcggggcgggatgttatatcggcgatacgctgaccgtttacccctattttcctgaaaccatatccgtgggcggtggcgactacaccggcgcggcagtccatttaattgataccgtggagatcgcaagtggcgactaa

SEQ ID NO: 258737 - DNA, 1053 bp, Klebsiella pneumoniae
gtggcgactaaatattttgccctgttaaccaatatcggggcggcaaaactggcaaacgccacggcattgggtgcgcaggttgagatcacccagatggccgtaggcgatggtaacggcgcgctgccgacaccgaacccggcacagaccgcgctgacgcatgagctgcgccgtgcgcaactgaatatgctgactattgacccggttaacaccaatcagatcattgcggaacaggtcataccggaagatgtgggcggatggtggatccgtgagatcggcctgtttgataaagacggcgatatgattgcggttgccaactgtgcagagacttataaaccacagttgcaggaaggcagcgggcgcgtgcaggtgattcgcgtgatcctgattgtcagcagcaccgaagctataacgctgaaaatcgatccgtccgtggtactggcaacccgtaaatatgttgatgatgccgttattgaggttaaggcttatgtagatcagaaattggccgcgcatgtagctgccagtgatccccatacgcagtatttgcttgagacggatattgatacatatatcccagttggattcccacttccgtggccgcaggcgacgcctccgagcggctggcttaaatgtaatggtgcaacgtttgataccgccaaatatccgaaactggcgaaagtctattccaccgggaaattgccggatctgcgaggtgagtttgttcgtggctgggatgatgggcgcggcactgacagcgggcgcattttattgacggctcagaacgatgctattcgcaatatcacgggagagcagtcgcttgatgttccctataacggtaagtcaacaggagcattctataataatggcaaaaatgccaatgagggaatttatgaggatggctctttcatattagatgcaccgagtgttggcggaacaggtggcttgaatccttctcagggtgaaaaaatattttttgatgcctctcgcattgttcctgtggcgtctgaaaacaggccgcgcaacgttgcatttaactacatcgtgagggctgcataa

SEQ ID NO: 258738 - DNA, 597 bp, Klebsiella pneumoniae
atgtcagaggcaaaattaaacagcaattttattgcgatagtggccggtgatattaccgtgtttaattacgatggcgaaacgcgcgagtatctttcctcatccgttgaatacctggccgttggggttggaattcccgctaactcatgcactgatgcgccgggtgaaagtaaagaagatttcactatttgccggtcagcggattttaccgcctgggaatacgtagctgatcaccgtggagaaacggtatatagcactgaaacaggtgaagcggtgattatttccgcccccggtgattacccaaatgacaccactacgcttgcaccgccaacgccttacgacacatggaacggcagcgagtgggtgacggatacgaaagcgcagcacgcagcggatgtggaagcggcggagcaacagaaggctgcgttacttgcagaggcacaaacaacgatcagcctatggcagaccgaactacagttaggcattatcagcgatgaagacaaagccagcttgatagcatggatgaaatacatcaaagctgtgcaggttgttgatacgtcgaaagcgccagacattacctggccggataagccagaataa

SEQ ID NO: 258739 - DNA, 489 bp, Klebsiella pneumoniae
atgatgatgatatacgggatgttcgtttttgaactgaagacgctgccttaccagcaacttcgccactcgctgaactggcgccatgtgaagaatgatcgcatcaaccgatcggcaaaatggcagtacatcggcgcgggggagacgcagatcaaccttgacggggtgctttaccctgaaattacgggcggcgacgtatctcttaccgttctggcaacacaggcatacaccgggcgtccctggcctttaatcagcggtgcggggcagatttacggtatgtatgtgctgaccgggctacaggccacgcatacggaatttgaccgctacgggaaggcgaaaaaaattgagttttcaatcagctttcagcgttgtgatgaagacctacgcgaacgcctgcaagcgtcgtccattggcgacctgctttcaggtttgaaggataaagccacgtccgcctacaactccgccagcagtacgctgtctggcctgttctga

SEQ ID NO: 258740 - DNA, 2967 bp, Klebsiella pneumoniae
gtgaaaagccttaatatccgcgtcgcgttcagcgcgatcgataaacttacccgcccggtcaatgccgcccgccagagcgcgggcggtttgtcagaatccctcaaaaaaacgcaatccagcattaaagatctggacagccagtcccgcacgttcaaccgtctgcgcgacagcgtgcaaaagacctcccgcaaaattgacgaagccagccggacgcttgaagggctgaatcaggcgcagcgggaaggtacacagcttacagacaagcaaaaagcacatatggcagcgctggccgcaaagctggagcgccttaactctgcacgcacgcaggaaatggttaagctgcgtgctgcctcacaggcgctgcgcagccacggcgtttcgctggtcggcagcgatcgcaccattcagagcgcgatacgtcgaaccgaacagtacaaccagacgctggagcgggaacggcgacagcttgccgctgtcacacaggcacgggcgcgctatgaccagatgcagcaaacagcgggtaaacttcgcggcggtggcacgatggccgttgccggggccactgctgccggttacgcagcgggacgcttcttatcccccgcagttgggtttgaccgggaaatgtcccgcgtgcaggcgctgacccgtatagacaaaagctccgttgacttttccgcacttcgtgaacaggccaaaaagctgggcgctgaaacgcagttcaccacgactgacgccgccagcgggcaggcgtttctcgctatggccggtttcactccgcaggccattcaggccgcactgcccggcgtgctcaatatggcgctggccggtggtatggatttaggcgaaagcgccgatatcagctcaaatattctgtctcagttccgtctcgatcccaaagaaatggatcgcgtcagtgacgtactaacgggggcgttcacccgcaccaacaccgatctgcaaaatatcggtgaggcgatgaagtacgccgggacaggtctttccagtcttggcgtcagcgtcgaacagacaacagccatgatcggcgtaatggcgaacgtaggcctgcgcggtagtatcgccggtacaggattacaggccgcgttttcacgccttgccgcgccaaccggcagggcaaaaaccgccctcaaggaactgggcgtagacgttgctgacgccacggggaaaatgcgccctgctgaagaggttctcactgaactctataaaaagatcagcaagtacggcgataccgacaagctctctttctttaaagatatcgccggtgaagaggcgtcaaagtcattgcaggcactggttatgtcagccgggagtggggaactccagaagttgctggaagcactgaaaaacgccaaaggtgaggcgcagaaggccgccaaaataatggcggataaccttgatggcgatctcaaaaatctggacagcgcctgggaaggcttccgcatccagattaacgatctcgtcgataatcagctccgcgccctgactcagggactgagtgacgttgtggggaatatgacgcagtgggcgaaggaaaatccgaagctcacccaatctctgctggttgtcggtggtagtgttctggcactgaccgccgccattggtggcacatcgctggcggtcggcctgctgatggggccgctggctaaacttcagctaggttttaccctactgacggggggcagaggcataaccggaacggttgccgctctgcgaacactcggcacggcttccggcccggcaatggcaagcgtgcgcggatgggggccagttctcggctcattagcagggaaaatgcggggagtttcaaccatcatacccgctatgcgtggcgcacttatgggggtatttcttgcgcctggtgccgcgctgggcgcactgaccaaaaacctcggaatgcttgcacttcgccttacgggttttacgaccatatggagcattatcacaactgctgtgtctatgctgggtactgcgctgtcactgctgttgagtccgattggcctgatagtagcggcgtttgttgctgccggggttcttatctggcgttattgggagcctcttaaagcattttttgcgggtgtatttaccggcatcatggaaagactggccccgttatgtgagaccttcgcgcagtttagccctatctttgatgcgataagcagcgctgttagccaggtctttaactggttcaaatctctgctttccccgatggagtccagcaaagaaacactggataaatgcgccagcgccggtgaggtgttcggcaatgtcctgggcggtgcgctccagcttgtcctggctcccgcaaaaatgctgctggatacattagcctggatccttgaaaagctcggtgttctgcctgatgaggccgaaaaagccagaaagaagatcgaagacgcacagcgcatggctgttcttcaggacaaagtcgcccttcttcagggagatatcgcgaaggttgcaccgaaaaaagttgaggtgaataacgttccgcctggcgcaccgcaacccacatcaccgctaaccggcgataacggcactatgcgcaggttgcagagtatcgacagcaacaccaaaacgacagccgacaacacgaagaagatcggccccggcgatatcgtgtttaaaaacctgcctcgtgcgctggccgttcgtggggaatggaaggaatcgcagctggccagcacagtcaggaacaacgggttaagcgcacgccccgcagtggtagcggcatcgcttcccgttaaacaggctgaacttctgccagtcagccgcagctccagcaatataccggttgccactggtggctttacgggagaaatccacgtacatcttcacggcgttgaccggcaggacgcgcgcgaaattggccggattgccgccgacgcagtgaatgccgaaatggcccgccttgcgcggctcaatcgcggcagcttcaaagacagagattaa

SEQ ID NO: 258741 - DNA, 318 bp, Klebsiella pneumoniae
atgagcaaaaaaaacgataacgccattacgctggtaaaacccgttgttcgcggcgatgagaaaattactcaggtaacgatcacggatgagatcaaacaggctggctccctacgcgggctgaagctggttaacgtgatgaatatggatgtggattcggtggcggtactgctgacccgcgtcacgtcaccgcgcctcaaacagaccgaaatcaatgaaatggatacccgcgatttcgtcagcctgtcagaagcgctcgtcccttttttgacacctgcggggtctggagcatcgaacgaggcggagacggagaatcagtaa

SEQ ID NO: 258742 - DNA, 516 bp, Klebsiella pneumoniae
atggcggttcctcacaaactgcgcctgttcacctgctttgtgaacggcagcaactgcatcggcaaagtctcttccgtgacgctgccaaaactgacccgcaagactgaagactttcagggcggcgggatgattggctccgctgcggtggatctcggtctggacagtggcgcactggataccacgatggtagttggcggtctggttcagtcgttactgctgaattactgcggcgatatcgacgaaacccgcttccgcttcgccggtgaatattacaccgatggagaaagcctgctggttgaggtcgaactgcgcggccgcatcaccgaaatggacggcggcgaaagcaagcagggagaagacacctccgtcagctacacgatgaagaacacctattacaggctcaccatcgacgacaagccgatgtttgagtttgacctgctgaacttcatctacaagaaagacggcaagaatatctaccctgaccgcattacatctgcgctgggaatgggtaactga

SEQ ID NO: 258743 - DNA, 1227 bp, Klebsiella pneumoniae
atgagggattatcactgcgaactcaataacgtaatggtggctaacatgtcagagacacgtttccacggtgtacgcgtccgggagaataccgacctggtgacggccatcaatgacattgaatctagtgtcattggggtcgttgccgtggcggatgatgccgacgcggaaacctttcccctgaatacccccgtgttgctgacgcgggttaacaacgtgctgggtaaggcgggtaaaaccggctccctgtacaaaacactcaaagccatcgctgaccagaccagtccgaaggttatcgttgtgcgcgtggcagcagccacggaagaggaaggcagtaaaacgcagtcgcagctcatcatgggtggcacggcagaagacggcagctataccggcatgtacgcgtttctgactgccgagcagaaggtcggctatcgtccgcgcattctggctgtgccgggctacgacacggaagaagtgacctacgcgctgtgcgtcattgcacaaaacctgcgcgcgtttgtttacgccagttgctatggatgcaaaacgatggctgaagccaccgcatatcgtgcgaccttcgcctatcgcgagctaatgcttatctggcctgatttcatcgcatacaacccgcagacaggagaaaacgaaaccttccctgccccggcctatgcctgcggccttcgcgctctgattgacaacaatcagggctggcacaaatcgctttccaatgtgtcggtaagcaacgtgctgggtatttcacaggatgttttctggtcgcttcaggccgaagacagcgacgcgaacgaactgaacaacaaggagatcacgacgctcatcaagcgtaacggtttccggttctggggcaaccgcgttacagacaccaaagattatatctttgaggtttatacccgaacggcacagattctggctgacagtatcgctgaggcgcaatttgaatcagtggacgaaccgctgacccctgccaacgttaaggacgtggtcagcggcatcagcggcaaactcaattcgctggtgacgcaggggcggctaattggtgctgaatgctggtttgatatcctggataacccgacaaccggtctccgtcagggtcaggtacgcattcgctataaatacacaccggttccgcctatggaagatctgacgctctaccagaccttcacggacgagtatttcgaatcggcgttttcttccctgggaggtgcataa

SEQ ID NO: 258744 - DNA, 1137 bp, Klebsiella pneumoniae
atggcacttacagacctgactaaatcacttaacgacgccggcagcagttataacgattcactgaccgaggcagtaaaaagtccgggattcagcattacgatgggtggcaaggtactgacgcagcttgatgatcggatcatgtcgttgtcactgacggacaatcggggttttgatgccgatcagctgtcaatatccattgatgacagtgatggcatggttgcactgccgccgcgtggtgctgagcttgccgtatcatttggctggctgggtgaaccgctgatttacaaggggctgtacacggttgacgaggtttcccacgaaggcccggcagataccattggcgttactgcccgcagcgctgattttcgtgaagaattcaacgtaaagcgcgaagtctcatggcatgacgtgaccgttgagcgcgttgtgtcggcaatagcgcaccgatacggactgaaggcgcagatcagtgaaatgctcatggatattgagattgatcacgccgaccagacgcaggaaagcgatatgtctttccttacccgcatggcggaaatgctgggtgcaattgccaccgtcaagaacggcagtctgctgtttattctgccgggtggtggtttgaccgctgacggaaaggcgctaccttctgccagcattgaccgcaccagtggcgaccggcaccgctttcgtattgccgatcgggatgcgtataccggcgtcagggcttactggctggatctcaatttcggtaaaaagaaaaaggtcagcgttaagcgccgcaagtctgtaaagcccaaaaaagagaagagcagcagccgtgagggcgattacatggagggcgcagacggtaacgtctatgtgctgcgcaaaacctaccagaatgaagaggcggcgaaacgtgcggcggcggcaaagtggcagcagcttcagcgtggcgcggcagagttttcgatcaccctggcgagtggccgcgctgagctttacccggaaatgcacgtgacggttagcggttttaaggatgaaatagataatcaggactggatcattgcgcgtgctgagcacgtcatagacgacagcggttttaccacccggctggagctggaagcaaaaatacctgactggatagcggaaactgaataa

SEQ ID NO: 258745 - DNA, 249 bp, Klebsiella pneumoniae
atgttcagatgtccattctgcggcgctatggcccgcacccgtaccagccgtaaaataaccgatatgacaatccgtcaatatcaccagtgtcagaatctggaatgtagccggtcattcaccacgcttaacagtgtggaaagggaagtaacaaaacgcgcaggtacagcgccgttaccgcctgactttatcccccgcgatgccttcccggcgtctcactatggaaaggatcagctaaatctagccctctaa

SEQ ID NO: 258746 - DNA, 798 bp, Klebsiella pneumoniae
atgaataggcgtgattttttaattctatcagcaggagttgctttatctggttgcgatttctttggtggcgctaacaaagctaacagcgataaaaaacttcgatttgctatcgcgtcagatggtcattatggtgaaaaaatcactgattataagaaaaactacagcgtttttgttagcgcggttaatgaatttagcaaaaacaataacgtcgatttttgcgtcattaatggcgatattgtgcatgatgataaaaaatactttcaacccgcaaaaaaacagttagatttgctttcaatgaaatattttgtaagtaaaggaaatcatgaccccgccactccagaagaatgggtgaatatatggggctatcctatggactttgatttcacgattgatagaaatgcctttttaatcatgtctacgtcagatttagctggcacgtatctttgtcccgatctctcttggctaactaacaaactaagagagcacaaagcaaaagaaaatgtatttatatttatgcatattaatcctgtagcgcaaactcactttgccgttgaatgcgatcaactcctttctctactatcagaatacaaaaatgttaaagctgtattcaatggtcacgaccatgaccatgacgaagtgttaataaaaaatgatatcccatttgtatttgatggtcactttggtggaagttggggaactgattatcatggatttaggatagtagaagtagatcaggataatactataaccacatatatgatggatccttcaaaaaaaatcaaaagctcatccttataa

SEQ ID NO: 258747 - DNA, 1047 bp, Klebsiella pneumoniae
atgactgatatcgccacattcactaatgagcaattaatcgccgtgtgccgtgctgacgtggcggaaatgtcgaagtttttaaaagagggtgaattcagcaatccgtcccgcgcagctatgtatttgcgtattactgaaatcgcattggcagcgctgatgggggagttctcatttgctcgcaatcaggttcgccgtgaacacgctgaatggtcacaggctaccttcggcaatgtgggcccggttggcccgctgaatcacctcagcaaagaagcactggaagccgctgaacagcctggcgacctgtcggaatgggctgatatgcagttcctgctgtgggatgcccagcgccgggctggtgtcactgatgagcagattacccaggcgatgatcgataagctggcagtcaataaacagcgcaaatggccggagccgaaagacggagagccgcggttgcacatcaaagagcagccagcgccggtagtgccagccgtatcggatgatatcggtgaaatccgcgtcggtcgcctccctacaatgaatcaggatgattaccctggcctgggtgattggtgggttcaacttcgcattggcgaggattctgacgaagtattggcgcgtgtgtatggtgctacgccacaggaggcgaacaaccgggctgaagcattagcctgccgcgccgccatgctgcaggaattaaaaaaaagtgcaggagctggagcagtatgcaggagtagcgacaatgcgcaggtgctgaccagcatcaatcccgcgccaactctggtttccttgccaaaaaacgccaagtcgctgaccggcaactctccggtaattggcattgacctggcatcaggtccagatcgcactgtcgaggttcattacgttgtacctcccggttacgttgtggtgccgaaggagccgacagacgaaatgatagccgctgctatgaactgcgaagatgtgctgttcaatagcgatgattctttttgcatacagttcgtgaatatctatgaagccatgctcgctgccgctccgaaggaggtgaagtga

SEQ ID NO: 258748 - DNA, 555 bp, Klebsiella pneumoniae
atgaaagacaagctgcagctactcagaaatcagctgaagatggggcatagaatatcattcgctgaagcaatgctcctgcagagagctatcgacattcttgtgaataaggctggcaactctccggtaattgatattgacccggcatccggtccagatcgcactatcgaggttcgttacgttgcacctcccggttacgtgatggtgccgaaggagccgacagaatcaatgataaacgcttggttatctgaggtcgcgaactggcgcggtcacgttgctggttataaagccatgctcgcagccgccccgcaaccacaaaacgaaccacaaaatattcctgaaattattccgcagtggattccggtaagcgaacggatgccggaggatgagcaggaggtgctcaccataaacagaatggggcattgctttgtatcattcttcgataagtactcagggctgtttttcgacaggcttgatgcgccagcagcatgctgcatagagcacgtgctggtaactcactggatgctgctgccggccgggccgaaggaggtgaagtga

SEQ ID NO: 258749 - DNA, 123 bp, Klebsiella pneumoniae
atggataagtgcaacgctctgctttattccatggtgattggcttcggcctggctgctggtatccgggtttacattgcctgggaatcattaatcaatctggcgtggagtgctattcgtggctaa

SEQ ID NO: 258750 - DNA, 741 bp, Klebsiella pneumoniae
atggttgctaaattaggatttgtagtcgacggctcttcatgggctcctggtaatattataggaagcctgtaccctcagccaatggcaggaagaattggcattttgaatgctgatggaacaactatgctgattggtgatgccccgactaaaataggctcacctggtttaagtcctggatatcaaactttaaacgcaattaacgctgggtatgatacagggattccagacaatattaccaaaacggtaatggtactggctaagcctgtgttatatggaactaaacgggcgcttggaattgggtcataccatggaggtagcggaactccaccggtgccacagggtgatactctagttattagcccaattgattacagtgtgcgggcaattgcaagtaccacaaccggaaccgcttcacagtctacaatccccggctccagcctggatatcagcaagtttcatctttattttggtgattttagtgcgtcctctttgcaggtcagtgcattccataataacgcccttgtctcaggaaacgttgctgctgctgcaaacagggcgatcccatcctccaatataagggttggtgttgcttatgacgttgtggattcaaacggctttgatgcaccaatacaggtagctgcatggggagcatggagtggggtaaatcttacaacagctgataagcaaagtatgtattcgacccttgtatcgatgctaagcggaataatttcaattagttaa

SEQ ID NO: 258751 - DNA, 849 bp, Klebsiella pneumoniae
atgacgctgttaccctggcatcccccctacgactggcaatggatgtttagttttcttggtgcgcgtgcggtgcaggggattgagacctttgccgacgggagctatagccgcagctttgcgctaaagggccactcaggactgattacggtgacgccggacgatgccgcgcagggcatgcgggtgacgctttccgccgggctgcagccggttgcggacgagtgcctggtgagaattgcgcgcttgtttgatttatcctgcgacccgcagcaggtcgccctgaccttgggaaaccttgctcagccgaggccggggcttcggctgccgggctccctcgacgcgtttgagcaggcggtgcgcgcggtgctggggcagttggtcagcgtagcgatggcggcaaagctgaccgggaaagtggtggtggcctttggagagccgctggtcgacgccccggggttttacctgtttccaggtgcgcaacggctggcgcaggccgatccgctggcgattaaggctctgggcatgccgctgcggcgcgcccaggcgctgattcatctggcgcaagcggccatcagcggcgagctccccctcgttgcgccggataatatagaagcgggtatgaagcagttgcagaccctgcccggcattggccgctggacggcgagctatttcgcgctgcgcggctggcaggcgcaggacatctttctgccggatgactacctgattaaacagcgctttcccggaatgacgcctgctcgtattgcgcgctatgccagccgctggcagccgtggcgatcgtacgcgttactgcatatatggtatacggaaggctggtcgccggatgaggaatag

SEQ ID NO: 258752 - DNA, 582 bp, Klebsiella pneumoniae
atgcgtttgtgcgaccgagatatagaagcctggttggatgagggacggctgggcattaacccgcgcccgcccattgagcgcattaatggcgcgacggtcgatgtacgtctggggaataaattccgtacttttcgcgggcatactgcgggctttattgacctgagcgggcctaaagcggaagtgagcgcggcgctggatcgcgtgatgagcgaagagatagttctgccggatggcgaggcgtttttcctgcatccgggcgagctggcgctggcggtgacgtttgaatccgtcaccctgccgccggatctggtcggctggcttgacgggcgttcttcgctggcgcgtctgggtttgatggtgcacgttaccgcgcaccgcatcgatccaggctggtccggctgtatcgtgttggagttctataattcaggtaagctgccgctggcgctgcgtccggggatgcttatcggcgcgttaagttttgaacccttatccggcccggcggtgcgcccttataaccgtcgcgaagatgcaaaatatcgcgaccagcagggcgcggtagcgagtcgaatcgacaaggactga

SEQ ID NO: 258753 - DNA, 1848 bp, Klebsiella pneumoniae
atgagacgaattctgaccacgctgatgatcttactggcggtagttgtcgccggtcttaccgcgctggtattgctggtcaatcccaacgactttcgcgcctatatggtcaaagaggtggcggagcgcagcggctatcagcttgaactcgatggcccgctgcgctggcacgtttggccgcagctcagtattctctcaggccgtatgactttgaccgcgcctggcgcagatgaaccggtcattcgcgctgataatatgcgccttgacgtcgcgctgatgccgctgatttcccatcagctgcaggtcaagcaggtgatgctaaaaggtgcggttatccagctaacctctaaaactgaagccgtgcgtagccagaatgcgccggtggttccgcacgacaacacgctgcctcaggtgcctgaggaccgcggctggtcatatgacgttcggcagcttcaggttgttgatagcgtactcttcttccagcatgaagatggcgaacaggttacggtacgcgatattcgtctgcagatggaacaggatgaaaatcatcacgccacgcttgatttttcaggccgggtaaaccgcgatcagcgggatctggcgctctctttatctgcgcaggtgcaaggcggcgattacccacactccctgaaggcggatatttcgcagttaagctggcagcttcgcggggcggaactccctgcggaagggattagcgggcagggcagcatgcaggctaactggcttgaagatgccaaaaagttcagcttcaataatctgaatttaaccgctaacggtagcaacattgccgggaacgccagcgtggtgctgggcgagcagccggattgggaactgaatcttcaggcaagtacgttgaaccttgacagcctgctttcccatgcctcgccgtctactgaaaatggcatcaaccagcaaggtcagagccagaccagacaggtacgcccggttattgcggataatgatattcagcaggactacaacgctctgcgcggctttaatgcccgaatgaccctgtcggctgaccagctacagtggcgggggatgcattttactcaggttaaaagcgatatcagcaaccagcaggggctgctgaccatcaatcagatgcaggggattctggatggcggtcgactgtcgttaccgggttccctggacgctcgcggcgacacgccacaagcctcgttccagccgaaactggaaaacgttgagataagctcgattctgaaagccttcaactactcattaaaccttaccggtaaactgtcgctgaacggtgatttctcgggggaaaagattgatgccgacgatttccgccgtagctggcaggggcaggcgcaaattcagatgacggatacgcgcactgaggggctgaacttccagcaactggtccagcaggccgttgagcgtagcactaacgttcaggcacaggaaaactacgataatgccacccggctggattcggtgagcaccgcgctggcgctggataatggcctggcgaccttaagtcgcatgcaggggcaatctgagctaatggcgttaaccgggcagggcgagctcaacctgctgaaagaagactgcgatatgcgcttcaacgttcgggttttaggcggctggaagggcgagagtaagcttatcgacaggctcaagcagacggcgattccattacgtatttatggtaactggcagacgctgagctacagcctgcaggttgaccagatattgcgtaaacagctgcaggacgaagcgaaaaaacggcttaacgaatgggctgagcgcaataaaaatacccaggacgggaaggatgtgaagaagttgcttgataagctgtga

SEQ ID NO: 258754 - DNA, 2190 bp, Klebsiella pneumoniae
atgtcggtaccgaaccagacaccctataacatctatacagccaatggactaacaaccgtttttacgtaccagttctatatcattagtgccagcgatctacaggtaagcataaacggaaatattgttaccagtgggtattctgtcgcgggggttggaaataaagatggtggtgacatcacctttctgacgcctccggcaaatggatctgtcgttatgttgcagcgtgttgttccgacgtttcggttaacggattatcaggataacggggacttactggcagataccgtcaacaaagattttgacagactgtggatggcaattcagcaggcgttcttatatcttggcctgaccttgcaaaggccactgctgggggggccgtttgacgctaaagggtatcgtatcgctaatctcggcgacccagtaaacccaaatgatgcagtgacaaaaaaatacgcggataccattctcagtgtgagtttgaataaagtgctacgcgttccagagagttcaattcctgttttgccttcagctcctcgccgagcgaataaaatccatgcttacgattcatccggtaacccgataatggttttacctgaaagcggtagcgcagcagacgtacttattgagcttgcgaaaacagatacgacagctgttattgcaggagtgcctgccgttgatgtagctggaaatacacgaaagacaaaacaccttgaacgtgcagctgacgtttatgatgttgttattacctacggtcaatctaactcagctggtgaggctatattatcaggagatacttcaggtttcccgccacctcttgagcgctctctgatgtatgatttcaccgatggaaccataaagccgattattcagaatattgttagctcttcaggtgttgcatcttccggtcatgcgtggggagaattctgcaatgaatggtaccgccttacaggaagaggtgttgttattgttcactgcggaaggggggccacatcgatagcccaactttctaagggatatgcaacggggaatgcagattattacgggaaaatggtggctggtgtggccgccgctaaagccagaatggctgttcagggactgccaattggcgcaacgtttatggcttttcaccaaggtgaaaccaaccagcaattgcttacaacatttgatgaatacagaggggcattacttcaacttttcacagatgtggatgcagatgtcggactgacccggttttgtaattttactgttggctgccctgtcaatcgcccagagtattcgtgggctaccattcagaatgctcaacgttacgtatgtaatggccgtgaaaaaatgctgacagtttttgatggctgtccttctttccttttacgtgatggtaatgttggtccagaaggtgttcattacactcagaagggctacaatctgatggggcgagagggcgctcgaggtctatggtcttcttttggtggggctgaaaactataaaactaatgtcgatcttgcacaatataatcactttgttgctccatggtccagggctgcacaatgtgttgcttcggtacgatgggcgagctcaataaacaaatgggctttattatataaagataatgacaccggaacatggcggcccgctaatatcaacaaggttgatacttcagaggatgggaattcgcttgaatttacaatcgctgataaagcggcttattggtttaccatgtcagctggtataacaagaaatatggtccagcagggttttagattaacagcagaaccatttaattcaggaaccgattataagataagggttgtattgtacgcagatgtatctttcgttttaaatactgtaacaggagaaatgagagcatctaaaggaggatctcttcccggatggttatcacgtgcattatctgtatcaattgtttcacctggcgttgcattgataacccatggaaacactcttgcatacccatcagtaagttattatggttcagatgatggctctagagtggccgctagtgtttctttattttgcccaagtgcagaaacaacaaggattaactgtagcattactgttaatgaccaaaatccatgggtttcaattaacttaagtcgaatgttggttaaaccagattacctttatgatgccggtgcgaccattaatgttaatgggttatacgcacctgagttctaa

SEQ ID NO: 258755 - DNA, 393 bp, Klebsiella pneumoniae
atgaaaaataaattcctttccctgtgcatcacactagcaacttttatgcctttaacctcgcacgcagaatttacggtatctatgtacaaaaacctaaaaaatgctgcaattaattccgatgccgaaaacgcaaaaaaagcaaaagatttaattagttcgtacttaatgggggtggcctctggtgctaatgaaattagtcagtttgaatcgattaaaaacggaactccctttccatattgtttacctaaaggtattaaactcacgccaagtcttgctgaaaatatagttgatagcgtactttccgataaagatgcaaacctaaataacgtagattctatgagtctatcaagaatctacgttattggtgttctacgttactacaaatgcaattaa

SEQ ID NO: 258756 - DNA, 1023 bp, Klebsiella pneumoniae
atgttggacccgagagatacatacggccccgtcccacaaaaagtaactgatgatgagataaagttaattaacgaacggttatttaactttacttttaaaaggattacttatatagatggatgtttgcgcgatgagttttctagagctcataactttatctattattggccacaaggtaaagttaggatgcaaagcagcattaattattttcattatacgtctgttgagaattttaaaaatattatccgctccggagttttttgggcatcccaactgggtgcaatgaatgaccctggagagttgtcatatgcaaaggagaaattattatatcaagtatcaactctatgttcaccaatgaatatagaaaaaaacacaaccagcaaaattaacaaaaacatatccaccttctttgacaggtatattttcaaacgactattctgcctttcatttagcaaaagaggaaacttatcaagccagtggtcaaaatattcatgtgaaaacggagtctctttttcattaaacactcaaatcataaaatcattatcaagtatttataatgatgttatttttactgatgttatttacgatcaatcaaaacagcttgaaatgctaagagaactagctcaggagataacgaaggactacactttattgattgatgaagattccgcccacaacttattacaaaaaaaattcgaaaaacaattaacatatattacggtagcatttaaacataatttttaccatgaagaagaggaataccgtgttgttatacccattaatggaaatgaaatgcacctcaaaacaaaaccagacggtgtcagtcaatatatgaatattgactttatgaatatatataaaaataatgaagacatcgacatccccgttgaatatgtttttactgcccctacatcaaatgaaagaaaagcattaaaaaatatcgacagtatactttccaattacaaaattaaatttggactaatcataggttcaggtgcgccattcatttggcccaaaaagtga

SEQ ID NO: 258757 - DNA, 147 bp, Klebsiella pneumoniae
atgaagagattttttgatactgatccggaccattacagcaaatacgcactacgtcggtttactctgttatcaaattttgttgtcttggccgttgttgccgtagcgacctggggcatctgcatgattattgagtggtggacggcatga

SEQ ID NO: 258758 - DNA, 1011 bp, Klebsiella pneumoniae
atgactattaagaaactcgatggtggtcgatatgaagtggacatcagacctgccgggcgcaacggaaagcgcatccgcagaaagttcgacaaaaaaagcgaggctatcgctttcgaaaaacacactcagtacaaccaccacaacaaagaatggctttctaagccgacagacaagcggcgtctgtcagagctaacggctatctggtgggagttgaaagggaaacacgaggagcacggaaagtctaatcttgggaaaattgaaatatttaccaggataactgacgatccttgtgctttccagataacgaaagcgcttatcagccagtacagcgcgactcgaagaagccagggtattaagccgtcaagcatcaatcgcgatttaacatgcatcagtggcatgttcactgcattgattgaggctgaattattcttcggtgagcacccgattcgcggtactaaaaggcttaaagagcagaaaccggaaaccggctatcttacgcaggatgaaattgctgtgttgctatcgcaactggacggggacaacaagaagatcgcgattctttgtctcagtaccggcgcaagatggggtgaagctgcgcggctcaaagcggagaacgtgatccataaccgctgtacgttcgtcaaaaccaagacgaacaaaccacgaacagtgccaatttctgacgaggtggcaaagatgatcgccagcaacaaaaggggttatcttttcccggatgcaaattacccggcattcaggcggctgatgaaggaactgaaacccgatttgccaccagggcaagcaacacatgcattacgccacagtttcgccacgcattttatgattaacggggggagcattatcactctgcaacgtatccttggtcattcgcgcattgagcaaactatggtctatgcgcatttcgccccggaatacttgcaggacgcgatcgccctcaatccgttacgaggaggcactgaggttaagagtgtccacacagtgtccacagcatag

SEQ ID NO: 258759 - DNA, 300 bp, Klebsiella pneumoniae
atgtcaaccgagataggcaacaagttatcgctcatacgtgagtctgaaaggctaaacagaaagcaattcgctgaaattactggagttccatacggttctttgacctactatgaaagcggtagaaccatcccgccaaccaacgttactatgaaaattctccagcacccgcgattcagcaaatatgccctttggttcatgacggaccagatctcccctggagccggacagattgcgccggctctcgcacactttgggcctcactcagacaattcttccccctcagagaagaaaactggttaa

SEQ ID NO: 258760 - DNA, 411 bp, Klebsiella pneumoniae
atgaacgtgaagcatttagccatttcgattagaaagacttgtattaatactttgaatgatggggtttctattggtgctgttttctttgagccacaaaccggaaagactttcaatcagttttatcagcttgagatgtacaaaagtgaggggctggatctccccatattcctgatcggtctggaaacatttattattgaacattcaaaacatcatcgtttggttgtatgggggtatttacatgatttacgcttccttaaaagtttgctgaatgagcttggcatttatagaaaactcattattgcaaaaagggaacgttctgagcatgctttatatgatgctttatccatacctaaatatatttcctgttatatggggagtagtaaaggttttggggaattatgcttgcattaa

SEQ ID NO: 258761 - DNA, 2667 bp, Klebsiella pneumoniae
atgaataacactgtacaccaggaagtcatccgccgtcttatctgtgatttcgaatttaagactaaggaaaaatatctccagcaggggatttgtcctaattgtcataaacgagaaatgtttaccagtattgaacatccgtacctgattaaatgtggtagggaaaataaatgcggccatgagtttacttcgcgtagcctctaccgagatctatttgagaactggtctaatcgttatgaggctacacaaagtcatccctatgccgttgcggatgcataccttagcgaaggtaggggtcttgatatcacgcgttttaagggggcgtatactcagggaagttttgcgcgcaaaggtttggggagtgcaacagtcagattcactctttctaatggtaatgcatgggagcgtattattgatgaacctgaacgttttgagcaaaaggccaattttgtcggctcatatgcgggatactggtgggaacctcccggaatagatctccgtaccgcagataaaatttttatcaccgaaggaatatttaacgcaatgagcctggttcaatccggtctttatgccgtggcgacacttagcagcaataattatccatctatgttgttgtctatgctcgccgagaaccttccggctgacaggaagcgcccccggcttatttgggcatttgacgatgatcgcgctggtcgtagccatattataaagttcgcacaaagagcgatacatgaaggttgggaggttagcgccgcattaccctcggagaacggcagtcattatgactggaatgaccttctgctgagggataggctgacggctaaagatatgaagcaataccgccattatggccgcctgctactggcacagagtgcagcggaaaaggcgctgctcatatatcagcacaatgaatggaatacttttcactttaactttggttcccgtacattctggtttgagcttgatttcaataaatacatgacggctgtagaacgtattcagacctatgacaaagaatgttatgacgaggaagatgccaagcgccgcgcgctcaaagaaaccggcatgattagcgaaatcgctaactgtacgttaactcccctctatttccagcgttcagagcctactgatgagtcatggtattacttacgagttggcactcccaatgccccgtcggtcaaaggtacatttaccgcgaatcaattggctagttcggcagaatttaaaaaacgtctccttcatatcgccaaaggcgggatgtataccggtagtacaaaacagctcgacattatttttcgttccttgcaaatggtgaaggaggtcaaaacgcagaattttatcggctacaacaaagaattccgcgcatgggtgctaaatgacgttgcggtaagcgatggccgggtttatcacctgaatgatgaagattactttgaaatccaaacatcgagcgttaagagcctcagtcttactccgtcactgagtataaacgccgatcttagccaatttgactgtagctggctggaggatatctggactgcttttggcgccaaaggctatgcggctctggcgttctggtttggctccttgttcgctgagcagatcagggaactgcacaagtctttcccgtttcttgagattgtcggggagcctggtaccggtaagagcaccctaattgaattcctgtggaagctggttggtcgtgaagagtacgagggatttgatccaagcaaatcaacgccggcagcccggggtcgtaacttttcacaggtagctaacttaccagtggtgctgattgagggcgatcgcagcggcacaacagaccggccgatgaaacaacgtgcgtttgactacgatgagcttaaatctctctacaatggccgtgcttcgcgtgcgcttggtatcaaaacgaataacaatgagacctatgagccaccttttcgaggcagcatagtgatagcgcaaaacgctgatgtggacggctcagaggctctgttgtcgcgtattatccatatgtacaccgacaaagctgggcagactgctattacccaggccgcagctgaaaggctggagcagacgccctgtcaggatgtttcgggcttttttgttgcggccactcaaaaggaaaatgaagtattgctgcaatatgaccacagctaccaacaagccagaaatgatatggccggtcatgctgatataaaacataagcgcgttacaaaaacgcattcccagcttattggaatgctggaagcccttccgcttgtcataccggttcgtcctgagcgcatcgttgagacgcgcaactatatctttacactcgccgctgagcgtcagagagcccttagcctcgatcacccgatggttcaggaattttgggaactgttcgactatctcgactctcaggagccgtttggaatgaatcatactgctgataataaacctgaggaaatagctatcaatttcaaccatcttgaggaggtggccagcctctaccgccaacggctaacttttacgttatctgagataaagaagctgctcaaggggggacgtgagcgtgagtttgtgcgtgcaggctcagtaaggagtgctatcagtgagaagtataatacaggaaagaccaaagaattgcggaaaccagatttttaccattgctggacgtttcggagaaagtga

SEQ ID NO: 258762 - DNA, 1299 bp, Klebsiella pneumoniae
atggaacctaaattacagacatttattataaacttggaatctttaagggatgcaattatcgagataaaaacagatgatcaattactattagataaacatggcgtggccatgcctgcaatttatcctgctgatctcgaagatatgcctgatttggttataaaaaaagtgatggccctaaaagatatcgaatttactgaggatgaaataagggagattgggcatttaaatactaaggttaggaagattcaaacaaatttagttccgcatctttactcttcgtttagtcaagcaataccatcgtttatttcatcttttgtttatataaatcaatatatagattctatatctacctttgaaagattggattctgctaatataatccctcgaaccttgtcaaaaagaataaaaagcattgagtccagaataaataatatcgagccaggagttgaaggtattgagttaaaaataaaagccattgaagatgctcacactgctgctgagaatatacccgtagatttagatgagttgagagaatacaataaagaagctgcgatccttaaacaaaaaattgagaaggtgtttttttcattagataaaagcgaagatgaagctgaagaaaccttggaggcaatgcgtactaagggggagtcagctgattattatcttgctaaatgcgatgaggcaatcagagcttcaacctctaaaggtttggctggtgcatttgaaataaaagccgaaaagttgaatagaactataacttactgggtaggcggtcttctagttgctttggccggtgggtgttatattgggtttgagaggctaaaggtgttgtctgctgtcttaaatcagacaaatccaaatacagcggtaattgttactcaacttattttatcaatatttagtattggtgcacctctttggcttgcttggatttccactaagcagataaatcaacgctttaaattggccgaagattatgcctttaaggcagcggttgctaaggcatatgaaggctacaaaaatgaagccgcaaaagtatcaaatggcgagtttgagaaaagattgtttgattcagctcttacaagactggaagaggctccgctgcgtttaattgataatgaggatcatcccactccttggactgaaatgcttaactcaaaatcatttcaaaaattcttagatgcttctttggaaaatgtggagtttgttaaaggacttatcagcaagaaaactgttacatctaaggcagccagtaatgatgattccataccttctaataaagagaaagccgacgcataa

SEQ ID NO: 258763 - DNA, 261 bp, Klebsiella pneumoniae
atgcgcattcttaaattgttttgccctgagtgcaaagcccccgccatcatccgaaaatcggtgccgaaaggcgatctgtacagtgatttatactgtgcgtgcacaaacgttgagtgtggccacacctatgttttaaatctcaccttctcgcacaccctcagtcccagcgccatgtctgttgatcgtctcgtcaaagagctggtaggtcagttaacgccccagcagcgacaatttgctttagatttattacagtccagttaa

SEQ ID NO: 258764 - DNA, 1047 bp, Klebsiella pneumoniae
atgagtaaacgacataaaaagcgaaaaacgcagcccatggccgcgccggtacaaaaacagaatttaaccctgccccgcagcagtgtgatcaccttcggtgagccagagcccatcctcaccaccggcacggattactataatatctggtatgacaacaaggcggaccactggcggctccccattgaccgtgtggcgctctcgcaactggtgaacctcaacgggcagcatggcggcatcatgtacgccaggcgcaatatgttcactgcgggctatatcggcggcggccttaaccacgaccagatcgaggcgggcatttttgattatctgctctgcggtgatctggccattctcaaactgcgaaacgtttttggtcgggttgtcggattatcccctctcccctcgctgtatgtccgcctgcgcaaaaatggtgactttatcgtgttgcaggaaggtgagccgctggtttatccgcctgctgatatcgtgtatatccgctcccatgacccgctgcagcaggtttacggcctgccggattatattggtggtatccattcggccctgctcaactctgaggccaccatcttccgccgtcgctactaccacaacggcgcgcacatgggttttattctctacaccaatgaccccaacatcaccgacgaggtggagaccgagatcaaagccaaaattgaacagtcaaaaggggtgggcaacttctcgaatctgtacgtcaacataccgcgcggtaacccggagggcctcaagctgatcaatatcggggaggtgaccgccaaagatgagttttcgaacgtgaaaaatatcaccgcccaggacgtactcactgcccaccgttttccggcggggattgcggggatcatcccgcaaaacgccgccggcctcggggaccccattaaagctgaggcgacatataaaaagaacgaagtggtgccgttacaacgaaaatttatgcgatccgttaacgatgaccctgaaataccggagaaactgcatttattcttcgattttgatgatgaaaagagggaagaatga

SEQ ID NO: 258765 - DNA, 1800 bp, Klebsiella pneumoniae
atggcgaaatacaaagatgaaatcatatttgcggcaaaggctctttatatcaggcgaatgacgcctgatgaaatatcaaaagagctgactatcccccgcagaactatttataactgggcgaataaattcggctgggcagaccttattgcgcatgattccattgaggaagcgatttcacgtcgctatatcacgctcagtgataaaaataacaagacggagctcgagcttcaggagctgcgcgaccttatcgcacatcatgtaaaaatcatcggccagcgcaacaaacacgtcgagcggatggcggagattaacgcgcgctcagccgatgccggcgtcgctggcgagggcggtgagaaaaagcgcaaaaagtaccgcaaaaatgacgtgtccgaactcacggctgagcagcttgatacctttgcccgcagccacctcttcagctaccagctctattgccgcgaacataagcatgaagactggcgatttatcctcaagtcccgtcagataggcatgacctactacttcgcctttgaggcttttgaggatgctgtcgtcaccggggaacatcaggtgttcttctccgcctccaaagcccaggcggaaatcttcaaacaatacatttttgaaatcgctgagcagcatttcggtatccggctgagcggtgctggcaacaaagttaggctgagcaatggcgcagtgctgcgtttcctctccaccaattccagtaccgcacagggatttaacggccatctctatggcgatgaggtgttctggatcccgcgttttaaaaagctgcacgacgtggccagcgcgatgaccactcagtcacgtttccgcaccacctatttttccactcccagtgccaaaacgcatgaagcctacgaagtctggaccggcgaacactggaaggatggcgatccgaaacgtaaagcggtggcgttcccgactgacagcgctcttcagaaaggtggccagcgctgcccggataccatctggcgctatgtcatcaccatggacatggccatcgccggtgggctgaggaaactggtggacatcaaacgtctgcgcgagcggtataacgaaaccacattcaacatgctctacatgtgcgcattcgtggacagcagggacgctgttttcaaattccatgagctgcagcgttgccaggtggacgctaaacgctggggagattatgacccggacgccgcccgcccgtttggcgatcgggaagtctgggcaggatttgacccggcgcgaaccggtgataactcaacattcgtattagttgcaccgccggtttttgccgtagagcgcttcaggatcctggcaatctaccactggcaggggttgagcttctcacaccaggccaaagaaattaaggcactcatgcagcgctttaacatcacacatatcggcatcgatatcaccggcatcggacgcggcgtctatgagctggtatcaaaattcgccccacgggaagcgatgcccattcactacagccttgagactaaaacacgcctggtactcaagatgatcgactccatcgagcgccagcgcatcgagtggagcgctgacgctatcgatgaagtcagccgcgaacgggcagagattatccccagctttatggccatcaggcgtattacgacgaaaagcggcggcgcaatgacattcgtcgccgaacgctcggaaaaaaccggtcacgctgacatcttcttcgccacttcacacgccatgattaacgagccgcttgatcacgaatttgagcgctcatccacctgggttttcgggaaagcagcatga

SEQ ID NO: 258766 - DNA, 1062 bp, Klebsiella pneumoniae
atgactgcacaggtaactgactggatttgcatttgcacctccggtgccgccatcgatggtcggcccatcgaggcatcaatgctactggaagtcgccgagcgttatgatgcgagtttttatacggcattgatttggccttaccatagtgatgattttgaagagcgtgagcgatgggtgccaaattacggtatcgttcacgccttaaaggctgaagagacgaatggcgaggtcaggctctacgcaaagatttcacctaatcaatatctgattgaggcaaataaacactctcaaaagctattcacctcttgcgagttttggcctgattttcagggacagggatattattacttacaggcattagctgttactgatattccggcaagcaccggcactgccatgctgaaattttcggctcagagtcgtgaaaagggtcttcagcctggtggtgtaatggaatttacccttggaaaattaacccctctgaataaacagtccttattagacaaagttttgatgggaatgaagttaaataagtttacgccggaaggtaactccgggtctgaaagtgaggctgagaatatggatgaactgaaaaaactgctgcaggacatgatgcagcagatgaaagaaatgagcgatgccgccaggggaaacaccaccagtaccgaaaaagaggccgccgacgaagtgcaggccgcagccgaagaaattgcggaactggccgaagaggtggctgaactggcggaagaggtggcagaaaacccggaagatgaggttgttgcggaggaattctctgcccgccgcgaagagctgtgcgagcgcattactgagctcggtaaaggtaaatcacgcttttcggccagccgtcgccgtcgtcgccgttcattctccgccacgcgccggagtgaaaaaagcggcgaaaaagctgacggaaaagtggccggcatcgagcagaagattgacctgatgatcgagacactgagcgctatcgctgacaagtccgtgacccccgtccccggaaagaagccgggcacagacaataaaaaattcaccgtgctgtaa

SEQ ID NO: 258767 - DNA, 1032 bp, Klebsiella pneumoniae
atgttactgaatcaggaaacgcgggatctgcttgagcggtttacggcagcaatgggcgaaacctatggcgtgcgagatccgcgtcagatgttctcgatcaccccgccaatggatacgcagttgcgtaaagccattatcgaaagcaacgactttttgcagttagtcaacatgctgacggtgaacaacatcaccgggcaggtggttgccacgggcaaccctggcctgtttaccggtcgtaaggctgacggtcgcttcagccgtaagctcgataacagcgggaataaatacgaactggtggaagtggattcaggtgctcacctggactacacaaccattgttgcctgggtaaatgccggcgatgagggagagttcttcaataaaattcaggcctttgttaatgcctcgttcgcgcaggacattctgcgggtggcctttaacggtacgcatgctgtcgaaggcgacactgacccggtaacctgtccgaatggcgaagacgtcgcaaaaggctggcaggccattgtcaaagagcgcgctcccgctcaaatcatcactgacgtggttaccattaaccgcccgcgtaacggcgcggactttatcggtctggatgcagcggcgaatgacctgcgccagacgctgatccatccggcgtatcgtaacaatcccgatctggttgtgcttgccgggcgcgatctggttgctgccgacacgacctcattgctcaacgagattgacgcgccgagtgagaaggtggcggcgcagctgcttaaccgcaaagtggcaggcatgccgttatattccccgccatttatcccggacggccggctgactgttaccaccctctggaacctgcatatctacaaccagaaaggcacgggctaccgccgcgcggactggaatgatgatcgcaagcgttttgagaacaactatctgcgtatggaaggttatggcgtggagtatgacgagctgtacgcctcgtttgaccatgttgagatccccgggatgaacgaccgggacgataacagcgaggcatga

SEQ ID NO: 258768 - DNA, 708 bp, Klebsiella pneumoniae
atgaacacaccggcaaggcgctggcgaaacagtcagatggcactcaaaaagctgcgtgaaggccagcagatgagcgcgtcagcacaggaccgtcgagcgcaggagtgcgagcttgagcttgaccgtcgccgcctgagcgaggcgggagagtcgcatgccctgcgtgctgagatgaagcgcgatgagctgctgccgaagtggatgccccgcgtcaggcgttatctcgatgccggtgatatttacccttatccggcgctggtctggtgtgcgatctggctgtttgacgttggagatctggacggcggtattgactatgcccttgaggctatcagtcagcagcaacccatgccggataatttttccagctctatgggggcgtttgtcgctgacgccgttcgggaatgggcggagcaggaatacgccgccggacgcagcgtggagccgtatttctctcgagttttccagctcgtgacagagtcctggcaactgcatgaagaaattaccgccaaatactacaaactggcggcacagcttgccctgcggggcgaggacggcctgcaggaaaagcccacagctttcagcaaccttgatgtgctggagcacgtgcgagccctgctgcagaaggccgcagcaaccagtaaaaaagcgggcgtgaccacgctcctgaacagcgtgaatgcgcgcattcgtgcgctcagtcgcgattaa

SEQ ID NO: 258769 - DNA, 474 bp, Klebsiella pneumoniae
atgcatcacccgtctttgccgttcagcggccgcggaattgattaccaggatgtgccggttaaaaacggcgatcctttctggcccgatctgaatctcggcgagtttcagaaacagcgcgcgctgccacccggtatggatgacggggtgatgttgattgcgctgctcgccagcgtgaaggaggtcaatgacgccctgcgtccggtggtgcgggcccataccgcgaaaggctgtctcaccgcccgtgaggtgccgggcgcgagcgccggcggcgagaacgagcttaccgcacagtacaaaaaagcggtttacgcccgggcgaaagccgatctgatgggggagtttcagaccattggccggcgcgacacgatccccgggcaggagggaagcgacacgcgcgacagcctgctcgccgaggcggcactggtgatgcgcaatatgcaggggctggggcgtgttgggatttacaagatatga

SEQ ID NO: 258770 - DNA, 498 bp, Klebsiella pneumoniae
atgagtgatcagctggagagcctgacgaactacctgatggcgcgcacgcctgcgcggatacacggcttttttgaggcggagattaccggcgtacagctcatccgttcgatgaaagaccttggactcggacagatgcggatcggtatcagccggagcacggtgatgcttagctggtatgcctacccgtaccgcgaatatccgccttcgcttatttacgcactggtgatggcctggattgaagggcaagccaacgcgctgtttgacgaacttcagttaccggatcctgccgcagatgtatcgctcggcacggagcagcaggggcggggggatttgacgataaccctcgagctggctgaagccctggttctgcgccagcacgagcagggggaaatcgggttatgcggtaagcgctggaccctgcacgaagcggaggtatggactgcagaaacgttcgacgtcgcgcctgtgatgagcggagtcagcgatgctgaagattga

SEQ ID NO: 258771 - DNA, 696 bp, Klebsiella pneumoniae
atgctgaagattgagggcggccttgatcgccgccagctgaacgacctgaagcgcgagctggcgaggcgggatttaccgccacgcaagcgccagcggctgctctggcgtatcgccaggcacggcattatcgcggcggcgaagcgcaaccagcgccagcaacaatccccggagggggcgccgtggccggggcgaaggcgcggcaaacaaaaaatgctgcgtggtcttccgaagctgctggctgtcagggaaatgccggagcgtgaagccgtggtcgtttacctcagaagccagggcggcagggcgttatccgccggtgtgctcggtgccattcacgcgcagggagccacaaccaccgtgaatgcggcggcgttgcccacaccggcacaaagcggccccgcgacacggaaacaggccagcgcactgcggaagcttggttatcagcgccgcgagggtggccggtgggtgagggcgtctgcctcctgggtggtgcagaacctgtcgagggcgcaggccggtctgataatccgcaaattaagcggcgaaacacccaaaagcacctggaagatagttttacccgctcgcgcctttctgggcgtcagcgatgcggaatttaacaggattatggcgcggcagctgcaggcgattgattttggctggcaggtcagtgctcaggatattaaggggaaaaattcatga

SEQ ID NO: 258772 - DNA, 1194 bp, Klebsiella pneumoniae
atgacatggccaagcgtggacattaaccagctcaacaaccattcgggcgagctgtcgggcgtcgagcaaatcatgctgtttgtcggccttgccggcgagccactgggggacgcgcatcccttacttgcggtgagcgcggagtccgatattgaagcggtactggcaaaggcctcgccgtatttgcgtgagcaggtgcgggcggcacagctgaacggcggacagaactggggagcttacgtcctgctggcagagggagagacagcagcagacccggaggcgccggatgcgctgaaaacgatgacgcctgactggctcagtcacattgagctggcgctgagtcaggtgggcgttgaaggcgtgatgctctgcgatgacataaacgacattactgcaggccgatcccggattaatgccctgcaggcgctgcgggcgtcggtcattagttcactggggcggcgggtctggtttatcaccacggtggccagcccgacagcgctcgaaactccgctcgactgggcaggctatcgggcatttctgaacgagctgcaggacgggatcagggcggaggccgtgcagctcgttccttcgctctggggcaatgaggccggtgttctcgccggccgcctctgcaatcgctcggtgacggtggctgacagccccgcgcgtgtggccaccggcgagctggcaggcctcggaaccggcagcggtgagttgccggtggataaagagggggtggaaattagtctggcgtggctgaaagcctttgagtcgatgcgctacagcgtaccgatgtggtgggctgattatgaaggcatgtactgggctgacggccgcacgctcgaggtcaaaggtggtgattatgaagccatcgaatatctgcgcgtcatggataaggtcgcgcgacgggtgcgccttcaggctatcgccaaaatcggcaaccgcacgctcaacaccacgccggtgagcatcgaaacccataagacctatttcggcaaaacgctgcgtgagatgtcgcgcaccgtccagctcggcggcattacgtttccgggggaggtggagccgccgaaagagggggatgtaaccatcacctggctgacaaaaacgcacgttgtgatcggtatcgtggcgacgccttatggttgccccaaacagattaccgtcaatatcggccttgatcgtgaactggaggattaa

SEQ ID NO: 258773 - DNA, 456 bp, Klebsiella pneumoniae
atgacgcagcgcattggcggcatggattttgatatcacggtcggtactgacgtgatccatgttgaatccgtttcgcttgatatcactgataacaccgccgtggcgcagtcccgcggcgtgcctgacggctacgtgaaaggcgacgtggcggccgagggggagattgagcttgatgagaaaaactttgccacgctcaacgagcaggcccgggcggccgggagctggcgcgatcttgaggcgctggacatgcttttctacgccagcgccggcgggctttcaacaaaggttgaggcgttcggctgcaagctgatcgtgacggcgccgcttaactttgatcccaaaggcggagaaaaggccacgaaaaagctcaagtatctcgtcaccgcaccggagtttgtacgcattgacggtgtgccgatcctgagcgaaagcgatttgcgcaatattgtggggtga

SEQ ID NO: 258774 - DNA, 297 bp, Klebsiella pneumoniae
ttgatcgcgctgcttgtcgccattggtgtggccggtgagctttaccggctactcaacagcgacgaaaagctcaccccgcgcgtgcttgtcagccggtgccttctgggggcgctggcatcgctggcggtactggcgacaagggcgcataagcctgatgtggaagatatcaccctggtgggccttgcctcactggtggccgtgctgggttactcctttctggaggagcctatcagggacggcgtcagggcattatttaaacgactttttgacggaagaaagcgcgatgacactgagtga

SEQ ID NO: 258775 - DNA, 339 bp, Klebsiella pneumoniae
atgacactgagtgaaaaacaacggaaattcacgacgatggtcggccggctgattgaatggtgcgatgcacacggctatgagctgacgttcggcgaagcgtaccgcaccccggagcaggcccagctgaacgcaaagagtggcaagggtgtcgccaatagcctgcacacgcagcggttggctgtcgattttaacctgtttatcgataaccagtaccagaccgacagcgcggcatataaaccgctgggcgagtactgggagtctattggcgggacgtggggtggtcgcttcagcaagcctgatggcaaccatttcagccttgagcataacggggtgaaatga

SEQ ID NO: 258776 - DNA, 393 bp, Klebsiella pneumoniae
atgatgattaagggctggctttcgaatcttctgccttctctggtcatcggtctgatgattggtcaggcagcgacctggcaggttgagaatgcgcttgagcgccgtcttgatggcgtactcctgagctcagagagcgagcgccagcgccttatcaatgacatttctgacgcctcagccagcaaactggaaaagcgcctgcagcagctgcaggacagtgaattgcgaggggaacgtgttttcagtctcgagatcaataacccggttttcggtcgcgagtgcgctactgatgactatatccggctgttcaacgaaaccagtgaggctgccgagcgcgccttatcaggcgaacctgacgcaggaatgcccggaggcgctgccgagactaagcggtaa

SEQ ID NO: 258777 - DNA, 279 bp, Klebsiella pneumoniae
atgagcgataaaaacatcattaccctggacgtagccggcactgaactgaaatttgagcctaacctcacggcatataaccaactgattaactctagcgcacgcgaaaaaaatgcggtgggcgtggtcaatgagtacctcacaaaaatcgtgacacccgaatcccgcgccgcgctcaaagagctgctgctgcgtccgggcgtcggtatgcaaatatctcaggcggtgaatgatgagtacgcgccggcgctggatatcgaagtaaagaaatcgagcgaataa

SEQ ID NO: 258778 - DNA, 1935 bp, Klebsiella pneumoniae
atgaaagaattaacctttgccctgaaccttaaaaatggcctttccgccccgcttggccgggcgcaacagtccgttgataagttttcaaaaagcacacagtcagcgctcgggcgcatcggcggcggggcgattggtttgtggggaacggcaaaggcgctgggcggcctgttaaaacctgcagatgaagtgcagtcggcgctcaatgagctttccacgcgcaatgtgggcacggacgccctgaaagcgatcaggcgggaggcggcacaatttagtacagattttggtgtttcggccgttgatttcattggttcggtcaccgaaatccggtcgtcgctgggcggcctgagtgattccgagctgccgcgcgtggcgcgggcgaccaatacgctggccgtggcgatgaaatccaccggcgcggacgccgccggctacatcagcacgctggccagtcacttcacctcggaagtggatcgcatcggtaacgttgcgtttgctgagaatatcgcctcaaaaactgcctggcttgtgcagaacaccgggcaggacatggcgcgcattcaggcgctgcttcagggggcaaaaggaaccggcacgggttacggcgtcggtattgacgaacagctggccgtgctgggcaatctcggcaacggcctcggcagtaatgccggcggcgtatatgacgcctttctgaaaaacgccaaagccggcgccagagagctggggttaagtttcaccgacgcgcaggggcaactgctggcattcccggacattcttgatcggctgcaggccaaatatggcgacacggtagccggtaacattcccctgcaggagaaactcaataaggcctttggtaagggggcggcggcgctcatttcctcctggggttcggcggacaagctgcgtaaacagatagtgcagcttaagggcacggaggggctcggcggagcgacgtcaatggcggacaaaatggccgatatctgggcccggctggaccagagcggtggccgcattaaaacggcttttggtagtgccttactgccggtattcgagccggtcatcaataaagtaatacagctggcgagtgggtttgcccgctggctggaaatgttcccgaatattacccggtggctcggctacatcggggccactatcgcggtggtgacggcgctaacttcgctttttgccctgtgggcgggcgtcaaagcggtggccggtttgctcggtatgggcagggcattctcaattcttaatcttagcctgttaccgacgaggatcggactgctggcgctcggcattcaggccaaagcctttatggtctggtctgctgcctgccgggtggcaacgctggcgtggagtgcggcgctcggtgcgggcgcgatcgccatgagggtatacagcgctgcaaccctgtttgccggcgtggccatgcagctgttaatgagccccgtcacgctggttgtgctggccatcgccgggctggcggcgggcatctggtacgccattacccactgggatgcactcaaggcggccattatggacagcgcaccctttgcgtttatctcccgcgtgctgggcgcgtttggtgagctggctggcgcggccgtggaaaaagtgaagggcgttttttccggtctctgggcgtggctcaggagcaccacgatgagttctgtcaactggatggtggagaagctcaacaaaatacccggggtgaatatcgagcctgtcgggatggatgtggagaaagaaccgccaaaaatgccgccggtcgcaggcctcgccatccctcagtttaacgggggaggcgcaggtaagacgctaagcggcagcaccgttaagaacgataacagcagaaacatcggtcagctcaacgtctatccacagaaccgggaaacgcttgagtccctgattgagtcccgggagttgtacgcaggatga

SEQ ID NO: 258779 - DNA, 330 bp, Klebsiella pneumoniae
atgagtaaaacgctttatgtcgacctaagaattaccgccggcgattttgtcctcgattcgggcagtgagcccgtgcgctgtaataaccgagacagcatcgcgcaggatgtggtgcatatgattattgagtcagcactggccaggcagctcgttggcgagcgcagcccgacgctgcgatatgacattgcacagcagcttgagctgcttgttgagacagatgatcgcctggtgcccggcactgcgcaaatcacagagatgaagcccggcaggtatctcatcagtgccacgacgtgggattttgggcttattgaaaaggaattaacattatga

SEQ ID NO: 258780 - DNA, 1182 bp, Klebsiella pneumoniae
atgaacaacaggccagaaccggattatgaagccatcctggcagagcacgggatgccggtgaccgaagagcaggcgcgcgatgagtttaacgccatcgtgaaagaggccggcctgatcacgaacacctcgcgcatgagtccgttctggcgactcattactgccatcgtgaccgcgccggtgatgtggctcaaggatgcactggtcaacatcgtgatggccaatctctatctggccaccgcgtcgggcgtgtttctggacctgttcgcctgggcggtaaaccttgcacgcaaggatgccacggcggcgatgggcgtcattcgttttaccaaatccgatcccgaacgcgacattacggtgccggcggggacgattattcagactgagcggataaacggcagggttcaccagctcgcaacggttcaggattttacactttccgccggcacggccagcgcgcttataccggtgaccgccatcgaggaaggggcggccagtaatctggcccctgggtattttcgtatcttaccggtggccatcgacgggatcgcgagcgtggtcaacgaagaaaactggcttgtttctccgggggctgacgaggagagcgatgatgagctgcgtgatcgcacaaaaaaccagtttaatcttgtggggcagtatcacattgacgccgtttatcgcggaatgatcagcagcattgcgggtattaccaccgaccgcatctattttcagcacgatgcccctcgcggccccggtacggcaaatgtgtttttactgctcgatgctggcgtctccagtgcaccatttatcgaaacggtaaatgactacgtcatgatgcagggcaaccatggccacggggatgatgtgcttgcgctgcagctgcctgaaaccacgcacgacctgagtgtcaggatatatctgcacagccacgccctgctccgggaggatgagcttgagcggctgcgtctcgacattgccgatctcattcgctgcgcattccgtgaaaataacgactttgacgtccgtaagacatggccgttttctcgcttttctatgtcacgtctgggggaagaaatacaccagaacttcccggacgtggaatcggttgtgttcgataccggtgatattctcagcggcttgaacgtgccacgcctcggcgcgctggaggtggtgtatggagaataa

SEQ ID NO: 258781 - DNA, 2922 bp, Klebsiella pneumoniae
atggagaataaactgcctgatatcagcctgccggtctggatgaacaagggggagcctcttacgcttgcccacgcctcaaaaatatggtgggaacgcgtccgggactggctgatgtttcccctggctcagattgatgtggacacgtgcgacgagcagcttctcacactgctggcctatcagcgcgacgttgagcgttttcccggtgagtcgctgagtctgttccggttgcgtgtaaagcatgcttttgttaatgcacaggatgccggaagtctggcgggatttgcgcgcatttttgagcgtcttggtgtcggcgaggtgcagcagctcgagcgccagctgcagtacgactgggatgttattgtgctgcgtatcaatgacgagcagttatcgcgtgataacacactcctgatgcaccttgttcgccagtatggcaggacctgccgacggtattttttcgacgtactcaaccagaacacggtgcacgtccacgcggggagctttgattgcctgtcctcgtttcactgtgcccgtctgatcccccgccccacacgtattaatgtctggcctgatacgttgaggctttcacccggcgatacctgttttgtcggtgttgaggtgttgccggtggatgcgccggatttaagctggcgcgcggaaatcttcccgccgggggcggcgagtttgcaggtcgtggaggacggcctgtggataacaggcgtatcgcagggcgaggcgtccgttgtcattacggcgaacgataacggcatcaccacaacgatcccggtcagtgtggttgggcttgccggggtggtaatccgcctcgacagtctcagtcagccggtttttgtcgtgccatcgaaaaccgcggaagatgatttcaccattgactacggtgacggcgtcgacagccgggatttcactatcgcatccagcggtgaggtgtattgtacccgtccgctatctatcggaacgtataccctgcgagtgaagggtaatgtcccggtgacgttcagcagagcgctgactcccctgaacccgttgcttgaaatcgtttccctggcgggaaatcgcaccagtatgtatcgcgcttttttcgggtgcaccagtctcacacggatccatgacggggcctttgatcacctgccaaacgtgaccacgtacagccaggcctttgagggctgcactgcgctaaccgacatccctgcgaccctgttctgccgcgcccgcctggtgacggattttaacagcacgttcgccgggtgcacgagcctgacctcggttccggccgggttgtttgataacgcgccggaagtaaccagtttcaacagtgctttccgggactgcacctctctgcagacgctgccgggtgggctgcttcgccgggcgacaaaagcgacaaacatcagggtgatgttcatgagggcaaaaagcctgaaagtgatacccgatgatcttcttagcggtgcttcggcgctgacgaatgccggcagtctgttttccgggtgcgaacaacttgaagctatacctgaattgttgttccgggggttaacgcagctgaccagtctctccggggggtttagtggctgcaacgcactgaaagccattcctcctaagctgtttaaagggatgggtaaggtgacaatgctgaatgaaaccttccatgactgcacagcgctgaaggccattcccgctggtctgtttgatgactgcgtgctgacagggcaggtcagggggctgttcgatggttgccagtcgctggaagcgatcccggccggtttgtttgataactcgccggaaattacggacttctcttctgccttcaggaactgcggcgccctgcagatgctgcctgacggactgcttcgccacgcgtcgaaagccacgagtatcaaccgaatgttcctcggggcgaaaagtctgcgggtgataccgggcgatcttctgagtggagcgacgcgcgtgacggacgccgcgtacgtcttttccgggtgcagccagcttgaaagcattcctgaaacgctcttttccgggctggcgcaggtacaaaatctgagcgttgctttcagcggctgcaccgcactgaaagcaataccaccgcagctgttcagcggaatgacgaaagtcaccacgctgagcagcactttcgccggttgcagtgcccttgagaccattccggcggacctgtttgcggactgtacgtcggtggagacggtcaataacctgtttggtaactgcacggcgctggaaagcatccctgccgggttgtttgatcatacgccagaggtgacgagcttttccggcaccttcagcaataccgccattaccgccataccggcgggtctgtttgaccacgtcccggaagtgacaaacttcagtgagacattctccggtacgcctctcaggactatcccggccgggttgtttgatcatacgccaaaggtgacgctttttagctccaccttcagggataccgtcctcaccgccataccggcggggttgtttgattacaccccaggcgccataagcttcgccaggacgttcagcaacacggcccttaccaccattcccgccggactgtttgatgcaacggctaacgccagtgtgtttacttccgtgttcagtggctgcagcgcactgactcaggcaccggaagaattgtttgcccatacggcgacggcgacgacatttgaagaggcctttaaagattgtcgcgtgctggctgcggatattaatgcgctattcccgctggacagttacgcacaggtgcggtggctcgacagtgctttttacggctgttcccgtgtgacaggtagcggaagcgaatttatcggtaagttccacgcttcggtgtcacacgtccgaacactgagcggatgcacgtcactgaatgactacgccgcactcccttctggatggaaataa

SEQ ID NO: 258782 - DNA, 219 bp, Klebsiella pneumoniae
atgagaacattacgtgaactgaaaacggtaatcgggtatcagcagacagatgcctgttttctggactacctcagcatgctcagcgaagcgggtatcatcaccctgaatgagggcgatattgacggcggcactgtcagcgagacgttttatgaccagctaatcagggtctggggtattccggtggacgagaaagcagagacagaagggaaggagggataa

SEQ ID NO: 258783 - DNA, 1428 bp, Klebsiella pneumoniae
atggccacgagcatcattaccggtgctttttcgccgtggatggcagaacgtgttgcggcagggcggcctgttacccctgacaccatggtgtttgcgtatatccgcgctcaggatgaaaacgccgcgatctcgtctgatgaggggatgccttcgccagaggagattatgcaccgctgcgacatcactgcaagcgggacgcttaatgagaatgcggtggtgtattccgccgtactcgataccactgtcggagactgggattataactgggtagggctggcagacagtgagacagagacggtactcatgatcgttcactgcgccacgcaacgcaaaattcgtaccggcaatggcgtgcagggaaacagtctgatccgtaatctggtcatggagtttgccggcgctgcagagctcaccgggatcactgtgacgcctgaaagctggcaaatcgactacagcgcccgccatgcgggcggggatgaacgcgcccgcctggaaaatatcgatgtttacggcgtggcggcctttcagggggacgggtttctggtgaccgccggcgatggccatctccgtgtcgcccccgggctggggtacgtgttcgggttacgctgtgaagcgtctgaggtgcagcgactgcctgtcggcagcacacatacccgcgtctggatcgatgcctcctggcagggaacggcaaccggcgcgtggcaggtggtttacaccctgcagcaggcggagacgctggcgcactatgagcgggatggctttatgcactatgtgtttgccatcgctgaaattgatgcatccggccgcgtaacggatctgcgtcctcctttcccgcttcagcagctgcagcagcaggttgaccgtgattacctgcgcaccgatgcttttctggctgaaatcgctgaggcgggatcggaggcgcaaaagcaggcacgggatcatctcgatatcccgtcccgggaagaggtgcgggagctttgcccttatcgtaagggggatgtgctgttaacgacaaatcccctcaacccggcgcagacgtggccgggaaccgaatggctggacatgagcggagaatacgagtccaggacactgatgatcgggaaagagccgctgaaaacaggcggcagtgacgaggtcagtcttcaggaaaggcatctggctaaacacagtcacgatatcacgcagcttagaacgcgtcccgccggtgaccaccggcatcggtatgacaggtatcagaaagacgggacgagggactcgacccgcgtctcggttgataatacccgcctgggtatcgagacggcggacacggagcccgctggagaacatgagcataccctcgaaggggagctcggcagcacggggaacggtgaggcattctcggtcgtgagtcgttttgtgaccctgcgcggctggctgcgtacagcatag

SEQ ID NO: 258784 - DNA, 471 bp, Klebsiella pneumoniae
  misc_feature (376)..(385): n is a, c, g, or t
atgtggcagcgcaaaaaactcgtccttagcggagacagcgggcgtattctctgttccgtgctgtccgtgagcccgtggacacacggagcgggcatacaggaggcgtcaggtctgtacctgagccccgagaatgcggtcgggtgggtaacgggcaaactggccggcgctccctccggtctggacgtcacggccatgttattcagcgcgccgacgctgacggactttgtgagcgtgctggctgttgctgcagatatttttccggtaacccagttaacccaggtctggcgtcgcgccaaatccgcgttaagcctcagcgaaacgcggatgcagcttccggcaatggccggaggcttgccggcggcggcagcgttatccnnnnnnnnnngcgttatccgtgccgaccttgcggcaggccagcgctgcaaacgcgctgatatcggccgccggcagcacactcccggccctgagtga

SEQ ID NO: 258785 - DNA, 552 bp, Klebsiella pneumoniae
atgagtgacaggattgattttgccctcagtggacaggccatccgcatgaaaaatctggaagtgtccgtgtcgatgcgaattcaggataaagaccagtccgggcaggcatcgagcacggccagcgctcagcaggggattaaggccaaagaactcagggtgacagggcttatcccctatgacgatgaggagcagctcacgctgctgtatgcgctggctgaagctcaggacagtgccggcaacaatgcgcgctatcgcgtcaaccatgacacggcgagaaaaatcaaatttcgtgaggccaccttcagtggcgagattgcggcatcgaaagctgccgatctgctcgcctggcgggtttcattcagcctgcgcgaatatttcagcgtggcggagaaaaaagccgaaatgcgggcagggggcggaacggccgcaaaggttcagactgcgcagggcacaacgtccgccaccgatgcgccggagcaactcagctggtttgagaaggtgctcaaaaaggtggacacggccatcgggtcttatgacggaggtgagacatga

SEQ ID NO: 258786 - DNA, 1665 bp, Klebsiella pneumoniae
atgaaaacgacagtggcgttaaccattggctccgatcctgtgcacgtctcagactatcaccttatgcttgagcttggtgcctgcggtcgcgggtttgtcacggcggagacggaacgcgactgcacaggcgccctggtccgtctggatcttggtacgggagaagatgtttatcggtggtttacgggatttgttgagcgttgcggcgatgcggagcgtggctttaagcgcttatttttgcgggaactggccggcgcgttaggggtgtcatgtccggtgtcaatgcagcacccgacattacgggaggtctgcgcttctctctcggcatcaaccgacctgcggttttttgtgccggaggcccgttatgctgatagcaggatccctcacttcaagagtgccggtacggggtacgccctgctggacagtctcggcgcggccttttccgtcccggattactgctggcagcagctgcctgacggggtgatttatgtcgggagctactgcgattcgaggtttgccggggcgtcggttgagatccccgccgattttattaaaaccggcagttcaggtaacggtatgcaattggccctcataccagccatccgcccgggcgtcgtggtgaacgggcagcgcattacgcaggtggaagttgagaacggcgatatgcaggtgcgctggacgccaaaaaataaggctgggcggccagcgtgggagtcgccagaaaagcggcagattgataaagcttatcctgagttgtccgccggcctgcatttgccgcgccgcgcacgtgtcaccggtgcgcctgatgctgctgcgctgggagatgtacacgatcccttccggccacgttacgccgtaaatctgcagttgctcgatgccgacgggcgcgatgctgatatgcccgaactggttgccgtgccgctgccggtgccctttgccggaaatgagggcggtttattccagtttcccgcagagggcgccattgttgaggtggggttttctgatggccggccagataaacccatgatccggcagacgctgcaggacgggcaatcattaccggcaatccagcctggcgagcagctgcagcagcagcgcgccggcgtgagtcagcgggtcacccgggaagggagctggcaacgtgaaactgaccaggccattgaagaaagcagcgcgacccgcctggtggtaagcgacagcgaaacccggcagaccaccacgcgcaccaccacggtgaagggtaatgactccctcaccgtactgggagcggccacgctgatgtccggtgccgttctgcagctctcagatggcgattactgtgtcggcgttgcaaaccggtatgagctcagggcgaagcagctgcagcaggagatcgggaatgatgcagccctgacagtgggcggggcactgaccgaaaagataagcggtattcgcaggagcgtggcggccgcgcaggttatcagcgggcagactgtgaatattggcaacggcgagatcaatatccttgactgcctgacggatacacttgacgtcctgcaggagctcgcagaactgaccgcgcagcatacacacagcaacacgggcgcccctgtcaacgccggggagatacgcgcgaacgcgaagcgacccggtacactcacgcagaagtacaaaaaactcatcgcctga

SEQ ID NO: 258787 - DNA, 375 bp, Klebsiella pneumoniae
atggcagttattcaatacatcaccgatagccgaggccgaagggtctccgctgtagtaccaattgacctcttcgagaggttaataaacgacagcgaccttgacgaactgtacgacaccgtacaagacgatgccggcgcatctgatgaagttcgctatccaaacgaagtggttagtattctgtctgataagaactgcaccatgcaggcagcatggcgtttatacagaggaatgacccaaaaacaagtggctgatgcactcggtatcaaacaggccaccgtctctgaatttgagaaatccgagcgtccacgtaaggacaatatcgagagactggcaaagctctacaactgcgccccagagcaattaatcctcgaataa

SEQ ID NO: 258788 - DNA, 264 bp, Klebsiella pneumoniae
atgacccagatatcctggactggtagagccgttaaggatctacgcaagttgccatctgctgaccaaaaggcgatacgaaaaaaagttgacgccatgcagtcataccctgatatagcttcacttgatgtcaaaaaactgacagacaggggcgggcaatacagactgaaggttcagaactaccgcgtcatcttcgggtttataaacggggagccgctggttattgaaattcagcgcgtactacgtcgtaccactactacctactaa

SEQ ID NO: 258789 - DNA, 888 bp, Klebsiella pneumoniae
gtggccaaatatcagatatttgcagatgaagcttggactcacagcactccccccccaaaccggtatcattgcttttttggtgggattttaggatctgagtctgatgttgatagattacagacagcccttacgaaaattaaattgagacacaacataacccaagaggtcaaatggtcgaatgtgtctttaaaaaataaagactattataaagaattaattgactgtttaaagtttcatattttaaatcatgatattaaatatcgtcagatgtttcgtgacagagcttatcatcatgatgctgaacctgacgaaaccgaactggatatacaattcaagctttattatcaatacataaaaaatatgtttggttgtaaacatattcctgtagacgccaacggcagcagtattcttgtcagacttgatgggcattcaagcgaaaagcataaaactaggctgaaagattttcttgaaaatttgccaagaatgtggagtcgacctgacatcacgctcaacgttacatatgaaaatagtgcaaattctattcgcttgcaggtgtgcgatctcatgatgggggctgctggatactatggtaataaattccatttgcgtaggccaaatggaaaaaggggaatgactgccaagcaaaagttaaaattagaaatggctaagtatatctacgaaacgataaaatatattgatgcacaaacaagagggtctaaagcctttaattggttcgaatcaactggtattagtggtgattcgacaaatcattttgcccataaacttcgcatttggaaatttattccttctgtgcatcgaattaataaaggttggcagaatgataacttagataaagaaggtcgatttgttaaggatctatttgagtga

SEQ ID NO: 258790 - DNA, 756 bp, Klebsiella pneumoniae
atggatagcttacccgaaacgctacgcgatgatttagaacgcgctctagccttacagaacacccttttagatagagcgacaggcaagggcgatgatgagtttgcttataaacaacttcgccattacttcattaacttgacctccatttctgacctccttccccaattcattcggacatgccgatcacttagccagttttggcaacatataaaaaaaatagaaggctatgcccaaagacgggaggcgatatgggctgagtttcagcctcttttagatcatctagaagaaaaaaacacatttcctgccgatacatttattactgaaggactgagaagctatgatgaagcaggggtgaatgaagcatggtctaaagcattagacaggcgactaacagatccggaaggcgctattacctcatcacggacattattagagactgtatgtaaacatattctggatgatattaacgtttcatatgacagaaattttgatatgagtgaactgtacaaactcgtagcaaaagagctaaaacttgctccagaccagcattcagaacaaatatttaaacaaattcttaaaggttgttcttctgtagttaatggactaggaactttgcgaaatagatttggagattctcatgggcagggtaagaaaccagttaagccatctgatcgccatgcgcttttagctgtgaatctagctggtagcgtttctattttcttaatccaaacatggaacaacatgagaaaaaattaa

SEQ ID NO: 258791 - DNA, 480 bp, Klebsiella pneumoniae; identical to SEQ ID NO: 181378

SEQ ID NO: 258792 - DNA, 183 bp, Klebsiella pneumoniae; identical to SEQ ID NO: 181380

SEQ ID NO: 258793 - DNA, 648 bp, Klebsiella pneumoniae
gtgaacccgctggccctggagtgcaacgacggctggctcaatgatattcaggcgctggccatcagtgaggcgatggcgcaggaagcattgcatacagccgcagcgcacttttcccgcggcagcgttggcgcaggacgcgggatgagctgttttaatctgaagggcgggatcggcacggcctcgcgtgttattccgtcgctcaatgccacgctgggagtgctggtgctggcgaattttggcgcgctcagcgcgctcacgcttgacggtgtgcgactcggtgaagtgattgcaccgctgctggcaggagaggcaccgcaacgtgatgccggttctgtcatcatcgtgatggcgacggatgcgccgctggatgcgcgtcagttgaagcgtatcgcgaagcgtgccggtgccggcctcgggcggctgggcagctactggggccacggctcgggcgatatcgccgtagcgttttcaacgcaaccgctgccgcaaccgccgcaggacgccatgctggagccgctgcttgccgccgcggcagatgccaccgaacaggctgtactcgatgccttgttgagcgcagagcctgttaccggctttcggggtcaccatcgcccctcactgactcagattctggacaggttaaccacatga

SEQ ID NO: 258794 - DNA, 2121 bp, Klebsiella pneumoniae
atgtctatagtcataaaaaaaaatgttgcaacagatgctgatgagatcgatttaggtcgcttgatcggtgaaataattgatcataaaaaactaattatttcaatcacggcattgttcactttattagctttagtttatgcattatttgcaactccgatatatcaagctgatgcattaattcaggtagagcagaaacaaggcaacgcgattttaaataatttaagccagatgcttcctaatagccaaccaatgtctgctcctgaaatcgcacttttacagtcacgtatggttgtgggtaaaactgtggatgatttgaatctacaggcgaatgtagagcaggactattttcctttatttggtaaaggtatggcccgtttgatgggagagaaatcaggttctgtagttgttacgaggctgtaccttcctgaaattgacgatattgaacctgaattgaaacttttggtaaaagataatcgacattatagtattaaatataatggccaagaaatagagggcaagacgggtgaattactgagtagtatgggattatctttaaaaatagagcatattgatgctgagcctggtactgagtttacaataagctacactagtagattaaaagcaattacatcattacaagatttattttcagtagtagatcaaggtaaagatactggaatgctaacactttcaataacgggtgaaaatccagagttaattaaagaaattgttgatagcatagctaataattatctagcgcaaaatattgcgcgacaagctgcacaggatgagaaaagccttaatttcctcaatcttcagttaccaaaggtgcgtgccgatctagatgttgccgaagacaaactaaatcagtatcgacgtcaaaatgactcggtagatttgtcattagaagctaagtcagttttagaacaaatagtaaacgtagataatcaattaaatgaattgacttttcgagagtcagaaatatctcagctttatacgaaagaacatccaacttataaagcgttaatggaaaagaggaaaactttaatagatgagaaagagaaattaaatcaacgagtctcatctatgcctaaaacgcaacaagaaatattgcgtttaaatagagatgtagaatctgggcaagcggtttatatgcaacttttgaaccggcagcaggaattaaatattgccaaatcaagtgcaattggtaatgtaagaataattgattcagctgtaactgagactaaaccagttaaaccgaaaaatataggattagttctctttcgtgtcttcttaaggcgtggtatcgatagccctgaacaactagaagaaataggcattaatgtttatgcaagcattcctgtatcagaggatttttctaaaaatatagctcataaagcgaattggaaaaaaaataaggggaatgaatatagtggttttcttgcaatagataacccagctgatctggctattgaagctattcgtggtttaaggacgagtttacattttgccatgatggaagctaggaataatgtactgatgatatcaggcgctagtcctaatgctggaaagacatttgtaagtacaaacttagcagcagtaattgcacaaactgggaaaaaagtattacttatcgacactgatatgagaaaaggatacactcataaattgttcaatgtgggtaatgataacggcttgtcggattttctttcaggaaaaaatgatatagaaaaatcaataaagaaaatttcccctatcgggtttgattttatatcacgtggtattgttcctccaaacccagcagagcttttaatgcatagacggttcggtgaattaatttcttgggcaagcaataattatgacattattgtacttgatacacctccgattttagctgttactgatgctgcgatcataggacattatgctggtactactcttctgattgcgcgtttcgagcaaaatacagttaaagagcttgaggtaagttttaaacgcttcgaacaaagtggtgttattgtgaaaggttgtattcttaacggggttgttaagaaagcaagtagttactacgggtatggatatagtcattatggttattcatacaaagatgaaaaatcgtaa

SEQ ID NO: 258795 - DNA, 849 bp, Klebsiella pneumoniae
atgcatatgttgcctgcgaccaaggctatcccaaaagagatgctgccgatcgtcgacaagccaatggtgcaatatattgttgatgaaatcgtagctgctggtatcaaggagatcgtactggtcactcactcctcgaagaacgccgtggaaaaccattttgacacctcatatgagcttgaagctttgcttgagcagcgcgtaaaacgccagctgctggctgaggttcaggctatctgccctccaggcgtaaccattatgaacgtgcgtcagggccaacagcttggattaggccactcaattctttgtgcacgtccggtcattggcgacaatccgtttgtggttgtgctgccggatatcatcctcgatgacgccagcgctgacccgctgcgctataaccttgcggctatggtggcgcgcttcaacgaaactggtcgtagccaggtcctggccaaacgcatggaaggtgacctctctgaatactccgtgatccagaccaaagatgcgctggaatctgccgggcaggttgcgcgtatcgttgagttcatcgaaaaacctgatgaacctcagacgctggattccgatctgatggcggttggtcgctatgtgctttctgcggatgtatggtctgagctggaacataccgagccaggcgcgtggggccgtatccaattaaccgatgctatcgcagagctggcgaaaaaacagtcggttgatgccatgctaatgactggcgaaagctatgactgcggtaaaaaaatgggttatatgcaggcctttgtaaactacgggctgcgtaaccataaagaagggacgaagttccgcgagagtattaaaaaactgttagcgtaa

SEQ ID NO: 258796 - DNA, 177 bp, Klebsiella pneumoniae
atgtttactacggatagcgtcccagtcaggcttcagcgctactggcgcagttattttaaccccgccaaactctcccaaaaaaaattcttctttatgcttactcaactccggcgctttacggtttgcatagcgctggataccagcgataagttcagaggtgtaaaagcgattcaatga

SEQ ID NO: 258797 - DNA, 420 bp, Klebsiella pneumoniae
atggccgcctcggtggtggccatttcccatgatcactacctgaacatccgccagcacggcgcggtggaaagcccgcagctgcaggccgatgccggcctgctgtgcatcgccatcgctaatctgctggataacgccgtcaagtattcgccccccggtgaaatcgccatcgatattcattccgatgccgggcaaacggagctacgcattcgcgaccacggcccgggactccccgccggacaggcggaactgatctttgagcgctaccgccgcggcgagcacacatcgccggtgccaggcggcaccggtctcggactgtatgttgcgcgtcagatagtgcaggctcatgatggcaaactgtggctggccgagcatggcccggacggctgcacctttattctcaccctccccacggttgcttaa

SEQ ID NO: 258798 - DNA, 1095 bp, Klebsiella pneumoniae
atggggggggataatataatatttaagagagtctcaaagaatcagttatctggtatttttttaatgaaagcatcaacgcttcttcgcggtggaggttatacttttatagcttttttcattattttatatttttatttttttattgatggtgatgcatggatatatgttctctctgtggcggtctcttatttttttgcttctattgatgtgttttcaatatataataacgcaatccttgaatcaaggctaaatactatttctaatgtaattggtttatgcattggtcttggttttagatattttattgctctatatgaaatgaatccatattacctttctgtccctattatattaaccacgcttatcccgttcattatacgaaagtattttttttatgttaaaggtgtcggaaagagggttgttgttaatagaaaaaagataaaaacatattcacgttatatgttagttactggtgtcggaatagtcgcatctagtatatctgttgctgtttatagcagaataaatcagtttaccttaggagcgatagagacggtagcatctgttggtgtatactcagtagctgtgacattaggtacatcatggggatttatatctcaagcattaataacttctttctttagtagaatatactcagagccggacgactctgttgccattaaaattactgctaggttaaatcggttaatttttattgtttctatcttcttcttgatttttattgtttccttggggcacggaattttaattatcctttatggcgacgcctatgcatcagcatattatcccatggttttgttgtgtattgggtctttattctcggctttaggtactgtttcatatagatatattgttaggctatctggttattattatttatctaaaaagatgttatgcttgcttttttttagcattccactatcatatgttcttattctattctatggcattataggagcagcattgtcttttgttattgtagagtttttatcacttaccgtaatgaattatttttttaataatggcattatttgggagttacataaaattaccttttttaaatggcggaaagtatga

SEQ ID NO: 258799 - DNA, 540 bp, Klebsiella pneumoniae
atggttaagatcgttgatacagtacaaactgaggatgaaattactgagattattaattctgccaaacagtggatgtctattgatttttcaaatggaatgggagagcgacactactcggctatacaaaaaaacattctaatggaagaacgtataggtaaagatggagaattcttggttgactataaaatacatctctttaggcatagagataattcttttttttatgttttgcaaattatcgatgaccgttttgttggtgatttaaatcgaacattttatatcaataattttgatgacttgttttcaggtaatcatatcttggattttaattccaagtttaagttagaaaaagcattatcgctgagtaaaatcttaattgatgatttggaatatgctagaattgattggtatattgtggaaggtcagatttattttggagagataacattaacacctgcagcaggcatcggtaaaggatatggacatgaacttgacctgctaatgggggaaaagtgggatcttaatttagcgccacgctag

SEQ ID NO: 258800 - DNA, 267 bp, Klebsiella pneumoniae
atgacaaagaactatgttgaaagacaagatgccgaaccatggtataatataagaaccgtctttaattttatgtttcgtcgattcttccgtatcgctccgttatattatgtgctgttattaattgcaatttattttgtccccgctcttggtgagttaagagaaattatagggcaaagcgatcttattaccagaactaatataaataagtacaatgatcagtctatgtttaattttttttggtgcatatatccttattgtttggtataa

SEQ ID NO: 258801 - DNA, 285 bp, Klebsiella pneumoniae; identical to SEQ ID NO: 225070

SEQ ID NO: 258802 - DNA, 1218 bp, Klebsiella pneumoniae
atggatcagactgttcagcgcccgccggtccttattcagatgggtgatcaccagcgtctgcgactgtgcctccggggtccgtccggtatagtccttcaccagcgcctcgtagagcgacgcgggctgaccttccggcagggttttcccctcgctcagcgccttttctatcgccttttcctgctttggcgtgaattccaccacagaactgcccggcgcccagacgccttcttttctcggcacctgttccggcgtgacctgctcaatggtggtcagggcgcggtgcacatcccgctcaatcaggctgtagaccgccggtcgcagctcaggcacctggcgcacaatctctttcatgatggcaacgtcggcggcgctgcgctgctgcatcagcctgaacggctggcccggcgcgatgggctgcagctggtcgttatccccgctggacaccgcccgtccaccgccggcgacgatgagggagtgggcttttgccatatcggccagccccaccatcgagctctcgtcgagcagaaacagggtgttgctgaaatcgggtgtctggccattgcgctgcagcagctgagtgtcgtggaggaacgacgccgtcgtgcgcgcctccacgccggcactctgcatttccccgaccgcgcgatgcgtcggcgccagaccgatgacgcgcggacgggtctcttccggcagcagactgatggcactcatgactgcccggaactgggtggttttccccaccccggcatacccctgaaccaccgtgaaccgatccgtgctttccagaatcatccgggtcgccgcccgctgtccggcggtcaggtccgtcatcagactgtccggcacgcggtccatcaggggggccaccgcacctttaccttccagcacgtgggtcaggatgcttttttcggcgtcccaggtctgacgggaaatcagcaggtcattgccgtagccgtgcgccaccggtacattcagcaactgccccgacctgatttgtgcctggatggtcgtgtcgatgtccgccatcgaaaccttcccgcccccggtttccagcgccgtcgccagcagctggggccgggagaaggtcagtttctcactttcaagcagcgggatggccaggtgaatggcctgttctgccggggtacgcagtccggccttctgctgcgcaatggccgcatccaggtccgtctcgccggatcgggtcttcagctgctctga

SEQ ID NO: 258803 - DNA, 171 bp, Klebsiella pneumoniae; identical to SEQ ID NO: 138617

SEQ ID NO: 258804 - DNA, 2280 bp, Klebsiella pneumoniae
gtggatccgccgtgctgcaagacgctgcatatcagtctgtttttcgatggtaccggcaataacttaaatcatgacttttttatcgcgaacccgaaacatccgaccaatatcgcccggctgtttcgggcgactattggaacgggtacggctggcggggtgccgtctgacggtcagagtgagctgtttgatgatgacgccgagggggacgggaaatattttaaattctatatgcctggcgttggcacccccttcccggaagtgaatgacccggactattccaccatgggtctggtgggggcagttaagggggaggatcggattaactgggcgctgctgcggataatcgatgtgctgatgtttagtgccaccaaaaaatggctgaccaccacagagagtcgtcgttcactgaaagaaatgagcaccagctggaaccggctgtggtttggcggcagccataaccgctatgaagagttcactcgtttgctgaatgatttggcctctgatttgaagcccctgattattcagcctgagccgggcaagccgaaactgacaggcatcaagctgtatgtctatggtttttcccgcggcgcggcagcggcgcgcacctttgtgcgctggctgagcgaactgctgccccctccggcggcggaaggtgaaaaaccgccgcagtgcctgcagacaggcgggatgcagctgcccgtcagcgtggagtttctcgggctgctggatacggtggcctccgtcggggtggcgcatgtggtgccggttgccgacgggcatatgtcctgggcagacggcacgatggagctgccggatgatgaaacctatggcgggctgataaaaaaatgtgttcatctggtctccgggcatgagcagcgtctctgctttccgctggactctgtgcgccgggcaaacggcaaatacccgccctgtgccactgaggtggtttacccggggatgcactcggatattggtggaggatatccaccgggggatcaggggaaagcgaatggtgaggatgacagcttattgctatctcagatagttttgcatgatttgtatgcttcagcgtttttggcaggtgctccattaaaaataccaatgattgtaattccagaaggtaaattggtagatgtatggcggataatgccaattgaacttgaagagttatttctcatttcaattgaattgatcaaacgcttcaatgcctggcgcgaactcactctgggccaaaccacgccgaaaacgttcgatccagaagcagcctctcactacgaaccacctgccgccggcggcagtctggaaaccgtcattgctgagcagatggcctggatcaccgcctggcgcatcgaccgctatgccagaggctcgatgctgaaaatgcccttctatcagcgcgccaagaataccgaagcgctgcctgccgcgcggaaggcggcagaagtgattcgtgataaagaacaggagaaggtgctcagtgctcgccagaaccagatagcaaaccagcctcctgacaggatggatgagctggttctgcagccgggcgtgaaggattttgacccaaagatggatcaaacccagctgttcgacgcggcgaaggagttcggaaaggattaccacgacggttaccgtatcccggataacctggcgcagctggtgctggataccgtgctgcagccggtgattttcattctgaataccgatgatgaagcgcaggaataccggcgcatgaagcgtgacggagaggcccgggtggccgtcctctttcccgatgccggggaagccagcaacgcggagcagcctgccgggctggtgagggcgctgtttgatgatcaggtgcatgactcacgcgcctggtttatgtatgccgcgctcggcacgcgcgagatgtggaccggctacttccgctaccggatgatttacttcagcgagcgctgcagtaaaccgctctcgccgctggtgctcgccggagacctggtgggttttgcgaccgtgaccgcgggtgtcgtgctcagtttccggcaaaagcgcctgaccggcaagctggccgggctggctgcgacaggcgccgtgcgctcgctggaggtggcggtgctggacaagataaccggggaagcgctgccggagctgcccggaggggcgcagctgcgggcatttacccacgagccgggaaccgttgtcgcacagcaaaaggtgcggaaagcggaagagcagctggcgcgggggcaagccgcgctgccggccagctggctggaggacgttctgacgacaacggtctga

SEQ ID NO: 258805 - DNA, 441 bp, Klebsiella pneumoniae
atggaaaatcattacgaatacctgaaacttgacatgtctgcttcaatcgatgaaatcagagatgctattgagctaaacaaaaataatgatgaagctagaataaggaagataaaatcaatcttacttaatgagcgattcaaaagtgaatatgatgagaaattaatatcatacttgataaataatggtgactcatcaagaaaagcagatgaaaaaaaacaaagtttatacattgaacagataaaaaacttagataatggggagttgcataactcatacatatacgccgcgtttttcctgttggttttaaacttctctttatcattagtggttagcacacaagtagactatgtaattagtttcatagtgaacatattgaccatttttgtgctttataaagactggaaaatattagaaaaaaaacaaccttgctgtattttctaa

SEQ ID NO: 258806 - DNA, 894 bp, Klebsiella pneumoniae
ttgcataacgccgcactcggactttttaacgaccgactcccgcacaagccgtacttctcggacgatctgcacttcggtgtgcgtatcgcagggaaagaacgcgcactcttggcaaagtacatccagtttaatcagccgcatgccatgttctggctgggcttcgacgtcgatcgcgccggtgcggccatcgactggagtgaccggaacgcgcccgcgcccacgctgaccatcaccaacccggaaaacgggcacgcgcacctgctatacgcactggaaacctcgatacgtactgcgccggacggcagaatgaaacctctgaagtatgcagctgccgtggaaaacgcgctgcgtaaaaaactggatgctgatacagggtattctggcctgctctgcaagaatccgaaccacggtcactggaaaattgccgtttggcagccagaactctacacgctggactggcttgctgatttcctcgatctgaacgcggcaaacaacaaagagatcgttgccgactatggcttaggccgcaactgcactctgttcgataaaacacggaagtgggcttatcgcgctatccgtcagggctggcctgaatatgaccagtggctgcaagcttgctatgaacgtgccagtgcttacaacctgcaattttcatcgcctctggatgataatgaggtgattggcatagctaaaagtattgcgaaatggactcgtgctaattttagtgaaggtactttcagtgattatgtttttcgtacgcattcatctgaaatacaaagcctccgagggaggaaaagcaaaggtggggggaggccgtcattaaatgaagtgtgggttgatttgggtgttagcagaagaacatatttcagaatgaagtcaaaactaaaaggttag

SEQ ID NO: 258807 - DNA, 1044 bp, Klebsiella pneumoniae
atgaatccggccagtaagaaaaatattcttgtcctggcggccctgggggctgccgccctggcggcagcgagctacggcgcttactggtggcataccgggcgctttatgcagaccaccgatgatgcctatgtcggcggcgacattagcgccatctccagcaaagtctccggctatatccagcagctggcggtgcaggacaatatggcggtgaaaaaaggtgacctgttgatccgcattgacgaccgcgattatcgcgccgccctcgcgaaagccgccggagaagtggcggcgcagcaggccgcgctggccgatatccaggctacccgccagcttcagcaggcgaccattgccggctctgcggcctcgttactggccgccacggcggcaaccgaaaaactggctaacgacaaccgacgctataacgccctggccgcgtcgagcgcgatttccgcacagatccgcgataacgcctccgccgattatcgccgggcgcacgccgagcaggagaaggccaaagcggataaaaccgtggccgaacgtcagctggcggtgctggatgctcgccagcagcaaatcctggctgccctggcgcaggcccaggctaacctcgagatggccaggctgaacctcagctataccgacattcgcgcaccgttcgatggggtgattggcaaccgccgcgcgtggtccggctccttcgtcagcagcggtacgcagctgctctccctggtacccgcgcacggcctgtggattgacgctaacttcaaggaaaaccagctggcgcatatgcgtgccggccagccggtgaccatcgtcgccgatgtgctgccgaaccatacctttaaggggcatgtcgccagcctggcgccggcgaccggctcacgcttcagcattctgccggcggagaacgcgaccgggaatttcactaaaatcgtgcagcgggtgccggtccgcattgcgctggaaggtgacggggcaaagcttgacgtcctgcgcccgggactgtcggtgatcgtcaccgtgaacgaaaagagccctcgatga

SEQ ID NO: 258808 - DNA, 981 bp, Klebsiella pneumoniae
gtgaacagatctatttattttgatttatgtgagaaaaggcttacgttgctatgctatagcgttgaattaagagggaagttaaatattcttaactataatcttcattgtgaagatttttatgttcacttctttaatttattatttggatattccctaaagaatactaatcaagagaagcataattttgagggtatcgatcttatcgatgagaatgggaagatagtattacaggtttcatcaactgcaactaaaacaaaaattgattcagccttgaacaaagacttaagattatataaaggccatcagtttaaatttatatcaattgcaaaagatgctagtgatttaagaaataaaacttacactaatcctcatgctttggtttttataccgcagcaagatattcatgatgtaaaatcgatacttaatgttatttcacatcttgacataacaaaacagaaagaaatacacggttttctaaaaaatgagttacaagaggaatctgataatgttttaatcgaaacaaatattgctgctgttataaatatattagctaaggaggatttttctaatgttgaaactactgacttcccgcaaccattcgatgtaactgacaagattacatttaataatttgaatgcagctgaatatattattgaagattacaaaatccatcatggaaaagtatcccgcatttattcagagttcaaccagatgggtaaaaactcaagcctttcagttttgtcttcctttagaactatcttcgtaaaattgagtacacaatacactggagatgagctattttttaaaataattgacagctctgttgaaatggtcagaaaaagtgcaaattttacacaaataccattagaggaactggagctttgtgttagtatacttgcagtggacgcgttcatacgctgtaaaatttttagggaccctaacggagtgaatgatgttgttaccaaaggacattcatcctaa

SEQ ID NO: 258809 - DNA, 249 bp, Klebsiella pneumoniae; identical to SEQ ID NO: 18105

SEQ ID NO: 258810 - DNA, 321 bp, Klebsiella pneumoniae; identical to SEQ ID NO: 196510

SEQ ID NO: 258811 - DNA, 312 bp, Klebsiella pneumoniae
atgaatattgtcggagttaccgcctgtacggtggggattgcacacacctatattgctcaaaagaaaattgaaacagccgccaaaaaagccggtcataacgttaaaatcgagacccaagggaccatcggcattgagaatcagttaaccgctaatgagattgccatggcagatattgttctgcttgcggcggatgttaaagtgacgggagaagaacggtttgcgggtaagaaagtggtcaaagtcgccacggaaacggcagtgaaatcccctaataaactgattgaaaaactcagtgaaatagtcaattcataa

SEQ ID NO: 258812 - DNA, 582 bp, Klebsiella pneumoniae
atgtctctaaaacaaatatggcaagcagcaaatcctaaaggacatctgctgaccgctatctcatttctgatccccattgtctgtggtgctgggtttattattgccatcggcatggggcttggtggaacggtgcaggacacgttaacgccggggcaatttgatttatggcaggcgatggccactctgggcgctaaggcgcttgggctgttgccggtggtcattgcggtgggtatttccggctcgattgctggcaagccgggcatcgcaccaggatttgtcgtcgggctggcggcgaacaccatcagcgcaggctttatcggcgggatgatcggtggctacattgccggctatatcgcgctggcgatcatcaaaaacgtcaaggtgcctgactgggctcgcggtttgatgccaacgttgatcgtgcccttttttgcctccattatcagttgcctgattatggtctatatcattggtacgcctatcggtatctttacggaagcgctgacatctttcctgagaagtatgggcacgtcatcgaatcttgtgttgggcgcagtgaataggcgctctgtgtattgttga

SEQ ID NO: 258813 - DNA, 324 bp, Klebsiella pneumoniae
atggggattgttaatatcgttgaaggctctatcccgatcgtcatgaacgatatcgtccgcggtatcgccgccgcggccatcggtggcgcgtgcggtggcgcagtcaccatggtgtatggtgcggatgccacggtgccttttggtggggtactgatgatccccaccatgtcacacccgatggctggcattatggccctgctggtgaatattgttgttaccgccacggtttatgctgtcatcaaaaaagatattccgcgtgatgtgctggttactcatgatcacgaagaagaggatatcgaccttaatgatattaaagtgagctaa

SEQ ID NO: 258814 - DNA, 645 bp, Klebsiella pneumoniae
  misc_feature (8)..(17): n is a, c, g, or t
gtgaaagnnnnnnnnnnaagaacgcttacgccgccgctgcgttgctactggcagggaacggagctcgcctggcaggcgtttcgtgcacagatgaccctcactgttgcgcagatgacactaccctcacgcccgcatgcctggcgtggggaggccagcctcgcggagatagcacacactctggcggaagctgccccccatgacactgtgcttatcgccggatgtcaggtggttgtcgcccagccgggggccgtgcaacccgccggagagtctgcggtactgtggctcgccggacggggcggtccggtgcacctgaccaggggggaaacctattgcgcagaaaaaggggaggccctgactgctgtagccgctcgtgtgctggtgcagaacgaactgagcggccccccggaagcctgtgcgctgttttttcagccgggactggaagcgctggcgcacagcggttgggatatcaacctgtatcgccaggatgcctgttggggagacatcggcgagatggaaggcttgaccgttctgtcgctggcggcgatctacgccgcgcactaccaacaaccgtgtggctggctagcccgcgatcccttgaataccctcgcaattggaattgtaaaacctgatggacaacgtcaataa

SEQ ID NO: 258815 - DNA, 780 bp, Klebsiella pneumoniae
atgaccagacaatggattgaggaggtcgccggaacctgtcgggctttcggaacggattatctgcatgtcattatcgatcaggcgggggtggatttttccgttattccggcgctgaattcgctgtcagttgagtggcagtcgctttttcatggacttccggaagcatttattgtcgatgatgctccgctggtggcgcgctttacgcttgatgatcttgagcaaatgcgctggttacaggatatcagccagcaacttgccatccaggcgccgctgctcctgttctgcacatattggcccttttcggcgctagcgaactggctcacgcagtgtatggatattctgcaggaagggcgcagcggaattttacgcttttacgatacccgggtatttccgctgttgtttacgcacattctcagtgacgagcagcaagagccattgatgcgtccggccctgttttgggcgtggcaggatcttgacggccaggcgaaaggcatcaagggcagtggtctcccgccggaacgcgatgaaaaggcgccaaaaatagaactcagcgatcgccagcttgagcatctgatgtgtatcagcgatgtcatcgtcatgttgtcgcactgtgctccgcctgcgggcatgtttgactcaagacagtcactgttttcggcctgttaccagggcatggtggaggcgacacgccagggtcttcttctggatgacgctcgtgaagactgggtaatgaagaagtggcttgccgacgtaaaaaccagtgagagactttcagaatga

SEQ ID NO: 258816 - DNA, 1335 bp, Klebsiella pneumoniae
gtgatcaccttttacgtgtgggcgcgtctgcagcgggatggtgaaaccggtctggcggagggcgttacgctactggcggcaatgcttgagcggtttggggctatgctccatccccagcgtgaacgtagctgtaaatcagcgctggaatggcttggcagtcgccggatgtcggacagtctgtctctttatccggaagtcgacatgaccactatgcaggtcattatcggggcgttattgctggcggaagccactttttccggcttggctgaagcatctcgccccgatctttccgggctatatcagatactggagaaccgcctggtgcaaagcggcggagcccacagtctggtgccgcagaccagccgcgaagaacacgatctgctaccccaacatacggacaccgcaccggtaatgcataccgtcacgtcaggtcgtgatttgctcgatcaggctaaggtgctggcgaaatatctgcgcgagtgtcccggcggatggctggcaggtcatcatctgatgaagagtgtgcgttgggatacgttaacggagttaccgccgctggatgcctccggccggacacggctattgcctcccaagcctgagagtaaagcccatcttaagcgtttgtatttacagaaaagctggtcggaactgctggagcatacggacacgctgttggcgcaaggcgtcaaccatctgtggctggatgtgcagtggtacgcctggcaggcgctgctgaaactggatgctgacagtgtacgggccgatatcctgtgccgggatatgaaagggctattggctcgtctgccggggctggaaaccctggcgtttaacgatggtacgccattcgccgatgaagtgacgctcaactggcttaacgaacgtgtcctggatgagatggccggatggcaagatgagccggtaatggcggcgaccagcgctgatgaggtgctgtcgctggagccagaagtgctcacccgcgcggacgatgaaggtattgagtcggcgctgaactggttacaggcgcagccgggctataccaccagccgcaatcggtggctgatgcgcttactgatggcgcgggtcagcgagcagtacggaaaaaatgaaatggcgctgcatctgctggcggaactcgacagccgcgcccgggaaatgacgctcgaacaatggaagccggagcttatctttgaggtcaaagcccgccgactccggctgctcagaggcaaggccgggcgcagtgaggcagaaaaaaatcgcttgctgccagaaatggagtcattgcttgccgggctcatcgctctggatcctgctcgcgccgcggtgctgtgcgcataa

SEQ ID NO: 258817 - DNA, 153 bp, Klebsiella pneumoniae
atgcaggaagatgagttcttcaactcccgcgtcgtgcgcgacctggatgccttcaaacaagaggcagatgtgatcatttccaatcgtatggcggaagaacttgctgatgtcgcggataaggtttatacccgcgatctgtttggtaatgattaa

SEQ ID NO: 258818 - DNA, 174 bp, Klebsiella pneumoniae
gtgctgaatgcgtgtcagaataaaactgacaggcgcagccagtggttgcagggggtgtcggagagacgaaaccggaacatcgcgacggtggcgctggcgaacaagaatgcccgtatagcatgggcgctgctgagtcgtgaagaggattaccatgggatacaggtcaccggttaa

SEQ ID NO: 258819 - DNA, 756 bp, Klebsiella pneumoniae
  misc_feature (576)..(585): n is a, c, g, or t
atgaatattaaacgtattggtctcgacctggcaaaaaatgtcttccagatacatgccgtggatcaccgtgagcatgttgtccttcgtaaaaccctgcgccgtgaccgcatggcggcctttttcacccaactctcaccgtgccttatcggtattgaagcctgtggctctgcccactactgggcccgggagctgacccgtatggggcataccgtacgcattatcccgccccggctggttaagccttatcttaaaggccagaagaatgatgccaacgatgccgaagctatctgcgaggctgtcagccgccccgggatgcgcttcgtggcgatcagaacggaaaggcagcagacgctgcaggcggagcaccgcgtccgggccagactcatccgtgcccggacagccctgagcaatgagatacggggtctgctgggggagttcggtgtggtgttgccagcgggaatagcgcaactgcgtaaggcgctaccggagatagtgtcgcagcaggtgcagtgggatgagtgttttattcgtctgctgtgcgaactgtcagaagagctgcagggactggatgagcgnnnnnnnnnngtccatatatggccagtgccctggtggctgcagtgggtgatggcagacagttcaggagcggccgggaaatggcggcttatctggggctggttccgcggcagcactcaagcggaggaaaggcgcgactgggccatatcagcaagcggggggaccgctacgtgcggacgctga

SEQ ID NO: 258820 - DNA, 423 bp, Klebsiella pneumoniae
atgtacaacggcgtgtccatgaacttgtttttgcgcgtaccgtgtctgtgcatagggatgttgcagtccccacataacggcacctggaccgttaccggctcagcaactatcacaaggcacttgccttcgtggcgcatatcgaccggcttgatgcctggcagattcagcaggtcgagcatcggcttaatccatacccagatcgatgtctttgccttcacgcagcaggtcatacaccatatcaaccaatgcggtcatgccctgacggtcagacttgagcacctgggttgccagcttctgatgactggacaaagcacgaacaaccgcttgctgcacagcaccggggaggttgcctttcatagcctgctcacgggtgttgctttccacctgagccatgacgacatcgctttcaccggtaatcgctga

SEQ ID NO: 258821 - DNA, 735 bp, Klebsiella pneumoniae
atgagccagaatatttatgacgacccgcagttttttgccggctatgcgaccctcgatcgctcggtgaaggggctggaaggcgcaccggagtggccttccctgcaggcaatgttgccgccgataaccggtttgcgggtggtggatctcggctgcggctacggctggttttgccgctgggcacagcagcagggagccagccagataaccggttttgatatctcccagcggatgctggcgcaggcgcgggagatgacccgcggggatgagattgtctaccgctacgccgatctgcaaaccctgacgctgcccgccaacagctgcgatctggtctacagctcgctggcgctgcattatttaccggacattgccccgctcttcgccaccctgcagcaggcgctggttcccggcggcaccctggtcttttccgccgaacatcccatctataccgcccccttgcagcagggctggcgggtggatgagcaggggcaaaaaagctggccggtcagtcactatcagcaggagggtgagcgcgtcagcaactggtttgccgagggcgtcatcaagcaacatcgcaagctctcaagctggataaacgcgcttatcgccgcgggttttgtgctggagcagttggatgagtggggtccgagcgccgaacagattgtccaacagcccgccctggatgaagagaaagaacgtccgatgatctttttactgcgcgcgcgtaaaccgggctaa

SEQ ID NO: 258822 - DNA, 585 bp, Klebsiella pneumoniae; identical to SEQ ID NO: 241388

SEQ ID NO: 258823 - DNA, 351 bp, Klebsiella pneumoniae
ttgcgttttgaacacgaagttatgcctactgataattatcaaggagttgctgtcgttaactatactgagtacgagattccctatactagaattattgagcataaacattttgagtatgtgaattgcgaccatactgtcatctcaaaagagtaccctttagagtgggacaaaggttgcgagccgtattatccaattaataacagtaaaaatatggatatatttaaaaaatatcgagagttagctaagaaagaaaaaaatgttatatttggagggcgactggctgagtataaatattatgatatgcaccaggtgatttcctcggcactgaatgccgtgtctaagcttgtttaa

SEQ ID NO: 258824 - DNA, 354 bp, Klebsiella pneumoniae
gtggccaccggttcgacggtgcatgaggtggtggaggcggcgcagcagcttgccgacctcggtatccaggcgaaagtggtcagcgtgccgtcgattcgcccctgcgataccgcggcgctgctggcggcgctccagccatgtggctcggtgatcaccgtcgaagagcataacgtcaacggcgggttgggcagcctggtggcggaagtgctggcggaagcgggcgtgggcattgccctgcagcggttggggatcccggacggggagtacgccgccgccgccgatcgcggctggatgcgtcagtaccatgggtttgatgccgccgccatcgttgccctggtgcaaaaaagagactga

SEQ ID NO: 258825 - DNA, 390 bp, Klebsiella pneumoniae
ttgatcaccggcgacggcgaactggcggaaggcagtaattgggaagccgccctggcggcggcgcactacggtctggataacctggtcattattaatgataagaacaacctccagctggccgggccgacgcgcgaaatcatgaataccgatccgctggccgataaatggcgcgccttcggtatggaagtcagcgaatgccagggtaacgacatggcctcggtggtcgcggccatcgaggggctacagcagaacggtaaaccgaacgttattattgccaacaccacgaaaggcgcggggatctcctttatccaggggcgcccggagtggcaccaccgggtgccgaaaggcgaagagatcgctctggcgctggaggaactgaaagatgagtaa

SEQ ID NO: 258826 - DNA, 351 bp, Klebsiella pneumoniae
atggaagatgtcgccgctcatctctctgacgcagggtatcaggtctctgttatcaatccgatgctcagcaaagcgttcgtccagagtcagggaatacgcagcaaaactgatacggtggatgcccgccagctggcgtatttttgccgggagaaacgcccggcgatatgggaagcgccacacgcagacggttgtgaacccgtagcccggtcagcgcagcgcaagccgggagtagtccgcaccagtcagggctgtttcacttctttaaaaccctgcgatttcagcaatttctccgactcgctcagcgaaatgaacttttgtgaacagtcggaaaaactggcccccggcaagtga

SEQ ID NO: 258827 - DNA, 201 bp, Klebsiella pneumoniae
atgaaaacgtcgccgcacatcttactgcgtattgaaccacaggacgtggaggttgttcatgcgcgtgaagcggtacggaaagaggcatttttattcttctttctgcgccgtgagcgacggacctacagcgtggagctgaacgttaccgtcaccgtgaccgccattaatctcgataaagtggatttcgtcacgcaaacctga

SEQ ID NO: 258828 - DNA, 174 bp, Klebsiella pneumoniae
gtgcaactgctttaccatcgcctgccggtttccctgaatcatgagatgacgctgggcagcgcgagtgcgggccggtttatcctgccgctcacggcccgctactaccagacccgtccccggatcaccgccggtcaggtgtcggccgttgcgacctataccttacattatgactag

SEQ ID NO: 258829 - DNA, 126 bp, Klebsiella pneumoniae
atgggctttgtcgagaccatcgccgaccgggtgacggtgctgcatcagggacaggtgctggcggaaggatcgctgcgcgaggtgcaggctaacgaacaggtgattgaagtttatctcggacgctaa

SEQ ID NO: 258830 - DNA, 126 bp, Klebsiella pneumoniae
atggcgctgtcgcttttcgcgtcgttgcaggcgtttttgacgcagcttaccgagtcgcaaaccggttcgctgggcagtctggacacgttaaccaccgttgcctggtcatcggagagcagcacgtga

SEQ ID NO: 258831 - DNA, 405 bp, Klebsiella pneumoniae
atgcgtctccaccagcatgccgtcatcattcccggatttcagttcattgagcctgtcgcgcaggtcgtcaacgatctgattttcaatacgagccagggtatagacctgttgctgttcattctgcacttcccgggcgcgtttcagatactgcctcgcatccccctgccgggcttcaatctgatcgagcagcgttccctgttgccaggtaaaatcctgcaccagcgaattcagctcggtggtgaaatcatcgtgcagccagtcgatccgcgccgcaagctctcccaccttttcacgaaccagaaacatgttgtagagcacgcgatccagttccgccagcagcgcgcggctgtcctgcaatatcacccccaactgctggcgttctgccggcgacaacccctgacttag

SEQ ID NO: 258832 - DNA, 486 bp, Klebsiella pneumoniae
atgatccggacgctgttcgctccaggtgagattaagctcgcgattcagcgcttcgtctttgttcccgtccgtggactgaccgttgatctgcgtcagacgggcccggacgatcggatagaattccgccgcccgcgtctggtgttcggcgaggaaggtcttcaccggcactatctgctcaggggcgatattgatcagaaagtagttcgggctctgcgggggcaactgctgctgccagcggtcaagcagatcgccgcgcagcaccaacaggagcgccagcagcataaacgacagggaaaacgccgccagctggctgagggtcgaccacggctggcgcagcaggcggttcaccgccagacgcagcggcaaggctttgagcgtcaggcgtttgagcagccacagcaatccccagcccaccaggccgcacagcagcgccagcaccaccgccccggccagcaccgaccacagcagcgggctgccgcccagtag

SEQ ID NO: 258833 - DNA, 444 bp, Klebsiella pneumoniae
atgctccgggccgagcttcggcagcagccactgctcataattggccagctgttcagcgtcgccggcgaacttatagcgccatgcgacgcgactgccgggctgcacggccccggtttttgccacgtcggccatattcatcatcagccgcggcgccatctggaaggggttaaaccccgcatccggctcctgaatcacctccccggcaatgcgcagcgtggcatcgccaacgtcaatcgtatcgccggttttcaggttcagaagcgccatcagccttggcgccagcagcacgctccccgcctgcggtttcagccccggcggctgcgtctcgagggtgccatacagcggatagcggtcgtccaccgccttaacgtccgccagctgcggcgtatccccggcgaacgtcatggtggcaaagctcagctgctcgccgacggtcagccctga

SEQ ID NO: 258834 - DNA, 675 bp, Klebsiella pneumoniae; identical to SEQ ID NO: 139153

SEQ ID NO: 258835 - DNA, 663 bp, Klebsiella pneumoniae
  misc_feature (581)..(590): n is a, c, g, or t
atggataaaaacctccccgatgggctgccagcaccgcagcgttacggcgccatcctgaccattgtattaggcctgacgatggccgtgctggacggcgctatcgccaacgtagcgcttccgacgatcgccagcgatttaaacgcgtcaccggcatcctcaatctggatagtaaacgcctatcaaattgccattgttattgcgcttctgccgctctctttcctcggcgatatggtcggttatcggcgcatttataaaatcggcctggtcgtattcaccttcacctctttagcctgcgcgctctcccgcagcctggaaatgttgacgctggcgcgcgttgcgcagggtcttggcggcgcggcgctaatgagcgttaataccgcgctgattcgcctgatttatccccgccgctttctcggccgcggaatggggatcaactcttttgttgtcgccgtctcatccgctgcgggcccgaccattgccgccgctatcctgtcgatggcttcatggcaatggctgtttctcattaacgttccgctgggcgttatctcactggttctcgcgatgcgctacctgcccgccannnnnnnnnngcgatgcgctccctgcccgccaatgtcggcgggagcaaggtcacccgcttcgatctgcccagcgccatcatga

SEQ ID NO: 258836 - DNA, 456 bp, Klebsiella pneumoniae
  misc_feature (21)..(30): n is a, c, g, or t
atgaagacaacgcgctgccgnnnnnnnnnncagtatgaagacaacgcgctgccgtgggatagcgtcaatgcggcaaccttcgtgaaatatggcgatttgacgccgtttggaccggaactgctgaagcgtcacgatgcgcgtattgccaaagatcctgagttccagtacatcatgaaggatattgctcgctataacgcgatgaaagacaaacgcaacatcgtttccctgaactacgcgcagcgtgaaaaggagaacgaagaagatgatgcgattcgtctggcccgcgttaacgatcgcctgaaacgcgaaggtaagccgttactgaaaaagctggaagatctgccgaaggattaccaggagcccgatccgtatcttgatgaaacggttcatattgcgctcgacctggcccatgaggaaaaggatcggccagcggtagagcccccggccagtaaataa

SEQ ID NO: 258837 - DNA, 1665 bp, Klebsiella pneumoniae
  misc_feature (1648)..(1657): n is a, c, g, or t
atgaacaaattctttaagctcaccgcgttggcgggcctgctggtaatagcaggccagtcgttcgccgtggacgatataacccgggtcgatcaaatccccgtgctgaaagaagagccgcagcacgcgacggtgagcgagcgcgtaacatcgcgctttacccgctctcactaccgccagttcgatctcgacaatgccttttcggcgaaaattttcgatcgctacctgaacctgctggattacagccataacgtactgttagccagcgacgtcaaccagtttgccgcgaaaaagaatcaaatcggcgatgaactgcgcagtgggaagctggacgtattttacgacctgtataacctggcgcagaagcgtcgctttgagcgctatcaatatgcgctgaaagtgctggaacggccgatggattttaccggccacgataatttcaaccttgaccgtagcaagtcgccctggccgaaagatgaagccgagctgaacgcgctgtgggatgccaaggtgaagtttgaccagctaagcctgaagctggctggcaaagatgataaagagattcgcgaaaccttaacccgccgctacaagtttgctatccgccgtctggcgcaaaccaatagcgaagacgttttctcactggcgatgaccgcttttgcgcgtgaaatcgacccgcatacaaactatctctcaccgcgcaacaccgagcagttcaatactgaaatgagcctgtctctggaaggtatcggcgcggtgctgcagatggacgacgactacacggtgatcaattctctggtcgcgggcggtccggcggcgaagagtaaagccatcagcgtgggcgatcgcatcgttggcgtcggccagcctggtaaaggcatggtcgatgtgatcggctggcgtcttgatgatgtcgtcgcgctgattaaaggtcccaagggcagcaaggttcgcctggagattctcccggcgggtaaaggcgccaaaacgcgtattgtgaccctcacgcgtgaacgcattcgtctggaagaccgtgcggttaagatgtcagtcaaaaccgttggcaaagaaaaagttggcgtgctggatattcctggcttctatgttggcctgacggatgacgttaaggttcagctgcaaaagctggagaaacaaaacgttagcagtatcgtcatcgatctgcgcagcaacggcggcggggcgctgaccgaagcggtttcgctttctggcctgtttatcccctccggcccggttgtccaggttcgcgataataacggtaaagtccgtgaagacagcgataccgatggcgtggtgtactacaaaggtccgctggtcgtcctggtcgatcgtttcagcgcctcggcttccgaaattttcgccgctgcgatgcaggattatggccgcgcgctgatcgtcggagagccgaccttcggtaaagggaccgtccagcagtatcgttcgctgaaccgtatctacgatcagatgctgcgtcctgactggccggcgctgggttccgtacagtacactatccagaaattctatcgcatcaacggcggtagtactcagcgcaagggtgtaacgccggatatcatgatgccgaccggaaccgaagagcgtgagaccggcgagcagtatgaagacaacgcgctgccgnnnnnnnnnncagtatga

SEQ ID NO: 258838 - DNA, 636 bp, Klebsiella pneumoniae
atgataatttatacacctatcataataaagttgggactgggaatactgtgcttaattgttcaaataaatctcatgggaaagggaaatctggccccttcatccgcaatggatcaggttcagaactatgtgctgggggggattattggtggcgtaatttacaatgaatcaataacagtactacaatttgttctggtattaattatatggacttttctggtttttgttcttaagtttttaaaagaaaataatcggttagtaaaaagaattcttgatggaaagcctattactttggttcataatggaagtgtcaatgttaaggaatgtttacgcaatggtgtttcagctaatgatttgatgttcaaattaagagcaagtggtatttatgaaatagaacagcttaaacgagtgatacttgaacaaaatggtcagttaaccattatacaaaatggtgatgaaaatatacgttatccaatcatagtggatggtttggccaaccatgatctgctcgaaattcttaacaagaatagtgactggttagaaaacgaagttataaagcaaggcttcaataaaatcagtgaagtgtatttaggtgagtatttatcaggtagaatcaatgtatacggatatgaaaaataa

SEQ ID NO: 258839 - DNA, 1077 bp, Klebsiella pneumoniae
atgcagggaatcgcactccccggtaaagcggcgctgctgtccgtttccgtattatctgcccttgcgctaaacgtcagggctaaagaaaacgctgagattcattttgatccttcattcctgagactgggcaccggtccagcgccggatttatcgcgttttagccatggcgcgagcctgtctgagggaacgcatcggctgcggatatggtttaacgaaaagccggtagtgaatcaggatgtccgttacgtcgcagaaggacatggtaccacgccctgcctgacgcctgagctgattacgcagcttccgcttcgccacgagatgctgcccgatagcgcctgggacagcggtgctgatgtctgtacagacctgacggcgctgattcctggggcgacggtgatgagtgacagtaatgcgcaaacgctcaatattcaggtgccgcaggtctgggaacagcgcagcgcgcgcgacgcggtaccgccagcattgtgggatagcggtattcccgccgcgctattgggctacaaccttagcgcatatagcagtgagaacaacggctataaccatgacagcctttatgccagtctcaacggcggcatcaatattggtagctggtacctgcgccataacggcaactggagccgggataatcacgctggcggccattatcaaacacagaatacctatattcagcgggatctccctgctttaaagggccggatttctgtcggccagatcaacacctcggggcagctttttgacacgctgcctctaagcggactaaagctggagagcgatgagcgcatggagccgctctcccgtcgcggctacgcgccggaaattcgcggcattgcccgtacgagcgctcggattgctgtccgccaaagcggtaacctgatttatgaaacaaccgtcagtccggggcgtttgtcattgatgatctttatcctaccggctatggcggggatcttgacgtcaccgtttacgaagctgacggcagcaaacagcattttcaggtgccattcgcttccgttacgcagctattacgtccgggccagtcccgttatgaactctcaatag

SEQ ID NO: 258840 - DNA, 480 bp, Klebsiella pneumoniae
  misc_feature (360)..(369): n is a, c, g, or t
atgagttcctgcattgcagctgaagagagcctggccaacgccaggcccgcgtggcgcgccgtttatgcgctggcgctgggagtatttggcctgattgtcgccgagtttcttcctgccagtttgttgacgccgatggcggcaagcctgggcgttagcgaaggcatggcggggcaggcggtgaccgcgacggcgctggtggcgttagttaccgggctgctgatcaccaccgcgacgcgaaatattgaccgccgctgggtgctgatgttcttctccgttttgcaaattatctccagcatgatggtggccttcgccggttcgctggagtttttgctgctgggacgcctgctgctggggatcgcnnnnnnnnnnggatcgccatcggcggcttctggtcgatgtcgactgcgaccaccatgcgtctggttccggcggcgatggtgccgaaagcgctggcgattatcttttccgccgtttccatag

SEQ ID NO: 258841 - DNA, 363 bp, Klebsiella pneumoniae
atgattatcgatctatcagaagtttttccggtacgtaagagctatacagacattgtaagcgcggctaccgataatttcgcagcagtagacagcaaagtttttgcttctcttcctgctgatgtgcaatgcggcgatgttttagacgcttccggcgctctctacacctctggcaatgcggctttcgtcgtcgtgtccgacttcgttaaagctggcagtaataagcctgtaaacgtcttacgtgctcccaacgttggatcatacgttgcccttaagagcgacaacctcaacgcagctaaccacgcagcagcgatcagcgcattacaggcgcaaggcttcgccactcgtgaatttttcacatcttaa

SEQ ID NO: 258842 - DNA, 489 bp, Klebsiella pneumoniae; identical to SEQ ID NO: 105113

SEQ ID NO: 258843 - DNA, 129 bp, Klebsiella pneumoniae
atggctccctcgcaaatattttttctccaggcctattttggtgacttctgtcacatttatgcgccttgtcttagtaacaatctacctttcttttactttctggtgttttgtcctgctatttcccgctga

SEQ ID NO: 258844 - DNA, 1020 bp, Klebsiella pneumoniae
gtgttccaggtagctaaagaaaacaactttgctctgccagcggtaaactgcgtgggtactgattccatcaacgccgttctggaagcagctgcaaaagttcgttctccggttatcgttcagttctctaacggcggcgcagcgttcatcgcgggcaaaggcgtgaaaactgacgttcctcagggcgcagccatcctgggcgctatctctggcgcgcatcacgttcatcagatggctgaacattacggtgttccggttatcctgcacactgaccactgcgctaagaaactgctgccgtggatcgacggtctgctggacgcgggtgaaaaacacttcgccgcgaccggtaaaccgctgttctcttctcacatgattgacttgtctgaagagtccctgcacgaaaacatcgagatctgttctaagtatctggcgcgtatggccaaaatggacatgactctggaaatcgaactgggctgcaccggcggcgaagaagacggcgtggacaacagccacatggacgcttccgctctgtatacccagccggaagacgttgattacgcctacactgagctgagcaaaatcagcccgcgtttcaccatcgccgcttccttcggtaacgtacacggcgtttacaagccgggcaacgtggtgctgaccccgactatcctgcgcgactctcaggaatacgtttctaagaaacataacctgccgcacaacagcctgaacttcgtcttccacggcggttccggttcttccgctcaggaaatcaaagactccgtaagctacggcgtgatcaaaatgaacatcgataccgatacccaatgggcaacctgggacggtatcctgcagtactacaaagctaacgaagcttacctgcagggtcagctgggcaacccgaaaggcgaagatcagccgaacaagaaatactacgatccgcgcgtatggctgcgtgctgcacagacgtccatggtgactcgtctggagcaggcatttaaagagctgaacgcgatcgacgttctgtaa

SEQ ID NO: 258845 - DNA, 1251 bp, Klebsiella pneumoniae
atggaaagcaaagtagtagttccggcggaaggtcaaaaaatcaccctgcaaaacggcaaactgaacgtccctcacaatccgattatcccgttcattgaaggtgacggtatcggcgttgacgttaccccagcgatgctgaaagtggttgatgccgccgttgagaaagcctataagggcgagcgtaaaatttcctggatggaagtttacaccggtgagaaatcaacccacgtctatggccaggacgtctggctgccagctgaaaccctcgatctgattcgtgactaccgcgttgctatcaaaggtcctctgaccaccccagtcggcggcggcatccgttctctgaacgtggcgctgcgccaggagctggacctctacgtctgcctgcgtccggtacgttactaccagggcaccccgagcccggttaaacacccggaactgaccgacatggttatcttccgtgaaaactcagaagatatctatgccggtatcgagtggaaagccgactctgcggaagcagacaaagtcatcaaattcctgcgcgatgagatgggcgtgaagaaaattcgcttcccggaacattgcggtatcggcatcaagccgtgctctgaagaaggcaccaaacgcctggttcgcgccgcgattgaatacgcgatcactaacgatcgtgattccgtcactctggtgcacaaaggcaacatcatgaagttcaccgaaggcgccttcaaagactggggctaccagctggctcgcgaagagttcggcggcgagctgatcgacggcggcccgtgggtgaaaatcaagaaccctaacaccggcaaagagatcgtggtgaaagacgtgatcgccgatgcgttcctgcagcagatcctgctgcgtccggcggaatacgacgttatcgcctgtatgaacctgaacggcgactacatctctgacgccctggcggcgcaggttggcggtatcggtatcgccccgggcgccaacatcggcgacgagtgcgcgctgttcgaagcgactcacggtactgcgccgaagtatgccggccaggacaaagtgaacccgggctccatcatcctgtccgcagagatgatgctgcgccacatgcagtggttcgaagccgcagacctgatcgtcaaaggcatggaaggcgctatcgccgctaagaccgtgacctatgactttgaacgtctgatggaaggcgctaaactgctgaaatgtagcgagtttggcgacgcaattatcgcgaacatgtaa

SEQ ID NO: 258846 - DNA, 1188 bp, Klebsiella pneumoniae
atgcatgcgatagcagaaccacaacgctttaaccgacagcattttatttttcatggccaggggcaaagttattttattctctgcctggttaacgtcattctgtcagtgatgactctcgggatatttattccatgggcctgggtacgtaaccggcgttatctcgcagaaaatctggagctgagcggcgctcgttttgcttaccacgctcgtggaagcgcaattctttttagctttgctatgttcctggccatgctggcggtagtgttctgtatatttaatttctgtactgccgaggctaccgaggctgccgcgctgacgctgctcttattcatgttcctctctcccttgatggccatgcagggactgagttttcatgcttcgatgactacattaaatggcgttccctttggctttcaatgctcttcactccgcgcctggtgggtgttgagcggtatgccgttactaatggtggtcttaatgtttgttctgttttcctctatcgggacgggcttttggggatacggttatcgagcgatattattacaggcggtgctattagaactcgtgcaatttattggcatgagcgttattctcggtattctttatagtcattggctcgaactgattggtaaaggcgcatcctttgggatatataaatttgatattaatgccagcagtaaacgctgtattattatttctctttgggccatgctcatccaggtaccttttttcctgctctctaccgcgattgctgccatttttattgatctcagtggtctttttttagaaccttccgaagagtcctctttattttctggcggctgggtaatgttgattagccttgttattttctggatgggggtcgtatgttccgcggcctatgcctgggtatccctgcgcaatcacgccatcaataacttaacgctggataatcgtatccagtttcactctacgctgactttttccgctattgcgctgcgcctgctggcgttgatatttttgtctgctctgacgctggggcttgcctggccatggctgaaaattaatttactccgctaccttgcggttaatacccagataactggcgatctggatgcgctgacgctcaacccggatcttacgatgcctgcaccgacgacgctggggcagatgtgcagcagcttcattcccatgctgccgttcctctaa

SEQ ID NO: 258847 - DNA, 348 bp, Klebsiella pneumoniae
  misc_feature (264)..(273): n is a, c, g, or t
atgtcactgcaaaatttaacccttttcccgcgtctggagctgatcggcgcgccgacgccgcttgaatatctgccgcgcctttccgattacctcggtcgtgaaatcttcatcaagcgtgatgacgttaccccgcttgcaatgggcggtaataagctgcgcaagcttgagtttctcgcggctgatgcgctgcgggaaggtgcggatacgctgattaccgccggagccatccagtcgaaccatgtccgtcagacggcagcggtggcnnnnnnnnnnggggggcaaaacttggcctgcactgcgtggcgctgctggaaaacccaatgggtacccgggctgagaactatctga

SEQ ID NO: 258848 - DNA, 504 bp, Klebsiella pneumoniae
atggcgacctccgccacgctgtcgtttggtctcgcttttgaggcaggtgagaagaacatcatgcgccggccgccgcgcgaccctaagctgcacgtgatggacggctttgctatctggcgggttatttttgtcgggtcgatgattgccgtcagcgcctttgtgcttgaagcctggctacagccgcgcggctattcgcctgagtttattcgtacggtgctgttacagacgctggttactgctcagtggttctatatgctcaactgtcgcgtggcggatggcttctcgctgagtaaaggattgctggcgaaccgggggatctggattgtcagcggcgtgctgctggtgctgcagctgctgattatctacgcgccgttcatgcagatgctgtttggcaccgaagcgctgccgttccgctactgggttatcacttttattatcggttttgtgatgttcctgattgtggaagtcgagaagccgctgacccggagatggcgtacggtctga

SEQ ID NO: 258849 - DNA, 432 bp, Klebsiella pneumoniae
atgaaaacgcagcacatcgttccgctgtccgatcaggctattgctgtcttaaagcaaattgaagcgctttccggtcatctgacatttatcttccccggcgaatacgatcaggataaatgtatgagcgacaacactatcaacaaggcgctgcgcgtgatgggatacgatactaaaaaagagatctgcggtcacggttttcgggcgatggcgtgcagtgcgctgagtgagtcgggattgtggagtaaagacgctattgaaaaacaaatgagccatcaggaaagaaacagcgtccgtgcggcctatattcataaggctgaatatctggaagagcggatcgcgatgatgcagtggtgggcggattatctggatgcgaatctcgacaggtatatttcagcttaccagtacgccgcgcctctgaaaaacgcctcataa

SEQ ID NO: 258850 - DNA, 354 bp, Klebsiella pneumoniae
atgttcccaccaactctgttcaggaagtctaagcacttcatctgtaaagtaatgctaaacatgctgtcaatatcctttattgatggtgccacgatgttgcctgctcgtcttaaaacagctcgtttacgggcaaattttactcaggaaaaattaggtgtactggcgggtattgaagaagcgactgcccgatcccgcatatcccaatatgaaagcggtatccaccgcccgacatttgaaatgatgtgtgcatttgccaaagtgcttaatgtaccggagtgctatttctatacggttaatgatgattttgccgaagcagtgctggatcttcatcgccagtggggaaataaagcctga

SEQ ID NO: 258851 - DNA, 273 bp, Klebsiella pneumoniae
atggtgctttttatgcttcctgtccgtcttaaaacagcccgattacatgcacatctgactcaggaaaaactgggagtccttgccggtatcgaagaagaaaccgcacgttctcgcgtatctcagtacgagagcgggatacatcgaccgacgtttgaaatgatgtgcgcgttcgcgagggtgcttgatgtgccggaatgctatttctacgtggttaatgatgatttcgctgacagggttctggcgctttatcaggaatgtcagaattattcctga

SEQ ID NO: 258852 - DNA, 633 bp, Klebsiella pneumoniae
atgctgtcatcgacagcgcctttgcttcacaacctgaaagaagcacctgttccgtcaggacggttgagccctttaccggtgcagacctctgcaaacaccgggtcgcagaacatcgcggcggaggttcagatacattctttaactgcgccagtccatcggctgtcattcccccgaccgaaaatcacccgattttacggctcacttgcacctgctgactttcagcgccttttacctgcgccagatctccgaccaatgcttcactacaccggaaacgacccggtaagccctacacctgctgccacatcaacgccttttactttacgggctgtggcctgcattgccgcaaggctttgctgccgcgtgaccgtaaaactgcaccagagtctgcgatctttctcgcactgcacccgaccagtgcgtcactttcgtcgcgtagagcgacaaagtgacgcacaaccaccacaccgcgccatgcccctgttttcaggattccggcgctcattcccaaatctgacacgcctttttggggtcgttgtcagcaagaaagaggagaaaaagatcgataccgaggggggcatgacgccccggagaatcccctgctcacgcaggcagtctgtactgcgtacagtctga

SEQ ID NO: 258853 - DNA, 564 bp, Klebsiella pneumoniae
atggcatacagaaatgggaattattgtgctttttatgtagccgaaccctttcatgaaagttctttgaaagcacatgcaacaaaagactttgtttattacaatatgttacgaatgtggaaaggtaatgataactcgtttccatttattgattctcatgataaaacctacaacgtaagagatgatagcgattgggaaaaaacgttaagaccacgtctccgcttgcgtcttcaaaattcaaaaaatattattctctttctcagttctgagaccaaaaactcacaagccttagctgaagaaatcaattttggaataaacaaccaagggctccctgtgatcgtcatatatcctgaatatgaaacaaagcaaagtttactttctaacggaaatttaaaacagtcagtaaagtctctctgggataaactaccaatattcaaagactctatttcgagagtaccaactcttcatgttcctctagataagaaattaattaccactgcacttaatgatacggatttaacagttaacaataaatgtgcatcaggaatatataaatacaatccttaa

SEQ ID NO: 258854 - DNA, 165 bp, Klebsiella pneumoniae
atgcaggaaggattttactgggtccgcagcactacagcagccccggaagtatggttctatgcagaagggtgcggctggtttgaacccatgaatgaggtctccctcgtgcatcagctgtttttatccctgggttgcgtatctccgtcaggccatcactggctgtag

SEQ ID NO: 258855 - DNA, 645 bp, Klebsiella pneumoniae
atgttacccgatctggccgtgatcgacccgtcattaacggacagaactccacgctcaatcaccctggcatcggggctggacgctctgactcaggtgatcgaaccgtatgtatgtaccagtgcgaacacattcaccgatatgatgtgtcgtgatgctatcccccgcgcaatgagtgctctgagcactttaatggagaaagaatgcgcagccagtcgggatgacatggcttgggtcagcctgtgtggtgggctggcactggcaaatgccgggctgggggtggtacacggtctggccggcccgctcgggggattatgtgaagctcctcacggtgcgctctgcagtacgctgttgccgtatggcctggaaatgaataatgaaaatgtgacctccgaagagagccagagccgcctcgaagaaatccgtgacgtcctggcgcgcagttttagcgtcccatccggtcaggctttcaaagcccttactgactggagccatcgccacggactgggtaccctcagggaactcggtgttccgtatgatgcgcttgaggtggtcgcagaggcggcactcaatgcctcatccatgcgtgccaatccggcgacactgaatcaatcgcaactactcagtttgctgcataaggcctggtaa

SEQ ID NO: 258856 - DNA, 237 bp, Klebsiella pneumoniae; identical to SEQ ID NO: 203515

SEQ ID NO: 258857 - DNA, 723 bp, Klebsiella pneumoniae
atgaatgaaaattttgaaagaaaactctggctatccaccgtgccgcttgtgtctactgacgtgagaggcttcccaacagggatagcttcggggtgttttgtaaggtatggcaataaaagattgcttctatccgttcaacatgcaaccggaaatggcgaagtatgggctattcagcaacagtatgttcctaatcgaggtgcagaattatacaggttaggcggagtcaactttttaaggaaaaacaaaataaatacttcggaaattgtggatgttgatttttcctacgttgaagtgccagaatcaacaattgccaaacgccaagaaataaacccaaacactgctgagatcctttctgaagaatatatttctacactgacatcttctttagaaaatcaaccatgtgcaaacactaagtatggttttagtgggcttattaagccatcaatagatcagtgcgggggaaataattttctagttactgaatcccgcatttatactggccttgtgtatcttcgtaccgaaggtgactatcattattttaaacttcctttcaatcatcctggccaccaacatttccaaggttgtagcggcgcaccaattatcggtgaagatggtaaactggttgctttagtttgtggtgggaatatcaatacaaatgagttgtgggggatttcactaagggcatataaattttccgtagatgttcttgttaaaggcctataa

SEQ ID NO: 258858 - DNA, 1068 bp, Klebsiella pneumoniae
atgagcattatttccgagaaaatatcttctaggatcaaaacgttaaagcaagagttcgctttaaataaaaacgttaaacatcaaggcgtaaagggtgaattaaacgaagtagagttgataaaaataataaaagacgttattccaaagaagtatgagatttcaaaaggtataattgagaactcatctggagagcagtcaaacgaaactgatattgtaatttatgataatggaatcctgccgccatatataaatagtgaacttgcattcgtccctgtagaggcagttagatataatattgaggttaaatcaactttaacagcaaaagagctcgaaacaacaattggaaaatttagaaaatttcgatcaattggcggacgctcccccactgttctatttgccttttcaagtaacgcaaaaaaaagcgaacttagtagatattatgataacgatgttaacttcttaacaaacccagcaattagtgtactctgcatttcagacaagtgttactattacaaacacacagaaactaaatacctaaaagactatcttagtaattctgatataattaaaagcatcctgaaagatgaagattttgaaatttctaatttcaaaaatgtcattcaagatactttaaaaaacgatgacattctctcaaaactaacgaggtctcaatttgccttattattacagtcttctatccaagctaaggcaataggtaccaatgttgacaccaaaaaactgacaataaatgacattaattataatgaaataacatttaaaatacaccaatggattggagtagagtgttgtaataatgatgtagagttatcatttttctctggaatatcgaacacattatccaaggaagctttcggtagttacttacttaacgataaaaaacttcacctcaaagttttttctatttgctatgaagatatgtggggtaatttaagttgtcagcgatttgataaaaacggcctagatgaggatttgaatgatgtcagcttcaattttcaaagctcatctgaggaaagtaaaataatctttcaccttaaaaaatcatcatag

SEQ ID NO: 258859 - DNA, 471 bp, Klebsiella pneumoniae
atgaatatcaaagttgcaaacactggaaacgcagaggagtgctgggcgctaaggaatcaagccattcggtttggatgtaagggtagttatagtgatgaggttatcagcgcctggacgtcagatttgatgccggatggatttcgtgaattaatgaccaaagatttttttttcatcgggcaagatgatgaaggaaagatcatcgcgaccgcactccttgacgtgggcaccaacaccctgaaagccttctacgttctccccgagctccaggggaaaggaatcgggaccagattcctctctgcacttctggatgaggcgaggaagtcaggaatgaaatttctggagttatcatctacgccaaatgctcgttttttttatgccagccggggttttgttttaatcggcgaaaaagcgtatacatcctctgtcacggggacagacctactctgttttgatatgaaaatggtgctttaa

SEQ ID NO: 258860 - DNA, 630 bp, Klebsiella pneumoniae; identical to SEQ ID NO: 195127

SEQ ID NO: 258861 - DNA, 273 bp, Klebsiella pneumoniae; identical to SEQ ID NO: 195126

SEQ ID NO: 258862 - DNA, 10302 bp, Klebsiella pneumoniae
atgacacagcacctcattaaaggtcgtaagggcgggagttcaaatccgcgaaccccaacggaacagcctgatgatttacagtctgttgcgaaagcaaaaattctcattgcgctgggcgaaggtgaatttgccggtgcgcttacagctaaagatatttaccttgatggcacgccgctggaaaaccccgacggctcccaaaattttagcggcgttttctgggagtttcgcccgggaactcaggcgcagaattatattcagggaatacccggttcagaaaatgaaattaatgtgggagtagaagtatccagcaaaacggcctggtcccgctcttttagtaatacacagatttcggcagtacgtttgcgtttaaaatggccatcgttactcaaacaggaagataatggcgatctgatagggaacgccgtcagctatgccgttgatttgcagactgatggtggtgtctggcagacggttctgaagagcgcagtaaaaggtaagaccacttctggctatgaacgttgtcaccgtattgatctacctcgggcgacgacgggttgggtattgcgcctgcgtaaggttacggaagacgcaaacacttcaaaaactggcgatgtcatgatgttacaaagctatgctgaggtgcttgatgcgaaacttcgctatccaaatacagctctgctttacgttgaattcgactctcgtcaatttaatggctctattccaaaaatttcctgcagtcctcgcggccgcatcattcgcgttcctgataattatgatccggagacccgacaatattccggtatctggacggggagatttaaatgggcctggacggacaatccagcatggattttttacgatctgattgttagcgatcgttttgggctggggaatcgtcttacttctgagaatatagataaatggacgttatatcaggtcgcacgatattgtgatgaacccgtacccgatggcaaaggcgggaacggtacagagcctcgctacttatgtaacgtctatgttcagaatcgcaacgatgcttatacggtgttgcgggattttgcggctattttccggggtatgacatgctggagcggcgatcaggtgattgctctggcagatatgcctcgtgatatcgattacacctacaccagggctaacgttattaatggacgttttcaatatgccagcagtagtagcaaaacgcgctataccaatgcactggtttcctggtctgacccagaaaacgagtatgcagatgcgatggaaccagtttttgagcagccgctggtagcccgctacggatttaaccagcttgaattgacggccattggctgtactcgtcagtcggaggctaatcgtaaaggacgctgggggattctgaccaacaataaagaccgcgtggtgactttttccgtcggactggacggtaatattccgcagcctggctatattattgcggtggcagatgaaatgctggcgggaaaaatcaacggtggccgcaccagtaaggttgacggctgcattattacactcgatcgcaaaacggaagctaaagccggtgatcgactgttgttaaacctgccatcgggcgtgacgcaaagtcgaactattgagagcatcgatgggtttgttgtcaccgtcactgccgaatatgcagaattacccgaaacggaatgtgtatgggctatagaatctgattcgcttagggtccagcaatatcgagtcgtaagtgttaaagataacaacgatagtacatttactattttcgcggctgctcatgatccggataaatatgacagaattgatactggcgcgataattgatagccggccgataagcgttattcctcccgggaaccaaagtgcgccggataatatcattgttgagtcttattccgtagtcaatcaggggatgagtgttgaaacaatccaggttaactggacgccagttaaaaatgcccttgcttatgaagcccaatggcgacgtaatgacggtaactggattaacgtaccgcgcagctcgaccacctcgttcgaggtcagcggcatttatgccggtcgttatctggcccgtgtccgagcgatcaacgctgcagaggtctccagcggctgggcatactcagaagagaaaacgctgaccggaaaaatcggtttgccgtcggcaccgctggcgctgaccaccacttccctgctgcatggcgtgcagctgaactgggcgttcccggaggggagcggcgatacgcagaaaaccgagctgcagtacagtcctaatcccaacggcaacggggctatggcgctgtctgatgtggcgtatccgggcaaaatgtatcagcagatgggcctgcagattgcggcgatattctggtaccgtgcgcggatcgttgaccgtatcggcaatgaaagtccgtggacggcctgggtgcaggggatggccagcgacgatatcggtgagtattacgacaaactgaccgatgcgattaaggacacggaagcctggcaggaagcccagcgggatattgaggagactcataaggagctgacaaaaaccgccgaggctattcgtgaagaagtcgcgcagcaggtcaccgatattaaccagagtattgatgattctgcgtctgagatccgccagcaggttgacgggcagatagagtccgtcaacacgtcgataacggagaatatcaacagcgtaaatcagacgctcagtgacaatatcacggcagtcaacaagagtatcaccgatgccgtgagcgatattaatgcctccgttgaccagcagatcgctgtcgttaacaaaaccctctccgagggggatgctgcgttaaaatcccagctgcagacggttgaaaacagtctgaaacagtccatcgcccaggcgaatacaggctgggacaaagcggtaaaacaggagactgccgaccgcattgcggacgtcaacgcgaaagcggcgcaggcggcagaccagctgctgaatgaaaaaaacgagcgcgtggccgccattgataatctgcaaacgattattcaggacggcgacgagtcactggcccgtcagatttctgaaatttccgccggtagcgggcagcagtttgattcgttcagtatctggtacttcgataaagacaatgaggggtggaccgaggacgatgccggtcaggtgccgatgcaaatcacggacgacggctggctgaaagcactgaacagcaccgcctccggccgttcgcccaacgggcaaactattccggcttcctcctatcgcaccgtcatgctgcgtattaaacgcgtgggtaatccggcatggaaagggcggctttactggattggtacagaggaaaccggctggagtgatgcccgctcggtgaatatcgcggagcaggagtttgacggcgatggtatcagcgtggtggccatctccgatgtgaactggaatgcatccggtacggtccgccgctttcgcctggatctggctcaggggcagaatgccgacaaccatttcctgatccactggatatcggtcgggcgtccggcaccggcggccagtactgcggcgctgcgtaatgaggagatggcgcggacgcaggcagatgaagcggaagcgctgaagcgctccacgctggcggcacagataaggggaacgacggaaagtaacagcctggcggatctgcgttccggcctgctgtatcaggagatgaatgcccgtatcactgctgataaagcagaggtgacagcccgggaatcgctgcagacgcagttcaacgagaataaatcctcggtggcggaggagctgagttccctgtcgaccgcacaaagcgcacaggccagcaaaatcagcgggctggaaaccagtctgggtaaaaaagccgatgcaaccgcgctgcagtccctcacgcaaaaggttgaacagcagggcaccacgttaaccagccaggggaattcgctgacctctctgtctaaccgcgtcggtaaaacagagtcgggcgtggccgcaaacagcaacgccatcacgggcctgcagtccagcgtcagccagcaggataaaacgctgaccagccagggcagcgcgatcgctaaactgcagaacgacctgacaacaaccaattcaaacgtcagtaaaaaggccgatgcgagcgcggtcacggcgttaaccaaccgggtatccgcgacggaaggcaacctgacaacacagtctggccagctgacgatgctgaaaaacaccctggctgaagggtgcctgattagcaatggcggcatggatgtggatctgtcgttctgggagaactccggtaccggctcggcattcacgtatgatgcaggtgaaaaagcgctgagaacgacaaccggctctgtccgggttgccaacgtcacgcgtatccctgctgaggccgggctgacgcttaccgtctcatttgagtacaaaacatcggaaacgatgaacagcgtatcgtctgataccgttggtgtgataactgatttgggcaatcctgtcgcctggctatcctcagaatctctgtggctgagtggcgtgacgaccagctggcagacgaaaaccgtggagctgaccattccggcagactttaccgggaattatgtctatctgcggtttgccgccgggggctgggcaccgtcaaacagtgcgcgtctgtatatccgtaaagtcgacgttttttcgtcgaccggggtgtcgaagaaggcaaatgcctctgccgtgactgacctgaccagccgcgttgactcatctgaagggaagctggccagccagagccaggcaatcacaaagctgcagaatgacctgaccacgacgaactcgaatgtgagtaaaaaggcggatcagagcgcgctgacgtcactgaccgggcgagtggagaagacggaaagtggtctgactgctgcgaacagcaatatcacttccctcaacagctcaattagcgccgcaaaagcagccggggatgactatatacctaacccggcatttgatccttcttacgaccgcatggggtatgacgtcgtatcatccggcgctgctggcgtgcccggggattgcccgtttgcgtacgtggttcgtctggcaggccgcgatcatgtccccaaaataaacaacattgctgtcacaccgggtgatgtcttcgagatgtcggccctggtagcctgcggcgccggtcaggccgattttaatctttatatcgccagcggcacctcagcgacagaaggggttaaagcgagactttctggcggtaacacgaaaaccacggcggtctggaagcgcgcaacatggcgctttacggtgccgtctgatacgaatttcctgcgccccttcctgcaggttaaccagagttcaccctttggtacggtctggtatgcagcagactggcatctgcgcaacgtcaccgcagcgaaccgcgcacagaaaaccgccgatgccaccgcgtcagcagtggataccctgaccacgaaagtcactcagcagggcgatacgttgtccagcatcgggagccggacgacggcgctggaaaacgggctgaagacgacaaacagcaccgtcagccagaaggcggacgcgagcgccgttcagaccctgcagaacacggtgacgcagcagggcaaagacattacggcggcgaacagcgcgataacgaagctgaccagcgacctgtcgacgacgaatgccaatgtcaacaaaaaggcggatgcgagtgcgctgcagacgctgcaaaacaccgtagcggagcagggcaaaacgctgacaagccagggcagcagcctgacgcagctgagtaacagcctcaatgaagctgttgctgatgcggatgcctcccgggcgatacccggcaacctgatttccaacgggtcattcgagcgcggccaggctgcgtttactggctggcagtcagcgacgtcagtcataacggcattgtcaccgtacaacggcacccgaatcctcaaggtggtgccgggcagtaacgtggtctcgctgcttcagaagatttcgttcataaaggatcgcacctacaaaataggtgtgttcacgcgtgtttcaggtggcacgacaatgccgtcaggcgctgccggaaataacaagctgcgtattggtgaatccggcggaccactgaaagaggtgcagttcaatcccgcgacgctgccgacaggctctgtctggcaggaaatttctggcacatggaaggcgacgaaaacggcagtccttgacgtctccattatggtactgctggcgacgggtgagcagtattttgatgatttctatcttattgacgtgactgatgagaccagtattgcggccagcgccactgccatcagtaatctgaccaaccgggtaacgagcgcggaagggaagctggagagtcagagcagcagcatcacgaaactcacgaacgatctggccacgacgaatgccacagttaacaaaaaggcggacgcgagtgcgctgcagtcgctgcagaacaccgtaacagaacagggcaaaaccctgagcagccagggcagcagcatcaccagcctgcagaacgggctgacgaccgcgaaccagaacatcgcgaagaaggccgacgcgtcagccgtcacctcgttaagtaaccgggttaccgaagccgaagggaaactgaccagccagagcaacagcatcactcagcttgaagcttcactcgatagtgcccgcgacaccggtgaaaatctggtcgaaaactacgatttcagaaaccagttaaatgcgtggaatctgcagaatgccgggcgcattgtgtggggggcctcaagcggggatggttctgccggggtgaccatcacgcatactggcgacgcaagtaatccggggttaatgtcgaataacgcaaaatggttcccggtcagttcatcccgccggttccgttttaaggtccgcgccaggctaatttcaggctcaggcgggattttatgccgcatctttaattcgaaaaccgcaggcacttacacccagacgcaggctgttgtaaccagaaaagatggttttgaaacgctgacggtagatatacccgcgttgccggccaccaccacagacgcaaggattgctttttatgtctatccgtccgcaactgttgtggtcgtcgacagcattgccgtttatgacgtgactgatgaaactgcgggttcagcgaacgcgtccgcaatcagtgacctgaccacacgcgtgaccagtgccgaggggagcataacttcccagggggcggcgatcacaaagctgcagagtgacctgtcggacaccaatgctaacgtgacgaagaaagccgacgccactgccttaaacgcgttatctaatcgggtaacgcagacggaaaaggatatcagcagccaggctgacagcattaccagcctgaacagctcgctgaatattaatgcccgtaaaggctcaaacccgtggctggacggaacgtttgaatcctacgacgcaaaccacaatctgggtgggtccgcgcgagtggtcacagggatcagttactcgggcggcaaatgtatgcgcgtttcgcgcgcgcagaacacgacaggcaacagcgatgatttaatcggctcacgccttgccattcgcgatacggcagtattcagggttgaattctgggcgatgatgccttccggagaaaacccgtccagcggctgggtcactgtcgtcggtctcaacgtacaaaatgatgcgggcgcgaactcatggctgggggcggcgaatgtcagcgaatcagcgctggccggtcgtgacaaatgggttaaattttccggctatgcaaaagccacagcgaaaggcgcgacgcgcgctgtggtctggatctccacacgcggggcgaacggcagcaatacgccaggctataacttgtatatcgacgacctggttatcaccgatgtcaccgatgcttacaatgcgcagggcacagcagacgcggcggcctctgcggttgataccctgaccacgaaagtcactcagcagggcgatacgttgtccagcatcgggaaccggacgacggcgctggaaaacgggctgaagacgacaaacagcaccgtcagccagaaggcggacgcgagtgccgttcagaccctgcagaacacggtgacgcagcagggcaaagacattacggcggcgaacagcgcgataacgaagctgaccagcgacctgtcgacaacgaatgccaatgtcaacaaaaaggcggatgcgagtgcgctgcagacgctgcaaaacaccgtggcggagcagggcaaaacgctgacaagccagggcagcagtctgacgcagctgaataacgccctgagtgataccacggccagtctggctgctgacggtaaaatccccggcaacctgatttccaacgggtcattcgagcgtggtcaggattcgtttaccggatggggaagcgtcgggtctgttatcagtgcgcagtcgccgaactacggcagcaaaatcgcgatgtgtggtgtgggtcttgccacactatcccagaaggtcccggtaacgaagggcaacacctataaaatcggagtgtttgcccgtgcgcagggcggttcggtcatgcaggatcagggcaataacaaactgcgtattggtcagtcgtccctgctgtacgatcgccagtttaaaaccgcagacctgcccaccggctcctcatgggttgagctgtccggaacatggaaggcgacggttgacggaatggttgatgtgtctatctattcttccctgaagtctggctctcagtattttgacgacttctattttgtggatgtcacggatgaagtgaatattgccgccaacgccggggccatcagtagcctgaccacgcgcgtgaccacggcagaggggaaaatcacctcgcagggcagcagcatcacaaagctgacgaatgacctggccaccaccaatggcaacgttaataaaaaggcggatgcgacagcgttgaccgcgctgaccaaccgggtaacgagcgcagaagggaagctggagagccagagcagcagcatcaccagtctgcagaacggactgacgactgcgaaccagaacatcggaaagaaggctgattcttcgacggtcacctccctgactaaccgtgtcacgcaggctgaaaataagctggagagccagagcagcagcgtcacatcactgaataacagcattgcggccacccagcaggatgcggacgcggcaaaatccatgcccggcaacatgctggcgaacaactcgttcgaacgcggttttgacggctggagtaactccggctggagcacgctggcagcgcagaacccgaagtccggcaaatacatcattcaggccacgaagacatccagcggctcaacggcctgtgaccaggtggtgaagctgacgggtggccagacgtaccgcgtgggtgcctgggtgcgcaggtctggcgatatggccatcagcaataccagcaataccaaaatcagcatccgcaacagctcaggaccgctgaaagatattacgatcccggccagcgtcggtactgcatggacttatatcagcggcgactataagccgacggcagacgccgagctgatcatctctctgcgctccagcctgtctgcgggttatctgtatctggacgatgcattctgcatcgatgtcagcgatgaggtggccaatactgtcaacgctgcagccatcagttcgctgacaacgcgcgtgaccagcgcagaggggaaaattacctcgcaggggcagcagctcaccagcctgcagaacaacctcggaaataaagcggatgccagcgctgtcagttcgctgacgacgcgggtaacaaatgctgaaaataaaatcacggccacgtcaaacagcctgaccagcctgaacagcaccgtcggtacgttatcctcgaccgtacaggcccaggggcagacgctggcagagacaaacggcaaggtcagctcgatgtactccatcaaagttgaaacaaataacgggaagaaggtgggcgccgggatcgtgctgggcagtgatggttccacaagcgacatgatcctctatgccgaccgtttctcgctgtttaaccgcaacagcaaggctgctgtgccggtgatgattgctgaagagaatgaacttttcatcgatagtgctcgtattaagaatgggtctatcggttcggcaaaagtgggcgatttacaatctgacaactatgtatctggtcaaacaggttggcgttttagcaaagatggcagtattgaaatttgtggcggagttgcggggaatggacgcatggtcatgaataacactggtatcagtatttttgataataatggcaggctacgcgtccggatgggtaagctgtaa

SEQ ID NO: 258863 - DNA, 615 bp, Klebsiella pneumoniae
atgcaagaacatatggtcagaatagaattgggtggtattcttggtaagaagtttggcaaatatcattgtcggatggtagcaacagcatctgaagcaataagagctttatgctgcactatcaatggatttgaaaaatttatgaataacagcaagtctatggggttaacttatgctgtttttaaaggaaagaggaatattggagaggatgatattccttttccaattaatgataaattaatacgaattgtcccggtcgttattggcagtaaaaaagctggcgtattacagacgatattaggtgtagcattgatcgcggtcgcttcaatagccactatgggatctggggggatatttgccgccattgctgctggttccggttggggaagtgccgcaatgctaggggcctcaatggtcctcggcggtgtactccagatgctttctccccaggttccaggcttagctagtcaacagtcacccgaaaacaaagcctcttatgcatttggcggagtaacgaataccaccgcacagggatatcctgtaccgctgttgtatgggaaacgtcttatcggcggggcaattatttcggctggaatttatgtagaagaccagcagtag

SEQ ID NO: 258864 - DNA, 735 bp, Klebsiella pneumoniae
atgcgtcagaaggttatcatggccattcagaagcatgcgcaggaggagtatcctcacgagtgttgtggtgtgattgcgcaacggggacgggtggagcgttactttccctgtcgtaatattgcggataatcccctggatcattttctccttgcgcctgaagattatgtgcaggtagaaaattggggtgttgttacgggaattgtccatagtcatcctgatgcgacgacgcagccaagcgagttggacaaggcgcagtgtgatgcaatgttattaccatggcatatctttagctggccggaaggggatctccgtacaatttttccgcgaggagaattaccgctactggaacgcccgtttgtgcttggacattatgattgctggggattggtcatgagttattttcgccagcagcatggaattgatctggcggattacagagttgattatccttggtgggaagataactacccggataacttctatcgtgattgctggtatgaatgtggctttcgcgagttttatggcccaccgcagcctggcgacatggtaattatgcaggtacaggcgaataagtggaatcatgcaggtattcttcttgaaggtaatatgctacttcatcacctatatggtcatttaagccagcgggtaccttatggtggttactggcgagaaagaacagtaaagattttgcgcttccataacaatgatactgaattgaataataatactttctga

SEQ ID NO: 258865 - DNA, 753 bp, Klebsiella pneumoniae
atgattacagctgattaccaaaaacttgaacctggaaatgaaatacgtttactggaaattgatggcagcgtatttggcatggatgatgtcttatatttccacggacacagtatcgcgcatagcgaagccgaaatcctggatgcaggaggggatgaaaaacgtttgcctgcaaaatctatttggtggcaaggcaatgaatatatgccgtggccttgcattgttgaagggatagaatccactaccagcggtcgtgacgcgcaaccatctctgaaggtggcaaatattgatgcttcgattaccgcgctgtgtttgtattacgatgacctgattcaggcaaaagtcactatccacgatacgttggcaaaatatctcgatgcacgtaatttccctgaaggtaatgcgtcagccgaccccacgcaggaaaaacgaaaagtttttttcattgatgccaaaagtgaggagactaatgaagcaattgagttttcacttgccagcccaatggatttgcaagggattatgatcccaacgcgccagctgcattctatctgtacctggtgtatcagaaatagatatcgtaccggtgatggatgtgattatatcggtcaacgatattttgatattaataatgtgcctgttagcgatccctccctcgatgtttgtagcggtacgttgtcagcctgtaaattacgttttggtgaggacaacgaactgccttttggtggtttccccggcacctctttaattcggagctag

SEQ ID NO: 258866 - DNA, 348 bp, Klebsiella pneumoniae; identical to SEQ ID NO: 184846

SEQ ID NO: 258867 - DNA, 1110 bp, Klebsiella pneumoniae
atggcgagtgaaaccaatataacgctgcgcgtaaataccagcgagctggaaaaaagtagccagcttcttgataagtatcaacagaaagcatccgtcgccaaccgtaaaagcgaagagctgaataaaacttttcgtgctgcaacagaaatacagaaaaggcatacggatagcctgaagaggctaatgcaaacgctccctcttcctccagccagaatgggatccatacttcaggatatggtgaagaaatctgagggtgagacctacaatataacgtctggccctaaaacttactgggattcactggcaggaattggtagccatccaaaagaggatgtgggtaatacgccaaaattttttctgcaaggcgaaaatatggaagaacgtcctgacgatgataagaaaaaaaggaggggcggcgattggctcggcggtttaatggaaggagttaaagaggcgtgggataaattccttaaagatggagaaaacgttcatggcaagcttaaggatttagctaaagacgcttttagctcaatggggaactcactggtggaatatataaccacaggaaaggcgagttttaatgatttcctgatgacctttctgaaagggacgctgaagatgctcagccaattattgttggtaaaagccatgcaggcttcctttaacgcgatgtcgaattccggcattggctgggtagcatccatcggtaaagttttcacgggccattccgatggcggctataccggagacgggggtaaatatgagccgagagggattgttcatggcggcgaatttgtttttactaaagaggcgacctcggcgatagggattggcaacctttacgccatgatgcgcggtgcgcaggggtatgcgggcggcggctatgtaggaacggcatcaatgcagggactgggttcttctggcgcagggccactgaccattcagacctcagtacttattcagaatcaaggctccgaaccgcaagcggtcgataataacggcgcgttaaatcgcgcctggcagcagacgatagaccgttccgttcgcgctggtgtggcaaatgaattgaggcctggtggccttatctggaatgcaaaccacgcacgttaa

SEQ ID NO: 258868 - DNA, 663 bp, Klebsiella pneumoniae
atggcttttgctctgcctaatggctcaactgtttttgtcggttccggcttgagtaatcctgtcgtggtaagtacggtatcgaatgcggaaggtgcggtttttaccgtgactgaaaatcataatcttagggtcgatgatgtcgtgcttatttcttcgggctggggtgccatcgatggtttagtcgccagaattactgcgcaaacccctaatagcgtgaccatttcggtcatcaactctagcgaccggaatttctttcctgcccatgccggtggcgggaaattgcaaaaaatcactgaatggactgaaattccacagattactgaagtcgcgctgtcagggggggagcagcagtatgcacaggtacagtttctggccgacgatcgccagcgtaatattggaacctttaaggccgctaaaaaccaaacgttcacattagcgcatgatgcttcattacctatctataatgtattgagcatggcagatcgttatggacaagttttaccactacgcatgtttgtgcctaatgcaaaagagtatcgctactggtccggcgttccgtcgtttgatccgcaaccaatgacggcggtgaatagcgttgaaaccgtacaagtcgcgttttccattcactctcgggatattactttctacaagtcggaagaataa

SEQ ID NO: 258869 - DNA, 420 bp, Klebsiella pneumoniae; identical to SEQ ID NO: 184847

SEQ ID NO: 258870 - DNA, 1107 bp, Klebsiella pneumoniae
atgaaaagaaaagtactggccctcgttatcccggcattattagctgctggcgctgcacactccgctgagatttataataaagacggaaataaactggacctttatggcaaggtggacggtctgcattatttctctgacgatgcatcaaaagatggcgatcagtcatacgtccgtcttggcttcaaaggcgaaactcagattaacgatcagctgaccggctacggtcagtgggaatataacgtccaggcgaacaacaccgaaggcgcggacaaccaatcctggacccgtctggcgttcgcaggcctcaagttcgctgattacggttcattcgattatggccgtaactacggcgtgctgtacgacgtagaaggctggaccgatatgctgccagaattcggcggcgactcttatacccaggcggataactttatgaccggccgcgccaacggcgtagcaacctaccgcaataccgacttcttcggtctggttaatggcctgaactttgccctgcagtaccagggtaaaaacgaaaatgccggcagcggagaaggcaccaacaatggcgatcgcagcgtacgtaacgctaacggcgatggttttggtctatccacttcttatgatttcggtatgggtatcagcgccgctgccgcctacacctcctctgaccgtaccaacgatcagatgacccagaccaccgcgcagggcgataaagcggaagcctggaccaccggcctgaaatatgacgccaataacatctatctggcgaccatgtattccgaaacccgcaatatgacgccttacggcaacggtaacggcgtagccaacaaaactcagaactttgaagtgactgctcagtatcagttcgacttcggcctgcgcccggcggtctctttcctgatgtctaaaggcaaagatctgaccaataccgatggcgacaaagacctggtgaaatatgctgacatcggcgcgacttattacttcaaccgcaatatgtctacctatgtcgattacaaaatcaacctgcttgacgaagacgacagcttctattccaacaacggcatctctaccgatgacgtggttgctttaggcctggtttaccagttctaa

SEQ ID NO: 258871 - DNA, 900 bp, Klebsiella pneumoniae
atggatggtgccatttttctccagcaagtggtcaatggaatgagccttgggggcatgtacgccctgattgccatcggttatacgatggtttatggggtgctgcgcctgatcaacttcgcccatgcggacgtgatgatggtcggggcgtttaccaccctgtttttgttttcttccattggactacccttcggggtagccgttttcctgaccctcgcgctgtgcggcctgttcggcatgctgatcgaccgggtggcctatcgcccgctgcgtcaggcatcaaaaatctcgatgctgatcaccgccatcggcgtcagcttcttcctcgaaaacctgttcaacgtgctgtttggcggcagctcgcgcttcttttccgcaccggaatttttcaacaacactcgcgcctttggtgacgtgattatcaccaacgtggcgttgatcgtgccgctgatcaccgtcctgctgctgctggcgatcctctggctgctgtaccgcacccgctacgggatggcgatccgcgcggtggccttcgacgttaataccgtccgcctgatgggcatcgacgccaaccgcattatctcgctggtgttcgccctcggcagcagcctcgcggcgctgggcggggtgttctactccatcagctacccgaccatcgacccgctgatgggcgtgctgatcggcctgaaggccttcgccgccgcggtgctcggcggaatcggcagcgtcaccggcgcggtgctcggcggctttattctcggctttaccgaggtggtggcggtcgccctctttcccgagctgggcggctacaaagacgcttttgcctttatgttcttgattctggtcctcttattccgcccggttggcattatgggcgatgaacgtctggaaaggagccgtttctga

SEQ ID NO: 258872 - DNA, 1137 bp, Klebsiella pneumoniae
atgaacaagttttccgggaaagcgtctttaatggccacgctggttgccgcgtgggtcggtgccagcagcgcgcaggcggctgaaattaaaattggcgtggtcttgccgctgagcggcgcgctaagcggctacggacaaccttcgcaaaaagggctggatatcatccagagcattacgccgacgttaaaaaacggcgacaccgtgaagcttatcgtgattgacgataagagcgacaaggtcgaagccgctaacgccatgcagcgcctggtctccagcgataaagtcgacgcggtgatcggcgaagtcacctcctccaataccctggcgatgaccaaaatcgccgacgacagtaaaacgccgctggtctcctcaaccgccaccaacgaccgcgtcacccgcaaccacccttacgtcagtcgggtctgcttctccgacagcttccagggagtggtcggcgctaacctcgcctcgcgcgatctgaaggctaaaaccgccgccatcgtcttcgacagcagcaacgactactccgttggcctggcgaaagccttccgcacgcagttcctgaaaaacggcggcaccattcctatcgaagttcaggctcccggcggtagcaaagactttaaggcccagctggccagcgtgaaggcgaagaacgtcgacatgatctatatgccgatctactacaccgaaggggcgctgatcgccgtacaggcgaagcagctggggctgagcaagccggtggtcggcggcgacgggctggcggcggatcaggtcttttttgacgtcggcaaagacgcggtcaacggctatatgaccaccgactactactcgccgaacgccaaagagcaaacgccggcgggcgaggtgtttatcaaagcctgggaagccaaataccagcagccgacccatacatggggcgcgatggcggcggacgcctataacgtcattatcaacgccatgaaccagtgcagcgacccgcgcgaccgggtttgcgttaacgaaaaaattcgcgctactaaggacttccagggcgtaaccggtacgctgacgttacaaaacggcgacgctatccgcagcgcggtcatcaacgaagtgaaggatggcaagctggcgtttcgtaccgtggttaatccttaa

SEQ ID NO: 258873 - DNA, 1008 bp, Klebsiella pneumoniae
atgcgcaatcaggatctgatcctcgccgccagcaaatgccgggtcgtcacccgttttcgcaacactatcggcctgccggggcgcctgagcgtgcgcctgcagcccaatcacccgaccgatgacctcaaaggcatcgccgccagcacgctcgacggcctgctgtacggcgcaggagacgcggtgatcggcatcaatccggccagcgacagcctgccggtgctggcgcagctaaaccatatgcttgacgatattattcagcgcttcgccattccgacccagtcgtgcattttgacccacgtcaccaacaccctgcagctgattgagcgcggcgcgccggtggatctggtgttccagtcggtggccggtaccgaagccgccaacagcggtttcggcattaatctggcgctgctgcaggaagcgcgggaagcggcgcttagcctgaaccgcggcacgctgggcaacaacgtgatgtattttgaaaccggccagggcagcgctctttccgccaacgcccaccacggcgttgatcagcagacctgcgaagcccgggcctacgccgtcgcccgacattttgagccgctgctggtcaatacggtggtgggctttatcggcccggagtatctgtacgatggtaagcagattatccgcgccgggctggaagatcacttctgcggcaagctgatggggctgcccatcggctgcgacgtttgctacaccaatcacgccgaagcggatcaggacgatatggataccctgctgacgctgctttgcgcggccgggctgacctttttgatcggcgtaccgggggcagacgatattatgctcaactaccaaagcacctcgttccacgatgccctttacgcccgccgactgctgggtttacagcatgcgcctgagttcgccgactggctgacgaagatgcagattattgaccgccacggcgcgctgcgtctgaccgatgcccgccatccgctgctttccgtcctgccgcaaggagaaccggtatga

SEQ ID NO: 258874 - DNA, 507 bp, Klebsiella pneumoniae
atggcatcggcggctaattccccccgtctcgcgctgcgcttagccgggctacaggtttataaccgtctgcggttgagtagcgcggataaacgcaaccgcaatccggaggatttaacccagttcacagtcgcctgcaattcggtagcccggataaggcaacagccgccatccgggggatttaacccgattcacagccgcctgcaattgggtagcccggataaggcgcagccgccatccgggggatttaacccgattcacagccgcctgcaattgggtagcccggataaggcgcacccgccatccgggggatttaacccggttcacagccgtctgcaattgggtagcccggacaggcgcacagcgccgcctccgggatggtctcctgaagccagatttacaagactttcgataaataatggcgttgcatacccgcgtgcggaaaatccggcagcgacatctgcagctgatagcccagcttctgataaaacggcagcgcctgaaagctga

SEQ ID NO: 258875 - DNA, 861 bp, Klebsiella pneumoniae
atgtcgcagatcctaacgctcccgcgtcgctctgttcagctgcggcccttactgtggcttctgccgccgctgctggtgctggcgaccctgtttttctacccgctgctgctgatcggcgaacaggcgctacgtgatgccagcggtcacctgagccttgaaaccttctggcaggtcgtgggatcccggcgctttatcaacgcgttgctcaatacgatgcaaatcgcggtcttcgccaccctgggctgcctgctgctcggcagcgtcctggcgctgattctggtgtttattccctttcccggcagccagttgatcagccgggtgattgatacctttattgccctgccgacctttctcattaccctggcgtttacttttatctacggctccgcgggtttgctgaatggtgcgctaatgtcgctattgtctttcgaactgccgccgatcgattttctttattccattcagggcgtgattctggcggaaatcaccgttttcacgcctctggtgatgcgtccgctgatggccgggttgcggcagattgataaaagccagctagaggcggcgagtattctcggcgcgcatccgctgcgggttatcggccaggtgattttcccggcggcgctgccggcgctgatggcgggcggtagcctgtgcctgctgctgacgactaacgagttcggcatcgtactgtttatcggcgccaaaggcgtgaatacgctgccgatgatggtgtacagcaaggctattctcgaatcggattacagccaggcctgcatgattgccctgataaatattctgctgtcgctgggactgtttataatctatcgcgtggccgccgcgcgtaccggcgtgaggagctaa

SEQ ID NO: 258876 - DNA, 1089 bp, Klebsiella pneumoniae
  misc_feature (384)..(393): n is a, c, g, or t
atgttaatgaaaacaaccgtcgctcatcccccgtcgtcgacgggaacgtccgggatcactctcgactcgctgcgcgtttcttatcacggcaacgtggtgctgaagccgctgaccttaactattgaaccgggtgaagtgctggcgctgatcggtccatccggatccggaaaaaccacggtgctgcgggcgatagccggatttgtacagccggcgggcgggcggattttgctgggcgatacggatgtcacccacctgccgccgtatcaacgcggccttggcatggtggtgcaaaactacgccctgtttccgcatatgaaggtagaagataacgtcgccttcggcctgcgggcgcagaagcagccgaaaacggagatagctgcacgnnnnnnnnnngattacgccagccgctatccgcaccagctatccggcggccagcagcagcgcgtcgcgattgcccgcgccatcgccgtacgtccgcgggtcttgctgcttgatgagccgctctcggcgctggatgcgcaaatccgtcacaacatggtagaggaaattgcccgcctgcaccgcgaactgccggaactcacaattctctacgttacccacgatcagaccgaagccctgaccctggcggacaagattggcatcatgaaagacggctcgctcattgcccatggcgaaacccatcagctttaccactatccgcctaatcgtttcaccgccgagtttctcggacgcgccaatatcctgcaggcgacggcgctgaaagataccgcagggcctggcctggtcagcatcagctgcggcggtggattgattaccgctttcagccgcggcggtcagcacggcaataataagctgctgtgtattcgtccgcagcatatgagcctcgcgccgcgaacggccaccagcaaccggcttaacgctaccctgcagtcggtgcactggcagggcgatttgacccacctgctatgcgacgtggccggggaggcggtgcgcattgtgatgacccacgtggatccgctgccgcgggccggcgacaggctggcgctctattttgaacccaacgatgcggtcctgattgaggtgtcataa

SEQ ID NO: 258877 - DNA, 594 bp, Klebsiella pneumoniae
atgaccacaatcgcccttattgacgatcatcttatcgtccgctccggctttgcccaactgctggggctggaagccgattttcaggtcgtcgcagaattcggttccgggcgcgaagcgctggcggggctgcccggccgcggcgtgcaggtctgcatctgcgatatctcgatgccggatatctccgggcttgagctgttaagccagctaccgaaaggaatggcgatcgtaatgctgtcggtgcacgacagtccggcgctggtggagcaggcgctgaacgccggcgcgcgcggttttctctccaagcgctgcagcccggatgagctgatcgctgccgtccgcaccgtggcggccggcggctgctatctgacgccggatatcgccatgaagctggcggccggacgacgggacccgctgaccaaacgcgaacgcgaagtggcggaaaagctggcgcaggggatggcagtaaaggagattgccgccgagctgggcctgtcgccaaaaaccgtgcacgttcatcgtgccaatctgctggaaaagctgggcgtcagcaacgacgttgagctggcgcgccgcatgttcgatagctggcaatga

SEQ ID NO: 258878 - DNA, 291 bp, Klebsiella pneumoniae
atgcaacaagcgactcatgaaaacgttattctacagctcaccgtgcgcaaccatcccggcgtgatgacccacgtttgcggcctgtttgcccgccgcgcatttaacgtggaaggcattctttgtctgccgattcaggacagcaaccagagccgcatctggctactggtcaacgacgatcagcgcctcgggcagatgattagtcagattgaaaagctggaagacgttgagaaagtggtacgcaatcagtccgatccctccatgttcagcaaaattgcggtgttcttcgaataa

SEQ ID NO: 258879 - DNA, 435 bp, Klebsiella pneumoniae
atgattggtatatttaaatatgcagcaaaaaaagacatggtattaggtattagcgatcagcaaaccggggctcgggccgttatattaccgatgtcctcaccgctaaataaaattctgtggacggttgatgacaggaccggcgagatcgctctggccgccagcgaggagctgctgctgggtatccacggggatcaaatgggttcaggcgcagcgattgaactccaggcgcgggggagtaaagcgacacagcggtgggatttagtcagctcacgtcgctttattaaaagcaaacaaaacccgagctttgttattgacagcgtcaaccgcggcacgcaccaggggaatccgattatactttacgaatttaatggttcggaagcgcagcagtgggtatttgtgccgatggatatgttaacggcaaatagcccggaataa

SEQ ID NO: 258880 - DNA, 618 bp, Klebsiella pneumoniae; identical to SEQ ID NO: 252629

SEQ ID NO: 258881 - DNA, 531 bp, Klebsiella pneumoniae
atgcaggaaatagttaaagcagcgccgctgttatgttttttactgctgggctgtgatccggcagaaaaagaagcaccgcgcggcagcgggaagaccagctacgtggcggctaatctgttgggctataaccatatggcaggcacgaatatcaactggttctccgtcaacggctatcgggggcacgccggggggtttacctgctgcatatcgctgccggaaaaatggcggcccaatatgcaggtggcagtggagtgggaggttaaccctaacccgtttccgaaggatctcccccacttctatgatccaaactatgaacattatatggaaaaatataaggctacctttcgtcagtataaagcggtggccactattcccgaatatgaagattcctgcggcctgcaggtgcatttcttgccctgtcagcagattaaagtaacggccacctgccacgggccgacccatcctgaccacccgattaaagaacctttcgatctgccggagtctgcccagtgcccgccagaaacgccatga

SEQ ID NO: 258882 - DNA, 414 bp, Klebsiella pneumoniae
  misc_feature (305)..(314): n is a, c, g, or t
atggaccaaaaacgacttactcacctgcggcaactggaggcggaaagcatccatattattcgtgaggtggccgccgaattctctaacccggtgatgatgtactccatcggtaaagactccagcgtaatgctgcatctggcgcgtaaagcgttttatccaggaactctgccgttcccgctgctgcacgttgataccggctggaaattccgcgaaatgtacgagttccgcgaccgtaccgctaaagcctacggctgcgaactgctggtgcataaaaatccggaaggggtggcgatggggattaaccnnnnnnnnnngcctacggctgcgaactgctggtgcataaaaatccggaaggggtggcgatggggattaacccgttcgttcacggcagcgccaaacataccgatatcatga

SEQ ID NO: 258883 - DNA, 189 bp, Klebsiella pneumoniae
atgaaagccatgcttcgctattttttaaaggatatttatgacggcattcgcactcacgtaatattaatctgcgcaatagtacttacagggcttatttaccgggctttcgattttgacatttggttcacgcctgtcgttgtcattgttatattggttgcccattgggtattaagccaattcaggatttaa

SEQ ID NO: 258884 - DNA, 357 bp, Klebsiella pneumoniae
atgagcaactctataggtgagagagtggtatcaattcgcaaaaaggctgatttaaaccagcgtgatttcgccgctcgccttgggatatccaacggtggtatcagccagattgagaatgggaaggctatgcccggaggtgattttctccttcgaatacaccaggagtttggcgttgatataacatggttgctcacgggtgtgagcaaccacgctcaggtgaatgaggttcaacctatgtctccagagaaaaaagagctactggatgcatttgatggcatgacaccagaacaacggagggcgattcttgaggtcggcaaaggactcgcacaaccaaaaccgagcaaatttgcaggttaa

SEQ ID NO: 258885 - DNA, 348 bp, Klebsiella pneumoniae
atgcgttatctctgggttagtgtagttgctttggttttagtgactgggtgttcaacaaagaattatggtcgacaaggtgaacttactcagtatgagaaggagactatgtcttgccgtgaaatagagttagaggaagccaaagttcatggttttctgcaacatgttgataaagaaagccagttcgatggtcgttcagttctttcctttttgggggattttggcatcggcaatactatggaaaaaaatagtgctcttgagagtgcaaacacccgactgtcacaactgcaactacttagggtaaaaaatggctgtactccaggtgtctccaaaacgcccttaaacacatag

SEQ ID NO: 258886 - DNA, 234 bp, Klebsiella pneumoniae
atgtttaaggggatacccgtcaacggagcgggcatttcagtgggggtaataaatatctctgaggataaaaccgtgatgtcgtttatcgtcaattacaccgcgccgggcagtgatatcgtatttgaccaggaaacgttcagttgtgattacgatttagatggtcctaaccccgaagaaaatgcctacacccaccttagaacgctcagcaaattcagtgatgctattgaggtttaa

SEQ ID NO: 258887 - DNA, 177 bp, Klebsiella pneumoniae
atggagttatcagaaggcaataccgtgatttgctataacaatactgatgtgactgacattctgactgtcggaaaggagtaccaggttgagaaaatactggatgctgatttgatgacactggtcggcgtgtcagagccggtctttatctggcggtttatctctccttccctgttttga

SEQ ID NO: 258888 - DNA, 1503 bp, Klebsiella pneumoniae
atgggcagtgcattgctcatgcaccacaccgggaaaagcgtcgctgaatatttagatctttaccttgcaaccgtattctttattacccctgagcagtacggtgcaaagggggatactgttcatgatgatacagatggtctgcaggatgcgatagacaaagcggcagcgaccagccttatgtccggtggcgtttatactcccgtgctcgtgcaactcaacaagccgtaccggataacccgaaccataacgattgatgcttcccgagtgaggcttaacgctatatcgggttgtggggtttatgttgaccctgatggaacgtacacagataacaaagtattcaacattacgggcaacgggccgaatgccgctgtggcggccagcaaggtgggagcgttgtttgatggtgttttgtttctcaccagtggtgaaaagaagcttgacctttttcacgcagtgcgtgacagcacagccagtaatgataacggggcgtgtcttcataacgtaaacaacattgccgctcgtggtttcagaacgattttcactcacggcgcagggggatggggctggaatttcaccggatgcctgttcagcggaaacgttcgcctgatggacatcatcaccgcgggtgacacttacgagagacacacgtttgtcggctgtctgtggggtaacggtggttacgcattcagggtgaataaccccaacgggaaaatttactggattggtggctcagttgattattgtgacggtctggcacaaatcacctccgggcatatggaagttaacgggcataacgaatggactggcagaacgaagcccctggtagaaatcaccggctcgaatgcatcgctgaccgtctccggggcaatttttgtgcggggtaatactgatactcaatactatatgtttcagcaatatcagaaacggcaggtgacactgaaagacacggtttttattactgacggtgtgaacgccagtaaaggcctgatatccaaccttgaggttgttaaaagcaatctgacattccctaatgatgcagccaaaagcattgcttataattcatctgatgaaagcctgctgaccagcaataatgctgttgttgatttctcgttatcagcaactgcgaaccatacggtatcagtgacagatggtaaactgacagtgacggcagtcaccggcggcaccacttcgcatctttatatcgatatacccgttatgggtaatacaaaggttggtttcaaattagttgcatcgaatacatcttcactgggggcaatatcgctgaacaaatcgctgctcacattgagtaaaaagcaaatatccgacctgtcgaactcagggacggcatcatggccagccagcgctgccagtgtggcgggcggttcggtgacgctatttgatatccccagacaggccgcttttctgaggctcgattttaacgtggcaaatttgaccacgggtacaagcttcattattgaatcgctgaaaatgttcacatattaa

SEQ ID NO: 258889 - DNA, 330 bp, Klebsiella pneumoniae
atgattgttgatatccagctcaagacgcagctgcggatagcgggcgagaaaatcgggcaaaagcggagaaatcagctgcatcgcggtaaaatgagcgcaggctacgcgcagcgttccgctggggatcgctcgttcactctgcccggcgatctcatccgacagctgcgtcagggtgcgcgttttttgcagtaccttttcccccgcagccgtgagcgtcagcttgcgggtagagcgatgaaccagtcgggtgccagcccactgctccatctgttcaagataacggctcaccatcggccgcgacatccccagcgcccgcgcggcggcgcttaa

SEQ ID NO: 258890 - DNA, 348 bp, Klebsiella pneumoniae
gtgaccgccgggacgcatttgacctcgctggtaccgccgcagcactggctgatcgctaacctcaaagagacgcagctggcggaggtccgcgtcgggcagccggtaacctttaccgttgatgcgctgaacagcgagaaattcaccggtacggtgcagagcatctccccggccaccggggttgagttcagcgccatttcgccggacaacgccaccggcaacttcgtcaaaattgcccagcgcattccggtacgcatcgccgtggatgaggggcagaaaaacagccagcgcctgcggccggggatgtcggtgcaggtcaccatcgacacccgcggggaggagacacgatga

SEQ ID NO: 258891 - DNA, 369 bp, Klebsiella pneumoniae
atgagtcagaatatcggcggtctgctggggtcggccattctcggcacctttcagacatggcgggagaagtttcactccagccagctcgccgaccagttgaccaccctcaatccgctgattactgaacgtttgcagcagtacagccaaatgtatcaaagccagattggcgacagcaccctgctcaacgttcaggccaccacgctgctacaaaacgccgccacgctgcaggccaatattctcgcttacaatgatacctatctgctgacggcagcgatttcagccgccacgctggtgtgggttttctggcgcttaataagattacgtattaccgcccgcgttgcgttgaagcgcgcgacgggaagcaaataa

SEQ ID NO: 258892 - DNA, 1254 bp, Klebsiella pneumoniae
atgcgcatgcttgcccgaatgtttgttttactccttctgcttacggcgtgcagcgcttccgccagcctgttaagccagcagggcacccccgcgcgctatatgcaaacgaccgaagatgcggatatctgggcgcaggttggcaaccaggtagtgagcgtcggcaacgtacgggcagggcaaatactggcggtagtgccgaccgcagccgattactacgagtttaattttggctttgcgaccggctttatcgataaaggccaccttgggccggtgcagggcaagcagcgggttgaggatagcctcggcgacctgcataagcctctgagcaaccagaatctcattacctggaaagatacgcccgtctatgatggcccctccgctggcagcgcgccgttcggcaccctggcgaataatttgcgctatccgattatcagcaagctccgggatcggttgaatcaaacctggtttcagatacgcatcggtaaccgcctggcgtgggtgagcagtctggatgcgcaggaagataacggcatccccatactcacttatcaccatattctgcgtgacgaagaaaacacccggtttcgtcatacctcgaccacgacttccgttcgcgccttcagcaaccagatgacctggctacgcgaccagggctatgccacgctgagcatgtatcaactggaaggttatctgcgtaataaagtgaatcttccggcgcgttcggtggtgatcacttttgacgatggtctgaaatcggtcaaccgctatgcgtacccgattcttaagcaatatggctttcacgctacggcttttattatttcatcgcgcatcaagcgccatccgcagaaatgggcgccgaactcgctgcagtttatgagcatttccgagttaaaacagattcaggatgtcttcgacgtgcagtcgcatacccatttcctgcatcgggttgatgcccggcgtcatccgattctgctcagccgcagctatcacaatattctgtttgattttgaacactcgcggcgggcgctggcgcagtttaatccccacgtgctctatctttcttatccgtttggcggctataacgctaaggcggttcaggcggcgaacgacgccggttttcatctggcggtgactaccgtgagaggtaaggtaaagccgggcgacaatccgttcttattgaaaaggctatatattctcagaacggattcgctggagacgatgtcgcggctgattagcaatcagccgcaggggtaa

SEQ ID NO: 258893 - DNA, 1086 bp, Klebsiella pneumoniae
atgctgaaaaaaacaaagccaggagccctatgtatatccaccatcaatgcagtgatagctttatgcatattattttatggtcaccccgtcaaggcggctcaagagtgtcgatttaataacggtaaaggcggtagtacaacgctggttaatggaagctacaacgaaatcaggctacccacgccaaccagcggtcaatctcatatgatcgcacagtttaatacgagtctaacaccaacgattgtcggcaggtgtggcatgggtgatgatggcgaagatatgtgggctaaaacctcaccagatataaccggaaacggcctttataatttcgcttcttttcttactaatattccaggcatcgagtaccaggtccgaataaatacaacttccggcatcggaaacatgtttgcgcaaaacacacaaggctttcaaattatttcttataacgatggccatgaagataactgggataataaaactttccaggccgcaatttatatctatttaaaagagtcatttaaaggaaacccaaataaaataacccatttaaaaccccagcctggactattaggctgggtgagtttgggtgaacccacagatagcaacaatcagccttatgccttttatgtcacggaagataccttttccattcctctggttttaccgacctgcagcgtgatggcgcttggcgacggaggtactaatgttgcaatgggggattatttcatatcagactttaagaatagcaataccactaaagatgttccgtttagtattgatgtcagcaactgtaccagcgtggcaaaattcacaacaaaaatgaccacgctcaacacgaccggaagcggagcagacctgctgggtaatagcctgaccgcgaacgcggctgccggtatcggcgtaaaaattctctacaataaaacgactcaacttattcccaacaacgctaactctaattacgtggtaagcgacgagactattccaggcagcaaaaattttaactttattgcccgtatggaaagggatggtaacccgcttgttgtgggccaatttaaagccactgccgtttttaacatgacctatgactga

SEQ ID NO: 258894 - DNA, 618 bp, Klebsiella pneumoniae
atgtcattctgtatccgtattatcgacccaataggaaaggcattgttggctgtgggaatgactggcggtctgtgcatagcttcttgttttgctgatggaaataacgaagggctggacgttactctgcaggccaatattgtggagaatacctgccagatttcactttccgataatgggacagtgcatttacccattgtttcccgcagttggttttataccaacgacggcaacccccgcctgcagccagatgacgccgccagcggtacgctctttagcgtgaatgtggaaagttgctcaggcgatggcgcgacggtcaataccatgacctttagttttcagccgcaaaatggggtctggcctgcggaaagtcagcaggtttttattaatgaaacaccggcgacggcaggcggagcggaaaacgtggggattgtcatcttttcttcccgcgataaccgtaacgtcgtaaatagcgacggcagctccgctgtcgctatcgatgtcgcaaaagcggaaagctatttaaccagctacgatttttacgcccgctatcagagcaccggtacggtaagcgctggaaaagtgaccagccacgttttagtggatgcgatatacaattaa

SEQ ID NO: 258895 - DNA, 558 bp, Klebsiella pneumoniae
atgaaaaaaaactcttttctgggcggtgctatcgtcacattactcttctctgcgccctctttcgccgtgataaccggaaccagtagcgtttcggctacttttacttccactattgaagccggtacctgcacggcgcagatccagaacgccagcggtcagcccgtaagtacgctcgatttcggcgatgtctttaaatctgacctggtcaaacaaagccgcagcgaaccgttcaaagtggccttcaccgattgtgcaggcgtaaagtcggctaaatatcaggttattccaggcagcggcggcggctgctcgggcccgagttctaacggcgactcgtttgccggaggcaactctacaggttttgaagtgtggcaaggggaatcaggaaccggaacgttactgagctgcaataccaaaccttcgcaaactctcgccatcagcggcagttcgctcaacgtcgatttttcttcacgcatcgttatcgcaaaagacagaaaaatcgctaacgtgacagcgggtagcgtcagctcgcctgtgacgtttgttatcacctatcagtaa

SEQ ID NO: 258896 - DNA, 582 bp, Klebsiella pneumoniae
atgaagataatgagtctgaaacaactttatctggtgggctgtagcggcattttgttcgccactgcgttaccggggcaggcagcctcactggatgtcacctttaccgccaacctgcgcgaaactacctgcgatatggccattgagggcggcagcggtgatggcaaaaacaacaccattcctatcggtacgaatggcgttgtgagcctggataaaatcatcagcggcgacagcgcagcgcaggcaacctttaagttgaaaatcaccgaatgccctgaaagcctgcaatcgcttaaaaccaccatcagcgggacgaaatcagggtacaaagataccgtgataataaatggcgcgacaacggcggatgccgctgactctcttgggatcgccatcgccagagcgtcagcaaccgatgcgcctttcattattaatgccggtgcggacgatgggcgtctgatatggaccagccaggagataaaaaataaagaagtgccgctagtcgcgacgctggttgaaacgcaagcaggccagggcgctacgggtactttcagcgcgctggctactttcaatttcacctatgaataa

SEQ ID NO: 258897 - DNA, 2556 bp, Klebsiella pneumoniae
atgttttttcgtcgatcattattgtgtacaactatctgtattgcactccagtcctcagtaatggcggaagaagctccttcagttccagcagatgaaattgaatttaacgatcagtttttatttagtaccggcgacaatattgacgttagccgtttttctaaaggtaacccgataccaccgggcacctataaaacgcaaatcttgctaaacagcaagcccaagatgctggtggattttacctttaacgataacggtacgcccagagctacgccctgttttaccagtaagctgctggcgcaaacaggcgttaacacagaaggactggatctcgaatccgccgcctgcatcgatattgcacaacagtatccgcaatcctcatggaattatgatattggcacccaggagctggcgatctccatgccgcaaatctatgtccttaaacgccctgatggctacgtcgatccctcgctctggcaggacggaattaccgctgcaatggtctcttacgatcttaacgcctggcactctgaaagcgatggcagcagttctgattcggtttatgccggactgaagtacggggtcaacatcggtgcctggcacctgcgcgccaggggaaacgccaactgggatcaggatagcggcagcgattacgcaagccaggatatctatctgcagcgtgatatcacctcattgcgctcacagtttctggtgggagattcctatacccgcggcgatggcttcgattcatttagcctgcggggcgtgcgcttttacaacgacgatcgcatgctgcccggcggagcttccacttacgcgcctgagattcgcggcgtggcaaagagcaatgcgaaggttgtgattaagcaaagcggcaataaaatctatgaaactaccgtgccgccaggtccatttgccattaccgatctcagcaccaccggctatggtagcgacctgaacgtatcgattgaagaagccgatggcagcgtgcgcgtcttctcggtgccctactcttcggttacgcaaatgctgcgcccgggctatggtcgctgggacatcggcgccggcgaactgcgcgacaagagtttaaaagagaaaccagggctgggttacgccaccggttattacggcctgaacaacaccttcaccggctatgccggcgtgcagtatatggatgtcggctattacgccgggttagtgggtatcgccactaatacgcccgtcggcgcattcgcatttgacattacacactccacaaccgccattgatgacctggatactctgacgggccaaagctatcgcgtgacctggagcaagctgattgaggaatcccgcacctcattcaatattgctgcctaccggttttccactgaaaactatatgtcattacgggatgcagccacgttaaatgacaacctcaggcacaacaacgacgatacgccgcaagaattttcccgttttcagcggatgaaaaaccaattccaggtcaacattagtcagccggtctctctctggagcaacagtaatggcaacctgtatgtcagcggcagctgggaagattactggaataaatcctcctcgacctctcagtactcggttggctataacgactcattttcatgggccagctatagcatttcagtccagcgttcctataacgaatatggcgataaggacgacagcgtctatctcaacctgagcattccgctggaaaacctgctggggcgcaataagcggccgctcggtttttctaccgtcaatatgagcgtcaacagcgatctgaagtcgaacaataatttctctaccagcgccaacggcaataccgacgactatcgcttcagctacagccttaataccagcgccagccggtcagatggctcgtcaatcaaccaggttggtggttacggcagctacagcagcccctggggacccttaagcctgtcggcttctgcttccgatgatgccagccgccagtactccatgagctacagcggcggcatgctgctgcattccggcggcctgactctggcccccaacagcatcggtgataccgataccctggcgctggtgcacgctgcgggagccaaaggcgctcgtttaaccaacggcgacgggcaaattaacggttcgggatacgccatccagccctatttatcggcttaccgtgagaacaacgtcggcctcaatatcgacaccatggaagaggatgtggaggtaaaaaacaccagcacggtcgttgttccccgcagcggtgccgttgttcgggtcgattttgagaccgatgaagggcgctcgctgttacttgaactacagcgttccgacaacggatttatcccgctcggcgccgatgtgcaaaatgaacggggcgagtctatcggtaccgtcggacaggcgggaatggcctatatccgcggcgtcaccgagagcggaaagctgcgggttatctggggaagcggaagcgggaaccgttgcaccgtgaactaccggctctctgacggtggggaggataaaaaaataggccttacccgtctgctaaataaccaacgttgccagatgtaa

SEQ ID NO: 258898 - DNA, 723 bp, Klebsiella pneumoniae
atgcatcgttttatccaacttacgctgacatcgctggtgtgcgccagcgcggcgttcagtacatttaatgcctgcgcggatattgttatttccggcacccgcgtgatctacccgcaatcatccaaagacgtgaccgttaaaatggaaaaccgcggcactaaaccgctgctggtacagtcgtggcttgatgacggtcgcgataccgttaatccgcaggaactgaagctgccgtttatcgtcacgccgccggtatcacgtatcgacccgtcgaaggggcaaaccgtgcgtattacctggacccagcagcctctggcgcaggatcgggaatcgctgttctggtttaacgtccttgaagttccgccaaaagcgaaagacggagacagccaaaacgtattgcaactggcgtttcgtacccgcattaagatgttttttcgcccggatggtttgccgggagatccggctattgccgccggtaatcttaaatggtctcagcaaggcaccgcgctcattgccaataatagcagcccttattatgtgtcaatggctaaagcgaccgttaccgtcaacggtaaaaaaatagaggtcgattcccacactattccgccgctctcgaatgaaaccattccggtaaaaaatgcgccagcgctgcgaggcggaaaaattgaatataccgcgatcaatgattttggcggtaccgaaaaacatcaggccgccatcaattaa

SEQ ID NO: 258899 - DNA, 606 bp, Klebsiella pneumoniae
atgaataagttaaccattgcggctgcatcaattattctggctttaggctcagcctccgcatttgctgatgatacgataaccacgccaggcaccgatgttggcctcattacgtttgatggcgccgtttccgacaccacttgcaccatcaccaccaacaacggcgttgacgccagaaacgtcaccatcagcatgccggtggtgaaaaaagccgatgtcgaaggcaccaccgttgacgcaggcgttggctcgaaagagtttgaactgcacctgagcaactgcccggacacgctgaccaaagcatccgcgacctttacttcccagcagtttgccgaactctctaacggcacgctgaaaactgacccgagcgttaccggtcatgccgataacgttagcctggcgctatttaacaacagcaccaccgataccgatcgtattcaggttggcctgccgaataacaacacccaggtcgccaccctgaccagcggcgaaggtgtgctggcttaccgcgtggcttacgtcccaagcgccgattgggttaaaggcaccaacgatatcaccgcgggtaaagtgaccagcaacgcgacttttactatgtcttacgagtaa

SEQ ID NO: 258900 - DNA, 513 bp, Klebsiella pneumoniae
gtgcgacagcgcggctttacgttgctggaaatgatgctcattttgctgctgatgggcgtcagcgcaggcatggtgatgctggcctttcccgcctcgcgcgatgatagcgcggcgcagaccctggcgcgctttgaggcgcagctgcgctttgtccagcagcgaggtctacaaaccggtcagttttttggcgtctcggtgcatcccgatagatggcagtttctggtcctgcaagcccgcgaaagccatgagcccccctctgtcggcaacgactggaacggctatcgttggctgccgctaagcgccggacgcgtcgccacttcgggtaacgtcatcggggacaagctacgcctcgcttttccgcagggcgaggcctggacgccgggcgacaaccccgatgtgctgatctttcctggcggggagatgaccccctttcggctgaccgtcggcgaagccacgggtatcgcgtttaatgcgcgcggcgaaagccagcctcaaccgcaggaggcgccatga

SEQ ID NO: 258901 - DNA, 651 bp, Klebsiella pneumoniae
gtgaatatcgttcaccgcgccgctggtggccagctgagcgggcgcagcgaccggcgcacgggccttcagcgcctcaaccacgcgcgcgcgccattcagcggccgcggcctgatattcaacgtcggcatcaacgcgatcgagcagacgttccgcgccgagctcggccagcttgttgtcgaaatctttgccggactgacagaaaaattcataagaggtatcgccgagaccaaagacggcgaacgcggtcccgtccagcttcggcgctttcttagagaacaggaacttatgcaatgcgaccgcttcttccggcggctctccttccccctgggtggacgtcactaccaccagcagtttttccgcagcaatttgtttgaatttataatcgcctgcattcaccagcttcacgttcagcttcgccgccagcagatcgtcacgcagcgcttcggcgacgcggcgggcgttgccggtttgcgaggcggaaatcagcgtgatcgtcggtacctcggcggccggggcgggttcggctaccgccgcgccggactgctgattcagcacgccccagaaatagccagatacccaggcgagctgagtgggcgtgaagtcagtggtggccgcctgaaggcgcgccagttgctccgggttgagcggtag

SEQ ID NO: 258902 - DNA, 468 bp, Klebsiella pneumoniae
gtgggcgccgtcattgatccagcgccacagctcggccccctgctcgcgcagtttgtcctgaacatagattttttgttgttgatcgcgggaccaggccagatcgatacgggtcagcagaccttccttcacatagctctgccactccacctgatagaggaaatcttcggtgaagtgcgggttgccgaagaacaaccagttcttgccttgcgctccgtccgcagcgcgctgctgcataaaggcgcggaacggcgcaataccggtgcccgggccaatcatgatcaccggggtctccgggttggctggcagacggaagttgtcgttgtgttcgataaagacacggacttcgccatcctcttccacgcggtcggcgaggaaactggaggcgccgccagcccgggcgcggccttcaatttcatagcgcaccacgcccacggtgacatgcacctcgctctccacttccgcctgtga

SEQ ID NO: 258903 - DNA, 1092 bp, Klebsiella pneumoniae
atgaaaaacgcgatttatcttttaaccggcggcattgctctcgccctgtttgccgcagcaccggcacgcgcggcgatgggcggctgcgaagccgtaggcgggcctgctaattttactaccagctttgccaatgactggacaaaagagcaaaacgtcgccggaactttaatagacatgacctccggcaccaactccggcggcagctataaaatgatttgcgactgccccgccaacaccggggttaatctctactattcagcaaccacgccgttagctcactccggctattccggatttcaaaaattaaacgacagcctgaatattaaaacggtgattaccgatatacccggcgtatcggcgcttacggttcctactaacataaactcaccggttagaggcgaaggttattttaaggctgcaaacgataatggcgtatgcagcggcgatcctgaagatcaacgcgccgggacatttaccgtaggcagtaacgtcagcattacctttcgcgtcacgaaatcttttttaggccggatggagatccccagcacgcatattgctaccctccagtcggcctggagtagcaccgttaattatgcaaaaaacgtctacaaagatattgccgatatttatctcgagggcagcatcaccgttccgcaaagctgtaagattaacgaaggcgatgtcattcgggtcaaccttgggcaaatcagcgcctcaaaattcactactaaggaccacatgcctgacggatatacgcctgtaaagtttgatattgtctacgattgtggggatacgtccttgtttggacaaaatgactatgtcactctggctgttcagggtgaggacatcgccgatgagtacacattagctgcccgccgtagagaatcagataatgtcgcggatattggtattcatatgaataaccttagcgcgggggcaggtcttatcaccgttacaggagactctggtatgactttaggtgattcggcaggcattctccatatgcgggcataccccattaacctggtcggtggagccctacagccagggcctttccgtacctctgcaaccctcaccgcaacggttagatag

SEQ ID NO: 258904 - DNA, 876 bp, Klebsiella pneumoniae
  misc_feature (758)..(767): n is a, c, g, or t
atgagttacctgttagcgttagatgccgggaccggcagcgttcgggcggtcgtattcgatctccagggccgtcagattgcggtcggtcaggccgaatggaagcacctgagcgttgagaatgtccccggctcaatggagttcgatctcagcgtcaactggcagctggcctgtcagtgtatccgccaggcgctggccgccgcccatctctctgcggcggatattcagtccgtggcctgctgctcgatgcgtgaaggcatcgtgctttacgaccgcaacggcgaggccatctgggcctgcgccaacgttgacgctcgcgccagccgcgaggtggcggagctcaaagagatccacgacgaccgttttgaatccgaagtgtacagcgtgtcggggcagaccctggcgctgagcgccatgccacgcctgctttggctggcccaccatcgcccggatatctaccgcaaagcggcgaccatcaccatgatcagcgactggctggcggcgaagctctccggcgagctggcggtcgacccttctaacgccggaaccaccggcatgctcgacctgttcagccgcgactggcgcccggcgctgctggatatggccggactgcgggccgatattctctcgccggtcaaggagaccggcagcgtactgggggcggtgaccgacgcggcggcggcgcaaagcgggctgcgcgcaggcacgccggtggtgatgggcggcggcgacgtccagctcggctgcctggggctcggcgnnnnnnnnnnggctgcctgggtctcggcgtggtgcgcgccgggcagacggcggtgctcggcggcactttctggcagcaggtggttaacctgccggaagtccgtactgacccggagatga

SEQ ID NO: 258905 - DNA, 342 bp, Klebsiella pneumoniae
gtgagacaggcggcggaccgcctctatctcttcggcctgcgccgtcagcagcggcgcgccgtcgggaacggtcggcatcaccaggaccgcatcgcccaactgcgcgtcccaccaggcggtaaaacgctcgcgctgctggcaggcggcgtcaaactgcgcgcgggtgaccgctttgccccagaaaaaacgctcgcggacgtccggccccagctgcaggccgtagcgctcaatggtttccccctgcgcctgccaggcttcgtagccctgaatctggcggaaggcgagatagatatcatccacgtccggcagcggcgcgccgagcggcgttaccgggccgaataa

SEQ ID NO: 258906 - DNA, 1716 bp, Klebsiella pneumoniae
ttgaccaaaatgatcaaaactaataataccaccccctcaggggatgtcgcgccacgccgggcatatcagcagacggttgatgcggtgctggcgcagaaaaaaagccatgtcgacgggctcagcgccgctgaagccgccgagcgtttgcagaccttcggcccgaacgccttgccggagaaaaaaggcaagccagcctggctgcgcttccttgcccactttaacgacgtcctgattttcgtcctgctggccgccgccgcgctcaccgcggttatggggcactgggtcgatacccttgtcattcttggcgtcacggtgatcaacgccctgatcggccatatccaggagagcaatgccgaaaaatcgctacagggcatccgcaatatgctctccagcgacgcgcgcgtgcagcgcagcggtaaacacgaaaccatcccgacccgcgacctggtgccgggcgatattgtgattctgcgcgcgggcgaccgcgtgccggccgatatgcgcctgattgagagccataatctgcgggttgaagaagccattctgaccggcgagtcgacggtggtggataaaaccaccgacgcgctggaaggcgaactgccgctgggcgaccgtaccaatatgctcttctccggcacgaccatcagcgccggcggcggcgttggcgtggtgaccgcaaccggccaggataccgaactcggccacatcaaccagatgatggcgggcattgaaaagcaccgtacgccgctgctggtgcagatggataagctcggtaaagcgatcttcgttatcatcctggcgatgatggctgcgctgttcgtcttcagcctggcgctgcgcgatattcctctcggcgagctgctgctctccctgattagcctggcggtggccgccgtgccggaaggcttaccggcgattatctcgattattctctctctgggcgtacaggcaatggcgcgtcagcgggcgataatccgcaaactgccgacggtggaaaccctgggcgccatgaccgtggtgtgctcggataaaaccggcaccctgacgatgaacgagatgaccgttaaagcgatcatcaccgccgactgctgctaccgcgtcgaaggcgacagctacgagcctcagggtaacatctgcctggaaggcagcaacgagccggtgcagattaaaccgggcagcgtgctggaaacctatttgcgcaccatcgatctgtgtaacgacagccagatgattcaggacgagcgcggcctgtggggcattaccggcgggccaaccgaaggcgcgctgaaggtgctggcggcgaaagcgcggctggagcccgtcgatgcccgcctggtcgcgaaaatcccgttcgactcgcagtacaagtacatggcgacccaccagaaaatgggcgacgtcgagcaggtgctgattaccggcgcgccggacgtgatttttgccctgtgccgccagcagatgagcaagcagggggcggtgccgtttgagccgcagtactgggaagaggagatggctggtgttcctcggcattgccggaatgagggacccgccgcgtccggaagcgatcgacgctatccacgcctgccagaacgcggggatccgcgtgaagatgattaccggcgatcacccgcagacggcgatgagcattggccagatgttggggatcaccaacagcagccaggcgatgaccggctaccagctggagcacatggatga

SEQ ID NO: 258907 - DNA, 1584 bp, Klebsiella pneumoniae
gtgaccaacaaccctacatcaacaagctggttacctttgattgtcttatgttgcgcgcagtttctggcttctgccgacaatgtgacgttaagcatcgccacgcaggcgctaatgaatgatctgcacgccacgcttgggcaggtcagtacggcaaatacgatgtacccgctgattgcaggcacgtttatggtggcagggggaatgctcgggtgtatctggggttggcggatgctgtttcgcattggatgcatgatattcatcctcgccgaagcctgcgcctatttttcgccatcgataacgctctttacgtggggggctcgtctgaccgctggggttggcggaagcctgatgatacccgccgtttttggcctgatctctgcactatatcaacagcgacggcgggttgccgcatttggcgcgctgggcgcctccagcggcatttctttcgcctgtgggccgattttatgcggatatttgctggaccacgtcggctggcgcatcgcatttgcctcgcttggcctgctggcgctacttatcctgttctgctcaaccatcatcccggcaccaaaaaataatcgtgcagctattaccttcgataccccaggtttcctgttaggcactctgggtctgttcctgacgattttcggtatcctgcgcatcccgatctggggactagttatgcccttcgacccggcagtaagcgttctcggcctgagccccgcccctttcgtcatcctctgcggcctggtggtgctgctaatgatgctgcgctgggaacgtcattttgaagccaccaccggcaacgctttgctccccgctgttttcctgaaaacccgcctggtgcggcacgggctctatctcactggttggatcttttttgcgtacagttcagctattttcaccgtggtgagttttgcacagattgtcaaaaacgtctcagcgatggaaacagggctgctgatactcccttttgcgatatgcctcgccgcctgttcgcttggcctgccgctgtttattcaacagcgaaaccctcgccgtcagtgccaaatagggctgacagcgggaatcgccggcgctctggtagccgcaggggcgctccatgtaacgggttttactccgatcatgatggcatcagggctttgtttgatcggcgcaggaatgggcactattgcagccaacgctccgatgctggtcaccactggcgcagggagtcggcatgctgaacagtccggcggcgttcaggccgcgtcgcgcgatatcggacaagctttaggaatggcgttgatcagtactgttatgctcacggtactgaccttcctgatgaaatatcaggtacagcacgacctggcaattaccccgctcgcgagacaaatcatcagccatctcacgtttatcccctggactagcgatcgtaccttccgtcagctcatccagacacaaaacctggcgcctgccgatatttatagccttctccaacattatcaactgagcaggatgcagagcgcgcgctatgggcttctggcgatggcgatcgcaacgtctatgctgcttatccgcctccgccatctgccgaagtcgtcgtag

SEQ ID NO: 258908 - DNA, 1677 bp, Klebsiella pneumoniae
atgacgacaaattcagtaattaactctgcgggcatgtcgcacaatgcatccgccgaaacggcaatgaaatggttgccgctgctggtactgtgcctcgcgcagctctcaacatccggcgataatgcaacgttgagtatcgctaccggtgcactggtcaaagacctgcacgcgtcaatggatctcatcagcattgccaacgcgatgtactcgctggccgcgggttctctgatggttgctgccgggatggccgggctgatcgtaggctggaagaaaacgttccgtatcggctgcgcgctgctattcctcgccgagctgacggcctatttttcaccaaacatgctggtcttcacctacggcgcccgcctgctttccggtattggcgggagctttatgatcccttcggtgctggggcttatcgccagtaactataaaggcgggcagcaggcgatcgcctttggcgctatcggcgcggcaagcggggtctcttttgccgcaggtccgctgatttgcggtctgctggttgaccacctcggctggcgcgcggcctttgccgctattgccggcctgtgcatcgtgatcttctgcggctccttcctggtgcctacgccagcaaaaccagaacgcaaagtggtgttcgatctgccgggcgtcatcctgaccgttatcggcctgttcagcgtaatcctcggcttcctgaaagtctcaagctggggcctgttcacgccgttcaacgcgccattcaccgtgatgggcctcagcccggcgccgttcctggtgctgtttggcctgatcgtcctggcgattatgctaaagtgggaacgccatcgcgaagccactacaggcagcgcgctaatcccgttgtcgtttctcgctacgccgcaggtgcgtaacggcctctatctgacggcatttatcttcctcgcctacggttccggtatttttgtgaccgtgagtttcgtgcaggttgtcgccggactgaacggtattgaaaccggcttgctcattctgccgtttgcgctgggcgtcgtggtcttttctctggggctgccgatcgtctggaaaaatgcgaatccgaaacggatgtgccaaagcgcgttgttaatcggcacgctgggttcagttttgtgcatctttggcttcggcccgtccgatttcagcgcaatcgtgccggtagggatgtgtctgattggcgtcagtatgggcattgtttccgcctactccagctatattgtcaccagcgccctgccggcgcgagatgcgcaacagtccggcggcgtccaggcaacgtcgcgtaacgtcggccaggcaatcggcgtagcggtctgcggcatggtgatgctaacggcaatcaccatgacggtgcagaatatggcaagtaaagacgcttcgctgagcctggatacgcagcagaaggtggcaaatatttccgttatcccttatctcagcgataccggcttctcaaagctcatgctggatcaaggggtcaataagaaggatgtatccgaactaaaccgggtgtataaaactgcccgtctgaaagccacgcgagcgggtatgatcgctactgcagttatgacgctgctatttttattcgggacacgtaatctccctgtccgcgccaaaggttccgctgacgctacaggagaagagccgcgtgccaggaagtcgaaaatctaa

SEQ ID NO: 258909 - DNA, 1647 bp, Klebsiella pneumoniae
atgtcagcatcagaaatcacgatttttgccgctaaaaaaatcattacgatgtgtccaaaccgcccggaaaccacccatgtcgcggtacgcggagatcgtattttaggcaccggcacccttgaggaactcaccggctttggcgaataccagctggataatacctttgccgacaaagtattaatgcccggcctgattgaagcccattcgcacgtcaccgggggcggcatgtggcagttcccgtatgtcggttactacgaccgcccggaccataccggtaaggtctggaaaggctgccgctcttttgatgatgtcgtcagcgccctacaggccgttgaacgcgagatggccgatccgcatgccccgctgatcgcatggggtgtcgatcctatctatttcggcagcgaaaagctgggccgcgaacatctggaccgcgtctcaaccacccgtccggtcgccgttatccatatgagcatccacctgatgggcgcgaataccgccgcgctgcacgactgcggaatatttgacgactgccagattgaaggtgtggtgaaaaatcaggacggtacgctgcacggtgaactggtagaattcgccgccatggggccaatcctgaataaatatggtttctgggacgaactcaccaccgaaatcgccattgctaatttcggtcaggaagcatttcgtgcaggctgcaccagcgctgctgatatgggtctgaccgatttcagcaatcccgagctgatgaccaactacatccgcatgacccgtgaagcggactttccgattcgtctgctggtggcctacggccctcctttcgtgaaaaaacccttccaggaagcgctggatttcgccccggacgtcatgcgtcacgggcacgaaaaaatgcacttcggcccgatgaaaatcttcctcgatggttctatccagggcggttcaggacggatgctggagcccttctattatctggatggccacaacggcgcgtggaacgctacgccggaagaggtggaacagcaggtctacgacattatgtcccgcggctaccaggttcattgccactgtaacggcgatgaggcctcggaagcgttcattacagccgtcgagaaaaccctgaatcgtattccggcggttaaccaccgcgcggtgatgcagcacgcgcagatgctgcgtgaagatcagttcaaacgcatcaaagcgatggggatgggcgtgaactttttcagcaatcacgtctattactggggcgatcaacactacagcaaaaccatgggcccggagcgcgcgatgcgtatggacgcctgcggcagcgcggtacgccacggtatacctttcgccttccacagcgattgcggtatcacccccatcaacccgctgttcaccggatggtgcgcggttaaccgcctgacggcttccggacgtgtactgggcgaagcggagaagattaccgtcgatcaagcgctgtacgcgatgactctgggcgcagcatggaccatgaaaatggaccatctgatcggcagcattgagtgcggtaaatacgccgactttaccgttctggaagacgatcctcagaccattgagccgattcagctcaaagatgtgaaggtatggggcaccgtgctgggcggtaagaaacagcaaatcaagtaa

SEQ ID NO: 258910 - DNA, 1368 bp, Klebsiella pneumoniae
atgatgagcacgcccggcctccacggggcgaagctgcctgcgacgcgtgagctggcacgtatgctgggcgtttctcgcaatacggtggtctcggtctacgagcgtttatacgctgacgatttgattgaaacccgacagggtgatggaacctatattcgctacagggggcaggaagctgaagagggcccggaggttccggaaattccagccctacgcgtagactcacgcctgccgctgacggcaaggtttaaccgccattttgttcacgatggcccgccgaaggcttttcgcattggcatgcccgcgattgaccattttccgtttgatacctggtcgcgcctgcaaaaccgcttctggcggcggcgacccattgcgcaaatggggtacggcgttccggcgggagatttacagctgcgcgagcttatcgccagctacctgcatacctcgcgtgggctgaagtgcgacccggcgcaggtgattattaccctgggggcgcagcaggcgattatgttgtgctccgcgttactgctgcgcgccgaacaggatgtgattatggaaaatccctgtcactgggcggctgcgggcgtattttcctgccttggtttaaatattaaagcgattaacgttgatgatgaggggcttcagacggcacagttgtcggattatcccgatgccaggatggtctacgttagcccgtcatgccagtatcccacgggcgccacgctctcactttcgcggcgcatgacgctgctggagtgggccagaaagcatcaggcgtggattatggaggatgattacgacggcgagtatcgctataacggcacaccgttaatgccgctcgccgcgctggataatcgccaccgggttatttatatcggttcgttttccaaagtgatgtatcccgcgctacgcctgggctacatggtagttccgcaacagcttgtggaaccactgaacctgctgcgcacgttgtccacccgccagccgccaatgaacgaccagcaggtgatggcgagctttattaccgaaggtcatttccagccccatattcgtcgaatgcgcagaatcagtaaaagccgccgcgatctgctgctggccgagtggaaccagcatctgagccatattggcgtgatgcccgaagtggcctcggggctacatgccgcgattacgctggatagcgccgaaacggaaaatcggcttgttagccaggcccaggcggcaggcgttgaaattacgccgctgagcgcgctgtggatccccgatacgccggaaagcgaccaccattacggtattgtgcttgggttcgctggcgtcatggaagcggatattgtgcaatcgatacaggtgctaaaaaaatgctggcagtga

SEQ ID NO: 258911 - DNA, 225 bp, Klebsiella pneumoniae
atgaatcacgggcaactatccatgaaaaacgttttcccagcgcttgccgttttattagcggttctcagccttagcggctgtggtctgaaagggccgctttacttcccgccggcggataagacgtcgcctccgccgactaagccggttgatagcggtatccagagctctacgccggatcgtaacgatcgcggcgatagcggtggcccgacccaggtgaattactga

SEQ ID NO: 258912 - DNA, 666 bp, Klebsiella pneumoniae
gtgctgatagagatcgacgatttgccggccgaccatcatgcgtacgatatcggtggtcgagacgctgctcagggtttccgtgccgatccacgtgccgtccctgaacaccgtgacccggtttgccagctgccatacctcttccatgcggtgcgagatgtagaccatcccgaccccatcctgacgcatctgctcgatcagccggtaaagctggagggtctccgcccgcgacagggcggcggtcggctcatcaagcaccagtacttttgcgttttcactgacggcgcgggcgatctcgaccatttgctgacgtccgatgctcaacgagccgagcggcgcctgcgggtcgatgtccgcgttaatccggtccagcttctcccgggcctcccggagcatccgtttgcgatcgagaataccggcgaaagaggtcggttcctggccgagaaacagattttccgccaccgtcatatcgggaaccgtattcagctcctgatggatgatggcgatgccatatttgcgcgcatctcttggcgtgcgaatatcaatctcctgcccgttgatatagatcgcgccgctatcgcgctgctcgtttccggagaggatcttcatcagcgtggatttacccgcgccgttttcccccatcagggcatggacctctccggcgaataa

SEQ ID NO: 258913 - DNA, 306 bp, Klebsiella pneumoniae
atgaatgtaaaccgttccgatatggccgacctggtctatttttgcgccatcgctcgtcatcgcagttttagtaaggccgccgtcgagctcggcgtaagcgcctcgacgctgagccatgccctgaaggggtttgaggcgcggctgggcgtgcgtctgctgaaccgtacgaccaaaagcgtaaccctgacggcggcaggcgagagtctggccagcgcggtgagcgagccggtggccgccatcgatggcgcgattgaacagctcaaccagtttcgcgactcgcctgcgggacatattcggctggagtaa

SEQ ID NO: 258914 - DNA, 780 bp, Klebsiella pneumoniae
  misc_feature (754)..(763): n is a, c, g, or t
atggcaggaaacacaattggacaactctttcgcgtcacgacgtttggcgaatcgcacggcctggcgctgggctgtatcgtcgacggcgtaccgcccggcattccgctaaccgaagccgatctgcagcacgatctcgatcgccgacgtccgggaacatcgcgctatactacccagcgccgcgaaccggaccaggttaaaatcctctccggcgtattcgagggggtgactaccgggaccagcattggtctgctgattgagaataccgatcagcgttctcaggattacggcgcgattaaagacgttttccgcccgggtcacgctgactacacctacgaacagaaatatggcctgcgcgactatcgcggcggcggtcgttcctctgcccgtgaaaccgctatgcgcgtggctgccggagcgattgccaagaaattcctcgccgcgaaattcgggattgtgattcgcggctgcctgacccagatgggggatattcctctggctatcaaagattgggaacaggttgaacaaaacccgttcttctgtccggatccggagaaaattgaagcgctcgatgaactgatgcgcggcctgaaaaaagagggcgactccatcggagcgaaagtaaccgtggtggccgatggcgttccgccggggctcggtgagccggtatttgaccgcctcgatgcggacattgcgcacgcgctgatgagcattaatgcggtgaagggcgtggaaattggcgatggttttgaggggnnnnnnnnnntggttttgaggtggtga

SEQ ID NO: 258915 - DNA, 1368 bp, Klebsiella pneumoniae
atgaacaatcaattcacatggcttcacattggtctgggttcttttcatcgcgcccatcaggcgtggtatctgcatcgtctgattgcttccggagataagcgctggcacattgcggcggggaatatccgcaacgacgccgagcaggtggtccaggtgctggcagctcagggtgggcgctatgtgctggaaaccgtcagccctgaaggggaacgtgaatatgaagagatcacctcaattcagaaactgctgccgtggcaggccgggctcaagccgctgattaacgaaggggcaaacccgcagaccaaagttatcgccttcaccgtgacggaaggcggctactacctgaatacccgccataagctggaaaccagcaaccccgacttgcaggccgatctggcaggggagtgcaaaacgatttacggcactatcgcgcggatcctggaaaagcgtatggcggacaacgccgggccgctgactctgctgaactgcgataacgtgcgccataatggcgagcgcttccacgacggcatggttgagttcctgcagctaaccggcaagcaggcggtgattgactggatggccgccaacacgacctgcccgaacaccatggtcgaccgtatcactccgcgtccggcggcagatctgcccgcgcgcgtcaaagcgcaaaccggcattgacgatagcgcgccggtgatgggtgagaccttcatccagtgggtggtggaaaaccatttccgcgatgagcgcccgaatctggaagcggttggcgtggagatggttgcatcggttattccttatgaagaggcgaaaattcgcattctgaactcgtcgcatagctgcattgcgtgggcggggacgttaatcggccagcagtatattcatgaaagtacgctaacggatttcatctacgccattgccgaccgctacgttacggaagatgtgatcccctgccttggcgataacggcattgatttaccaacctatcgcgacgtggtgcttaagcgctttaccaacccgtatatccaggacacgaaccagcgcgttgccgccgacggtttctcgaaaattccggcgatgatcgccccaaccctgcaggagtgctaccagcgcggcgcccgcccggaagcgaccgcgatgctgcccgcgctgttcttcgtctttatggaacagtggcataagggaagtctgccgtatgaataccaggacggcattcttgacgcgcaggcggtgcatcagatgttcgaagccagcgatccgctggcgctgtatgcccgcgataaagcgctatttggcgaactcgctgaaaacgccgatttcctcgcgctgatgcgcgaaaaagtcgcggcagtttatacgctgattaactaa

SEQ ID NO: 258916 - DNA, 672 bp, Klebsiella pneumoniae
atgcagactgaatttatcgcagaaccaataatgagcattgacgagagattaatgggggttgagcttctcactcgtttcatttccagtgaagggcgctcacatcatccagagtatgtgatttcatcctgggatttggataggaagcggctctttctgtacgagcaatgcggtttcattgccagcaaacaaaagtggttcgaaaggaataatctgttttgcacactaaacattgatcaacaaatggcttttctcgttcggcacgatcacacattgataaaagcgtttgaatctatgccattcgtcaaacttgagctttctgagcatttccctggtttggataagggattgaaaagccctttgttaaagtcgctgagccagggtgtgaatgggctatggctcgatgaccttggcgcaggaaacgcgaatgttgttagtttgatggaaggatactttgaggttgtaaaggtagatcgctgcttctttaatcagcaggtgcagaaaccaaccttctacccgctgattgcttccattcaaaagcactgcgacaaagttattatcgaagggattgagaatcgagaacatttgggaatactgcgtgaggtaggagtttggggattacagggttatctttttgaatcggtcccttttaaaaacgtggattcattgctgtag

SEQ ID NO: 258917 - DNA, 1863 bp, Klebsiella pneumoniae
atgcttgagattaacacaagtaagattgttaacaccgttactttcaccgtagataaaagcagtattgcggaggctaaaaaagccgccgatgaccttcaacgccattttaaaaagctggagaatccgaagattcgtttcaaggctcaaaagcaacgaagagctaaagcgcgtgaacaagttgcagatgctaaggtttctccttctaagagcaccactgacttaaagcagcaacgccaggcagaagaggcagggaaagcgcaagccagggaagcggcgaagattgccaaacgtaatgaaaccgctgatttgaaatttcgtagtgctaatctccagatgaaaggtatagccgggaaatacggcattgatcctgcgaagcaataccagttttcccgcttcgctaaggaacagacagagcttttccgtaacggtcagatcagtagccagaagatgaactatgagctacgcgaacgcatagctcttatgcgtcgtgaagcagcgttacaagctaaggtgacagcttccactcaggctcaggcggcggcaatacgccatgctaagaaaacagactatgcaggggctgcaaagggtattaaagaaagaggtataaacggcatcatcggcggtggagtgggcttaatcggggccactgctgcatttgctggcggagcaggtgtcctgtctcgtattcgtgacaaagggaatgagaatctcgacctggtgagacaatcggctcttgttaagactaatcctaatgcaatcaagacgatggtagcatgggggcagcaacacggcgtagactccgctaacacgtctaaggccgtcgataacatgaaagatgtacgtgagcgtcttgctatgactgttacaaatggacagttcaaagatggaaaatggacaggcggcgacggcgggatcacaactatcatgaataagtttggctggtcgaaggagcagatcgctaagtatcaggataatccgttagatttcttacaagctactgtgaatgaagggcagcgtagaggctttagccaggcccagattggtaatttgatcgaatcattaggtgatgatctgatgcactacaccgatctattcctgaataatggtgcagagtttaacaagacgctaaaaaccctcgttgatagtggccagacgctgaacgacgaacagatcaaacaaacctatgcttacggcgatctaaccgttgcaatgggtaatctgatgaatggcgttgataacagcctgttcactggcttcatgaaaggttttgctgatggtggtgatgacctcgtgaagaacaccaaagtgatcaccgaatctgctggaatgcttggagagggtttaggcaatctttctaaagaaatcacagggtttgtaggggagatttccggagttatctccgatctgaatgcagggcttcgctctcgtttccctcagtggttcactgatagcgataagccagcggcccaggctctctacgatggtgctgtgggtggttctgcgaatgctacagcggattggattcaggataagactggctttgatacccgttcagtggggccagctatcatggattggttaggcgttggtggtggtaacgctggaacagcggcaaatcaatacagccttaatggtgattctcttcgtggttctgcaatgtcactaaccagtggtaacgcgccagcgtacaaccttgcaccagtgtttaatctgacagtagcgccacaagtaccgctaacaattcagagtgacgcttcgcgccttgctgattatgttgattttcaggctcgtgcatcacaagccagcttcatgcaatcgctcacgttgtcagcgttaagcggtcaatcatcaacaggtgggtga

SEQ ID NO: 258918 - DNA, 567 bp, Klebsiella pneumoniae
  misc_feature (369)..(378): n is a, c, g, or t
atgtggattctgaaaataagccacgtcaacgggcataaatttactgatggttctaaaaatctctattgctatctaaggggatttgaccgcgcatttccttcttatgcaaaaataggtgatgtgtttggaataacgccaagagccgcagaggaacgagttaagaaactgcttgaaatgggattgattattaaagattcgcgccctgggacttctaacctttatcaagtattagagattccacgagaagaatctccagaactacagcctactccccttgaagtgcatgaaagtgctccagcacctacgccaccccctgaaccagtgaagaccgcagaggaaaagccggatgatgatgtgattattgattcnnnnnnnnnngtgtgcgaactgctgtcaaagcctgatagtttacgacagcaaaacaggggagatacatttataaattatgctcgtcgtgtaatgcaaagtaaccataagaaactaccttccagattcgaagataagttagagatgagatttgaaaatcgttatccacacttctatggacgattcgggataccattttaa

SEQ ID NO: 258919 - DNA, 216 bp, Klebsiella pneumoniae
atggtgatcaacatgaagctcttactttacgtgctggtactgctgccgctggcggctcatgcaggacaaattacgatgactcatccagaggaggaacagacagagaacgggaaaacgctatgcacgtatcagaacagcatttatctgttcactttcgtaactaaggggaaatgtccgtatgcgaaaaccttcaatacagaggattcggaagagtga

SEQ ID NO: 258920 - DNA, 474 bp, Klebsiella pneumoniae
atggaaatgttaaaaagtgcggtgttctcagattgtaagcagtatcgctattcaataaccaggacctgggatgaaacaaagccctatgtggtctttataggtctgaacccttcttatgctgatgctgaacaagatgatcctacgcttgggcgttgtatctcgtttgctcaggggtggggaatggggggagtacgtattgttaacctctttgcattcgtacatacaaaccgcttcgagatgatgaaagttgctgatccggttggtgctgataatgatcgctacatagttgaaacggtagctaatgctggcatagtggttgctgcatggggcaatgagggacggcattttcaacgctctgctgcaatacgtgctttattacccgctcacactaaatgctttaaaatcaatgcaacaggtgagcctaaacaccccctctatgtacatggtgacacagcgctaattccctttatttaa

SEQ ID NO: 258921 - DNA, 261 bp, Klebsiella pneumoniae
atgcagatcactgtcacatcccagaacgtggacacgcataagaaaaagatagagcgtgacggcctcaaagggattacctacttcatacaaatggcaaacagtgtgcgcattactgcatcccaggatcatcaaacaatagtgcaaggcgttttagggaaacctgatagcgataaccatcatcaattatcatcttattggacatggaatgatgtggacgccgtaaagctggttgatgtgctgtacgcagtcgctaacgcatga

SEQ ID NO: 258922 - DNA, 1308 bp, Klebsiella pneumoniae
atgaggttaaaatcacttccgtacaccttcaagagatacggtaactactacatccagattcgcttatctgatgggcggtcatacaaaaaatcactttccactgatagctaccgtgaagcatctgctttgatgattagcatcactccgcacctcccttttgttaaatcattagctactccaatccctgtcttcgaaaagtttttgtcagacttgatcgcgtcagaacgcagggctgcaagaaatccgctcttaccccaacagcagataattgttccatctgaactcgtggaacctaagccgccagccgaaccggaaaaagtgctatccctgtcggatgcgtgggcgatgtacaaagatgaaaaagggggtaactggacaaaatcaatctcaatggcaaatgagcgttacatggaggtgttgctaactgtcttgggaggcgaaactgatgtaacgatgatcacaaagcaggacattaagcaggtgatggaagttgttgagaacctccctaagcgcgttgtacagccttatcgatcaatgaccatccagcaactgatagaatgtgatgatgtgccaccggatgagttggtgggtgttgaggccatccataagcatctcaagatctacaaatcactgttcaaaacttttcttactgagagcaaagacattctgactaaatcacctaccgatggcgtagtggctgcaccatcaaaagcgagatttggggcgtacagcacaacagaaatgagaaagtttgtagggtgggcgctcaagcagcctgatggctggaaaaaatgggtcactttgttgttggcatacactggggccagaaggggagaaataggaaggctggagaagtctcagatcaaattcgacgaagacagtcagcgctactacttcctgattgccgaaggaggtcaggggaaaaccgaaaatgcgacaaggcaggtagtcattcatcctaagttaattgaatggggtttcatggattatgttgatcgccagtggaaagagcggattttttcagaagtggcaggtacgaacatgacgaagatcggcaaagtattagctgatgttcgtgatcagcttgggattccgtatcaggatgactacgggcagcgccgcttggtgcatagtttcaggcacacaatgatttcaacctgtttagctggttgggtaggaaaccttgctcatttgcagcaggtggttggtcatgagaaaagtggagcaggcattacccagcgctatctgcatacattccccttatcctcagtttcttatgtgattgatggcttgtgctgggaatcctaa

SEQ ID NO: 258923 - DNA, 504 bp, Klebsiella pneumoniae
atgcgctcaaccgcgagattgaagcccttatttgttgccctctttttatgcgccagtctggcaagctgcgataaaaatgaagataaaacgtttgtgcagaagattgctgaaagtgatgccccggaacaacaccagaccttcacgaacaatcttaacggcgttgatgtaaaaatcacctattactataaaggcgatgtcgtcctgcgccagacggcagaaaacaccctgccctatgatgttcttgccgccaaaaataaagaacatgccagaatgatcatcgagcaaattgccggggcttatcgggaaactgagggcgtcagcgatgttattgagtattttgacgatcgcgccagcgaacatatgacgattgatttcagcaaagcaaaaatcagcgagctgtgtaaactgccgggaataaacatcactgattgttcgggaaaatatctctcgatggcgcgatctgaacgcctcattctcaaggatggattcaaagcggttgagtag

SEQ ID NO: 258924 - DNA, 3561 bp, Klebsiella pneumoniae
atgacaaccgctcaaaatcagaaccatggaatgcaaaacgctgccgtaggggatcaccacccgtggcttgccgatgatgcgtccattgcgcttaccgatcagattaaccactttagccgttgccgccgcgatcggcctcgtcccccctgccatgcacgttctgaagatcagctctggcaagatatcgccgcgagtaaaaaggcttacaacaccttagcagcatacgcatcctgcccaccagactggcagttcgcttttgctgaacttgcgctgcgtctcaaggcgagccgacgcgaaggcagcctgctttccgaagcagcgttactctggcatataggccactttgagccagatttaatggatagcttcgttgcccgccacggcctggaaacgacggtggaaattgtttgttgctccctgcaactgtggaaaaaatatagcgataccgcatgcaaatatatcctcacgcgggatattcctcttgatgaggaaaacgctctccccaactggcacccacgcctgtgcggctatctttccacggctccagaagaagagtggcaacgctgcgcaaacaaactgattgccgctattccaacgctctctcccgttatgcagcctttaattgcactgctactgccggagcgtacggatatcgccaacgacatggcgctgcgtttcgtcgggcaaaatatcccggccatggggagattaaagtcagtggttacggacgacaacgcaatagcggcattgcgccactatccgttcctcccggcaaataactttggctatatcagcttcgcggcaacgcagatggccgaccggggcataaagggaatgagccgcaccctcgacgtcctgaaggaagaatatgcggcggaactctgcgagatatttccgcagctccacgttgccgactatctcggtaaatggctttggaaagttaaccatcccgatgcgttgaagctgttgatcttaagcgctggcgacaaaaacaagcgtctggaattcctcagcaaagccagccagaggcatccccacgccgctatcgcggcttatgcagaactgctgaaggaacaagaaaaccccatctggcgtcagacgctaacgacgcttatcgccgccgcgccagaacgagcagaacaggtcttaccctggataagcgagcaggcagtcgaagtactcgccagctgtcgtcagcaagagatgcagatgacatgcgccagttccgactcgctgccccaggtgctggtcacgccgccgtggctggcgaaaacgactaaagccgccgtccccgcgtttgatctgcccacgcttgccgtatccgcggttgtcgcccctacccgaaaaatgctcgagagtcacggtgaataccggcagatagcccaacgacaggcaacacggcaaacgatgtttatcgatttaccgccgctggaacaaagaagctgggagcccatgctcctgccacaaacgccagagcagcaaatcctgtggcgtttaggctttgagaactggagaaaaacgggagaagagcaatatgaaaaattgcctattccacaaagcgccgtcgatgcgctactgcgtgacgattttccgacgcttaaagccgagcgagcaaaatattgcggggacaggcgaacctcctggaacctggcagaactttgttatctccccggtgaacaggctatctcgctgctgaatcagatcattaacgaaacggactattatggtgaatctgagattctgacgatattcggccctgccgccgtcccggcttttttgacctgcctgaaccgagaccccaggcgactatggcacttcactgcctcctgcggcaccagcgaactggcgctgccgatggcgcggttattgcgtaaaaaaacgcagcacgccgaaagccgcgactggctgttaaaataccccgaacatgccgccgccgggctgcttcctgttgcgttgggcaaaacaaaaaaagatcgcgaagacgcccggttggggctccgcctgttggcagaaaacggcaggcgggcgctgattgaagaagtggcgcagcgctatcatcaacccgcagtctcggcggcattaaccgcgctgctgaatgatattacacagattaaatacccctcgactacagctccgctaccgggattctggcagcccacgctgtggcgcagaccgcagctcaaaaccaacggtctaccgctgggggacgatgccctgtgccatctgggcaccctgctcagcttcccgcgtgaagtcgctatccatggcggcctgatgcaggtaaaagaggcctgtaccccggaaacgctggccgccttcgcctgggatctgtacgaggcctgggaagccgctggcgccccgtcaaaagagaactggggctttaccgcgctgggtattctcggcgatgacaataccgctcgggacttaacgcgattcatccgcgcctggcctggagaatcccgacataaacgcgccattacagggctcgacattctggctgaaatcggcagcgatatcgccctgatgcagctgaacggcatcgcgcagaaaataaaatttaaggcgcttcaggaagccgcgcgggaaaaaatcaaacagattgccgacaagcgcgaactgaccattgccgagctggaagaccgcctcgccccggatctcggactggacgacaacggcactctggttctcgacttcggcccccgccgctttacagtcagcttcgatgaagctctgaaaccctttgtgtgcgatgaaagcggccgacgcctgaaagatttgccgaagcccggcaaaagcgacgatgaaccgcgggctgcggaggccgtcagtcgttacagacagttgaaaaaagatgtccgtaccatcgcatcccagcaaattcagcgtctggaaaccgccatgtgcctgcgccgccgctggaccgccgaacagttccgcctgttcctcgtcgaccatccgctggtgcgccatctcacccgccgcctgatctggggagtctatagccaggaaaacgtcctgctggcctgcttccgcgtcgccgaagataacagctacagcgatgcagaagataacccgttcagcctgcctgaagggcaaatcggccttccgcacgtgctggaaatctccgcggaagacgccgccgccttcggccagctgtatgccgactatgaacagctgccgccgttccgccagctcgatcgcaaccactatcgcctgacggaaagcgaaaaccgggccacagaattaacgcgctggcgcggacgccagtgccaggccgggcgcatcgtcggactggagcgcaaaggctggcagcgaatagaagatggcggcagcatctgcggcatgttcaaacccgccgccagcggcgacatggtgctggaagtggaacctttttcgctgctgtatggagaaaccacctacgacgaactcatcccgttcgagacagtgaaaatcgttaccaaaggcgatattgactacggcaaaccgacctttgctttcgcaacgctcgacgctatcgccgccagcgaactgattaacgatatcgaatcgctattcgattaa

SEQ ID NO: 258925 - DNA, 558 bp, Klebsiella pneumoniae
atgctggcgcaggcgggcaaggatagttttcagcagccgttccccggcctgacgcaggcccaactgccagcaccaattttgccagaccggcgccggcatcccggaaagatagcccgccagaacgtccagccgcttttcgctgtagggggtgaggtagcagccggtgacggcgtcgggcgtcggtggtggcggggattcaggttcctgcgctggcgcccggcaattccgccacagggctgccagcgccggggcgtgccagccgccgcagaccaccacgaccgggccgtcattttgctgcatggcccatgccacccagcgggccatccaggcttcccgctgccggctggtttccccgccgctgctatcgccgcgcagctggataaagtacgttttcagcgcctgctccagaccggcgcgctgggtttcatcttcgaacagatggtcccacagcgcgtcggtattctccattccgctggcgacaaacagacgctgctggtcatcgacgcggcgagcgtcagaggcatcgctgtcatcctctctttgcgcccagaccggtaa

SEQ ID NO: 258926 - DNA, 1236 bp, Klebsiella pneumoniae
  misc_feature (1164)..(1173): n is a, c, g, or t
atggatagccatacgctgatacaggcgctcatctatttaggctccgccgcgctgatcgtgccgattgccgtacgtctgggcttagggtcggtgctcggctacttaattgccggctgcattattggcccgtgggggctgcggctggtcaccgacgccgagtcgattctgcacttcgcggaaatcggcgtggtgctgatgcttttcgttatcggtcttgagctcgatccccagcgcctgtggaaacttcgcgcttcggtgtttggcggcggggcgctgcagatggtcgtctgcggcgtgctgatcggcctgttctgcatgtcgcttggtctgcgctggcaggttgccgagctgattggcatgacgctggcgctctcttcaacggcgatcgctatgcaggcgatgaacgagcgtaacctgacggtcacccagttgggccggagcgcctttgcggtgctgctgttccaggatattgcggctattcctctggtggcgatgatcccgctgctggcggcgagcggtggctcgacgacgctgggcgcgtttgcactctcggccctgaaagtggcgggtgcgctggcgctggtggtggtgcttggccgctatctgacccggccgatgctgcgttttgttgcgcgctccggcctgcgtgaagtcttcagcgccgtggctctgttcctggtgtttggcttcgggctgctgctggaagaggttgggctgtcgatggcgatgggggcattcctggccggggtgctgctggcgagctcggagtaccgccacgctctcgaaagcgatattgaaccgtttaaggggctgctgctggggctgttttttatcggcgtcgggatgtctatcgacttcggtactctggtgactcatccgctgcggatcctgattttgctggtgggatttctggtgattaaatccctgatgctgtggttgatcgccaggccgttaggcgtacctcgcgcgcagcgccgttggtttgcggtgctgctggggcaggggagtgaatttgcctttgtggtcttcggcgcggcgcagatggccgatgtcctggacggcgaatgggcgaaggcgctgaccctggcggtggcgctatcgatggctgccacgccaatcctgctggtgttgctgacccgtctggagaaatccaccagccgtcannnnnnnnnnagaaatccaccagcggtcaggagcgcgaggcggatgaaattgacgaagagcagccgcgggtaa

SEQ ID NO: 258927 - DNA, 618 bp, Klebsiella pneumoniae
gtgctgctctccagcggcgtgaagatggtgattctcgatcacgatcctgaccacgtcgataccctgcgtaagtttgatatgaaggtgttctacggcgatgcgacgcgggttgacctgctggagtcggcgggggcggaaaaagcggaagtgctgattaacgccatcgacgatccgcagacaaacctgcagctggcggagctggcaaaagagcatttcccgcatctgcagatcatctcccgcgcccgcgatgtcgatcattacattaagctgcgccaggcaggcgttgaggcgccggagcgtgaaacctttgaagcggcgctgaagtccgggcgtatgacgcttgaggcgctgggcctgggagcctacgaggcccgcgagcgcgccgatctgttccgccgtttcaacctgcaaatggtcgaagagatggtggccatggcggaaaacgatgcggcctcgcgggtggcggtattcaagcgcaccagcgatatgctgaccggaataatcaacgaagaccgcaaccatttatcgctggttcagcgtcatggctggcaaggaacggaagaggggaggcataccggtgatatcgctgatgagccggaaaataaacccccggcataa

SEQ ID NO: 258928 - DNA, 1482 bp, Klebsiella pneumoniae
  misc_feature (1338)..(1347): n is a, c, g, or t
atgccttttacacttggtcaacgctggattagcgacacagagagcgaactgggattagggacggtcgttgcgctggacgcgcgcatggtgaccctgcttttccccgccatcggcgaaaaccgtctgtacgcacgcaacgactccccgatcacccgcgtgatgtttaacccgggcgacaccatcaccagccatgaaggctggcaactccaggttgacgaagttaatgaagagaacggcctgctggcctacaccggcacccgactcgacacccaggaagccaacgttaccctgcgtgaagtgctgctcgacagcaagctggttttcagcaaaccgcaggaccgtctgttcgccggacagattgaccgtatggatcgttttgccctgcgctatcgcgcgcgcaaattccagagcgaacagtaccgcatgccgtggagcggcctgcgcggtcagcgcaccagcctgatcccgcatcagctgaatatcgctcatgacgttggccgccgccatgcgccgcgcgtcctgctggcggacgaagtgggtctgggtaaaaccatcgaagccgggatgatcctgcatcagcagctgctctccggcgccgccgaacgcgtactgattgtcgttccggaaaccctgcagcaccagtggctggtggaaatgctgcgccgctttaacctgcgcttctcgctgtttgacgatgagcgctatgccgaagcgcagcacgatgcaattaacccgtttgaaaccgaacagctggtgatctgttcgctggatttcgtacgccgcagcaagcagcgtctggaacacctgtgcgaagcggagtgggatctgatggtcgttgatgaagcgcaccacctggtctggagcgaagacgccccgagccgggaatatcaggcgattgaacagctggccgaatgcgtgccgggcattctgctgctcaccgcgacgccggagcagctgggaatggagagccatttcgcccgtctgcgcctgctcgaccccaaccgtttccacgacttcgcccagtttgttgaagagcagcagaactaccgtccggttgccgacgccgtcgccctgctgctggccggcaataagctgaacgacgccgagctgaacgcgctgagcgatctgatcggcgaacaggatatcgagccgttattgcaggccgccaacagcgatcgcgatgatgcccaggccgctcgtcaggagctggtgtcaatgctgatggaccgccacggtaccagccgcgtgctgttccgcaatacccgtaacggcgtcaaaggctttccgaaacgcgagctgcatacgattcgtctgccgctgccgacccagtaccagacnnnnnnnnnngcatacgattcgtctgccgctgccgacccagtaccagacggccatcaaggtttccggcattatgggtgcccgcaaaacggccgaagagcgcgcccgcgacatgctctatccggagcagatttatcaggaatttga

SEQ ID NO: 258929 - DNA, 696 bp, Klebsiella pneumoniae
atgttagaagatcttaaacgccaggttctcgaagccaacctggccctgccaaagcacaatctggtcactctcacctggggcaacgtcagcgccgtcgaccgtgaacggggcgtgctggtgattaaaccctcaggcgtcgactacagcgtcatgaccgccgaggatatggtggtggtcagcctggagaccggcgaagtggttgaaggtcagaaaaagccctcgtctgataccccgacccaccgtctgctgtatcaggcattcccgacgctgggcggtattgtccacactcattcgcgtcacgccaccatctgggcgcaggccggtcagcccattcccgctaccggcacgacccacgccgactatttctacggcgcggttccctgcacccggctgatgaccgacgacgagatcaacggcgagtacgagtggcaaaccggcgaagtgatcgtcgaaacctttcgtgaaaaaggcatcgatccggcgcaaatgcccggcgtgctggtgcactctcacgggccgtttgcctggggtaaaaacgccgaagacgcagtgcataacgccattgtgctggaagagatcgcctatatgggcatcttctgccgccagctggcgccgcagttgccggagatgcagcagacgctgctggataaacactatctgcgcaagcacggcgcgaaagcctattacgggcaataa

SEQ ID NO: 258930 - DNA, 387 bp, Klebsiella pneumoniae
atggagtgcttcaccgaacaggggatcccggtcaataacgtgatggcgctcggcggtatcgcgcgcaaaaacccggtgatcatgcaggtctgctgcgatgtgctgaatcgcccgctgcaaatcgtcgcgtccgatcagtgctgcgcgctgggcgcggctatcttcgccgccgttgctgccggcgtctaccacgatattcctgccgcgcaggagcaaatggccagccgggtggaaagcaccctgcagcctcgcccggcgcaggcgcaacgttttgaacaactctatcagcgctaccagcagtggtcgctcagcgcggaacaacgttacctcccttcgactgcaaaagcggaatccgcgccgcaatctcaggcagccttcacccattaa

SEQ ID NO: 258931 - DNA, 1110 bp, Klebsiella pneumoniae
atgcggcgagaagccgccgcgcccggcggcaagcataatgatcagcaaggtggccgccgcgccaaggctgccggccggcagcagccagccaaaggcgtcgccaggcacgaagaacagcatcagcaccacgccaaaagccgcgccggagctgatgcccagcacttccgggctggccatcgggttgccggtcaggcgctggataatacagccggcgaccgccagcatgaccccggcgaacagcgccgacagcacccgcggccagcgccagggcagcagttgctccagcagatcgccgtgggcccacagccagccgtgggcatcgcgaccaaaggccagcgccacgctcaccgccagcagcagcaacgcgacgcctgcgagaacaaaccattgcacatgatagcgctcaggctgcacattatcgccgccgttcatcaccggggcgctgatgctgcgcaaccgcggcagcagccacagcagcagcggcgcgccaatcagggcggtgaccgagccggtggagacttcccgccatacccggctcagccagaggatcacctgatcggaaagccacaggagcagcgcgccgatcagcgccgccagcagcagccgcgccagcagccgacgggcgccaagcattttcgccagcagcggcgcgaacaggccgataaagccgataatccctaccgcgttcaccagcagcgcgctgatgacgatcgccagcgtcagggcgccgaggcgcgccagggacagcgccagcccgaggttacgcgccaccccgtcatcgagccccatcagggtcagcggccgcagcagcagcaaggtgagtattgccccgccaagcagctgcggccacaggcgctgcgccacgctccagtcggtctgcgtcagcgtcccggtgctccacaggaacatgctttgcagctggtcgtgatggaaaatcaccatcagctggttaagcgcgccacagtaaaggctgaccaccagccccgccaggatcagcgttaccggcgacaggcgcttgccccacgagacgccaaacaccaacgcgcccaccagacaggctccggccagcgcggcgaattgcgacgccagcacgccgggaatagcccataa

SEQ ID NO: 258932 - DNA, 177 bp, Klebsiella pneumoniae
atggatatatctgtgggtagtatcgtaatttgttataacaatactgatgtaactgacattctgactgtcggaaatgagtaccaggttgagaaaatactggatgctgatttaatgacgttggtcggcgtgtcagagccggtctttatctggcgctttgtagacccggattcagcgtga

SEQ ID NO: 258933 - DNA, 1929 bp, Klebsiella pneumoniae
atggcagaagttccactcccgacaccgacacaggttccggtacctagtaccgatatccgcaatgcggtatttgcaggcgcgaagcttgacgaagaggttaccggtactggtgaattctataccgatcgcctcggcgtgcagcgcctgaccaatacggggcgcacaaatctatttaatttatcccaacaggacagagaaagccggttcaatgcatttatccagaactcggggtatgaagtaatcggtgattacactgccggtccgttgacgctcaccgagtataaccagcttattcgctataacaacgagttatataaactcaccgcagcaacagatatcccgtttaccacagctggtaatactgatgaaacatggaccagtaccgacgcagcgcattttgtatctgtcggtgatgcagcgctacgccaaaacctggggtctattgacccgctgctaggtggggccttggttgcgttgccacagggtggaactgtcaattcatcagttctttatctcacccctgagcaggatggtgcgaagggtgatggtattgaagacgatacggatgcgattctcagtactatcaatagagctttgtcccgcagtgttacagctacgggaatatatgtacccgttacaattcaactcagcagcatatacaggatcacgaaatctattacagtggaaggctccagaattcgtttcagtggattagctggttgtggttttttcatcgactctgcagggagttataccgacagtaaagtttttctgatttccggggaggggccagaagctgcttatgttggacaatccggatctctgttcgaaaatgtgtgcttcctcacgacaggaaaaacattagacctgtttcactcggtgcgtaacagttccgtttcaggggataatggtgcctgccttcacaatatttcaaacatttcagccaggggctttaatcgcgtatttactcatggttcaggcggttggggttggacctgggtaggctgtcagttcagtggctgtaccaatctgatgaacattgtgacggcctctgacacttatgagcgtcatagcttctttgggtgtacctggcagaacggaggctatgctttcgtaattaataaccccgatggccgaatttactggcatgctggatcaatcgactatagtgacggcctggcgtctataggggctgggtttattgaagcgagcggacataatgaatggacggcaagatcgttacctcttgttacgattactggttctaatgcatttgttaaaatgtctggaactatgtttgtccgcaataatacaaccactcagtattatatattcaaacagtatcaggcccggcaggtattcattgatgatgtcgtgtttgttactgatggtgttaataccagttatggtcttatatctaactatgaagttataaagggtaatcttgcctttactaacgatgcatcaaagagcattgcttataatagctctgacgaaaacatgataagtggaaccattgttaatgctgattactcgcttagttctacagccagccactcagtatcagtagtcgatggaaaaattacggtaactgccagcgccagtggtgttacatcgcatctttatatcgacatagccgttaccgggagaacaaaattagctttcaaaatgatagcttcaaatacttcttccgcaggggcgatatcgcttaacaagtctcttcttacgcttgggaaatcacagattgctaacctgtccacttctggtactgcgtcgtgggctgcaaacgcggccagtgttcctggcggctcagtgactgtgttcgacgttccaaaacaagcaggttatttccgccttgattttaacgtagctaatcttgcggcaggaacgagttttatcatcgaatctctcaaattattcacttattaa

SEQ ID NO: 258934 - DNA, 768 bp, Klebsiella pneumoniae
atgactaactccatcatcatttcagatatatcaattcgtcaggacgccgaaagtcgctattccctcaatgacctgcataaagctgctggtagcgaatctcgtcacgctccatcccagtggcttaggcttgaccaagtaaatgagctaatacatgcgattttaaatatgcagatctgcacaattaaaccggttgatagccataaagggcgttatggcggcacatacgtttgcaaagagcttgtttacgcatatgccacatggatcagcgccgagtttttcctcaaagtgatcagtgcttacgatgcgctcgtttctggaaatgctgaaaaggcagacgctattgcaaaaacatccaccgatgagcgcacaccgttgcgcggtctggttaaccgcatcatgggtaaaacgggtattcattaccagccgctttataaaatgatccaccgcgagtttggcgttaaccatattgacgaattgacgcccaaacaagtcgctgaggcgatggggtatctggcgagtaaggtgctggagggggaacttttgccgaaagatagagagccaggcccatttcagccagcaatgccacatagtgctagcagggtaatgctgtatttggatgaaaagggcgtagtgatagggtcattaccactacaggaagatcaggttgcaatgagcttcgaggggtttatctcttttgcaaagcaaaaaggcatggtagttatgccgcgcgaagagttggagcagcgcgtagccaacctactagcctga

SEQ ID NO: 258935 - DNA, 693 bp, Klebsiella pneumoniae
atgacaccagttaaagagtttggcgaatgcctgattactgccggagacagggattatttcttccgtccgtcactgctggccatgtcgcgaattggcgaacctgctgaaattgttcagacgttctacgacctatgcaatgacgaagtgaccccgctgttaaggcgagctgctgaatcctacatccacaatgagtacgaccggctgcctgattgcgtgttgcattatattcagagcggtctattgagccgcaagtcgattatggctgcccatacggtattgacagcctgctgtgctgacgatatcggcgagttgataggatggatgaagccaggtaaaggcagaaagcgcagtttcgtatggcgccagggaagcatgccgcagcataacatggtcatagtcgcccaaagtctgatgatgcacggcatcataggtaaagcgaaagttagaaagctccagcggcacgaatccagcgataccacatctgaattccgggcatcagattacatcatcgcagcacgtaaccacttcggtatcagcaaggaagaggccggccaactgacgatgactgagtttcagctaatgctcatcgctaaataccctgagcagaaagggtacacccgcgaagagtacgatcacgcagctgatgactactttgcgcgccgtaagcgcagacaggataaagccaaccaataa

SEQ ID NO: 258936 - DNA, 381 bp, Klebsiella pneumoniae
atggctgacccaatcacagcggcagacgtgcaggcgttcctcggtgagttgggttactccatcccgggcgctctgctggagccgatcctctgcgtggtgaacaagattatcccgtgcctcgatggcgcgggctatgacgagtgcaccgcaaagctcatcctgatgtacgcagcggcgctcatggctacgtcttccggttcgcgacgcattaaatcgcagggtgcaccgtctggcgcgtcccgttcgtttgaatatggcgacgacagcatcacctggctgcgtgactcgctggcgaaactggataccagtggctgcaccagtgaacttccgatcagcgctggcaacagtgtgggcctgtttatggtggtcgggggctgctga

SEQ ID NO: 258937 - DNA, 402 bp, Klebsiella pneumoniae
atggcactcgtaaaggtattggtagcaaacctctttgccggtgccagccttcaaaaactggaggctggacaggtttatgacgtcgatgactcgatcgctgaaaagtggattgagcagggcaaggttgaaaaatccaccgagaagaagggtgaaaagcttgtctttgaagtggcgacaccatctgcgcctgtggcagccagtacatccgatttgcagtcaaaactcaatgaggcgctgtctcagctggagcaggccagatctgaaattgaggctaaggataaagagcatgccgaagtgattgagcagctgaagcaggaaagtgcagttaagctaggcgctgaaacaaagcgcgctgacgaagctgaagcggcactggcagaagcaaccaagaaggcgaaataa

SEQ ID NO: 258938 - DNA, 1197 bp, Klebsiella pneumoniae
atgaagcgcaaccgcgttaacgtgctgaccgtcgtcaactccgcttcaaacatcaccactgaaaccatcgacggcaagccacatatcgtggttcgcggcatcacgcctgtcgtggacgatatcgtgatgaaccggaagttgtacccggcagccgaaatcgaaaaggcctacaacacactcgagcgtaacccgatgccgctgggccatccgaaagtggacggtaaacacgtgtctgctcgcgatgtccgggcggtgaatgagtaccacgtcggcgcctggctacagaacgtcagccacaaagacggaaaggtggcgggcgacatgtacgttaaccgccagtacgccgaatccagcgagaagggcaagcgtctgattaaccgcctggatgagatgctggccggtaccaactccgacccgatccacatctccaccggcctactgtattccggcatcgccgccaatggcgaatcgaagggtaagaagtacaacgagattgccaccaacatgatgtttgaccatgtggctgtgctgctcgatgaacccggcgccggaacgcctgaagaaggggtcggcattttcgtaaatgctgaaggcgataagcttgaaattgaagtagtaaacctcgctgatgctgacgttccagacccgcaagacgcctcaatcaaaacatttttcaaccagctaaaggcgtttttcagcgccaacagcgattcaacccagaaggaaacagatccgatgaaagagctcatcgttaatgcgctgaaggccaaaggtaaatcggttgacggtaaaaccgatgccgagctgatggacgcgtacaaccagatgctggcagaaaacgccgacagcaaagaagaaacgcctgaagagaaggccgcacgtgagaagaaagaagtggatgacaagaaggctaaagagcagaccaccaacagcgaagagatgccagcgtgggcgaaagtccttactgagcaggtcaccgcacttaacagccagatcaatgccaacgctgacaaagagaagggcgaaaagcgcgcagctgtgaagctggcgatgaacatgagcgatgaagaagttgcagatctggacggtaaggcgctcgacgccatgtatgccaagtgccagacatctttcggcctgaacggtacattccgccatcaggctactaacacccaatcagtcagcgaaatgccggagtaa

SEQ ID NO: 258939 - DNA, 618 bp, Klebsiella pneumoniae
atgcttgatcatgcagactactcgccaaacgtttaccattggattaaaactgattactacggcaaagatgacaatgtcgccaaggaaaaagcatttgaagttatgctgaggatcattgatgacggagtcctaagggcgtcgggtaaggacaccttcaagcacatcaaaagcatttgcttcaccgagtcaccaaaggaagttaaagttcatcagagctcgcgatacttaacctttggcttctccttcgataaggaatttatattccaaaaaggtggaaggcacgttatctaccaaactaaagctgaaggggaagatttgccacctcacttgcattggcggcatgtcacatatgaccctgctgacaaaagaaagcgtgaggatggcatcaacttcacttgggaaagagaatggcggcttcatcacgaagaactaagccttctttcaagtaattcggtcattgttccgaacgaagattacaaagaaagactcatcgctgaaattgaacatatgaaggggttttcgaaatacatgagagaaaacgctggcattcatgttgaccccagaccgtactctcagtacaccccggactttatcaaaaaattcgacactataagttga

SEQ ID NO: 258940 - DNA, 255 bp, Klebsiella pneumoniae
atgtctgatttagagaataggattaaagagttagaggatgaaaacgataagttgcggcttgatattcatgccctaaaagttgccgtaatcaccatttcttgcgttgtaaatgaagcagttggcaagtcaaagggtttaatggctgaaacgatagaagactctttaaagtacgatcccgaccttgagcataatgaggagtatttcaacaagttaaagggggaagtaattcagttattaggaaaagcatcagaatag

SEQ ID NO: 258941 - DNA, 528 bp, Klebsiella pneumoniae
atgaaagaagcagttatagtccatgatttcgatttctcaaagatggttatggccatccaaggaaaggcgttcacaaccagtcaaaagatcgctgattactttggcaagcgtcatgacaacgttctgagaaaaatcaggcaggtcaagtctgagtgtccgcctgaatttgctgccctcaattttgaggaggctgatttcattgataaaaatggtgaagcgcagccaatgttcaaactcactaaagacggctatatgcttgtcgttatgggatttactggcgcagccgctactctcatcaaggtccgatacatccaggcatttaactggatggcagatcaacttactcgctggcatgaaatgggcgaacaggcccagcaccggcacgcgctgaaggttgctaagtcagaagtgaaggcccgcatcggtagtaagatgatgaacgccagaaagcgagagaagaaattactcgcactggagtttgaccagatcctctctctgacacagccaaagttgatttttactgaatag

SEQ ID NO: 258942 - DNA, 462 bp, Klebsiella pneumoniae
atgagccgcttaaccgccactatcagcgcagtggttatctgcctgattgtttgcctcggctggctggccagtcactaccacgacaacgctaccgagttcaaaaggcagcgtgacgaaaaagctcaggcactaatgctggctaacgagacaatcaacgacatgcagacccgccagcgcgatgtcgctgcgctggacgaaaagtacaccggggaaatggctgatgctaaagccactatcgatcagcttgagcgtgatgttgcttctggcaagcgtaggctgcagctcaacgccagatgccctgcgagcagagcgaccggcaccggcggcgtgggcgatgcttccggccccagacttgttgacaccgctgaacgggattatttcaccctcagagagcgaatcgtcacagtgacgaagcaggttggctatctgcaggactacatcaaagagcagtgcttaaaataa

SEQ ID NO: 258943 - DNA, 171 bp, Klebsiella pneumoniae
atgcatagtcctctcgctaaggtaatggagcgatcaatcttccgcgtaccttctcgccgcacgcgtaaagtcgaagttaaaccttccgacatcccgacgctgaaagactataccgccctcctggtcgataagaagtggctttgcctgagagcaaggagtccgcatgcttaa

SEQ ID NO: 258944 - DNA, 645 bp, Klebsiella pneumoniae
atgaaacggttttttgaaaactggccaactgagtttgtcaggcgactcgacattttgcgcgttcttgacgaaagaggggtaagaagaagactttacattgaacgcactgacgaaatttttgcaactatggcttctgaaattcgcgacgctgtagcgcaactaaatgacgctgacgcccaggctttcgatatcggtcgtctctatagatattacaaaagaggtgagtcaggggatgctttggcggacatgctcatcgcgaggattcaacacgaatgcgagcggctttgcatctcgccccgagtttacgctgtgccatatttattttttgcgttgcttgccgccaggggagaggacgaagatgctcgcgagttttttaatcaaatgatgcgcccgctagtgattgcgtaccggtttaaacaactggctcgatggcttggaaggagaggtgggggcaggcctgcacacagattaaaaggggaggcgatcgagttggccgggcaatattttgccgataacccaactgcagcgctgtcgcgttgcgtgcaattcgtttccagcgtctttgtcggcaaatacgccgatccgcccgcaaattcgactattagaaagtggttagcaagtttttacaaagatgataaatcttga

SEQ ID NO: 258945 - DNA, 681 bp, Klebsiella pneumoniae
atgcctgtagctaataaaacaaaagaagatgagcggcgcgaattaaaggatgcctatgtcgacgctgtcaaaattagcggggtcgacagaagaacgcttaaaagccttcatctcatcaatgataacgtactggataaatggctctacgttgcggatcgatacccggactttaaagcgtgctgggagcttaatgctttcattcgctcaaccggattacggcagtcaaatatgctggaaaaaatcatccgcagacacaagcagagagtctttgagatagcccggagatatcgcgaagaaaacggcgagatcgatcgagaaacatacgcaggaagacgttacatgctcaacggaaaacttgtcaccatcagtgaggcgtgtggcacgttgggattttccacttatcaggcattacatgccgccatcgctaaagaagggatttctttaaatcaggatatatcgcatctgcgtccaaaatacagaacaaagaataaacaaaaaacgcactcggaacctgctgaaagaaaaggattttatttacttaatggtgagaaggtagatctcaagttattaactgaaatgcaccatacgaaaccctcaacaatgaggtacaggctccgctcgaaaaaagtaaaagtgggcgatgatatcagtgatattgatttgtctggttcaagaaaatga

SEQ ID NO: 258946 - DNA, 453 bp, Klebsiella pneumoniae
atgaaattattccacggctcatatgaaagtgaatctccggttattaaaattggcgcatacgcgatgactggcgataacgtttttgatggtatctttgccagtgatgatgcggagattgccggttctcatggccgcttcgttcacacttacagtgtcgagaatgttgcagataacgtcattcttaacgaacgcatcgacgacgttatcgcctttctccgtgctgagctggagtgtgatgatgtcgaagcgttggcatatgctctggcagatgatgaatgtgatgattcatttgcatatatgctttctcctcgctcctgcacgggtgatgcaggttgggaaatgcagcgcctacgcggtcgcgttgccgctcaccttggctttgatgccgtggaaatggaagacgagcacggcacgagctacctgattgttaacccgaaaataattgccgagtaa

SEQ ID NO: 258947 - DNA, 240 bp, Klebsiella pneumoniae
atggaaattattcagggaacttgtagttgtggagagcccatcagcattgaactaaatgccaaaatgagttgtagaacagatggaaaaaggccgttctatccggatgagaacaaagaaccggaagtcataggaaacttcgtttattcgcatgagggagtgacagtattccggtgcaggaaatgtaacggctgggttgcggatacagttcctgaggcgacgttagaggtgcgagatgagtaa

SEQ ID NO: 258948 - DNA, 591 bp, Klebsiella pneumoniae
atgaccagcaaattaaccagagaagaattactcaacatcatcgagactgaccacgttcaatgtggcgaggcggcatatcttgcccgcatcgcactggccgcaattgacagcgagccggtagagctaccgctggattatcttcagggacacaaagacggtctggagtgggcagctcaactggcaaaagccaatcacccagaaaccggagactggctatacgatgatcctatcgagctggcaaaagctatcagcaaaggtccagatatgcctccatcgcagccagctctggacggtgagcctgtggcgtggaaatggcggctggttgacttagccacaggagaccctggtgagtggagagttactcttgctcccagtttgccgggtaaaggggcggggtatcgcacagaaaccatcccgctctatcgccacgcgcagcagccggtagtgccggatggttacgtgttggtgccgaaagagccgacgcgccaaatgatgtctcaagggcatttcgctatgaaaggtactgaccggggtaaattcagacgtatttatcaggcgatgatagcggccgcccagcaggagatgaaataa

SEQ ID NO: 258949 - DNA, 477 bp, Klebsiella pneumoniae
atgacaactgatatcacaaaactggcgcagagcctgaaagcggcagcaatggaagcaactttagagaagtggtacgtcgataatgacttcgatgtatgcagcgaaaattacggattcgttgccgaattgcacggcgataacttagtgcataacgctcaatttatcgccgtggctaaccctgccaacatcatcgcgctggtagaggcgctggagaaggcacagcagcgcatcgccgagctggaagaaagcaacgctcagatcatccagtcacgcgaccactacaagcgcatgaccgaggaagggttaaagcggttggcgaagtcccgcaccgtcaccgtgaagctgccagagctatgcgtggggggtgttcaaggaggccatgcggtaatggtgccatatgcaggaggacactggtttaacaagacggcgattttggagatgctcactgccgctggcatcaagtgggagactgagtga

SEQ ID NO: 258950 - DNA, 264 bp, Klebsiella pneumoniae
atgagcaagctaacggtgaaggttggggttttaaatcctcgttatgtgacgttttcatattttctcatgaacggacgcattgatgttttggctaaacaacttgcagagcgtctggagattgaagccgatacaccttccgaggcgattgattttgttaagcagactctcattgatattgctgcggatgatattggaataaaagacattgataagccgggagcaagctggcgtgaacaatttaatgttaagggcggtgcagcatga

SEQ ID NO: 258951 - DNA, 543 bp, Klebsiella pneumoniae
atgaacatctcaacagtaaacgagctcattcagtcgcttgagagtgcgggcgagctgtcgatcaaagagcggaagtatcttgaagttatgcgctgggcgattcgtgttgctggcgagcgtgatgcggagctgaatgcagagcgcgtatgggaaagggccatgctggaagtttgcggcgaggatggcccggcgtcggtagccagcgaaattcgagcgctgcaggttctccgggatacgagaattcaggcgcttaattctcaggttgagcaattggctgcggagaatgtggccatgaaatcaaatgccatcaaagcccgtcgagtcattatgtcttctaaatttgactactggagtgacagggtggagttgtttgaagttgttcgcttaattatcgaaacccccgccaccgatcgcatcgtagcagaagctgaggcgcgcggagttgagaaggccatcgaatgcatagtgcaaacaatcacgccaaatcatgaaacgatactcaaagaattcgcccagcagctgcgcgagggggccgacaaatga

SEQ ID NO: 258952 - DNA, 930 bp, Klebsiella pneumoniae
atggcaaacaccgccgaagtaatcaattttcctgtgcctgacgtggcacttaaggagccgcgcgtggcagatattgacgacggctatacacggattgctaacgaacttttggaacacatagcaagcgctgatttaaccgctcgtcagctaaaactgatgctggcatacatccggaaaacatacggtttcaacaaaaaatcagatcgcattgctgatgagcaaattgctcagctaacaggaatatcaaggcagaatgtaaacaaagcaaaaagggatttgctttcaatgaattgcctgattgttgaaggtaataaaatcggagttaacaaggcggtttctgaatggaaattcagcaagtgtctccaagttagcaatcttgtctctaagtcagagacaaagagtgtctccaagttagagacaaaagaagtctctgagttagagacacacaaaagacattctttaaagacaactttaaagacagatcttacccctatagtccccacgggggacgggtgtgaaaaacgagttgttgaagaagttattcaggacgaaccgctggccgatcctgtcaggcaggttttcgcgcactggcaaacagaacatcaccacttgactgcaaagttggatgacaaacgccgcaagcgcatcaaggcccgactggcagaaggcttcaccgcagatgaactctgccgggcaatatccggcgccaaaggtgatccctggctgatgggcaagaacccctccaagaaacggtatgacggcgtagaaacaattctgcgtgacgctgctcaggtcgaaagactgcgtgacctggcgggagatgaacacgctatggcggtcgcacaaggccagtactcggcaaccactgcacgcaacctcgaaaccctccagcgctgggctggcggcactgattcaggagaacttttctga

SEQ ID NO: 258953 - DNA, 1029 bp, Klebsiella pneumoniae
atgacagatatcattgagcatgaagaagataatgagccaataggaaaagccaaaggtggtaaagccagagcagcgaaaatgactccagagcagaggaaggcatcttcaaaaaaagcaatagaaatgaaaaaacactatgcttcacttccttctgcagaatacggcaacaatggtagtgctttaaaagttggggatattgaaataccttgctacgtgctcgatgatgggcgaagagttttatcacagggggggttgcagactgggataggcatgtcaaaaagtggtggcgtaaagggcgagcagcgcatagtcacttttttgagaagtcttgaatcaaaaggcattaaaaccaataacttatcggcacgctgcgcagcaccaattgagttcagagttgtgggcggtggtaggacggcttatgggtttgaagcggagattttagccgatatatgcgatgccgttctcgaggctaatagtcaaggtttactggcccctcagcagaaacacttcgctaaacaatgtgaaattttagttcgtggtttcgctagagttggcattgtagctctcgttgatgaggctactggttatcagcgcgacagagaaagggatgcccttgctaaaatactggaggcatttgttgcaaaggaaatacaaccatacataaccacatttcctccagaatattacgaggagcttttccgtctgagaggtcttgagtacccgccatccaatcctaagttcaggccgcaatactttggcttgctaaccaacgacattgtctataaacggctggctccaaatatccttgaggagctaaaaaagaaaaccaaatcagcatctaaaggaacaaaacttttccagtcattgactcccaatatcggccaacaaaaactcagagaacatctctcctccgcagttacgatcatgaagctatcagacgattacccagatttcattactaagatgaacaaaattcatcctcgatttgatgatattgttccacaagacctcgaagattcagataagtaa

SEQ ID NO: 258954 - DNA, 147 bp, Klebsiella pneumoniae
atgaataacaatgaatttgatgaaggtagttgcgggatgtcgcgcaagggcttgcgggctctctgcaaagtcctggctgtaatgatcccattgtgggcggttgctgctcttgtcgctcttcactatgcgggggtgttcaatgattaa

SEQ ID NO: 258955 - DNA, 297 bp, Klebsiella pneumoniae
atggcggcttatcacattcaggaccggatcgaagcccaggcttggaatacacattaccagcagctggcgcgcgaagagaaagaatcagagctcgcggatgaccttgagaaaggcctccctctccgtctgctggaatcgctgtgcatcgacgaacttcaacgccgcggcgccagcaaacaggcgattagccgcgcattcgacgatgacgtggattttcaagatcggatggcagctaacgtccgctacatggttgaagttatcgcccggcatcaactcaacattgaagaggagcaataa

SEQ ID NO: 258956 - DNA, 930 bp, Klebsiella pneumoniae
atggctactcaactcatcgaacaagtatttagcctggtaaatccactaaaggctgaattcgagcaggtttgctcagaaccctctatcaatttcaggcgtgaatctgagttcgcaatgcagattttcgccaataacgactacctggctaaagtcgccatcggtaatccggttagcaccagaagcgcagtaatgaatgttgccgggatcggcgtgtcccttaatccggctcagaagctggcttatctggttccgcgtaaaggggcaatttgcctcgatatcagttacatgggcctgatgcacattgcgcagcagtctggcgccattaagtggtgccagtcggcaattgttcgcagaaacgaccagttccgccgcgaggggctcgataagccgccgatccacatctacaacgacttcgatactgaagagcagcgcggggacatcgtaggcgcgtatgtaacagtaaaaactgatgatggtgattacctcactcatacgaggcgtatcgatgccatctactccatccgtgaccgctcggaagcatggaagaaatacaaatctgataacagcaagaagtgtccttgggtcaccgatgaagagcagatgatcctcaagacagtcgtgaagcaggcggcaaaatactggccgcgccgtgagcgtcttgatgcagctatcgaccacgttaacgccgagggagaggaaggtatcaactttgcagcagagcgtcagccagagcgcgatataacgtctcttagcgaaaccacgcagaaagagattaacgacctgcttgtctctttggataagacatgggatgccgatcttctccctctctgttcacgcattttcaaacgccctatctcgcagccagccgacctgacagaactggaaggtgttaaggctctcgggttcctcaggcaaaaggcggcagcatga

SEQ ID NO: 258957 - DNA, 1263 bp, Klebsiella pneumoniae
atgccacactcgctttacgccaccgataccgacctgaacgcagacaatctgctgcgtttgcccgccgagttcggctgcccggtttgggtctacgacgcgcaaattatccgccgccagattgctcagttgagcaagttcgacgtagtgcgttttgcgcagaaggcctgctcgaatatccacatccttcgcctgatgcgcgagcagggcgtgaaggtggattcggtgtcgttgggcgagatcgagcgcgcgctggctgccggatacgatccgcatcagcatccggaagatatcgtctttaccgctgatctgatcgacgatgcaaccctggcgcgggtgaaagaactgcagatcccggtcaacgccggctcaattgatatgctgagccagctgggcgaagtttcaccgggccatcgcgtctggttgcgggttaacccggggttcggtcacggtcatagccaaaaaaccaataccggcggcgaaaacagcaagcacggcatctggcacagtcatttaacggcggcgctggaagtgatgcgtcgttatcagctacagctggtgggaattcatatgcatatcggctccggcgtagactacggccacctggagcaggtctgcggcgcgatggtgcgtcaggttgtcgaattcggtcaggatcttcaggcgatctccgccggcggcgggctgtcgatcccttaccgcgaaggcgaagaggcgatcgataccgatcactatttcggcctgtggaacgcggcgcgtgaacaggtcgctaaacacctgggccatccggtcgcgcttgagatcgaaccgggtcgcttcctggtggcggaatccggcgtgctggtttctcaggttcgcagcgtaaaagagatgggcagccgccacttcgtgctgattgacgccggttttaatgatttgatgcgtccggcgatgtacggcagctatcaccatattaccgctctggccgcggacggccgcgatctgagcgccgcagcggagatagaaaccgtggtggccgggccgctgtgcgaatcgggcgatgtttttacccagcaggagggagggaaagtggaaacccgcctgctgcctgcggtggtgccgggcgattatctggtgctgcacgataccggcgcttacggcgcgtcgatgtcctcaaactacaatagtcgtccgctactgccggaagtgctgttcgacaacggtaaagcgcggctgatccgccgccgtcagactatcgaagagctgctggcgctcgagcagctgtaa

SEQ ID NO: 258958 - DNA, 903 bp, Klebsiella pneumoniae
atggctgatatccaacaaatcactgaagcaagggacgtcgctgaacgtgaagtcgcgcggacgctgcgccgtgaaaaaataagccgctcgattcgctatgtgatcctgctgttcgtcggcctgctgatgctctacccgctggtatggatgttctcggcgtcgttcaaaccgaaccacgagatcttcaccaccctgagcctgtggcctgcccacgcgacctgggatggctttatcaacggctggaaaaccggcaccgagtacaacttcggccactacatgctgaacacctttaagtatgtgatcccgaaagtgctgctgaccattatctcctccaccatcgtggcctacggctttgcccgcttcgaaatcccgtggaagaaattctggttcgctacgctgatcaccaccatgctcctgccgagcaccgtactgctgatcccgcagtatctgatgttccgcgaaatgggcatgctgaacagctatctgccgctgtatctgccgctggccttcgctactcagggattcttcgtcttcatgctgattcagttcctgcgcggcgttccgcgcgacatggaagaagcggcgcagattgacggctgcaactccattcaggtgctgtggtacgtggtggtgccaattctgaaaccggcgattatctcggtggcgctgttccagttcatgtggtccatgaacgactttatcggtccgctgatttacgtctacagcgtggataaataccccatcgcgctggcgctgaaaatgtccatcgacgtcacggaaggcgctccgtggaacgaaattctggcaatggcgagtatctccattctgccgtccatcatcgtgttcttcctggcacaacgctacttcgtacagggcgttaccagcagcggaattaaaggttaa

SEQ ID NO: 258959 - DNA, 126 bp, Klebsiella pneumoniae
atgaaacgcaagaacaagcgcaaacgccgcaccatgtcgctcgctgagggagtctacgcagcttgcttttgcttcattctttttatcattggcttctatcaaagcatcaagattattgaagagtga

SEQ ID NO: 258960 - DNA, 2619 bp, Klebsiella pneumoniae
atgattcgcctgagtacgctactgctggcgcccccggttggagagcggttgagcgaacgctatcgcgattatcgccagcacggcgcgtcgcggctggcggccgcgctgggctgcttgtgggcatctctggcatgggcgttgatgccgctggaaaccccgcgctggcaggcaattcgcgaacatcatggcgagtttttcccgcatattaatccgcatcgaccgcgcccgctggacccgattcgctatctgctgcaagccctgtggctgctggtgacgcgggtgccggagccggataaaaagatcaactggcgttcgctggcggcgctggaaggcgtgcaggggcgctatgcgcagtggctggaaaagctaccggaaaaggtcaacgcccgcactggtcatctggataagcataaggagctggggcatctgcatccaaaagtgcggcggcttctccttggcacgataacctttttctcgctgatcctggcgctactctgtattacccagccgtttaatccgctctcgcagtttatttttctgctgctgctgtggggcgtggcgctgctggtacggcgcatccccgggcgcttctcggcgctgatgctgatcgtgctttcgctgacggtctcgtgccgctatatctggtggcgctacacctcgacgctaaactgggacgaccccgtaagcctggtgtgcgggataatcctgctgttcgctgaaacctacgcctgggtggtgctggtgctgggctatttccaggtcgtctggccgctgaaccgtcagccggttccgctgccggaagatatggcgcaatggccgacggtcgatatcttcgtgccgacttataacgaagatctcaacgtggtgaaaaacaccatttacgcctcgcaggggatcgactggccgaaggacaagcttaatatctggatcctcgatgacggcgggcgcgaagagttccgccagttcgccaaagacgttggcgtgcattacatcgcgcgcaccacgcacgaacacgcgaaagccgggaatatcaacaatgcgctgaagtacgccaaaggcgagtttgtgtcgattttcgactgcgaccacgtgccgacccgctcgttcctgcagatgaccatgggctggttcctgaaggagaaagagctggcgatgatgcagacgccgcaccacttcttctctccggacccgtttgaacgtaacctggggcgttttcgcaaaacgccgaacgaaggcacgctgttttatggcctggtgcaggacggcaacgacatgtgggatgccaccttcttctgcggctcctgtgcggtgatccgccgcggcccgctggatgaaatcggcggcattgccgtggaaacggtcaccgaagacgcccacacctctttgcgcctgcatcgtcgcgggcacacttcggcctatatgcgtattccgcaggcggccggcctggcgacggagagcctgtcggcgcatatcggccagcgcatccgctgggcgcgcgggatggtgcagatattccgccttgataacccgttgtttggtaaagggctgaagctggcgcagcgcatctgctacgtcaacgcgatgctgcacttcctgtccggtattccgcggctgatcttcctgaccgcgccgctggcgtttctgctcctccacgcctatatcatctatgcgccggcgctgatgatcgccctgttcgtgctaccgcatatgattcacgccagcctgactaactcgaagattcagggtaaataccgccactctttctggagtgagatctatgaaacggtactggcgtggtatatcgcgccgccgaccgttgtcgcgttgattaacccgcataagggcaaattcaacgtgacggcaaaaggcggcctggtggaggacgagtacgtcgactgggtgatctcgcgtccctatatctacctcgtgctgctgaatctggtcggcgttggcgtgggtatctggcgctttatgtacggcccggaaaacgaaattttgaccgtctgggtcagcattatctgggtgttctataacctgattattctcggcggcgcggtggcggtatcggttgaaagcaagcaggtgcggcgctcgcatcgcgtggagatgtcgatgccggcggcgattgcccgcgaggacgggcacctgttctcctgtaccgtccatgattactccgacggcggcctcggcgtcagaattcacggcgaggcgcaggtgctggaaagccagcacgttaagctgctgctgaaacgcgggcagcaggagtatgccttcccggtgcgggtcgcgcgggttaacggcagtgaggttgggctacagctgctgccgctaagcaatcaacaacatattgattttgtgcagtgtacgtttgcccgcgcagatacgtgggcgctttggcaggatagcttcccggaagataagccgatggaaagcctgctggatatcctgaagctggggttccgtggatatcgtcacctggcggagttctccccgccgtcggtgaaggttattttccgctcgctcaccatgctggtggcctggtttgtttcgtttattccgcgccgtccggaacgcgctgcggcgacactctcggcagaaccggcgatggcccaacaatga

SEQ ID NO: 258961 - DNA, 519 bp, Klebsiella pneumoniae
atgttccccctgcggccccgttcgggcgcatgctaccacttaggcagacagatgcccaccggtcgtctacttgcgattatccatccagctcacgatgatgctgaccagaatgccagcaatgatcagagccgccagatcgtcccacagcagcagaccccactgagcgagcgtcatacagccgccttattgcaatggcaaccgttcgcggctatcctcgaattgtctaggttcgagattagcccccgaaacgttgccaggttataccaaacaacgtgcgggggttttctctttccagcaacccatcaatcgatgccgccggggttcaagcccccgcaacattgcgcctcaccgggcgagcccggcttgccgacaattctactggcccgatcggctacccgcactccgccattacgcaccatgcgagacgcattccaggaaagtgttttgttgctgcaacaaaacgaaaaaggccgcaggatgttacccctgcggccccgttcgggcgcatgctgccactaa

SEQ ID NO: 258962 - DNA, 522 bp, Klebsiella pneumoniae; identical to SEQ ID NO: 173309

SEQ ID NO: 258963 - DNA, 339 bp, Klebsiella pneumoniae
atgcaggcctccggcgcgcaggcctatctggtcaataccggctggaacggcaccggcaaacgtatctcgatcaaagatacccgcgccattatcgatgcgatccttgacggttcgctggacaatgccgaaaccttcacgctgccgatgtttgagctgcagatcccgaccgagcttccgggcgtggatactcatatcctcgatccgcgcaacacctacggatcgccggagcagtggcaggaaaaagcggagcagctggcgaaactgtttatcgagaacttcgagaagtacaccgatacgccggcgggcgctgcgctggtggccgcagggccaaaactctaa

SEQ ID NO: 258964 - DNA, 1725 bp, Klebsiella pneumoniae
  misc_feature (1696)..(1705): n is a, c, g, or t
atgttgattccgtctaaattaagtcgtccggtccgccttgaacacactgtggttcgtgagcgattactggcgaaactttccggcgcgaacaattatcgtctcgcgttggtgaccagcccggctggatacggtaaaaccacgctcgtttctcaatgggcggcggggaaaaatgaccttggctggttctcgctggatgaaggtgataaccaacaggagcgttttgccagctatctcatcgccgccgttcagcaggcgaccggcggccactgtgcagccagcgaggccatggtgcaaaagcgccagtacgccagcctgccttccctcttcgctcaactgtttatcgaactggccgactggcagcgcccgctattcctggtgattgatgattaccatctgatcaccaacccggttattcatgatgcaatgcgcttcttcctccgtcaccagccggaaaatatgactctggtggtgctgtcgcgtaatctaccgcagctgggtatcgccaacctgcgcgtacgcgatcagctgctggaaatcggcagccagcagctcgcttttacccatcaggaggccaagcagtttttcgattgtcgtctcagttcgcctattgaggccgacgacagcaaaaggctgtgcgacgatgttgccggctgggccaccgcgctgcagctgatcgcactctcggcgcgccagaacaacacttccgcgcaacactccgcccgtcgtcttgccggtattaatgccagccatctttctgactatctggtcgatgaggtgctggataacgtcgatccgcgaacgcgtaatttcctgctgaaaagctcgttgctgcgctcaatgaacgatgcgctcatcgtccgcgtcaccggcgaagagaatggccagatgcagctggaggagattgaacgccaggggctattcctgcaacggatggacgattccggcgaatggttccgttatcatccgctgtttggtaattttctgcgccagcgctgtcagtgggagctagcggttgagctgccggaaattcaccgcgcggcggccgagagctggatggcgcagggcttcccgaccgaggctatccatcacgccctggcggcgggcgacgctaaaatgctgcgcgatattctgctcaatcacgcatggggcatgtttaaccatagcgagctgagcttgctggaacagtctctcgccgcgctgccgtggtcaaacctgctggaaaatccgcggttaattctcctgcaggcctggctgatgcagagccagcaccgctatagcgaagtgaataccctgctggcccgcgccgagcaggagatggatacggaaatggacaccgccatgcacggcgatttcaacgccctgcgtgcccaggtggcgatcaacgccggcgatcaggacgaagccgagcgcctggcgatggtggcacttgatgagctgccgctggccagctactacagccgaatcgtggcgacctcggtacacggcgaagtgctgcactgcaaaggccagctgagtaaatcgctggcggtcatgcagcagacggaacagatggcccgccgccatgacgtctggcactacgcgctatggagcatgattcagcaaagcgaaatcctgtttgcgcagggtttcctgcaggccgcctgggaaattcaggaaaaagcgttccagctcattcgcgaacagcatctggagcagnnnnnnnnnnacagaatctggagcagttga

SEQ ID NO: 258965 - DNA, 1098 bp, Klebsiella pneumoniae
atgaagggtaaagcgttactggcaggatgtattgccttaatcatgagcggtgcggcaatggccgaggatatcaaagtggccgttgttggcgcgatgtccggtccggtagcgcagtacggcgaccaggagttcactggcgcagagcaggctattgcggatatcaacgctaaaggcggtatcaaaggcaataagctgcagatggtaaagtacgatgacgcctgtgacccgaaacaagcggttgccgtcgccaacaaagtgattaacgacggtatcaaatacgttatcggccacctgtgctcttcttccacccagccggcgtctgatatctatgaagatgaaggcgtgctgatgatcaccccggcggccaccgcgccggagctgaccgctcgcggctatcacctgattctgcgcactaccggcctggactccgaccaggggccaaccgccgccaaatatattcttgaaagcgtgaaaccacagcgtatcgcgattgttcacgataaacagcagtacggcgaaggcctggcccgtgcggtacaggataatctgaagaagggtggcgccaacgtggtgttctttgatggcatcaccgcaggcgagaaagacttctccaccctggtggcgcgtctgaaaaaagagaatatcgacttcgtttactacggcggctatcacccggagatggggcagatcctgcgtcagtctcgcgccgctggcctgaaaacgcagtttatggggccggaaggtgtcgccaacgtgtcgctgtctaatatcgcgggcgcttctgcggaaggtatgctggtcaccaagccgaaaaactacgaccaggttccggcgaacaaaccgattgtggatgcgatcaaggcgaagaaacaggatccgagcggcgcgttcgtgtggaccacctatgccgcgctgcagtcgctggaagcgggcctgaatcagtctgacgatccggctgaaatcgcgaaatacctgaaaggggcaacggttgagaccgtgatggggccgctctcctggaacgagaagggcgacctgaaaggcttcgaattcggtgtgtttacctggcatgcgaacggtacggcgaccgacgccaaataa

SEQ ID NO: 258966 - DNA, 1521 bp, Klebsiella pneumoniae
atggcgaaagacaaaaaacgtggcttcttttcctggctgggctttggtcaaaaagaacaggcgcaggaaaccgacgcagaacaaaaagtagaagctcagcaagaggttgaagaacaggctccggaaagcgaaacgcctgcggctgcgccggaaacggtcgacgcgccggcgacggagcaccaggatgccgaagcctttgccgccgaggtggtcgaggtgaccgggcaggttgtggagagcgaacagccgcaggcggttgtcgactccccggcagttgagacgattgcagaaccgcctgtggttgaggaaattgtcgctgagcctgtagttgaagaagctatcgccgagccggtagtggctgaagctatagttgagctgacgccggaagaggtgattgccgaaccggaagctgtcgttgttgaaaaaggtgaagaggctgtcattgaagagccggaaaccgttgagccggtagaagaagcccagatcaccgacgaagagctggaagcgcaggcgctggctgcagccgatgcggcggaaaacgccgtggaagtggtgccggacgaaaccgtggtgacgccgttagagcaggaaaaacccaccaaagaagggttcttcgctcgactcaaacgcagcctgataaaaaccaagcagaacctcggttccggatttatcagtctgttccgcggcaagaaaatcgacgatgatctgtttgaagagctggaagagcagctgctgattgccgatgtcggcgtggaaaccacccgtaagatcatcactaatcttaccaacgacgccagccgcaagcagttgcgcgacgccgaggcgctgtacggcctgctgaaagaagagatgggcgatattctggcgaaggtggacgagccgctgaacgtagaaggcaaggcgccatttgtaattctgatggttggcgtcaacggcgtcggtaaaaccaccaccatcggcaagctggcgcgtcagtttgagcagcagggcaaatcggtgatgctggccgcgggcgataccttccgcgcggcggcggtagagcagcttcaggtgtggggtcaacgcaacaatattccggtgattgcccagcataccggcgcggattcggcatcggttattttcgatgccatccaggcggcgaaggcgcgcaacattgacgtcctgattgccgatactgcgggtcgtctgcagaataaatcgcacctgatggaagaactgaagaagattgtccgcgtcatgaaaaaactggatgtcgatgcgccgcatgaggtcatgctgaccattgacgccagcaccgggcaaaacgcgattagccaggccaaactgttccatgaggcggttggactgaccggtatcactttgactaagctggatggtaccgccaagggcggggttatcttctcggttgccgatcagttcggtattccgattcgctacatcggtgttggcgaacgtattgaagatctgcgtccgtttaatgcgggcgactttattgaggcactttttgcccgagaggattaa

SEQ ID NO: 258967 - DNA, 279 bp, Klebsiella pneumoniae; identical to SEQ ID NO: 173370

SEQ ID NO: 258968 - DNA, 1920 bp, Klebsiella pneumoniae
  misc_feature (1884)..(1893): n is a, c, g, or t
atgtcggctccagaatcgcaggataaaaaagtcccacacttctcatcgttaaaatttacccctgccgcgcagccggcggaaagctgctgcgcggaccacgcctgcagcagcgaaaccaccgaggaaaacgaggctctgaggcacgcacgctttagttggctggtagaaggcatggattgcgcagcctgcgcgcgcaaggtcgaaaccgccgttcgccaggtaccgggggtcagccaggtgcaggtactgttcgccaccgaaaagctgctggtcaacgccgagggcgatgttggtccgcgaatcgaaagcgccgtgcgcgccgcgggctatcagctgcgtgatgaaaacgcgccacgggcagaagagtccacctcgtggctgcgcgagaatctgccgctcatcacgctggtcatcatgatgggactaagctgggggctggagcagttcagcccgcctctgggcgaaatcgccttcatcgcaaccacgctggtcggcctgtggccggtcgcccggcaagcgatacgcctgatcagaagcggaagctggttcgccattgaaaccctgatgagcgtcgcagccatcggcgcgctgtttatcggcgccaccgccgaagcggcgatggtcctgctactgtttttaatcggcgaacgtcttgagggatgggctgccagccgcgcgcggcaaggcgtcagcgcattgatggcgctgaagcccgacacggcaatccgcgtgcgcgatggcgtgcgtgaaaccgtagcccagcgcgacctgcgccccggcgacgtgattgaagtcgccgccggaggccgcctccctgccgatggccagctactctcccccttcgccagcttcgatgagagcgctttgaccggtgaatccgtaccggtagagcgtaacgccggggaacgcgtagcggccggcgccaccagcgtcgatcgtctggtacagctgacggtgatctccgaaccgggcgacagcgctatcgatcgtattcttaagctgattgaagaagcggaggagcgccgcgcgccgattgaacgctttatcgatcgctttagccgcatctataccccggcgattatggtcgtcgccctgctggtggccattgttccgccgctgctgtttgcgggcgcctggctgccgtggatctataaaggcttaacgctgctgctgattggctgtccgtgcgcgctggtgatctccaccccggcggcaattacctccgggctggcggtagcggcacgacgcggcgcgctgattaaaggcggcgcggcgctggagcagctcggccgcgtgcgccaggtggcgtttgataaaaccggtaccctgaccatcggccagccgcgcgtcactgcggtgatggcgaccgcagacatcagcgaaaacgatctgctggcgctcgcggccgccgtggagcaaggctccagccacccgttagcccaggctatcgtgcgtgaggcagaacagcgccggctggtcattccgtcggcaagcgatcagcgcgcgctggccggatccggcattgaggctcaggttgaaggacgccaggtgctgatttgcgccgccggtaaaactcgcgatccgcagtacgatgaacctattcagcagctggagagcgccgggcaaaccgtggtgctggtaatgcgcgataagacgctgctggggattctggcgctgcgcgatacgcttcgcgatgatgcccgtcaggcggtggatgagctccatcagttgggcgttcagggagtgatactgaccggcgataatccacgtgcggcggcggctatcgctaacgagctgggactggcgttccgcgccgggctgctgcccgcggacaaagtgcaggcggtgatagcgcttaatgcccagtcgccgctggccatggtnnnnnnnnnnacggtatcaacgatgcgccggcgatga

SEQ ID NO: 258969 - DNA, 618 bp, Klebsiella pneumoniae
atggctgcgttgctcaacggagagcgtgtcgtagctttcggttccggtcagcatcgtcttcacgcggtcaagcgcgttgatggtgtttgccgggtggcagtggaattcgccatttgcggctgcccccgcgtccggagacgggatgagctgctcagcgccggtcgctttcttcaacagctcaggacgctgctggaagaaggtttccacgttgttgaccgcatcgcgggtacgggtgatttcgtagccggaagcgttcatattgaccacgaagccagccggagctacgccgatcagaaccagcatgaccaggccaatgcctttctgaccatcgttcgcgccgtgagagaacgcaacgccaatggcggagagaatcagcgcaatacgcgtccagaacggcggctttttcttgccgtctttcttttcacgctcggctggggtcaggtggatacgggcgcgttttttggttccgctccagtaacgacgcaggatgaaaatcaggccgcccgccacgaccaggccaacgattggcgagatgataagcgagccaaaaatacccatgactttcgggatgttcagcgcgtccaccaccgacgtaccggtcatcagcgcattggttaa

SEQ ID NO: 258970 - DNA, 447 bp, Klebsiella pneumoniae
  misc_feature (428)..(437): n is a, c, g, or t
atggcagatttgaagaaaaaagaggtaagccgtagtcgaatggcggagtttcctgccggaacgccgcttcgttcaggggatgagtttccgactgaggatatcatctgtgaggcactagaaaacaaaagctttgaacgtctgaataactgcctggttatcgccagctcagatgaacatgatatgcgttttatcaatgaggagacgctgaatatttatttcagggatgatgtctggaccaatcgctatgtcagaacccatattggtgaaacgttaagaaccgttaatttttcaggcatacgggatcctgaactgcgtcttgaagccaaaatcatctcagccagcctgctctggattgtcggcaggaccgcgaagacgcagtccctgatccggaaatgtgcaaacattgtggcgggagcccgtattattgnnnnnnnnnngtattattga

SEQ ID NO: 258971 - DNA, 900 bp, Klebsiella pneumoniae
atgaaccgcgctgagatatgccagctattaacgcataaggttaatcagctgaaagataaagaagaaattcttaatggtctgctgccggatatccgcctgctgtacggcactcagccggggacgcgtacgccggtcatgtaccagccggggatcgtttttctcttttccgggcataaaattggctatatcaatgagcgtaccttccgctatgacaccaatgagtatctgctgctgacggttccgctgccgtttgagtgcgaaacttttgccaccccggaagtaccgctggcgggaataaggctgaatgtcgatattcttcaactgcaagaactgctgatggatatcggggaggatgagcagtttcagccgtccatggcgtcaagcgggatcaactctgcggtgctgtccgaagagattctgtgcgcggcggagcggctgctggatgtgatggaacgcccgcttgacgcgcgcattcttggcaaacaaattatccgcgaaattctctatcacgtgctgaccgggccgtgcgggggagcgctgctggcgctggtcagccgtcaaacccacttcagcctgatcagccgcgtgctgaagcgcatcgaaagccagtacactgagaacctcagcgtcgatcagctggcggctgaggccaatatgagcgtctcggcgttccaccataattttaaatcggttaccagcacctccccgctacagtatctgaagacttatcgcctgcataaagcgcgcatgctgatgatccacgacggcatgaaagccagcgcggcggcgatgcgggtagggtatgagagcgcatcgcagttcagccgcgagtttaagcgttatttcggcatgacgccgggagaagatgcggcacgcatcagaacaatacaggggatgtaa

SEQ ID NO: 258972 - DNA, 807 bp, Klebsiella pneumoniae
atggagaaacatccagacgatttattgaccggcgatagcgagccgtttaagggcgatcccaacttcatggcctcgctggcgcgcgggctggaagtgatccaggcgttcactccgcagcgcccgctgctctctatttcgcaaatcagtcaaaaaaccggcattccgcgcgcggcggtacgtcgctgtctgtatacgctgagcaagctggggtttgtgtacgccgaagatggtaaaaatttccagctgcggccgaaaattctggcgctgggccacgcctggctggcctccacgccgctggcgcgctcggcgcagccggtactcaagcatttaagcgaaatgctcaatgaatcctgctctatcgccaccctcgacggcgacgatattctttatatcgcccgcgcctccagctcgcgaattatgaccatcgacctggacatcggcagccgcctgccggcatgggcaacgtcaatggggcgcgtgctcctgagctatcagccggaagagaagctgaacgatatgctgggtcgggttacgatgattcgctacaccccgcaaaccgttgattcggtcgccaggctgcgcgctgagctcaaacgcgtacgtcagcagggttatgcgctcaacgatcaggagctggagatggggctgcgctcgctggcggtaccgttgtttaatccccagggccagattcaggcggcgctgaacgtcggggtgcacgccgggcaggtttccgcccaagagatgctcgaacgcgtattacccgagctccagaaggcagcccgggaattaacgctgctgatgcgctag

SEQ ID NO: 258973 - DNA, 318 bp, Klebsiella pneumoniae
atgcaggtcttcgcgcacaagatgcgcgccgaccttgagatgacccacggcctgattatggctgaggccgttaccctggcgctggcggaatttatcggtaaggccgaggcccatcaccgggttgaagcgctgtgtcgtcaggcgctggatacgtctcgctcattgctgagcgtgctggaaaacgatccgctggtcagcgagcatctttccgccagccgcttaacccaactgctggagccggcaacggcgaccggcagctcagcactcttcgtgcgccaggttgtggcgcgatataaggagcaacgtcttgaatgttga

SEQ ID NO: 258974 - DNA, 1329 bp, Klebsiella pneumoniae
atgcgcctttcgttaaagtttctggtcaatctgtttgttttaaatacgaatgatttcttactgcttgggagtggcatgtcgggatacaagtcaggattaagccgccgccgatttttacagggggcgggcgccatgtggttaatgagtgtgagtccggttgggttggctgccgcggcgcaggtggttgccgtacgcgtctggccatcatcgacctacacgcgcgtcaccgtggagtccaaccatatcctgaaatatcggcagtttgcgctcagtaatcctgaacgtgtggttgtggatctggaaggcgttaacctcaactccgtcctaaaaggcatgggtaaccagattcgcagcgacgatccctatattcagtccgcccgcgtgggacaattcgacccgcaaaccgtacgcatggtgttcgagctgaaacagaacgtaaaaccgcagctgttcgcgctcgctccggtcgccggttttaaagagcgtctggtcatggatctctacccttccaacgcgaccgacgtgcaggatccgctgctggcgctgctcgaggattacaataaaggcgatctgcagcggcaggttccgcctgcggagagcgggccgaaaccgggtaaagccgggcgcgatcggcctatcgttatcatgctcgatcccggacacggcggcgaggattccggcgccgtcggtaaataccgcacccgcgagaaagacgtggtgctgcagatagcccgacggctgcgcgcgctgatcgagaaagagggcaacatgaaggtctatatgacccgcaacgaggatgtctttatcccgctgaaggttcgtgtcgccaaagcgcagaagcagcgcgccgacctgtttgtctctattcacgccgatgcgtttaccagccgtcagccgagcggctcgtcggtatttgccctgtcaaccaaaggggctaccagtaccgcggctaaatatctggctcagacccagaacgcctcggatctgatcggcggcgtcagcaaaagcggcgatcgctacgtcgaccacacgatgttcgacatggtgcagtcgttgaccattgccgacagcctgaagtttggcaaggcggtgctggaaaagatgggaaatattaataacctgcacaagaatcaggttgagcaggcgggcttcgcggtgctgaaagcgccggatattccatcgatcctggtggaaaccgcgtttatcagcaacatcgaagaagagcgtaaactgaaaacggcgaaattccagcagcaggttgcagagtcgattctggcagggattaaagcctacttcgccgacggcgcgacgctggcaaggcgaggataa

SEQ ID NO: 258975 - DNA, 228 bp, Klebsiella pneumoniae
atgaaaacggcgacccatgagctgagcgaggccgttcagccgggcgccgcgctttatggcctcgaaacgcatttgcagggaaaagtggttacctttggcggcggttacgccctgtggcgcgacggctcattaattgggggtcttggcatcagcggcggcagcgttgaacaggacatggatatagcacagaccgccatcgcggccattaacgtgggaactcatcaatga

SEQ ID NO: 258976 - DNA, 339 bp, Klebsiella pneumoniae
gtggtgaaaccggacgaactggtgccactacccggcgacttagcgttggaaaaagtacgcgccattcgccgcagcgccaaagagcgggtctttgtcaccaacgccctgcgcgcactgcgtcaggtcagccccaccggcaacattcgcgatattccgttcgtggtactggtcggcggttcgtcgctggatttcgaggtcccgcagctggtcaccgatgcgctggcgcactaccgcctggttgccgggcggggaaatattcgcggcagcgagggccccagaaacgcggtggccaccggcctgattctctcctggcataaggagttcgcgcatggacagtaa

SEQ ID NO: 258977 - DNA, 204 bp, Klebsiella pneumoniae
atggacttcatcgatcagatagaccttgaagcgaccacgggccggcgcgtactgaacgttatccagcagatcgcgggtatcttcgactttggtacgcgaagcggcatcgatctctatcagatcgacaaagcgcccctgttctatttcacggcagttatcgcagacgccgcatggcgtggcggtaataccggtttcacagtttaa

SEQ ID NO: 258978 - DNA, 369 bp, Klebsiella pneumoniae
atgaaacaattaactgtatttgaaatggaagaaatctctggcggctatacttgggatttttcctctgcttcagcagcttttacttcactggctagcaacgctgttgaagcagttgctatcggtgcccttggtgggattatttgttccattgttggtgccgcagttggtggtttccagggagggtcaaatggcgggcttttaggatttggtctaatcggtaatggtgtaggtgctattgcaggttttattcttggcgctatgggtggcgtagctggagcggttgccttaggctgggataaatccattgatatcctgttagaatttgtagataaaggccttgatggtacctttgcaccttggctgaattaa

SEQ ID NO: 258979 - DNA, 243 bp, Klebsiella pneumoniae
gtggccggtgtggtggtagtacattttgtcttcgcgcttgttgccggtaacagcaactttttctgcgttcagaacgatgatgtaatcaccggtatcaacgtgcggagtgtattccgctttgtgcttaccgcgcaggcgacgagccagttcagtagccagacggcccagagttttaccggtcgcgtcaacaacataccagtcgcgttttacggtttctggtttagctgtaaaagttttcattaa

SEQ ID NO: 258980 - DNA, 327 bp, Klebsiella pneumoniae
atgatcgagcgaaagggcgagctgatcgctgggcatgccgaagtggcgaagcgtatccccggcgccgaccagcacgggagtggacgtcatcgcgccggcgagcatcccggccgtcaggccgatatcccagccgaagagcttacccagtcccatggcgatcagcattgcgctgccgaccattaccagcgcgagcatcaggtaatttttcccatcgcgaaaaaaaatagaaaaaaagttgggtcccgcttctacgccgacgcaaaaaataaacagcataaagccgagattgagggcgtcagtgttaatactgaaatgctgctgccctaa

SEQ ID NO: 258981 - DNA, 597 bp, Klebsiella pneumoniae
atggtgcgcctgcaccatgatttgatttctgccggagaacaccccgtgaatgatgtaattcctcgcccgcaggcgaaaacccccaaagcgctgaccccgctgctcgaaatccgtaatttaacgaagtccttcgatggccagcacgccgtcgatgatgtcaatctcaccatttataaaggcgaaatttttgccctgctgggcgcatccggctgcggcaagtcaaccctgctgcgcatgctggcgggattcgaacagcctaccgccgggcagattgtcctggatggcgtcgatctggcgcgggtgccgccgtatcagcggccgattaacatgatgtttcagtcctatgcgctctttccccatatgacggtggagcagaacatcgcctttggcctcaagcaggacaaattgcctaaggctgaaatcaccagtcgggtgcaggagatgctggcgctggtgcatatgcaggagttcgcaaagcgtaaaccgcatcagctctccggcggtcagcgtcaacgcgtggcgctggcccgcagcctggcgaaaagacgcagctggaagtggtcgatattcttgagcgcgtcggcgtcacctgcgtga

SEQ ID NO: 258982 - DNA, 435 bp, Klebsiella pneumoniae
ttggaatcgccacttggttctgatctggcacgtttggtacgcgtctggcgcgcgctaatcgaccatcgcctgaaacctctggagttaacgcagacgcactgggtcacgctgcataacattcaccagctgccgcctgaacagtcgcagattcagctggcgaaagccattggtattgagcagccttcgctggttcgcatgctcgaccagctggaggaaaaggggcttatttctcgccagacctgtgcaaacgatcggcgggcaaaacgtatcaagcttaccgaaaaagccgaacccctgatcaacgaaatggaagaggttatcggcaaaacgcgtgatgagattctggccggcgtttctaaagaagaggtggaaacgctgctcaatttgattcgtaaacttgaacacaacatcctcgatctccaggcaaaagattga

SEQ ID NO: 258983 - DNA, 1125 bp, Klebsiella pneumoniae
atgaaatcaggccgctttatcggcgtcatgtccggcaccagccttgatggtgtggatgttgtgcttgcagcaattaatgaagatctggtcgcacagcaggccagcctgacgtatcccatccccattgcgattaaagaacagattctggctatctgtcaggggcagccgctcacgctttcgcagctagggcggctggatacgcggctggggcggctgtttgccgatgcggttctggcgctaatggctcaggaaaagctacaggcagcagatatcatcgccatcggctgccatgggcaaacggtctggcatgagccaacgggtgatgcgccgcacactatgcagataggcgataataatcagattgccgcgcgcaccggcgtaaccgtggtcggagactttcgccgccgcgatatggcgctcggggggcagggggcaccgctggttccggctttccatcatgcgctgctggcgcatccggtagagcgccgcatgattctcaatatcggcggtattgccaatctctctttactggcgccggggcagccggtacgtggatacgacacggggccaggcaacatgctgatggacgcgtgggtctggcgccagtgcggcaaaccctatgataaagacgcgcagtgggccagcgaggggaaaattgtgctgccgctgctgcaggatatgctcagcgatccctggtttgccctgccggcgccgaagagtaccgggcgcgaatactttaactacggctggctcacgcagcatctggcgcgttatccggggcttcgtgcccaggatgtccaggcgaccctggccgaactgaccgccgtcagcatcagcgaacaggtgctgctaagcggaggctgcgagcgtctactggtatgcggcggcggtgcgcgtaacccgctactgatggctcgtctggcggcgctgttgccgggaaccgaagtgtcgacgaccgatgaggcgggcattagcggtgatgatatggaagcgctggctttcgcgtggctggcgtggcgtacccttgccggtttacccggcaatctcccttccgtgaccggcgcgtcgcaggcaaccgtactgggcgcgattttcccggccaatccgcagcaaaatcagagttaa

SEQ ID NO: 258984 - DNA, 186 bp, Klebsiella pneumoniae; identical to SEQ ID NO: 184840

SEQ ID NO: 258985 - DNA, 1593 bp, Klebsiella pneumoniae
atgacggcgaaaacagcaaacaaaattaccttgtgggagtttttccagcagctcgggaaaaccttcatgttacccgtagcattactctccttttgcgggatcatgctggggatcggcagctctctgagcagccatgatgtcctgacgcttctgccgtggctggacgtgccgctgctgcaggccgttttcgtctggatgggcaaagtcggctcctttgccttcagctttctgccggtgatgttttgtatcgccattccactgggtctggcgcgagaaaacaaaggcgtcgccgcgtttgccggttttgtcggctacgcggtaatgaacctggcggtaaacttctggctgacggccaaaggtattctgccgaccaccgatgccgccatcctcaaagccaataacatccagaacattatcggtattcaatcgatcgacaccgggatcctcggcgcggtgatcgccgggatcatcgtctggatgctgcacgaacgtttccataacatccgcctgcccgacgcgctggccttttttggcggtacccgctttgtgcccattattacgaccgtggttctcggcctggtcggtctggtgatcccgctaatatggcccgttttcgccatggggattaacgcactcggccaggtcatcaatagcgcaggtgatttcggaccgatgatcttcggcaccggtgaacgcctgctgctgccttttggcctgcaccatattctggtggcgctgatccgctttaccgaagcgggcggcaccctggacgtttgcggtcatagcgtcagcggcgcgctgacgattttccaggcccagctaagctgcccgaccagccacggcttcgccgagagcgcgacccgcttcctgtcacagggtaaaatgccggcattcctcggcggcctgccgggcgcagcgctggcgatgtatcactgcgcgcgtccggaaaatcgccataagattaaaggcctgctgatttccggcgttatcgcctgcgtggtaggcggcaccaccgaaccgctggaattcctgttcctgttcgtcgcgccggttctctacgttatccatgcgttactgaccggcctgggctttaccgtaatggcgatcctcggcgtgacaatcggcaacaccgacggcaacgttatcgactttgtggtattcggcattctgcatggtctgtccaccaagtggtacatggtaccggtggttgcggccatctggtttgcggtttactacggtatcttccgtttcgcaatctcccgctttaacctgaaaacgccgggacgcgatattgaaacaacgagcgcatttgagaaggctgtcaccggcgtgaccggcaaatcagggtataacgttccggcgattctggccgcgctcggcggcgcggaaaatatcgtttcgctcgataactgcattacccgcctgcgtctgtcggttaacgatatgagcaaagtcgacagcgccgcgctgaaagcgaatcgcgccatcggcgtggttcagctcaaccagcataacctgcaggtagtgattggcccgcaggtgcagtcggtaaaagatgaaatggctgtcctgatgaataccgtcgaggcataa

SEQ ID NO: 258986 - DNA, 2169 bp, Klebsiella pneumoniae
atgcgcctgcgcccgtttggcgatagcggtccgctggtgttgagctttgccgcgctggaagattattaccaggagcagggacgcgattgggagcgctacgcgatggtgaaagcgcgaattatgggcgataacgatggcgtctatgccaacgagctgcgcgccatgctgcggccgtttgtcttccgccgctatatcgatttcagcgtgattcagtctttgcgcaacatgaagggcatgattgcccgggaagtgcgtcgccggggattaaaagacaatatcaagctcggcgcgggcggcatccgagaagtggagtttatcgtccaggtcttccagctgattcgcggcggccgtgagccaatgctgcagcagcgggcgctgctgccgacgctggccgccatcgaagagctacatctgctgccggaaggggatgcgcagaggctgcgcgaagcctatctgtttttgcgtcgtctggaaaacctgctgcaaagcatcaacgacgagcagacgcaaaccttgccgcaggatgaacttaatcgcgcccggctggcctgggggatgggcgttgccgactgggatacactcagctcgcggctggcggaacagatggctaacgtgcggcgcgtgtttaatgaactgatcggcgacgatgaaacgcagtcgccggatgagcagcttgaagagtactggcgcgagctgtggcaggacgcgctgcaggaagatgataccagcccggcgctggcgcatcttgcagacagcgatcgccgcagcgtgctggcgctgatcgccgattttcgcaaagagctggaccggcgcacgattggtccgcgcggtcgtcaggtgctcgaccagctcatgccgcatctgcttagcgaaatttgttcgcgcgccgatgctccggtaccgctggcgcgcattacgccgctgctcaccggaattgtcacccgcaccacttacctggagctgctgagcgaattccccggcgcgttaaagcacctgattagcctgtgcgcggcgtcgccgatggtcgccagtcagctggcccgccatccgctgctgctggacgaactgctggacccgaatacgctttatcagccaacggccaccgatgcctatcgcgatgaactgcgccagtatctgctgcgcgtaccggaagatgatgaagagcagcagctggaggcgctacgccagtttaagcaggcgcagctgctgcacatcgctgcggccgatatcgccggaacgctgccagtgatgaaagtgagcgatcacttaacatggctggcggaggcgatgattgacgcagtcgtccagcaggcatggctgcagatggtggcccgttacgggcagccgacgcacctgcacgatcgccaggggcgcggttttgcggtggtcggctacggcaagctggggggctgggagctgggctacagttccgatctcgatttggtgttcctccacgattgcccgatggaggtgatgaccgacggcgaacgcgaaattgatggccgtcagttttatctgcgcctggcgcagcgcatcatgcatcttttcagtacccgcacctcgtcaggcattctgtacgaagtggatgctcgcttacgcccctctggcgcagcggggatgctggtcactaccgccgattcctttgctgattatcaacagaatgaggcatggacatgggaacaccaggcgctggttcgcgcccgcgtagtgtatggcgatcctgagctacaggcgcgctttgacgccattcgtcgggatattcttactaccccgcgagaaggcgaaaaactgcagaccgaagtgcgggaaatgcgcgaaaaaatgcgcgctcacctggggaataagcatcacgatcgctttgatattaaagccgatgccggtgggatcaccgatattgaatttattacccagtatctggtcctacgctatgccagtgataaaccgaagctcacgcgctggtccgataacgttcgtatcctggaactgctggcgcagaacgacattatggacgaggcagaggcgagggcgttaactcatgcttacaccacgctgcgcgatgcgctacatcacctggcgctgcaggaacagccggggcacgtggcgccagatgcgtttagccaggagcgtgaacaggtcagcgccagctggcagaagtggttgatggcttaa

SEQ ID NO: 258987 - DNA, 1413 bp, Klebsiella pneumoniae
atgtcactcagtcggcgtcagttcattaaggctacaggcgtagcgctgtgcgcaggcgccgcgccgctgaaggcacaggctgctggtcagcagcccgcgctgccgattcctcctttgcttgagtcccgccgtgggcagccgctatttttgacgctacagcgtgcgcactggtcgtttacgccgggcacccgcgcatcggtgtgggggattaacggccgctacatggggccaaccatccgcgtctggaacggcgacgatgtgaagctgatctacagcaaccgcctgacggaaaacgtcgcgatgacgatacgcggtctgcaggttcccggtccgctgattggcggcgcggcgcgtatgatgtccgccaacgccgactgggctccggtgctgccgatccgccaaagcgcggcgacgctgtggtatcaggccaacacgccaaaccatatggcgaaacaggtttataacggtcttgccgggatgtggctggtagaagatgaggttagcaagaatttgccgatccctaaccactacggtgtggatgatttcccggtgattattcaggacaagcgcctggataacttcggtacgcctgaatatagcgaacccggcagcggcggcttcgttggcgatacgctgctggtgaacggcgtgcaggggccttttgttgaagtgtcgcgcggctgggtgcgcctgcgtctgctgaatgcgtctaactcccggcgctaccagctgcagatgagcgatggtcggttgctgcacgtcatctccggtgaccaggggctgcttccggcgccggtttcgctaaagcagctgtcgttggctccgggcgaacggcgcgaaatcctggtcgacatgaccaacggcgatgaggtgtcgataacctgcggggaagcggcgagtatcgtcgatcgtattcgcggtttcttcgaaccgtcgagcatcctgatttcaacgctgattctgactttgcgcccgacgggcctgctgccgctggtgaccgatagcctgcctgtgcgcttgctgcctacggaaatgctggccggcgcgccgatccgcagccgcgatattacgcttggcgacgatccgggaatcaacggccagctgtgggatccgcagcgtattgatattacggcgcagcagggaacctgggagcgctggacggtgcgcgccgaccggccgcagtcgttccatattgaaggcgtcatgttccaggtgcgtaacgtgaacggttctgcgccgttcccggaagaccgcggctggaaggataccgtctggatcgacgggcaggttgagctgttggtctattacaaccagccctcctggccgcactttccgttccagtacttaagccagacgctggagcttgccgaccgcggctccattggccagattctggtgaatccggcgccgtaa

SEQ ID NO: 258988 - DNA, 258 bp, Klebsiella pneumoniae
atggcgatcggcagactggcgcagcagatggttcgccagcagcggaatatcttccgtacgctcagccagcggcgggattttcagattcaccacgttgagacgatagaacagatcttcacgaaattcgcctcgcgccatggccttcggcaggtcgcgatgggtcgcagaaataatccgcacatcaatatcgatatcgcgattgctgcccagcgggcgcactttacgttcctgcagaacgcgcagcagtttcacctgtag

SEQ ID NO: 258989 - DNA, 681 bp, Klebsiella pneumoniae
atgaaccccatcgtaattaatcggcttcaacggaagctgggctacacttttcatcatcaggagctgttgcaacaggcattaactcaccgcagtgccagcagcaaacacaatgagcgcctggagtttttaggcgactcaatattgagctttgtgatcgctaacgccctctatcatcgtttccctcgggtagacgaaggcgatatgagccgcatgcgcgcgacgctggtacgaggcaacacgctggcagaaattgcccgcgagttcgaattaggtgaatgcctgcgtcttgggccgggtgaactgaaaagcggaggctttcgccgtgaatcgatactggcggacaccgttgaagctttaatcggcgggattttcctcgacagcgatattcagaacgttgagcgccttatcctctcctggtaccagagccgtctggacgaaatcagccctggtgacaagcaaaaagatccgaagacgcgcttgcaggagtatctgcaggggcgtcatctgccgctgccgtcttacctggtggtacaggttcgcggtgaagcgcacgatcaggaatttactatccactgccaggttagcggcctgagtgaaccggtggttggcacgggttctagccgtcgcaaggcggagcaggctgccgccgaacaggcgctgaaaaagctggagctggaatga

SEQ ID NO: 258990 - DNA, 432 bp, Klebsiella pneumoniae
  misc_feature (416)..(425): n is a, c, g, or t
atgaacggcgaatcgcatcaggaaatccttcgtacggaagggctcagcaagtttttccccggcgtgaaagcgctggataacgttaatttcagcctgcgccggggcgaaatcatggctctgctaggcgaaaacggcgcgggtaaatctactctgattaaagcgctgaccggcgtctatcacgccgaccgcgggacaatctggctggaaggccaggccatttcgccgaaaaacaccgcccatgctcaacagctggggattggtaccgtctatcaggaagtgaacctgctgcctaacatgtcggtggcggacaatctgtttatcggccgtgagccccggcgttttggcctgctgcggcgtaaagagatggaaaagcgcgccaccgcgctgatggcatcctacggtttttcccttgatgnnnnnnnnnncccttga

SEQ ID NO: 258991 - DNA, 321 bp, Klebsiella pneumoniae
atggcgatcggcggactgacgcagcagatggttggccaacagcgggatgtcttccgtacgttcggagagcggcggtattttcaggttcactacgttgaggcggtagaacaggtcttcacgaaactcgccgcgggccatcgccttcggcaggtcgcggtgggtggcggagataatccgcacgttgatttcgatatcgcggttgctgcccagcgggcgcaccttgcgctcctgcaggacgcgcagcagcttcacctgcaacgcaaccggcatatcaccgatctcgtcgagaaacagcgtaccaccctcagcggcctggaataa

SEQ ID NO: 258992 - DNA, 927 bp, Klebsiella pneumoniae
atgacctttgaacagatcctggaagagtatttttttgcccgcttattgcgacctgacacccagagctgttatcgcacggcagtcaatcaattcactcactggcgcaacgtgttacccgccgaagtgacgtcgcatatggtgctggagtggcgtcattacctgctaaatgtgcgctgtatcaagccggtaagctggaatcactatatgcgccatatgcgggctttgtataacttcgcaattgagcaggggctgctagagcagtttatcaacccattccagaaaacatcgctgcgggaatctcgtaagaaaaagaaaaccctgacccgcgagcaaatcctcgcttcccgaaaagtgctgaaccaatttatcgaacgggagaaaatgcagcgcggctatcgttcgcctttatatccggcatggttttggctgaccgtggtcgaaaccttcaactacaccgctatccggctgaatcagcttattcacctgcgagtaagggatatcgatttggtccatgacacgctgtttattcagatcgaaggcagtaaaagccatgatgaacatattgttcccattgcctcccggctgcggccttatctggagcatctgcttgaagaagcaaaaacaaagggaatacgggccgacgatcagttgttcaacatcaatcgtttcagtcggcggacgctgcgccagggtaaaccgatgacagaaaatcaggtgagttatttctttgccaaactcagcgatgcctgccacagccgtttttcatcacaacgctaccgtcataccgttgccacagaattgatgcagaaaccggagcaaaatctgtatgtcacgcagaaactactcggccaccgcgatattaaggtgacgctcagctatattgaacacaatgtcgagatgctcagaagttgcgtggagagagattga

SEQ ID NO: 258993 - DNA, 654 bp, Klebsiella pneumoniae
atgcaggcacaccagttgctcattccctgtgaggataaagccatctggcattgccgaattgaggccagcggcggctggagcagtgaactcacgctgttacgtttttcccctttgctaatttgggaagatccacaacagcggcctgcaaccttcagtggaaccgtcacaccgatagcggggatccgaaatgagacagaagcagtgattgaaacaaacaccgaagtagaacagccatccccccaacccgaacagaacgataccgcactatccggagaagcattctggcaatggctggttcgtaacgttcaggctcaacatctgaaagtcaatgaacctaacgcccggatccataccgtagctgggtcggtgtttctggtgacgcccggtattttcaaactctggcttagcacctgcggtcagaatgtccctgaagaatactggcgggaggtacagaagaagttccagaacctgaatcttcaccgaaaacaaaaaaatggcctcaacatctggcactgcgccattgtcggcccacgccgttgttcacgtcggaagggatatctgcttgacgatcccacgccgctttttggagatgacgttccctttaataaccctcatctcttgctcaatgaaggaagtcactcaaatgacctttga

SEQ ID NO: 258994 - DNA, 846 bp, Klebsiella pneumoniae
atgcggatatggctgacgcgcaaaaaaccagaaaccacaccatccgacggcaagccgaacgccacggagggatggctgcatcctgaatccgcgcagatactactggctgtttcatcacgccagcaacttatccagtttattcgccagagcaccgccgttcccgcctcactgtttgaacgcttctggctgataccaatccaccgcttcgcagaactggcgcagttgttcccagcctcggaaaactatcaccactcccacgcaggtggcctgctcgatcacagtctcgaagctgcctgctatgccgcacgactgcggcagagttatcttttcccgcctgatgcagcgccagaagatcaggcggcgcagtccgaacgctggaccaccgttatcatctacgccgcgttgctgcacgatctgggcaaacttatcaccgatattgaggtggaagatgtcagggggaaacactggtttccgtggcatggcccactgacccagtcttatcggtttcgctatctgccgcaacgtaattatctgcgccatccggctgcggcagctcttctgctcacccaactactcccaccggaaagctttgactggctcgccgccaatgccgctgcgttatccactctgctgcactgcctgaacggacagtatcagtatgccgggctggcgggtgaactggtgcaaaaagctgaccgggcgtcggtggcgtttaatctcggcggtgatccggtcaaggctatccatcgcccacaaacctcatttccatcattgctgctctgcgcgacttgctggcgcatgagttccgactcaacaatcccaacggtggctctgacggctggctaa

SEQ ID NO: 258995 - DNA, 807 bp, Klebsiella pneumoniae
gtggtgccgatgaatgccttatccgggcggttttatcatggcatcaacattcctctactctggaacagcgcagagcgacagggatatgagaatgatcgctggctgaccttcacacaaattcgcaatgcgggcggtaacatccgcaaaggcgaaaaatctgcgctggccgtgttttatctgccccagcagcgcgaggtagtagacagcaacgggaacacggttcttgatgctgacggcaaccctaaattgacgtcctacgccgtggtacgcgagttccggctgttcaacattcagcaatgcgaagatctgccggaggcgttttcacaacctgtcgtgatggtcgatgaccctatcgccgctgccgagcaggttgcccggcaaagctcggtagtgatcactcaccggcgccagaatcgggcgtattactcgccaggacgcgactgcatcatcatgccgcatcctgagcagttcacttcgcgtgaggattattacggtacgctgctgcatgaactgacgcacgctaccggacacgcttcacggctgaaccgggacggcatcactgccggaaagcataccttcggtgatccgacgtatagtttcgaagagctcgtcgccgagatgggtgcagctttcttgtgtgctcatgttggcatccagtcgaagctacagcatgacagttacatcgcatcgtggctgaaggtgttgcagcaggacaaaaaagcgattttccgcgccagtggattagcgcgtaatgcctgcgagtacctgcttgaacgagcgcagcaaccgttagcgctgagcgcatga

SEQ ID NO: 258996 - DNA, 294 bp, Klebsiella pneumoniae
atgccaacttcaccttgccctgaagcaaaatccttatcgctgtctgtctcaactgaggcctgggaaaaggtagtcagttttccccccgatccctctcaggaagacgaccgtctcgaaaacctgattgtcgccaccatgctgacattcaaaagcgcaggcccggaccgtaagagcattaatttcggtctgtactgtttgccttctgacggcagcagcaatgtaccgctgatgacgccgctgcgcttaacgcttgaagataaccacctgttggttactgcccttcatacctgctga

SEQ ID NO: 258997 - DNA, 1305 bp, Klebsiella pneumoniae; identical to SEQ ID NO: 249212

SEQ ID NO: 258998 - DNA, 1239 bp, Klebsiella pneumoniae; identical to SEQ ID NO: 249213

SEQ ID NO: 258999 - DNA, 1194 bp, Klebsiella pneumoniae; identical to SEQ ID NO: 249214

SEQ ID NO: 259000 - DNA, 1425 bp, Klebsiella pneumoniae; identical to SEQ ID NO: 249215

SEQ ID NO: 259001 - DNA, 1446 bp, Klebsiella pneumoniae; identical to SEQ ID NO: 249216

SEQ ID NO: 259002 - DNA, 1272 bp, Klebsiella pneumoniae; identical to SEQ ID NO: 249217

SEQ ID NO: 259003 - DNA, 150 bp, Klebsiella pneumoniae; identical to SEQ ID NO: 249218

SEQ ID NO: 259004 - DNA, 258 bp, Klebsiella pneumoniae; identical to SEQ ID NO: 249219

SEQ ID NO: 259005 - DNA, 603 bp, Klebsiella pneumoniae; identical to SEQ ID NO: 249220

SEQ ID NO: 259006 - DNA, 759 bp, Klebsiella pneumoniae; identical to SEQ ID NO: 249221

SEQ ID NO: 259007 - DNA, 933 bp, Klebsiella pneumoniae; identical to SEQ ID NO: 249222

SEQ ID NO: 259008 - DNA, 1608 bp, Klebsiella pneumoniae; identical to SEQ ID NO: 249223

SEQ ID NO: 259009 - DNA, 1245 bp, Klebsiella pneumoniae; identical to SEQ ID NO: 249224

SEQ ID NO: 259010 - DNA, 1293 bp, Klebsiella pneumoniae; identical to SEQ ID NO: 249225

SEQ ID NO: 259011 - DNA, 801 bp, Klebsiella pneumoniae; identical to SEQ ID NO: 249226

SEQ ID NO: 259012 - DNA, 1152 bp, Klebsiella pneumoniae; identical to SEQ ID NO: 249227

SEQ ID NO: 259013 - DNA, 1203 bp, Klebsiella pneumoniae
atgatgtcggggctacattcatggcttttagataagtcaaccagtgacacctatatgttcatcaagcgcctgtcagccaacgatactggtgcgacgggtgggcatcaggttggcatttacataccttctggtattgttgagcatcttttcccttccattaatcatacaagggatcttaacccgtctgtgacgctgaatgcgcatacctcctcgcacagttgcccggacaccgaggccagggccgtttattacaatggtcgtttctttggtaagacccgaaatgaaaagcgtatcacccgatggggaggtggaaggaatcctctgcaagaccctgaaaacacgggggcgctagcgttactggcgtttgatcatcgtcagggagcagatagtcaattcgttgatatctgggtgtgtcatgacgctgaagaagaagatattgttgagtcatcgctcggagagattgttcccggttcgctggtctatggccccgcaaatgagattctgggcggtctggctttaaaagaacctgtctccagtgagtatcgtcttccggaagagtggagaacgcatttcccttctggtaaggagattatcgagtatgcagcagctcactattctccaaatgttgttggcccggataagcaactgattgaacgtcgtcgtgttgagtatgaaatttttctactggtggaggaaatgcatgttctgggtatggttcagtctgggtttggttcagtaaatgaatttattgcactggcgaattccgtgagcaacagacgaaaatcacgagccgggaaatcactggagctgcatcttgaacagctttttaatgagcacggactgacaacttttgagactcaggccgtgacggaaggaaataagaagccagattttttattcccctctgcgcaagcttatcacgatgaagcttttccagagcagaagctacgtatgttagcggtaaaaacgacttgtaaagatcgctggcggcagatattaaatgaagcagacaggattcaggatatttatctttttacccttcaggaaggtgtttctgttgctcaatttcaggagatgcagcaggaaagggtcaggttggttgtgcccagtagtcttcatgataagtacccgaaagctatccgagaatatcttatttcgttagaaacatttatcgatgaaactaaagcattgtatgtcgattaa

SEQ ID NO: 259014 - DNA, 1425 bp, Klebsiella pneumoniae; identical to SEQ ID NO: 249229

SEQ ID NO: 259015 - DNA, 738 bp, Klebsiella pneumoniae; identical to SEQ ID NO: 249230

SEQ ID NO: 259016 - DNA, 261 bp, Klebsiella pneumoniae; identical to SEQ ID NO: 249231

SEQ ID NO: 259017 - DNA, 285 bp, Klebsiella pneumoniae; identical to SEQ ID NO: 249232

SEQ ID NO: 259018 - DNA, 1296 bp, Klebsiella pneumoniae; identical to SEQ ID NO: 249233

SEQ ID NO: 259019 - DNA, 978 bp, Klebsiella pneumoniae; identical to SEQ ID NO: 249234

SEQ ID NO: 259020 - DNA, 1527 bp, Klebsiella pneumoniae; identical to SEQ ID NO: 249235

SEQ ID NO: 259021 - DNA, 2655 bp, Klebsiella pneumoniae
atgatgcgcagcggcaccctgaccgaacagacggtggacagcctgtaccagaaaggcgcgtcgttcgtcgattttctgccatgggtggagtaccagccgaacagtaaaacgctgctgctggatgacgggcgctcagtcggcgcggtgtatgacatcacgccgttcggcaccgaaggccgctctccggcacgactggaagagttgcgcgatatcctgaaggacgcgctccaggacagcttcacggaatacgaccgccatccgtgggtggtgcagttttactgtcaggatgaggacgacaccgcaagctggctggccgcgcttcgcgactacgccgtacctgaagcaaaggactccaattttacccacgcctggctggaagagatggaacgccacctgcacgcggtttcccgcccggaaggctacttcctggatgatgccgtcagccatacacgctggcgtgctcagcagcgtcacacccgaatggtggtctaccgctggctacccagtaaatcccgcgatccgctggaagactccccggaagaggcgctgaacaccgtctgtgaacggatgatttccgcactggcgggcgcaggtattcacgcccgcaggctggaatgtgaggccattcgccactggctgctgcgctggtttaatcccgccccgcagatggccgactcaccccggcagttctggcaacagatggcgcagcaggatgacacgccggagctgtacgactttgccgagagcctgctgtgcagtgaaccccgctcgcaggccgcgcagggcacatggctgttcgaccagcgcccacataaggtcatcgtgctggacaggctgcgcaaaccgcccaccgtcggtcatatgaccggagaatccgctcgcggcgacagcattaacgcgttgttcgacctgctgccggaaggggtgattatggcgctgaccatcgtcgtctggccgcaggaccggctggaggagcatttaagccgcctcagcgaccgcgccatcggcgagaatgtcgaatcagagtacaccaaaaaagactgtcaggaggtgcgccactggctgaaggacggccacaaactctaccgcagcgcgctggcgttttatctttccgccccggataacggcgaactgacccgacgcgtgcgcagcctgaatagcctgctgctgaacgcgggtatggttccggtacaggaaaatgacgaactcgccccgctcagttcgtggctgcgctggctaccaatgtgtttcgacccggctcgggataagcgccagctctacacccgcttcagctttgtacagcatctcgccaacctgctgccactgtttggccgcgagagcggcaccgggcatccgggcgtcagctattttaaccggggcggcgggatgttgtgctgggaccagcttaaccgcgaggaccgggctcagaacgggcacctgctactgctaggcccgaccggcgcaggcaaatccgccaccctgaacgcgaaaatcgcgcaactgatggcgctgcaccgcccacgcctgtttatcgtcgaggcaggcaactcgttcggactgatggccgattacgcccgcgagcacggcctgacggtgaataaaatcagcctgaaacccggctccggcatcacgctgccgctgtttgctgatgcctggaaactggcggaaagcgatgtgccttcaacagaaccggatgatgacgatcccgaagatgccgacaacgaacagcgcgatctgctgggtgagatggagatcacggcccgactaatgatcaccggtggcgagctaaaagaagatgcccgcctgactcgctctgaccgggcactgattcgcgaagcgattctgcacgcggctcggttcaccgcccgagagaaaagacagacgctaacccaggatatccgcgatgctctgttcacgctggcacaggatgcggcgctaccggaatcccgtcgtaaccggctgtgggagatgggcgaaacgatgaatatgttctgctccgggtttgaaggggaactgtttaaccgcgagggtgaagcgtggtcggaagcggatataaccctggtggatctggcgatgtttgcccgcgaaggctacgaagcgcaactggcgatcgcctatatctcgctgattaaccatatcaacaaccttggtgagcgtgaccagcatctggcccggcccatcgttaatattaccgacgaggcgcatatcatcaccgtcagcccgctgctggcgcggtttctgaccaaaggctcgaagatgtggcgcaagctggggatctggctgtggctggcgacgcagaacctgagcgactttccggatgatgcgaagaagctgctcaatatgattgagtggtgggagctactggtgatgccgcctgaagaagtcgagcaggtcagccgctttaagtctctgacgccggaacagcgccaactcctgctcagcgccactaaagcaccaggaaaatataccgaaggcgttgtactttcgccgcgtgtggaagcgctgttccgggtggtctcccctgccctgtggctggcgctggggatgacggagaaacacgagaaagcggagaggatgcggattatgcgggagtttgggtgtagtgagctggaggcggcgatgaaggtggcggaaaggtgttgtgtcaatgattga

SEQ ID NO: 259022 - DNA, 390 bp, Klebsiella pneumoniae
atgcgtaccctgatactgctgttttccctgcttctgagcgcctgtagcaccgaccagaaaacgctactgccggtggatgaaaacaccaccatgctgaacatctggggccgacaaaataacgatgcacaggcgctgtacgacgcgcggtcggtgctgcgccgcccgctgtatgacgccacgctgacctcgcaacaacagcaggccactcgcagcgacggcaatgccacgcaggcgctgttccggcgactgccgaacccggatctggagatgtatattttccctcatctggcgggcagtgaaggcgtcccggtgccgggctataccaccgtcttccccttctataaccgggtgcagtacgccctgcccggcgaacggaccgatccgctgtga

SEQ ID NO: 259023 - DNA, 675 bp, Klebsiella pneumoniae
atgaccgcgctgctgggccgcattccgcttaacggcagcgtcaccgacccttacccgttcaaggtactgattggccgcgataacctcaccgccaacggtatcgagttgcccgacattgaaggcgcggtgatctccggcagcgccaccggcgactggacgctctcctgcgtgcgcggcagtttaacgtcaatcacctttgtctttcgcgacggcacggtgcgcacgctacccgccgaaggcgacaaaaccggaaacggcacagaaggcaatatcggttggctgtccgatcctcacggcctgccctgcatccccggcgaacgtaaatccaacgccgccgaatatatcggctcgcagttcctactggccggatcgtccgccgccgcgcaggcgctggcaaacaaccagaccacctccaccgtggaggatggctccatcaccaccgcgctgacgggcgacagcgggcagtacgtgctcggccaggcgctaggcggcggcctgaaggagagcgccgactggtttaagcaacgctacggccagatgttcgatgccatctacgtgccgcccggccaggccgttgccatccatatcactcgccagttagccatcgactacgagcctgacggaaggcgggtgaactaccgcacgacgggcgatcgcactggagatctggactga

SEQ ID NO: 259024 - DNA, 516 bp, Klebsiella pneumoniae; identical to SEQ ID NO: 256260

SEQ ID NO: 259025 - DNA, 768 bp, Klebsiella pneumoniae; identical to SEQ ID NO: 256261

SEQ ID NO: 259026 - DNA, 1173 bp, Klebsiella pneumoniae
atgagcgcaaatgcggagagccaaaccccgcagcaaccgggcagcaaaaaagggaagcgtaaaggcgccctcctgctgctgaccttgctctttattattgttgccgtggcatacgggatttattggtttttggtactgcgtcactacgaagagaccgacgacgcgtacgtggcagggaatcaggtacagattatggcccaggtgtccggcagcgtgacgaaagtctgggccgacaacaccgactacgtgcaaaaaggcgatccgctggtcaccctcgaccagaccgatgcccagcaggcgtttgaaaaagcgcaaacccagctggcctccagcgtacgtcaaacgcgccagcagatgatcaacagcaagcagctgcaggccagcatcgaagtgaaaaaaaccgcgctttcccaggcgcaaaccgaccttaaccgtcgtattccgctgggcgcggccaacctgattggccgcgaagagctgcagcatgcgcgcgacacggttgccagcgcgcaggccgaactggacgtggcgattcagcaatacaacgccaaccaggcgatcgttctgggcacgaagctggaacaacagcctgcggtcctgcaagcggccaccgaagtgcgtaacgcctggctggcgctgcagcggacgaagatcgtcagcccaattagcggctacgtttctcgccgttccgttcagcccggcgcgcaaatcaccaccactaccccgctgatggccgtcgttccggcgaccaacctgtggattgacgccaacttcaaagaaacgcagctggcgcacatgcgtattggtcagcctgccaccgtgatcagcgacatttatggtgatgatgtgaaatacaccggtaaagtcgtcggtctcgacatggggaccgggagcgccttctcgctgctgcctgcgcagaacgctaccggcaactggatcaaagtggttcagcgcctgccggtacgtatcgagctggatgaaaaacagctggcagagcacccgctgcgcatcggcctttcgacgctggttgaagtgaacaccaccgaccgcggcggcgagatgctggcaagccaggtacgtagcgctccggtttacgaaagcaatgcccgtgaaatcggccttgagccggtcaataagctgataaacgacatcatccaggccaacgccggataa

SEQ ID NO: 259027 - DNA, 231 bp, Klebsiella pneumoniae
atgcagaatagccagaacgaactcatgaccaccgccgtcgccgccagcagccccgtcaacataccggccccggtcccgaccataaacaccgttttgcgtccgcgccttctggccagcgcgccaaacggcaaaatacaggccgccatgcccagcacaaaaatggtaatcggcagcgtggccagggttggagagggcgcgatggcgttgccaacaatcgccccggtagcgtag

SEQ ID NO: 259028 - DNA, 987 bp, Klebsiella pneumoniae
atgagtgcagatattcagcgccgcccccttccgggcatcacgacgcttatcgaaaaattccccctgattctcttttttgcgctgctggtctggctcagcctgcagtcgcctttctttttaagctggcagaatatcagcatgatgctggtgcagagcgtgccgctggcgatcctctgtttcggcctggtctgcgtgattgccgtcggcggcgatgacgtggtttccggcggtatcgatctgtcgctgcccgccatcgcggtgctcggcgtcgcgttactcagcctcggtatggcggagtggaacaccccttacctggcgctgattctgctgctggtcgccgtgagcctggcctgcggcgcggtcaacgccgtgctggtgctggcggcaggcctgccgccgctgctggcgaccctgtcgacctcagtagccttcaccggcctgaccgacctgctgaccggccagcgacgcatcgcggtaagcgacccgctgatggtggcctttcgcgataacgctctctttggcattccctggccgcttctctatctgctggcggtcttcgcgctgtttcagcttttgctccaccactcccgcttcggccagcatttacaggcggtgggcggtaaccgcgatatggcgcagatgagcgggctcaacgttcgccgtttaacccttctcgtctggctgctggcgggcctcgccgccggtctggcgattttaccgctgctcagccagggctcaggcagctcgagcggcacggcgacgccgctactgctggaaaccgtccttgccacttttatcggcgcggcgttctcgcggcgtcgcgtggtcaccatctggggagcgctgcttggcgcggtgctggtcaacgcgctctctaacgggctcggcctgctgggagtaaatattttctggatgggcgcgatcaaaggcggcctgatcctcgtggtgctggcggcgtcagcggtcagacataaaggaggcaactga

SEQ ID NO: 259029 - DNA, 183 bp, Klebsiella pneumoniae
atggaggcggtagcgttgctggcgcgtctggaggggatcatacttgatccggtctataccggcaaggcgatggcgggcctgaatgatggcgtgaaaacaacgcgtttcaccggcagcgggccggtgatgtttgtccataccggcggcgcgccggcgctctttgcttactatcctcgcgtctga

SEQ ID NO: 259030 - DNA, 240 bp, Klebsiella pneumoniae
atgtcggtaaaacattatctcaacagcttagcgcgcgtcgcgctggttggtggcgtcactcccgttcagcatctgcagcggctgtcggaatatttgcagcgcgatatctctataaaacgtgacgatatttcgcatcctggcatgggcggtaataagttcagaaagcttgagtttctggcgacagatgggtctgaagtgcgcagcgctgctggagaatcccattcaaaccgcagagcctaa

SEQ ID NO: 259031 - DNA, 1482 bp, Klebsiella pneumoniae
atggcgctggtcaacgccttcgcccacgtcctgctggaagaggatctctataaccacgattacgtcgaccgttttaccgaggggctcgacgcctatcgcgaaacggtaaaagactattcacctgaagccgttgaggagatagtcggcgtgccggccgctgaaattcgccaggcgatgcgcatgtttgccgccgccccctccgcgaccattatgtggggcatgggcgtcacccagttcggccaggcggtggacgtcgtcagagggctggccagcctcgcgctgttaaccggtaacctcggacgcgccaacgtcggcgtaggcccggtgcgcgggcaaaacaacgttcagggtgcctgcgatatgggcgtattgccaaatatgttccccggctaccaggacgtcaccgacgccagcgttcgcgataagtttgctaaagcatggggcgttaacccggcggtcatggacgaccaggtcggcacccgaatcaccgaagtgccgcacaaagcgctggccggcgaaatcaaagcctactacatcatgggggaagatccgctgcaaacggaagccgatttgggcctggtgcgcaaagggattgaggcgctcgatttcgtggtggtgcaggatatctttatgaccaaaaccgcagagatcgccgatgtgctgctgcccgccacctcctggggcgaacacggcggcgtcttcacctgcgccgatcgcggtttccagcgcttcgagcaggcggttatcgccaccggcaacgttaagcgcgactgggaaatcatttgcctgctggccagcgaaatgggctacccgatgcattacgacaataaccagcaaatctgggacgaaatgcgcgagctttgccccctgttctacggcgtcacttatgaaaaaatgggcgatatgaaccacgttcagtggccgtgtccgacgctggatcaccccggtacgccgtggctgtataaagataatctcttcgacacgccgaccggcaaaggccagctgtttgccgccccgtggcgagcgccggccgaaaccccggatgaagcctacccgctggtgctctgtaccgtgcgcgaagtgggccactactcgtgccgttcgatgaccggtaactgcgcggccctgcagtcgcttgccgatgagccgggccgggtgcaaatcaatcgcgccgacgcgcagcgtctcggcatcgccgatcagcagctggtgtgggtgagctcgcgacgcggtaaggtgattacccgcgccgacattagcgatcgcattaaccagggcgcggtgtatatgacctaccagtggtgggtgggtgcctgtaacgagctgacgcaggataatctcgatccgatctcgaaaacgccggaaaccaaatattgtgcggtgaaggtagaggctattgcggatcagcgctgggccgagcagtatgcatggaacagctacagcgagatgaaagcccgcctgaaagcggccgtgaacgtgtaa

SEQ ID NO: 259032 - DNA, 2109 bp, Klebsiella pneumoniae
atgatgaataattcagggaaatacctcatctggacactgctctccgttatcggagcctttgccctgggctatatcgcgctaaaccggggtgagcagattaatgcgctatggattgtcgtcgcggcagtctgcgtctatctgatcgcctatcgcttctacggcctgtatatcgccaaaaacgtgctggcggttgacccgacgcgcatgaccccggcggtgcgtcacaacgacggccttgactacgttccgaccgataagaaagtgctgttcggccaccattttgccgctattgccggcgcagggccgctggttggcccggtgctggcggcgcaaatgggctatctgccgggaatgatctggatcctggcgggcgtggtgctggccggggcggtacaggactttatggtgctgttcgtctcaacccgtcgcgacggacgttcgctcggcgagctggtgaaagaggagatgggcccaaccgccggggtgctggcgctggtggcctgctttatgatcatggttattatccttgcggtgctggcgatgatcgtagtgaaagcgctgacccacagcccgtggggcacctacaccgtggccttcaccatcccgctggcgatattcatgggcatttatattcgctatctgcgccccgggcgcattggcgaagtgtcggtgattggtctggtgatgctggtgttcgccatcatctccggcggctgggtggcggaaagcccgacctgggcgccgtggtttgattacaccggcgtacagcttacctggattctggtgggctacgggtttatcgccgccgtactgccggtctggctgctgctggcgcctcgcgactacctctctaccttcctgaaaatcggcaccatcgtcggtctggcgattgggattctgatcatgcgtccgacgctgacgatgccggcgctgaccaaatttatcgatggcaccgggccggtatggagcggcagcctgttcccgttcctgtttatcaccatcgcctgcggcgcggtttccggcttccatgccctgatcgcttccggcaccaccccgaaaatgctggccaacgaaggccaggcgtgttttatcggctacggcggcatgctgatggagtccttcgtagctatcatggcgctggtggcggcctgtattatcgacccgggcgtctacttcgcgatgaacagcccaatggcggtgctggctccggcgggcgtgaccgatgtggtggcgtcggcggcgcaggtggtgagtagctggggctttaccgtcaccccggatacgctcaatcagatcgccaacgaggtaggggaacagtcgattatttcacgcgcgggcggcgcgccgacgctggcggtgggcatggcctatatcctccacggttcgctgggcggcctgatggacgtctctttctggtaccacttcgcgattctgtttgaggcgctgtttatcctgaccgcggtggatgccggcacgcgggcggcgcgctttatgctgcaggatctgcttggggtgatcagcccggggctcaagcaaaccagctccctgccggcgaaccttcttgcgaccgcgctctgcgtgctggcctggggctacttcctgcatcagggcgtggttgacccgcttggcggcatcaacaccctctggccgctgtttggtattgccaaccagatgctggcagggatggcgctgatgctctgcgcggtggtactgtttaagatgaagcgccagcgttatgcctgggtcgcactgctgccaacctcctggctgctgatctgtaccctgaccgcgggctggcagaagtcgttcagcaccgataccaaagtgggcttcctggcgattgccaacaagttccaggcgatgattgacagcggcaatattccgccgcagtacaccgagtcgcagctggcgcaactggtgtttaacaaccgtctggatgccgggctgaccatcttcttcatggtagtggtggtggttctggcgctgttctcaattaagaccgcgctggcggcgctgaaagaggacaaaccgacggcgaaagagaccccttaccaggcgatgccagctgatgctgaaagcctggtcacccaggcgaaacgcgcccattaa

SEQ ID NO: 259033 - DNA, 198 bp, Klebsiella pneumoniae
atgtttgataccctttcgaaagcaggaaaatatctgggccaggcggcgaagatgatgatcggcgtcccggattacgacaactacgtggagcacatccgcgcgacccaccccgagcaaacgccgatgacctacgaagagtttttccgcgaacgtcaggacgcacgctacggcggtaaaggcggcgcgaagtgctgttaa

SEQ ID NO: 259034 - DNA, 855 bp, Klebsiella pneumoniae
atggaaattttcttatctaaaaaactacgctatttcatggtaataatggagacccgcaatttcagtaaagccgccgatgcgctttgcatcacccgctcaccgttaagtaaagttatttctgaactagagcagaaccttggtgatattttatttattcgcaaacataatgaactatcccccaccagcctggcctgggcatgttataacaaatgcaaaccgttttatgatagtttgcgttcaatggaagatgattataaaataaaagctaatcaaaaaccgatctcaattatttttgacatcagtattcctgagcttttattcaggcacgtggagatgatcgctaaacttgagcagctatatgtcgaattaaaaagagaacttattacaaccgacaccctttacaaccttcagcactcagagaatcatgctataatctcttttcgcgaactaggccgcagttctaacattaaatataatacatgggaagcgtgtgaagttgttctgttaagttcgcaacatgccaaaaacaataacagttgtaacgagctgcatatctggaaagataattacatcaattattttaaaggtatttattctgcaattcttgccgatatcaatattgaaccagtttttattgaacacaactttgatatttctacccttctttattctgtacgttcaggaaaaggtatggcgctaatgccatacaaaatgtcgactctttataaaatagaaggaacacgcattcaggtatttaaagattatcatatcaaatgccatctttattataatatcgataaaaaccaagggaaaactctggagggatttaaaaaagtattagcgcaatttatttaa

SEQ ID NO: 259035 - DNA, 375 bp, Klebsiella pneumoniae; identical to SEQ ID NO: 207111

SEQ ID NO: 259036 - DNA, 285 bp, Klebsiella pneumoniae
atgaagttgctcatgatgcctgtgctgataaatatctgcttttgtctgttaattattatcaggatcgcattctggagaagaaacggcaaacgctatcgtccgtttatctctctggtagcctggatgctggcggtttcctgctgtgcggtaatagtgagccttatgtcaggatattatcgcatagccgactgggcggaaacgctgattaatggattgttgtgtgcagctgtttattactgttctgggaatattgcccacttatttagagtcaggatgaaatcatga

SEQ ID NO: 259037 - DNA, 384 bp, Klebsiella pneumoniae
atgaatgtatttaaatttagtaaaaccagtctggcaaaattacaaggggtgcatggtgatttaatttccattgcacaacgcgcgctgttattaacgccgattgattttagcgttactgaaggcgtaagaactcaggagcggcaaaggcagctctatgaacaacataaaacgccaacgctcaatagccgccatttaacgggacacgctattgatgtgctagcctggcacggttcaacctgctcctggtactttccagattatgagttgattgccgtagcgtttaagcaagcagcccatgagctggggctggaagtggaatggggaggggactggaaatcacaagacggagtgcattttcagctaagctggaaaaactatccttaa

SEQ ID NO: 259038 - DNA, 3618 bp, Klebsiella pneumoniae
atgaatatgcctgatggcggagcccttgctcaaatagaaaaaatgctccaggtttctcccggaacgtttgtggaaaataaatatttctccatttttgatattatcagtcaatcccggcaggaatttatttctgcgaacctatcctggttgggtaatcggggaaataaagtctatgatctggcgttaggacaggcggagtatattcgtcgtttgtttagaaagaataaaacgacttcgcacgtaaaaaatacgcttcaggccacgcaaagcggagcgaccatcaaaaataatacctgcaggctcaatgagcaggggctgatgcagaatggccccacgtggcaaaaccagtttggtgaggactggaagacgtactgtcagtcgggggccccggaagcctatgactctccggtaagctatttgagctggctatatcagcaggcgttaatctacgagcaggaaatggtttcggctggcggtgatattattccgctttctgaacgccgcccggatctggcgatgatgactatcgataatgacgcggtaaatcaggtcgttccgacactgcagctggtgaatgaaatccttgaagagtcgctgtccaccgctattcctcagggcggtacgatggatagaactctggcgacaacccgttacccgactcttttgccttatcacttccctcacgatcaggtgatgctggcattgcagaatgcccaggttcctcttgagacaatcgtcagccagacggatagcggctggccctggttcctgagcgatacgttaactggtgccagaagcgtgcaagccgcagagctggcaagcaagctggcaccagaacaaatggtcattgtcaccgaagcggataacagcgctgcaggcgatatgagcggcttttataaagcggatcttggactggacacggaggattattcaccgtttgcggatgcgctaacatttgcagaacagttaacgatcaccgcttctcagcaggaatatctgctggcccgaggtccaggtggtacaaccgtagtcacatccgagaacttcctcccatcagggggtaatcagcgctcctctgattctgatgtctatggcgccagatttattaaccagggtgcaggagagggggtggttggactcgtcttcaatgatgagagcagcccagaacgcgatatgattggcggtacagatcttgttattagcgacgctggtgtgaagggtaccgatggaagattcagtaccgccatctccgtggacgcgacgcagggagcagaggtatttctcccttatgatatgagctgcgatggcactgaggtcgtcgatttcacgctttctttctggttccgggtgcacagtgatattaaagatagcgctactgtcgtgatgaataagaccgggacttattcaggcaatgctaccggcattgcgttgttaacttccttatctgaacatgatgtttcgctggaactatcggtttacggtggagaactctattcgaagatgacggaaactattcctgtcgatacatgggtgtttttttcaatagtacatgatactaccagcaaacatcttactggttattactgcacggataatgtcaatcttcaaagtcttattgttgattatagcaaggcatctgcgagcattgaattagaagataccacctggggattcaatggtaataaagggaatatccattatatgcattatcctgaacaggagtcggtaattgattttgatgatatttgcgtctggaataggcagctaaatgaacaggaaattaatatgctgctgacttcgcccggaggcggtaatacgtctatggaacattattatccctgcgataccagcgtcgctggcgcgacaatcattaatttatcagacgcgcgtatggatcgcatcaatcgtatggtgcgcttatgccgttggctagggatctcatttgaagaaaccgatcttctggtctgtgcctgtattaatgcgcaaggaaaagataatgtcgattttactatgaatgagcatactttgcggatgctaggggtattccgtcactggcagcaacaatacgctgtcactccatttcaatttgcagcggttctttctcaaatcacgccatacgcgatttctccggccgtaccgttcctcgatcaaattttcaactcgccatctctttttgacgaaccttttgctattaccggcgctacggtcgcgtataccgatgtttccggcgacagcgcgcgttccgtacggcaactgtgtgccggtctggggattagcgaagcggaattccgcgtgctggcagatatggtcgccgcgcagcagggggacgcaacggcgcggaccttcccgctgaccctggacgtggtatcggccttatatcgcatgacgatggtaccgcgctggctgggtttgtcgtttgccgaaggcgtggcgctaatgagcttattgccaggcgtcgaggtatgtctggcgggggtgcctcagttggcttttgacgatgctggaaaaccgacgtcaggcgatattcttgatgcgctgatggcactggatagcgcgcgcgactgggcgaaaacgcatgctctgtcatggataaaaaactatcttatcctgcagccgacgccagctcacctggctgcgtcaagcgaggcggtgaattttgtcaacagcattaagcagcaactgcctgcaacgctgctcagcgaacagagttttgccactttgccgatgccggatcagaatgacggctggacatggatgaatacgcttggcaacgtggtcgatgccgccgggctggtgcttgccgtcgctgcggactataccacgctcctcaccatggttcaggcggatatcgccgggctgccgtttgccgccaatgtgaatatggcccggcttgcggactcgctcgcgacgattatctggcaggcgaaacaggcccagtacggcgttgccgatagcgcgctcgcgcagctgtttaatacccgacagtcgctctcggccttccttctgcaatgggaaaacgacactgaatatcgtctgctggtggacacgctagcaataaatagcggatatagcgtcagcgatcccacgaccatcacctgggactatttatcccccctctaccagcttggcctgcgtgcaggtacggtcgcccagtttcagctcaccccagcaacactcagcgtattcctggagcatcctgattggtttggcgtgacggatacctccctgacgctggcgctactccagcgctttagccgctatcttgattggctggggttggccggcaaagaggatgctgttttggcctatctcaactgggtcaatgccgctacgccgccacaggccagttcggccgcacaagcgctgggtgcgctgctggcgtgggacagcagcgaagtagagctggccactgctcgctttaccgacggtatagcgaagcgcgtgaatgaagtggattacgtgatgcgcctgcaaagtctggcgacggatacgggactgtcggtgacgccgctgctcaataccggcgcgctggtcgtaggctcggtgaatgacacctgggatgcctggcaatcggcaggtgaatcattagttgcggcccaaacgctagtctcagcgtaa

SEQ ID NO: 259039 - DNA, 4536 bp, Klebsiella pneumoniae
atgagtattgatattgcagcatctttaaatcaacatcagcgcaacgcgttgctctcttattatcttgggcagtatgtgccgaatagcggaaatagtaaattagttgatttagtccagactccagaagatatatatgaatatttgctgattgatccgctggtgggcaattcagtgaccacttctcgagtagcacaggctatgtccagcattcagcaatatattaatggcattactatgaatatggagccagggtataatacaggctcgctggataacgatcggcttgccttgtggaatggtggcgccagtcagtactccatttggggaggggaagttgatctggatacctatccggaaaattacctcgacccgacgctgcgccagaatcagacggcgtattttaaagcgctgattaatgatctgaatcaaaataccattactgacgataccgcgcagcaggcggtcatgaattatctgaataaattcgagcaggtagctaatctgaatgttgtgagtggttatctgaatagcactgaacagactacgggtacctattatttattaggcaaaagcaacacctcgccggtgcaatactactggcgctcgtttgatatgagccagaatgtggataacgtggtggctacccgcgcatggtcagagtggttcccgatgaacatcacgattaatgaggataagttacagggcgccccacgtctggtatattttaataaccgcttatatctattctggtttgagaaatcaaccgctggtaatatatcgggcagcaccagcggcgaaacctatgatgagatcacggcttattcttcatactgtgattttagtaataattggtcagcaccttatactttaatgtcagtgtataatagcgacagtaatgatccttgctatgcattatttgacgcagcgtggctttgcacagcctgcggatataatcagagcggtaatgttttgactctatcgctatatgctggcgacggcgtaaaggatgatagttccgaaatcaaaggttataatgatttctctattgaaatagattattggtttaacctctcaagagtttacgctaaaagtgatagtgataatccgagtatacttgctgaatatctcttttattaccttgagaatgataattttcccggtaatcagaaaaaaattcaatcaaattatattattggtttgccagttataagccaggtgactttactccctcggcctgcatcagggcagtttattgactgttcttatgtgctccctgtacttaataaagaaaattttagcctgacttataatttagatggttcttatattcttcatggcaatattccccaggcggttgctactgatgcgtattataaaaacatttctgatgttatgctgggtgctgatggcacaactgctcttaatggagaaatgacaacagattcatgctggaatggtttgtcggaaaccagttcggatattaaatttaaaaacaccaagataacttgttctaaagattatggtagtgtaaacattttgcagctagtagatgtttatgattacaaagataccatcaatttaccccaggagtatgtattttcaagtaatgggtatgatatggcggaattgtggtttgacatattcgcgacaacttacggacagccttgtacgctcaatttctgttatgatgaaggtgattatcaatataccacacgttttgctttttcgtttaatccagcatcatcaggggatgcttctctatggacttttgctgcgtacgaaggcgctgctcaaggcacctggaaagtcacggcagatgaagtaattaataaaacgcaggctgtctttactatcaacgattcagcatggtcctttaatagaacgttgactccggatgatacgcttgttcgctacgtctcgtttggatacatggatgcctcgggctatgcgatttatgatgaatacgaagtagcgctgcaatatgcagaaaccatccccgtcaccccaacgattacgactcgagccgatagcgaacttgggaccgccgtgttcctggcgtttactggcaatttcgacaatggtaccgagatctcccccattcgcctgaacacgctatttgctaaagagttgataaacaaagccaacgttagcatcgacgatctcttaacctgggatactcagctaacgctggagcctgcactgatggacggcgggcctgatactccgatggattttagcggcgccaatggactctatttctgggagctttttttccatatgccctggctagtagcatatcgtctgtaccaggagaggcagtttgccgaggcgcagcagtggtataacgctattttcaacccgtcggctcgtggccgggtgagcgctaacccggattatcctgagcccgactactggagcgtacgtccgctggtggagacgtcttcttcagcagcccaggcgagcgcggtctggctaaccaccgatccggatgcgctggccgttgccgatccagtccactaccagaaagcgattttcatggcctatgtcgccaacctgatggcggctgccgatgccagctatcgtttgcaaaccagcgatggcctgagcctggcgcgcctgcaatacggtcaggtgaaagacctgcttgggatgcgcccggatctcaccatcctgaaccagtggctcccttgtactctgcaagaggctgccgacagcctgagcgccagcgaatcgctgcgccagttcgcacaaacggatgctgcgttccctctgttttctggtcggttcagcgcggcttccaccgtcgctaccagcgacagatttatggctccgctcaatgcgcagcttctgagctactggaatacgctggattcacgactctataacctgcaccacagcctgacgattgacgggcagccgatgacggtgccgctttatgcgccgctagtgaatcccgcaaacttgatgacgcagagcattcagggcggatcgttaacctgcagcgcgaataaccttgccgcgagcataccgccataccgttttagcgtgatgctgcagcgcgccaaaagcgccgcagcgacgctgggacaattagggcaaacgctgctgagctactgcgaacgcggcgatagtaccagtctgcaagagctaaaccagcagcagttgctggatatctccggctttagtattgcgctccagcagaacgcgctggatgcactggatcaggatcggcagactctgcttgccagccgcaccttaacccaggatcgactgaactattaccagaatctactgacggcgggcaatctggcggatgagaataacgccctacagcgcttgcaaggcgctatcaacgatatgaatgcctcgatggggctgattaccgccggcgcggcgatgaatatggcgccgaatatcttcggcctggcggatggcggcgatgtctggggagccgctgtcgaggccagcggcgcggtcacgcaggcgctggcgatggtggaaagtacgcaggcgcagaaattccagctttcggcggaataccgccgccgggccgatgagtggcagttccaggcagatcaggcgcaggatgaaattaatcaaatcaacgcgcagctggatgggctgactattcgccagcagggggcgcagacttctcttcaactggcccaggcacaacagaataacgtgcagtcaatgttaaccttcctgacgactcgcttcacccagtcttcactgtatacctggcttaccgggcagctatcagcgctgtactaccaggcctatgacgctgtgctgtcgctatgtcaaagcgcggaagcgtgctggcagtatgaaatgggcgatgttaccacccgctttattcagactaatgcctggaacgatagctaccgtggcctgctggtcggggagacgttgcagcttaacctgcaacagatggagtcggcatggttgacgcgcaaccagcgccgtctggagctgacaaaaaccatctcgttgcagcaactgcttggggatagcgcatttgccgatctcattaccaacggtaccgccagctttaccttgagtgaatcgctgtttgataacgactatccgggccactatttgcgtcaaattaagtttgtcacgctgacgcttccgacgctggtggggccatatcaggatgtacgtgcgacgctgacgcagaccagcagcagtacgctgcttaaagcggatatcaatggtgtgaattaccttaatgatagcagtacaggcaacgcgaataacatcgtgaccaacctgcgtgccagccagcaggtagcggtctcctcggggctgaacgatggcggcctgtttgtactgagcttcggcgatgagcgatatctgccttttgagggaaccggcgccgtctcatcatggaccctggcattcccgaataaagcaagtgatgaacagcaggcattattgaacaacctgagcgacgtgattgtgcaggtgcattacaccgcgctgtacggcggcggcagctttgaacaggcggtcgcgcagacgctggcataa

SEQ ID NO: 259040 - DNA, 4464 bp, Klebsiella pneumoniae
atgaacgatcatcacgctttttccacatttgaaacctcatttacgccgccctctttgcctcaaggaggcggaacgctgaggggaatgggggagtcgttgagccaggccggaccagatggtcaggtttcgctgactattccgctacctgtgcttgccggtagaggctttgctcccaggctggcattgaactaccacagcgccagcggcaacggaccgtttggtctcggttggggctgcgggacgatgcgtattgttcgccgcaccagtcatggtgtaccgcaatataatgatgacgaccagttcctggcgccggatggcgaggtgctggtacgtaccgtcggcacgaccaatgaaccgaaccctaccctggtaagtgaatataacggtgaagcgttatcgcagacctggacggtgacccgctaccagccgcgtattgagcactatagctccagagtcgaattctggcagggggaggacggcagccagttctggctgctgcacggcagcgacggaacgttgcatatgctggggaaaacaagggcagcgcaaatttgcgatcccgtccggtcagaatatatagcggaatggctgctggaagagtccgttaatccgcacggagagcatatctggtatcgctatcaggcggagaataccgataacctcgacctgagcggtaatgagcacggtcgggatcacagtgccaaccgttatctcatccaggttatgtacggcaatgaaatctccagtccagggctttatttatggaacggcgatacgccctccgctcagtggctttttgccttgatattcgactatggggagcgcagcctcgatccgcaaacgccaccgacgtttgataccgtcgggacatggccggcgcgccaggatccgttctccagctaccactatggctttgaaacgcgtacccaccgcctctgccgtcaggttttaatgttcaggatgcagggcaatcggacggcgctgatttcccggctgctactggaatacgatgaaaatccgctgttgactcagctaatcggcgcgcagcgcctggcttatcagcaagatcctaccccatcggatgcagcaaacaatgtgctggagcagctaccgccgctagatattgattattctgcgccggactaccgcggcgacaaaaacggctggcggcagatgcccgcgctgccgggcttgaacgaccggccctatcaactggtcgatttatacggcgagggggtacctggcgtgctgtatcaggatgcggcggcctggcgttaccgagcgccggtgcgcggagagggcggcggcgatgatgtggcatacgccgactggcaaacgctggcgcagatgccatcgctcggcggcgcagcttcccgactgatggatatcaacggtgacggccatctggagtggctggtggcgcagcctgcgctggccggcttttttacccaacagccggataaaagctggagcgggtttaccccttttagcgcgctgccggtggagtttttccatcctcaggctcagtttgcgtcgctggttggcagcgggctggccgatctggtgctgatcgggccgaaaagcgtgcggctgtatgcaaacgttggagtcgggtttgatgccgggctgacggtgatgcaggatgatggcgtcacgctgccggtaccagggcgcgatgcccgcgagctggtcgccttcgccgatgtgctgggctccggccagtctcacctgatccgtatccgttatgatgctgtcacctgctggcccaatctggggcgcggacgctttggcgcgccgttcaacctgccgctaccggcaccgctggacgatgcatattgtttcgatcccgcccgcctgatgctggccgatctggacggtagcggcgcggtggatattctctacgcccacgccgatcgtattgatgtgtacctgaaccagagcggcaataggttgattgccggagcgtcgttgccgctgccggacggtgtcgtctatgaccgcctgtgtcagcttgatgtggcggacgtttccggcaacggcatggccgaactggtgctgtcggtaccgcatatgacgccttgccactggcgctaccgtttcaatagcgtgaaaccctatctgctgaatacgctgaataacaatatgggagcgcagcgttccctgagctggcgcagttcggcgcaggagtggctggatgagaaacaggaagcgccgcaggcgatccctgcgctgccgttcgccgtaccggtgctggtgaaaagcaccactcttgatgagatcaccggcaataccctgagccagagataccgctatcgccagggcgtgtatgacgggcaggagagagagtttcgcggttttggctatctggagcgcgatgacgccactagcgatgcgctgccgacaggggacaatacgccgctggccgcgacgcagcggactaaaagctggtatcactgcgggcgcgaagaggatgaatctgcgctggcggggacgccgttcggcgccgatagccaggcggtcacgctacagcccacgcggctgactctatatcaggccggagaggatacggagctgatcgcgccggatgcgacgacgcgttactggctctatcggtcattaaaaggcacctgcctgcgcgaggaaacctacggtctggacggcagcgcgttgcaggatctgccttatcgcacgatgctacagcgtatacaggcgcgtctggtgcagtctgcagcgacggagtgcatcgtgacgccgttgccgctggagcaggttaacacgcagtacgagcgttttagctggcagagcgagagcgggcaggcgctgtttgacccgcaggtagggcaccaggtggcgatgcgttacgatcaatatggcgcgcgactgaatagcgtcaacgtggcctatccgcgccgcgcgccgctggacgatagcggaccaacgctggtgaatacccccgcagacgcctggcagaacagctatgactcacagcagaacgtggtgcgctataccgaatctctggcggcggtaatccacctggacgatgcgcaggcgtggcgtttgaatctaccttcgcagtcgcgtacaaatttgttgatcggcgacgttctccccgaggcggggatcagttatgaaagcctggcggcagcggatggacctttagcggtaacgcaacgccgcgatatggcacatcagaacgaagtgatttatctggattcttatcctgccatcctggcgttgattgatcgacagcgtacggcggtactgaacgatgccgcgcttcaggcctatgagggaatgactattccggcggagtatagctttgagcttctgggctacgtctccgttcccgcggtactgtctgtatctccggaaaataacgtttgggccgtagaacatgaaaagatgagctacaacggcagcgaccggttctatctaccttccaggtatcagcatacgtcgctcagcggtgcgctaacgctgagctatgacgataacagcctgtatctcacacaaaccgaagacgtctatctcaacgttactgcaatagagtacgacgatcggttccttactccttgtcgcataaccgatatgaatggcaatgtgcaagaggtgcaactggacgcgctggggcgggtcagggccagcagctattacggtaccgagcagggagtggcgcgcggatttggcgccctggccgataaccctgtatcggtagagctggcagtcagcgctgctatcgcgatggcgctgatggaaggctatctccagcagcaggccacgattatcgccattgatgcgtttagctggatggggcaggctgatgcagcgcgttttagcgcggacgagcgtgcgcaactgctggcgctgcgttttatcaccgcggatggctatattcgcgccaaaggatggcgctgggcgcagcaggcacgctcctcgcttgcactcaggttagcagcaacgccgcgcgcgccggtaaacggcgtcctgctgagcgccgataactatcccaccgctttagatccgcaaagcggcgcggcgttgcagcagacgcagatcaaagtcactcatagcgatggcttcggacgtgctttacagcactgtgtacgggtgccggacggcgaagcctggcagcgaacggatgacggcgaggtggtgacggatccgctggtatccgccagcccgcgctggtcggtgtccggccgcattgagtatgacaataaaggccagcctgtacggcagtaccagccctatttccttaacgactggcagtacgttgttgacgcctcgttacgtactcagggttatagcgatacatactattacgatgcgccgggccgggagattcgccgggtcagagcgaacggatattttcgccgcaacggctattacccctggttttccctgcttgaagatgaaaatgatacttccccggaacgggttaccgtacaaggagcgctggtatga

SEQ ID NO: 259041 - DNA, 2928 bp, Klebsiella pneumoniae
atgagtcagatcattgataacccaggggcgggaacgccgaccctggcgattaccgataaccgcggactgacggtccgcactttacaatacaatcgacaaaccattaccgacgctccgcaggcgttgattacccgagtattagccgatgatagcggcctcagtactgcccagtgggatccccgtctttatatgaactggctaaatgatcccaatgtttcggcataccaggcgaaccaggtttctctgacagggcagacgctgcgtcgcgacagcgttgacagcggctggaacgttacgctgtacgatgccgaaggtcgcccggtatggcagcaggacgtcagtgcggtctgcagacggcaggagtttgatttaatcggccgcctgacggccagctatacccagcaaaacggcggctcggagcgggtagcggcacgctttttttacggcgataccgatgcgcagacggctactccacaggatgataacctgcgcggcaggatggtccgtcactatcatgatgctggaaaaacaacgatatccgggtatacgctcggcggcggcatggtctgctccacgacacagctcctggccagcccggagcaacaaagcgactggcggggcgacaatgaaatgacctggcaatccgcgctttcgccagagaactggaccacgacatggatgtacaacgcatcgggcacaaccctgacgcagacggacgcctgccaaaatcagcagcgcttcttttacgatgtggctggcgtgctgtgcgctagcgagctaacacagagcggcggacagccgacgccgctattgaaatcgttaacctggacggcggcgggcagaaagctggtggaggttgcgggcaatggcgtgcagaccacctggggttatgatgaaaaagatcagcgtctgatatccattcgcgcggtacgcggcgatggaagcctgcttcaggatctcacctatgggcgcgatccggtcggtaatgtggtgagtatcagtgatgggacggcggcgataagctatttccgtaaccaggcagcgtcgggagacgcctgctatcgctatgatgcgctgtaccagatgatcggcgctaccggacgggagaatgcagatatttctccccagaccgccgctttgccggatgtggtgaaggataccagcaatctggtgtcttatagccgcagctatcagtatgattctgcgggtaatttacagcagatggcccattccggggccagcagctacacgcatacgatggctatctcgcagagcaataaccgttcgatcctgaatagcgatggttccgttacgccggagcaggtagatagctattttgatgttcacggtaatttgctgcaaatgcaggccggtacgccgcttatctggaatgagcttaaccagctgcgctatgtggtaacggttgacagaggtggggcgctggagggcaacgatcgcgaagtctatcaatattgtcaggggtcgcgcatccgcaaacagtcgcggatgctgaccaatagcgacagccatatctggcaggtggatgatgtgatttatcttcccggccttgaggtgcgccgcagctatgttgataacaacggcaacccgcagccagtgacggaggagttacatagcctgaagatagacgacggtagccgtgcggtcattcgggtattgcactgggtgaccgggcagccgacgaatatcgaagcggatcaaattcgctactctttggataaccatatcggttcggtcaatattgaactggacggcagcggcaatattttgtccagggaggagtattatccgtttggcggcactgcggtactgatggggaacagcagcgaagtaaaatataaatatgtacgttactccggcaaggagcgcgatagcgccggtctgtattactacgggcatcgatattttgccccgtggctattccgctggataagccccgatcctgcgggaacacgcgatatgattaatgcttattgctttgtcggtaataatcccgcgacatcgtacgatgcatccgggtttgttgatattgctgatttatcgcagccgttgaaggatctgctttttggagaccatgaggtttttgggagagaactcaatagcgtacggtctggtaatgacgttatcagaggaagaacattatggagcgatccggagattagcacgttttctccggtgatttctgaggttgccgcctctgagcatcaacggttgttgcaggagtcccgcgctggcggagcggtggcggcgctgtccggtgaagagcggtttatgatccgactttatagcgaagagtcgctgccttttcaccgtatgctgcttaatggcttatcttcagaagatattgttgcaggttatcagccggaaatggccagatatttaagcatgtcgcttaaccagctaccggaatatccgggccacagctatcgcggcgcgttattagggaatggcgtgggatatgttccgtcggtccttaatagagatgcggatggtggggaagcggtggcgttaagatcgccacaagcgactgaagaacaaagagacgtgacggtttcaattcaggcgggcgattatgtgacgacacagacgtttttttccaccagcgccgagatcagggtggcttcagagtttgtgatgcgccagcgttttggtaataccttttcagccgggactgccgtttttgatattcatgcccaaagtggcaggaatattacggaactgaccgagcttgatcaggcggagattttgctgcaaccgggggcattgttcagagtcacgaacgtagaggagcgtgatttggggattcgggtaggccttgaagagagcagtacggcctgggaaagagcaggcactgtaagggattatcgctttggttcggttgtgccctcccgaccaacgtatccggcttag

SEQ ID NO: 259042 - DNA, 1011 bp, Klebsiella pneumoniae
atggaagataaggtcatcatgccattgtcctgcacccggcaagagattgccgggatctctggcctgttgtcctcaatgcagcttcagtcagaaaccctggggccgttgcaggatggcgatttcaccgcttataaacggctgtatctggtggggtccggtgattcgtacgccattgctctgatggtggaacagtatctgaatcgctatggtgtggtggcgtgccgcgccgtgcagtccttcgagttcctgggattttccgcgcggcaggtcagcgcagatacgctggtggtggtgattagcgccagcggcaggccgtctccggtactggatgcgctcgcacatgcgcttacgatgccagcgagcgtagtgggaataaccaatgtaccgggaagtccattcgccaatttaacgccgtgtatgctttttactcaggcccgtaagagaggaatgcccacgcaaagtagttcggcaacgctctgtttattaatggcgctggccgaccgaatcctccaggcgaatgcggtgcctgcagagtcgacaaatttagatatcgagcgtttgcagcaagcatgggaagaggcgcaatggcaggcctggctgagcgaatatgcgcaggcatttttctcccgccgcgtgattttcctgggaaatggcctgacccggggcgtcgcatatctggcgtcaaacctgatggcctgcgggccgcagatagaggccagctttttccatattgaagaatattgccatgcattaaggctgaatcaggctaatcagcagcaccttgtggtgatgtttcccgacacaaataaagacctggcgctgtgcgcatctattcaacagcatttagcgcgccggggagcgttgtcacattgttttgcaccttctgagaattgcaaagtacacgattacttacagcaaattatgctgctgcttttcaaactctctctccaactggcagagcgttacgtcgctacgggtggtgaacgcgtcacattcgaggatataaaatga

SEQ ID NO: 259043 - DNA, 168 bp, Klebsiella pneumoniae
atgaccgaggtttttatcgctctcgtggtcgggattgttacaggtttaatattcagttgttttaaactaccaatacctgcaccgccggtgttgtcgggaattattggcattgttggcgtttatcttggtagtaaaggttatcaggttattatgcaacttattggctaa

SEQ ID NO: 259044 - DNA, 1134 bp, Klebsiella pneumoniae
gtgttatcgataccaaaggttatattacatgaacatttggaaggatcggtgacggcaaatctcgccgttcatttatcacggaagaatggaatagcgatagcggataaatatatcaagcgcggggccattcccggcgactatgaatatgcatgggataagtcagatttcgcgcattttataaaaatttatgattttatatcgtcacttattcagactcccgatgattattatctggtgacatcggattttctctttcgtaatgcactggcgggaatgatttactgtgaactgattatttctgcagatcatatgcgcaaggttggcggaggcgatgaggcgagcaattatcgcgcctgtctgcatgaagtcacaaaggcaattaaggatgctgaagcacaatatggcacggtgacccgcctgcatgccgttctgatcaggcatcaaggggtcgaacaggtcgcttctgccgtagatattttgctgaacaatccgcacccctatattaccggcgtgaatgttgccggacatgaaggaagcaacagcttcagtgattattctgcttatcttgcccgcctttatcagacgggcctgcgcgggtcgctgcatgccggagaaatctgcggcgcggagagcataaaagccgctctggatgcaggcgcttcgcgtatcggccatgggttccgcgccatcgagtcgcctgcgcttatcgaggagcttattgcgaaggagacgttactggaaatctcattatccagtaatcatttgctggttaatgagatccgagaaggggcgatgcctcaccctgtcagaaagctgtacgattgtggagtgagattaaatctgaataccgatgatgccgggatttgtgcaacggatatattaaaagaatatcagtttgctgtgcgtacatttggttttcagcgcgcggagctgattgatatatccatgatggctattgaggccgcatttgttgcggaggatattcagaaaacgcttttagataaagtatgcgcagctgccaccgatgaagatattgatttcttcgcgctcgcgcaagagtccgctcattctccagcgctgcgggtgagatttgcagaaagatataaacaacttacttcgaccagacaattatga

SEQ ID NO: 259045 - DNA, 1089 bp, Klebsiella pneumoniae
atgagtcatagcgatatccgcgtggtccccggccccgccaactactattcccatcccggcagccttgcgcggctgcaggatttttatagcgaagaacagctttcacgcgcggtgtgggtttacggcgagcgggctatcgcaggcgcccaggcttttctgccggcagcgtttaacgctcccggagccaaaaaaatcctctttaaaggccactgtagcgaaagcgatgtcagcgagctggcccgcgcgtccggcgacgatcggtcggtggtgattggcgtaggcggcggcgcgctgctggataccgcgaaggcgctggcccgacgcctcggcctgtcggtggtggctatccccaccatcgccgccacctgcgcggcctggacgccgctgtcggtgtggtataacgatgccggtcaggcgctgcagtttgaaatcttcgacgatgccaactttctggtactggtggagccgcgcattattcttaacgcgccggcggaatatctgctggcgggcatcggcgatacgctggcgaaatggtatgaagcggtagtgctggccccgcagccggagacgctgccgctcaccgtgcgtcttggcatcaacggcgcgctggccatccgcgatgtactgctggaaagcagcgaaaccgcgctggccgaccagcaacgtggcgagctaacccaggctttccgcgacgtcgtggatgcgatcatcgccggcggcggtatggtcggcgggctcggcgagcgctatacccgcgtcgccgccgcccatgcggtgcataacgggctgacggtgctgccgcagaccgagaagtatcttcacgggaccaaagtcgcctacggtattctggtccagagcgccctgctcggccaggacgacgtgctggcacagctggtgcaggcgtatcagcgctttaatctgccaaccaccctggcggcgctggaggtggatatcaataaccgcgaacagctgaataaggtgattgcccataccctgcgcccggtggagtctatccattttctgccggttgaactgaacggagaaaccctgcgcgccgcgtttgaaaaagtcgaacgtttcgccggttag

SEQ ID NO: 259046 - DNA, 474 bp, Klebsiella pneumoniae
atgaatgcggtgcgagataaacacaatgccaaggccctgctgttgcaggcggcgaaccaccgcaaacaggcgctcgctttcgttttggtccagcggcgcggttggctcatcgaggataagaaagcggcagtgatgcgacagggcgcgagccagcaggatttgctgtttttccaccagcgtgcagctgtcgatggagcggcgcacgtcgaggctgacgtcaagctgagccagcgcctcgcgcgccagctggcgcagccgtccccagcggaaggcgagccccggttccgccagcctgtcgagcatgatgttttccgcgatgctcaggcccggaaccagcgccacgtctacctcctgctgcaccagatgaatccccagctgtttagcatcgcgcggcgagcgaatgctcaccggctggttgttaatcaccacctcgccttcgtaatgggcgtgcgtgccgcacagcaccgccattag

SEQ ID NO: 259047 - DNA, 984 bp, Klebsiella pneumoniae
gtggacgccataaaaggatcggaactgaacgtgccggatgccgtttttgcatgggtgttcgacgggcagggcggcgtaaagccgctggtcgacagcgataccattgataaagagcatccttgttggctgcatctcaattatacccatgttgatagcgcggaatggctggcatcgacgccgctgctgcctaataacgtacgcgatgcgctgggtggggagagcactcgtcccagagtgacgaggattggcgatggggcattaattacgctgcgctgtattaacggcagcactgatgagcgcccggaccaattggttgcgatgcgtctttatatggacgagcggttaattgtttctacccggcagcgcaaagtgctggcgctggacgatgtgctcggcgatttgcgtgagggcaacgggccggttgacggcggcggctggctggtggaagtctgcgatgcgctgaccgatcacgccagcgaatttatcgagcagctccatgaccggattatcgatctggaagatgatttactcgatcagcaggtgccgccgcgcggctttctggcgctgttgcgtaaacagcttatcgtcatgcgccgttatatggcgccgcagcgtgatgtctatgcaaggctggccagcgagcggctgccgtggatgagcgatgaccatcggcggcggatgcaggatattgctgagcgtcttggccgcggtctggatgaaattgatagctgcatcgccagaacggcgattatgagcgatgagatcgcgcagattatgcaggagtcgttatcgcgaagaacctacacgatgtcgctcatggcgatggtttttctgcccagtacctttttaaccgggctgttcggggttaacctcggcggcattcccggcaatagctggcatatgggtttttctattttctgcataatgttagtcgttctcattgggggtgttacatggtggttgcatcgtagtaaatggttgtaa

SEQ ID NO: 259048 - DNA, 438 bp, Klebsiella pneumoniae
gtgcggccagtgtacttctggaacgatgtgtattcggcctggctggaagcaagctatcagcgcgtcgagtacgatcggggcggcgataaccaaggctggaagctgacgctgtcgcaaaacatcgccattggcatgggggcggagagccacccgatgctgcgattctacgtccccggcggccaggtggacaataagcacatcgccaaagtgaacgacagcagcgtcgaacggctgcattcgttaaacgtcggcgagatgtttgaggcgtggttccaggtctgtcggcatctacgcgaacaggctggcctgcgccggcctgttcgcgggttctgtagacttaattcaccgtcaggcgcagggccagatcctgcggatagggatcaaagtagttctgcgtctgcaggtaacgatccgggtattccgccagatagtgcttaa

SEQ ID NO: 259049 - DNA, 1020 bp, Klebsiella pneumoniae
gtgttccaggtagcgaaagaaaacaactttgcactgccggcggtaaactgcgtaggtactgattccatcaacgccgttctggaagctgcagcgaaagttcgctctccggttatcgttcagttctctaacggcggcgcagcgttcatcgcaggtaaaggcgtgaaaactgacgttcctcagggtgctgctatcctcggcgctatctctggcgcccaccacgtgcaccagatggctgaacactacggcgtgccggttatcctgcacactgaccactgcgcgaagaaactgctgccgtggatcgacggcctgctggacgccggtgaaaaacacttcgccgctactggcaaaccgctgttctcttcccacatgatcgacctgtctgaagagtccctgcacgaaaacatcgagatctgctctaagtacctggcgcgcatggccaaaatgggcatgaccctggaaatcgaactgggctgcaccggcggtgaagaagacggcgtggataacagccacatggacgcttccgccctgtacacccagccggaagacgtggattacgcctacaccgagctgagcaaaatcagcccgcgtttcaccatcgccgcttccttcggtaacgtacacggcgtgtacaaaccaggtaacgtagttctgaccccgaccatcctgcgcgactctcaggaatatgtttccaagaaacacaacctgccgcacaacagcctgaacttcgtgttccacggcggttccggttcttccgctcaggaaattaaagactccgtcagctacggcgtggtgaaaatgaacattgataccgacacccaatgggcaacctgggacggtatcctgcagtattacaaagcgaacgaagcttacctgcagggccagctgggcaacccgaaaggcgaagaccagccgaacaagaaatactacgacccgcgcgtatggctgcgtgctgcccagacttccatggtgactcgtctggagcaggcatttaaagagctgaacgcgatcgacgttctgtaa

SEQ ID NO: 259050 - DNA, 450 bp, Klebsiella pneumoniae
atgatccgtttctatctgggcgagcaaccgatcctcagcaatattcccacctggcaatgccgtaaagcggaagatctcagctacgtgctgagccatcttgagctgatggtcgtgaaggaggttcacggcgcgggcggctacggcatgctggtcggtccgcgctcgaccaaagaggagcgcgatgcgtttcgtcagcgtctgctggcaaacccggccaactatatcgcccaggacaccctggcgctgtcaacctgtccgacctttatagaagaggggctggcgccgcgccatatcgatctccggccctttgtcctttccggtcaggagatccgcctggttcccggcggcctgacgcgggtggcgctaaccgaaggctcgctggtggtgaactcgtcgcagggcggcggcaccaaggatacctgggtgatggaggaggacgaatcatgttaa

SEQ ID NO: 259051 - DNA, 276 bp, Klebsiella pneumoniae
atgacaggatttattctgtcgatcattctgacggttatcccgtttgcaatggtgatgagtggctccgcatcgcatgcggcaattctgggaaccatcctggttactgcagttgtgcagattgtggtacacctcgtgtacttcctgcatatgaacagtaaatcggacgaaggttggaacctgaccgcatttatcttcaccgtaatcatcattgctatcgtagtcgttggctccatctggattatgtggaacctgaactacaacatgatgatgcactaa

SEQ ID NO: 259052 - DNA, 333 bp, Klebsiella pneumoniae
atgaaagaattaaatatttgcgaaatggaatgcgtttccggtggtttcaacctcgtcgatgctgccacgagctttaccaatttcgtggtcaactcgggagttggtttcagctcttttgtcgcgacctccggcgcagccttcgctaacttcgtgatcgatagcacggtacagtttggcaaattcctcagcggtcaagtggactggaacgcttttgtctccgcaggtctggataactggaatggcttcgttaatacggcctctaacagctggtcaaccttcgttaacaacgcaggttccgactggaacagctttatcgacgtcgcgaaagcgtaa

SEQ ID NO: 259053 - DNA, 1701 bp, Klebsiella pneumoniae
atgaaaagctgggatgtcatcgttatcggcagcggcgcagcaggctttgccgcggcggtgaccgcctgctgtaaaggactgtcggtgctgatgctggaaaaagcaccgcagtttggcggcacctccgccatttccggcggcgcggtatggatccacgatagcgatcaggcgcgaacaatgactacagacgatagtcagcaggcaatcaaaacctatctgcggaccatcatcggcgagcccaactatcgtcaggatctgatcgaagcttttatctcttcgggacgcgaggcgctggcgtttcttgaaaaagagggggcggtgaaatatagcctgcgtccgctttctccggattattacccggatgaacccggtgccgtcgacgtcggccgggcgctggaggtggtggagtttgacgggcgcaagctaggcgaatatttccgcgatctccgttctcctccgccggggatgctgctatttggcggaatgatggttaatcgggtcgatatccagcactttctcgatctgcgccgctccctgcgctctatcacccactgcggcaagctgctgctgcgctacggccgcgatcggctcaaataccctcgaggaacacggctggcgatgggtaacgcgctgatagcgcgcatggcgacgctcgcctttcgcaaaggaatgcagctcaggctcaacgtgaatgtgctttcgctaagcgaacgcaatggcgaaataaccggcgtggaaatcgagaacgatgggcagccacagctcctcaaagcccgctgcggcgtggtgctggcggcgggaggttttgccgcaggcaaactggctgaacgctatcgccctgctactcgcgagcactacaccatgtcgcccgccgccaacgacggcgccgcgctgcgccttgccgccgcggtcaatgcccgcgaaggcgccgatctgccgtctaactttttctgggcgccggtctcggttttacggcgtcccgacggcacgcaagagcgcttccctcacctggtcaccgaccgcgcgaaacccggcgtcattgccgttaaccagcgagcggttcgcttcgtgaatgaatcaaattcttatcaccatttcgccagcgccatgcaaagccgggcagaaaacgccccctgcttcctgatttgtgatgctctggccatgaagcgctatggcctgggccttgcgcgccctgctccggtgaataacgacgcgctggtgaaggcgggctatctgcaccaggccgaaacgctggcggaactggcgcaacagctcgggctggacccgcagacgttggcagaaacggtggcacgctataaccgcgatgccgcccaaggccacgacccggagttcgccaaaggcggcaacagctataaccgcgcgatgggcgatcccggccatcggccaaacgcctgtaacgctccgctgaccagcccgccgttttacgccattaccctctataccggcgatctcggcacctcgcgcggcctggtcactaccgccaatgctcaggtcattaaccagcaggggcgccccattaaagggctctatgccgtcggtaacgatatggattcgattatggcaggcacctatcccggtccaggcattactctcggcccggcgctcaccttcggctatctctcagccagccatatggcgcaacaacacgcactctcaacaggagaaaattatgatctatga

SEQ ID NO: 259054 - DNA, 369 bp, Klebsiella pneumoniae
atgcgtgttggtacggatattgttgaagtggaaagaattattcaggccttgacgaacagcaattctttctttttacagagagtgtttactcatgctgagattaataaaattaacccgcacgacccaaattatgagcgcgcttctgggttctgggcggcaaaagaatcaattgtaaaagcagtaggttatgggtttaacaataaaatccgctttcatgatattgaggtcacgcatgatgaatatggaaagccagcgtttttgataacaggaagactgaaggaaatcctcgatgagcaaggagttgctaatatctccttaagtatctctcattgccgtactcatgcaatcgcagtgactattctttgttaa

SEQ ID NO: 259055 - DNA, 1647 bp, Klebsiella pneumoniae
atggatattcgatatattttcagcgcggccttgatattaatgagtttcagctcgaagacgtttgcagacatgccgctcgggcgtatgataaaagaacagcagagtaatgataatacatcaatcaaagaacggaagattgaaaaaaaagatgttttttcgcaagccgtacagaaaatagcagtagatagcgattttccgcaagagacgccttgctatgatatcgatgagcttattctcgaaaatgacttcctgaacgatcgctggatccgaaaaattaaaaaaagaatcgccggtaagtgtttgggggtcaaaggattacaaaaagcagctgtcgttttgcaggatcactttattaattccgggtacataacaacccgagtcgagataccttctcaggatcttttgactaaaaaactaaagttgcgaattattcctgggcgaatatcacaaattattatatctgataatgatataagtacatgggggttgccctttaaggaaggagatattctgaatgtcagagatattgaacagggactggaaaatatacagaggacgccttgggttgatgttaagataaatataatacctggcgttaacaacggtaccagtgaagttgatattaaacctcagcgtactaaaagatggaatttaagaacaacatataacaattttggtgataaaagtactggcaaccaactcttagggacaaccggttatctttataatttaacgaaatctagcgatcttttttatttggccggtaccagtagtcagacaggagggtataaaaatgttagcacctactatagtatcccttttggatactctgaattaagccttttttatagtagtagtaaatcaaaacagagtattgatgttggcctctatgattttgactatgtgggtaagacgcagtacttcagccttaagggatcacgaatgctgcatcgtgatgcgagttcaaagctttccgccagtgcagaacttatcagacgcaagtatgattatacattagggggggaagaattagttttacaaaaacgcgatatgagtaatttgaagctcggggtaaattacaagaaaaatttcaccggggccgtattagattccagtttaagctggcagcgttttatcaaggccttaggaagtacagaaacgccggatatgcgtaacggagatgtaagtcgccagagtcagatcatgaatctgaatgtgaattatatgaaatggctaacttcattacctgttgatgcttattatgaacttaatctcggtgtacagtatacgccggataatcttactctacaggatcagcttactataggcgaccgttggagtgttcgtggctttgatgatagtggaggaatttatggtaataaggggttctatctacagaatacgcttaatcttattacaggttatagaaacataactccctattttggtgtggattatggccaaatcatcggtaaggtcccggtacaggagattgagagtaaaaaaataatgggcggcataaccggtttaaaaggagttgtttatggtttggagtacgatttatccttatcgagcccttttgtctaccccgataatttaaatgtagataagtataaagttaagtttaactttaattaccaattataa

SEQ ID NO: 259056 - DNA, 567 bp, Klebsiella pneumoniae
atgaatattaatgttgactcgctgtctttagaaggtaatggttctatcgctaaaaatactgcaactggtattatttcctcagatagagatattttcataaatgttaatggtgattatttcaataatggctggattagtggcaagggagatgtgacagtaaaaagcaccggctatttaagaaattctcataccattaatgctgacgggaatcttaacgttagtggatacactatagctaacaataaagatatcgtttctggcaaggcattgacaattactaccaatactgacttgaccaacaatgctaatggtaatatcactgggtatacgacccggatcgatgctaataatatctctaatatgggtaacctggttgcttcatcccaactcaatttgaatgtggcgaataatatctataattatttgaatatctataccgaaggtaaagcggtaatcaatgccaaaaaagttatcaatactggcttttgggctgtctttggtggggctcaaggacttcagacagctgcaaatataacaaatatatttggtactgtggttggtaaatag

SEQ ID NO: 259057 - DNA, 597 bp, Klebsiella pneumoniae
gtgctattttcattaaaaaatgacataaagcgattaaaagatgatctcgaccaaatcaggactagcaatacatcaataaaatataaccttgatgatatattgataataaaggctggtttattgctacagaaaaataatttttcagaaaaaggggaagtacccgtttttggtgggaatgggattattggttatactaatgaggcaaaagaatttggcgaaactattgttattggcaaagttggagcgctttgtggaaacgtgcgatattgcaacggagacatttgggtcactaacaactccatgattgttaagaatagaaaagacgatgtagtctacatgccctatcttgcgaaattattaaatgcaatggagttaagaaaactatcctcaggaactgcacagcaatatataacagtccgtcatataaaatcgttagatataaatttaccatcaatagaaattcaaaagaaaatagatcatttgctgtatcaaatagagcatagaattaactcaatgattaaactcagagataaaataaattcttgcagcattcatataatgaatgatattacttgcaatttacagataataaaataa

SEQ ID NO: 259058 - DNA, 336 bp, Klebsiella pneumoniae
atgactaccccgcattctattgcagaattcactgatccagaagtctccccggaaaataaccgtaaaggcaccgtcagttacgcgagccgctttgaagatcgccagcatatcccggcaattatcatgaagggccagtggctggaagccgccggttttgccaccggtactaaaagtgatatcaaagtaatggaaggctgtatcgtgattaccgcgaagcagccggagccggaactggtggaatcgcttcgccagctgcataagctgtcggcgcgcaagcaaaaacaggttcaagcgttaatcggcgcgatcgccgggcagaaacgtaagctggcctaa

SEQ ID NO: 259059 - DNA, 549 bp, Klebsiella pneumoniae
atgctcaaaccgctgattgaagccaacgacgggcgctgctttatgctctgcacttcgcacgccatgatgcgcgacctggcggaacagtttcgcgccaccatgacgctgccggttctcctgcagggagaaaccagcaaaggccagcttttacagcaattcgtcagcgccggaaatgcgctgctggtggcgaccagtagcttctgggaaggggtggacgtgcgcggtgatgcgctttcgctggtgattatcgacaaactgccgttcacctcgccggacgatccgctactcaaagcgcggatggaagattgtcgcctgcgcggcggcgatccttttgatgaggtccagctaccggacgccgtcatcaccctcaaacagggcgtggggcgtctgattcgcgacatcgacgatcgcggggtcctggttatctgcgacaaccgtttggttatgcgcccctatggtgccgtcttcctcgcgagccttccgcctgcgccgcgcacgcgcgatatccgtcgggcggtgcgttttcttgcggtgccgtcggcgaggtaa

SEQ ID NO: 259060 - DNA, 1341 bp, Klebsiella pneumoniae
gtgatcgacgattttgcagcagatggccagctggccagcgcgattgccggatttaagccgcgcgagccgcagcgccagatggctttcgccgtcgccagtgcaattgaagaaactcgcccgctggtggtggaggcgggcaccgggaccgggaaaacctacgcctacctggcgcctgcgctacgcgccaacaagaaagtcattatttccaccggctcgaaagcgttacaggatcagctctacagtcgggatttacccactgtcgctaaagcgctgaacttcaccggtaaactggccctgctgaaagggcgttcgaactacctgtgcctggagcgtctggaacagcaggcgctcgccggtggcgacctgccggtgcaaaccctcagcgatgtcattctgctgcgctcgtggtctaaccagaccgtcgatggcgatatcagcacctgcgttagcgtggccgaagattcccaggcctggccgctggtcaccagtaccaacgataactgcctcggcagcgactgccccttatataaagactgttttgtggtgaaagcgcggaaaaaggcgatggatgctgacgtggtcgtcgtcaatcatcatctgttcctcgccgatatggtggtcaaagagagcggctttgccgaactgattccggaagcggaagtgatgatcttcgatgaagcgcatcagctgccggatattgccagccagtacttcggccagtcgctctccagccgccagctgatggacctggcgaaagatattactattgcttatcgcaccgaacttaaagacacccagcagctgcagaagtgcgccgaccgcctggcccagagcacgcaggattttcgtctgcagctgggggagcccggctatcgcggcaacctgcgcgagctgctggcggataacaatattcagcgctcgctgctgctgcttgatgatgcgctcgaactctgttacgacgtggcaaagctgtcgctgggccgctcggcgctgctcgatgccgcttttgagcgggccaccgtataccgaggccgcctgaagcggttaaaagagaccaatcagcccggctttagctactggtatgagtgtacttcccgcaacttcaccctggcgctgaccccgctgacggtggcggataagtttaaagaggtgatggcgcaaaagtccgggagctggatcttcacctcggcgacgctatcggtcaatgacgatttgcaccactttaccgatcgtctgggcataggcgacgcgcaaacgctgctgctcgccgcgcaatttgccgttaccgaaccagcccggcgccgcgcgacatctggcggcgatgctcaaaccgctgattga

SEQ ID NO: 259061 - DNA, 501 bp, Klebsiella pneumoniae
atggcggacagcgccctcgaacttgacgatttcctttcgcgttttcagcttctgcgcccgcagcccacgcgcagcgcgcttaaccagcgtcaggctgcggtactggtcccgattgtacgtcgcccgcagcctgggctgctgctaacccagcgttcgccgctgatgcgcaagcacgcgggtcaggtcgcttttcccggcggcgcggtagataacagcgatgcgacgctgatcgccgctagcgtcaccggctttcaggtcaccccggtggtagggattattccacctgacctgcactatcatgccagccaggatgaagtcgctgcggtcttcgaaatgccgctggccgaagcgctgcggctgggacgctatcacccgctggatatccatcgccgcggcaattcgcatcgcgtctggctatcctggtaccagcattattttgtctggggaatgaccgccggtattattcgcgagctggcgctgcagataggcgctcgtccttag

SEQ ID NO: 259062 - DNA, 567 bp, Klebsiella pneumoniae
atgaatgtatccgctacaattcttcttgccttcggcatgtccatggacgccttcgcggcctctattggtaaaggcgcgactctccataaacctaaattttccgaagccctgcgcaccggtctcatctttggcgctatcgaaacgctcactccgctgttcgggtggggaatggggatgctcgccagccagttcgtgctcgagtggaaccactggatagcctttgtattgctggtatttctgggcggccgaatggttctcgaaggagttcgcggcggcgatggcgaggagtgtgaagctccgcgccgtcacggtttctggctgctggtcaccaccgctttcgccaccagccttgacgctatggccgtcggcgttggcctggcgtttttgcaggtcaacattatcgccaccgcgctggctatcggctgcgcgacgctgataatgtcaacgctgggcattatggtaggacgttttatcggcccgctgctcggcaaacgggcggaaatcctcggcggtatcgtgctgatcggcatcggcgcccaaatactctggagccattttgccggctaa

SEQ ID NO: 259063 - DNA, 489 bp, Klebsiella pneumoniae
  misc_feature (392)..(401): n is a, c, g, or t
atgcgtttatcactcccgcgcctgaaaatgccacggctaagactgccgcgtctgccgggaatgtttattttcgcatggctgttcgccgcgctgaaaggctgggtgatgggctcgcggcaaaaagataccgatagcctggtgatgtatgaccggatgctgctgtggctgacttttggcctggccgcaatcggcttcatcatggtgacctcggcgtcgatgccggtaggccagcgtctggcgaacgatccgtttctgtttgccaagcgcgatggcttatacattctgctggcgctagggctggcgatggtgacgctgcgcctgccaatggagttctggcagcgccacagtaccgcaatgctgattgcttctatcgtcatgctgctgattgttcnnnnnnnnnnggattgcgctggggccgctgcgtatccagcctgcggagttcaccaagctgtcgctgttctgctatatcgccaactaccttgtgcgtaa

SEQ ID NO: 259064 - DNA, 636 bp, Klebsiella pneumoniae
  misc_feature (527)..(536): n is a, c, g, or t
atggtgatggcgggcggtaccggaggacacgtgttcccggggctggcggttgcgcaccatttaatggaccagggctggcaggttcgctggctgggtaccgcggatcgtatggaagcggatttagtgccgaagaacggcattgaaattgacttcattcagatttccggcctgcgcggcaaaggcctgaaggcgcagctgctggcaccggttcggatattcaacgcctggcgccaggcgcgggcgattatgcagcgttttcaaccggacgtggtgctgggaatgggcggctatgtgtccggccccggcggactggcggcatggtcgctggggatcccggtggtcctgcatgaacagaacggaattgccggtctgacgaataagtggctggcgaaaattgccaaaaaagtgatgcaggcattccccggcgctttcccgcatgccgatgtcgtgggcaacccggttcgcaccgatgtgctggcgctcccgctgccggaacagcgcttagtcgggcgtcaggggccaattcnnnnnnnnnntcgtcggcggttcgcagggcgctcgcgtgctcaatcagacgatgccgcaggtggcggcgaagctgggctctactgtcaccatctggcaccagagcggtaa

SEQ ID NO: 259065 - DNA, 1407 bp, Klebsiella pneumoniae
atgaatggcaataagctttcagttaaagagaaaataggctacggaatgggcgatgccggatgtaatattatcttcggcgccatcatgttgtttgttaactatttttatacggatatttttggtctcgcaccggcgctggtcggggtgcttctgctttccgtacgcgttattgatgccgtgaccgacccgattatgggggcaatggcagaccgtacccgcagcaaatatggccgttttcgcccttggctcctgtggatcgctttcccgtacgcgctgttcagcgtcctgatgtttaccaccccggaatggacgtacaatagcaaggttatctatgctttcgtcacctacttcctgctctctctgacctacaccgcgatcaacatcccctactgctcattgggtagcgtgattacgaacgacccgcaggaacgcgtggcctgtcagtcatatcgtttcgtattggtcggcatcgctaccctgttgctctccctgacgctgctgccgatggcggactggttcggcggcgaggataaagccaaaggctaccagatggcgatgaccgtgctggcgattatcggtatgtgcatgttcctgttctgcttcgccaccgtccgtgaacgcgtaaaacccgcagtccagaccaacgacgagctgaaaaaagatctaaaagacgtctggaaaaacgaccagtgggttcgcatcctgctgttaacgctgtgcaacgtctgtccgggctttatccgtatggctgcgaccatgtactacgtcacctgggttatgcagcaaagcacccacttcgccacgctgtttatcagcctcggggttgtcggaatgatgatcggcagtatgctggctaaagtcctgaccgaccgctggtgcaaactgcaggtgtttttctggaccaatatcgtcctggcgattttctcctgcgcgttctatttcttcgacccgcacgccaccatgatgattatggtgctctacttcctgctgaacattctgcaccagatcccgtcgccgctgcactggtcgctgatggccgacgttgatgactacggcgaatggaagaccggtaagcgcatcaccggcatcagcttctccggcaatctgttcttcctgaaagtcggcctggccatcgccggcgcgatggttggcttcctgctatcctggtacggttacgatgccggcgcgaagcagcaaagcgcttccgcgattaacggtatcgtattgctgttcagcgttatccccggcgtcggctatctgattaccgccggcgtggtgcgtatgctgaaggtaaaccgcgaatttatgcggcaaattcagtccgacctcgaaaaacgtcggattaactacagcgagctcaacgactatcaggaactgaaaaccggcgaacatgtaaggaaagcataa

SEQ ID NO: 259066 - DNA, 1998 bp, Klebsiella pneumoniae
ttgcgcttcaccgtacatacgttccagaccatcctgcatgatgaccgcaacttcgtacgcgtaagacggatcgtaagagatacagttcgggatagtcagagactgaatgtggctgtggccatcttcgtgctgcagaccttcgccgttcagcgtggtacgaccggaagtcccgccgatcaggaagccgcgagcctgctggtcgccagcctgccagcacagatcgccgatacgctggaacccgaacatggagtagtagatgtagaacgggatcatcggcaggttgttggtgctgtaagaagtcgcagcagccagccaggaggcgccggcacccagttcgttgataccttcctgcagaatctggcctttttcgtcttctttgtagtaagcaacctgctcacggtcctgcggagtgtactgctggccgttcgggctgtagataccaatctgacggaacagaccttccataccaaaggtacgcgcttcatcggcgatgatcggcacgaggcggtctttgatggatttgttcttcagcatcacgttcagggcacgtacgaacgcgatagtggtcgagatctctttgttctgctcttccagcagcggacggaaatcttccagggtcggcagctccagcttctcagtgaagtgggtctgacggctcggcagatagccgtgcagtttctgacgctgggcgtgcagataagtgtgctcttcggaaccttccgggaaggttacgtacggcagtttttcgatatcagcatcggcaaccggcacattgaaacgatcgcggacgtagcgtacgccgtccatgttcattttcttaacctggtgagcgatgtttttaccttcggcggtgtcacccatgccgtaacctttgatggtatgggcaaggattacggtagctttgcctttggtttcctgcgcttttttcagtgcagcatagactttcttcggatcgtgaccgccgcggttcagggcccagatctgctcgtcagtccagtcggcaaccagcgctgcggtctccggatatttaccgaagaagtgctcacgcacgtaggcgccgtctttggatttgaaggtctggtaatcgccgtcaacggtttcttccatcagctggatcagtttaccgctggtatctttacgcagcagctcatcccagcgaccgccccagataaccttgataacgttccagcccgcaccgccaaagatgccttccagttcgttaatgatcttgccattaccggtaaccggaccgtcaaggcgctgcaggttacagttgattacgaagaccaggttgtccagcttctcacgggttgcgatggtgatcgcgcctttagattccggctcgtccatctcaccgtcgccgaggaaagcgtaaacggtctgtttagaggtgtctttcaggccgcggtgttccagatatttcaggaatttagcctgataaatcgcaccgattgggcccagacccatagagacggtcgggaactgccagaattcaggcatcagtttcgggtgcggataagaggacagacctttaccgtgaacttcctgacggaagttgttcatctgttcttcagtcagacgaccttccaggaaagcacgcgcatagacgcccggagagatgtggccctggaagtaaaccaggtcgccgccgtcctgctcgttgcgtgcgcggaagaagtggttaaagcacacttcgtagaaggttgcggaagactggaaagaagccatgtggccgcccagttcgagatcttttttcgatgcgcgcagaacggtcatgatggcgttccagcggatcgcagaacggatacgacgttccagatccagattacccgggtattccggctcatcttcaacggcaatagtgttcacgtaaccgccggtcgatgcgccagcagccactttcaccccgcctttgcgggcttcagaaaggagttggtcaataagatactgagcgcgctcaacaccttcttcacggatgaccgattcgatcgcctgtag

SEQ ID NO: 259067 - DNA, 741 bp, Klebsiella pneumoniae
atgagcgcaaaactgtttcgcgccgccgtggtgttctgcggcctgctcctgatttggtggctggtgacccgcagcggcattcccgcctttctgctgccttcaccttcggcggtggcaagcgccctgtgggtcaaccgcgcctacctcggtgggcacacgctgatcacattaagcgagatcctcagcggtctcgcgctcggcgttctgctcggcgtgatactggcgctgtgcatgattgtttcgccgcgccttcagcgttggctgatgccgttggtgctgaccagccaggcgatcccggtctttgcccttgccccgctgctggtgctgtggttcggcttcgggatgagcgccaaggttatgatggcggtgctggtgatcttctttcccgtcacctcggcgttttttgacggcctgcgccgggttaaccaggactatcttgacctcgtgcgtaccatgggcgcctcttttggcgcgcagctgcgccacatccgcatgatggctgcccttccggctctcggttccggtctgcggatggccgccgccgtcgcgcccatcggggcgattattggcgaatgggtcggttcagccgaaggactgggctacgtcatgcttaacgccaatgcccgtctgcaaaccgatatctgctttgcagccctgtttattctggtgctactgaccgtcctgctgtggctggcggtggatgcttttttacaccggctgattaactggacgccggaatga

SEQ ID NO: 259068 - DNA, 681 bp, Klebsiella pneumoniae
gtgcatttttttgccgatgaaggtctgccgctggtccgcgtcggcacgctgattaattcgccgctgaacacggtgatcgcgctggataaaagcatcaaatctcccgccgatctgcagggcaaaaaagtggggtattcggtaagcggaatcgaacaggcgacgctggccactatggcacagcacgcgaaaatcgctcccaaaagcatcaagctcatcaatgtaaactttcagctgaccagcgccctgctggccggacaggtcgatgcggtgattggcggctatcgtaatatcgaagcgctggaactgcagcttcaggggaaagatccgcaggtgatgaacgtcgaggattacggcgtcccggcctacgatgagctggtgattgtcgccaaccgggatgacgtcaacgcgccgaaaatcaggacgttcctgaaagcgctgcaaaaaggcgttgcttaccttcgcgctcatccgcaggaaacctggcaggcgtttgccgacgcgcatcctgaactgaacacggagctgaacaagcaggcctggctgaaaactcttcctctgtttgccagcgatccggcagcgctggataaacctcgttatgaagcttatgaacagtttttatataacaacaagttggtgaaaaaagtcacacctttaacgaattatgcggttgaactgcactaa

SEQ ID NO: 259069 - DNA, 375 bp, Klebsiella pneumoniae
gtgttcgaaggcgaagaatttaccggtacgcgcaaagccagcctgaacttcatcgacgatcagcagaatgccgtgttcctgagtcactttacggatgcgctgcagccactcgaccggagccgggttcacgccgccttcaccctgaacggcttcaaggatcaccgccgccggtttggtgacggacagcgcgccgtgggtcatcccgtggtagccgccggagaagctgatcacggaagtacggccggtgtattttttcgccagcttcagcgccgcttctacggcgtcagcgccggagggaccggtgaactgcaggcagtattctttaccttcgcccggcagcagggaaagcaggtattcagagaagcgatcttttaa

SEQ ID NO: 259070 - DNA, 633 bp, Klebsiella pneumoniae
  misc_feature (21)..(30): n is a, c, g, or t
gtgcggctacggactgaccgnnnnnnnnnncgctgctggtgcggctccggactgaccgagtttgcctccacggtatgcgccaaggaagcggatggcctggcggatgtcgggctgccgctgccggggcgcgaattgcgcatcgtggatggcgaagtgtggcttcgatcggacagcatggccgcaggctactggcgaggcggccaaacgataccgctcaccaacgccgatggctggttcgccacccgcgatcggggccggcttgacaacggcaggctgaccatcctcgggagaatggataatcttttttttagcggcggagaaggcattcagccggaggaagtcgagcgggttatcggcacacacccgttgattgagcaagtttttatcgtgccgcaggatgatgcggagtttggccagcggccggtggcggtagtagagtgtcgcgagcatggcgacccatccgtgctggctgactggtgcgccgataagctggcgcgctttcagcagcctgtgcgctggttacggctgcctgaatcgctgaaaaccggcggaattaaaatttcccgccgggcgttacgtgactgggtcaaccagcagcagagctccgcctcagatgcgctggacgtgcaatag

SEQ ID NO: 259071 - DNA, 315 bp, Klebsiella pneumoniae
atgctcgccgcgtaccttcatgctgaccagcgcggcggccagctgctcaggcttcacttcgccgcgcaccactgcggaaaacagctggtggctctcctgctggctcagggtttctgcctgatacagtttttccagaatcggctggagggtattcgtctgttccagcttctgcagcgcccaggccagagtctgttccagcagacgcgccccctgggtggtcagaatcgattcaggatggaactggaagccgcagacgcgatccgcgccgtgacgcaccgccatgaccatgccgttaaagtgggcgttgatcgttag

SEQ ID NO: 259072 - DNA, 870 bp, Klebsiella pneumoniae
  misc_feature (672)..(681): n is a, c, g, or t
ttgagcaacaccaactacgcagtgatttacgacctgcacagccataccattgcctctgacgggcgactgactccagaagaacttgtccatcgcgcgcatcagatgcgcgtcggcaccctggcgataaccgatcacgataccgtggcggcgatccccgcggcccgggcggagattgaacgcgccggtttaccgttgacgctgatatccggagtggaaatctccacgctgtgggaaaaccatgaaatccatattgtcgggctgaatattgatatcgcccatccggcaatgaccgcgctgcttgatgagcagaaagcgcgccgccagatgcggggacagcagattgcagagcggctggaaaaagcgcggatccctggcgcctgggaaggggcgctgaagctggctgacggcggcgcggtaacccgcggccacttcgcccgctttctggtggaggccggctatgccaacaatatggctgacgtttttaagaagtatctggcgcgcgggaaaaccggttacgttccgcctcagtggtgtacaataaaacaagcgattgatgtcattcatcattccggcggtaaagcggtcattgcccatcccggacgctacgacctctctgccaagtggctgaaacgactgttggcccactttagcgagcagggaggcaatccgatnnnnnnnnnntggcccactttagcgagcagggaggcgatgcgatggaagtcgcccagtgtcagcaggcgccgcacgagcgggctcagcttgccgcttacgccgtgcagtatggccttcatgcctcgcaggggtctgattttcatcagccctgtccgtggatcgagctgggccgcaaactttggctacccgctggcgtag

SEQ ID NO: 259073 - DNA, 1617 bp, Klebsiella pneumoniae
atgaaggcttcagagcacccgcctcgcgttcgccaacgcgccttaccgttaaagctgagcaccgccgtgtccttgatgatcggcagcgtcatcggcgccgtgctgctgctggtgtatgccttgtggtatatgcagatcagcaacgccacccgcgacggtctgaaagagaccgcgctggcggtggcgcgcaccatggccgatatgccgcaggtgaagcgcggactggaggcgcccccgcagcagcagatcattcagccgctggcgcaggccattacccgccgcaacgacctgttgtacgctatcgtcaccgatatgcagggtattcgctattcgcatccggacagctcaatcatcggcaaaccgttcatcggccacgatattcagccgacgctgcaggggaaagagaatgtcgccatcaaccacggggtgctggccccggcgctacgggtgtttacgccggtgttcaacgaacggcatcagcaaatcggcgtggtggtggtcggcatttcactgagtaaagtggacgaacagatcgccaacagccgttgggacgtgctgctgaccatcctgttcagcgcgctggtctgcgcgctgggcacctggagcctggttcgcggcctgaagcgcgtgctgctggggctggagccgcacgaaatatccacccagtttcagcagcgtcaggccatgcttcacgccctcaaggagggggtggtagcggtcgatgcccatggcgaggtaaatctcatcaaccccgcggcggaagagatcctcttttccggcccggataagactctcgttcacagccccctgctcgacgatctgcagaccgtgctgcagagcggcgagccaatgttcgaccgcgaactggggtgcaatggtctgctgctgatcggcaatacagtgcccatccgcagccagggtgcggtggtcggcgccatctgtaccttccgcgataaaacggaggtcagccaattgctgcagcgactggacggcatgatgagctatgtggatgccctgcgcaccacctcccatgagtttatgaataaactgcacgtgatcctcggtctgctgaatatgaaaagctacggcaaactcgaggaatacgtgctgcagaccgcccaccgctaccaggcggacatcggcgacattcaacatcgcattaaatccccggtggtggccggcttcctgataagtaaaattcagcgcgccacagagtgcggctttaccctgacgctggcggaggagagcctggtgccggattgtccgaacgagaaacaggtcacggtgctggtgacggtgctgggcaaccttattgagaacgcgctggacgccatgagcggtcaggcggagggtgagatcggcctgctgctgcactaccaggacggctggctaagcggtgaagtgagcgacgatgggccggggatcccggagaacaacatcgacgctatctttaacaaaggcttctccaccaaaggcgagaatcgcggcgtcgggctgtttcttgccaaccagcagttgcgcgagctcggcggcaccctcgccgtcgaatcggaacccggcgtatttacccaattttttgttcatctcccctgggatagtaaaaggaaacctgcgtga

SEQ ID NO: 259074 - DNA, 357 bp, Klebsiella pneumoniae
atggaactggcttctctggtccgggatatcctccggcagcggcacgttgaacgtctggcgcagcatcgtgaacaggataatgaagcggaagcagagtgggagatcgcccgctggcggcatcgcagcggggtggtgatccagcgccgctatgagctcgagatcgcgcagcaggatagcgcatcctgcccggagtgctggattgactggcaggttatcgacgccgccggccaggaggtcaacccgatgcgcaaacagttttataacctttgccagcaatccttctggctggctatgcaggcgggtggtgaagatgagacctcagacagaattgctcagataaccgacaatcacccgtaa

SEQ ID NO: 259075 - DNA, 921 bp, Klebsiella pneumoniae
atgagcagttcgctaaccgcgtcaatgcaggctcgtcgtcacccggagaccacccacatcgatcgcctcgccaccgccgatatgctggcgatgctgcatcaggatgataagcagatatcggaggcggtcggcgcctgtctgccggatatcgcccggctgattgatatcgccaccgcgacgataagccggggagggcgcctggtcattattggcgccggcgcttcgggccggacggccattgaggcggtcagcgactattcgccggaaggtaaacacgcgctggtggggctgattgccggtgggcagacgacggcgatggccgagcgggagactgcagcgaataattatgacctgggcgcctttgagctgcagtcgctggacttcagcaaccgcgatatgctgctggcgctgaccgtcagcggcaagacgccatgggtgtggggggcgatgcgccacgcctggtcgctgggcgccccgatagcggtcatcacccagcagccgaccagcgaggcggcgcagctggcggatatcattattgctccgcagaccgggccggaggcggtggcggggttagccaatccgaaggctcagttggcccagaggcagatcgtcaatatgctgacgaccggactcgccatccgtgacggtcgggtgtacagcaatttgcgggtggacgtgcaggctgacaattcgcactgggcggagcggcagatagcgattgtgatggcggccaccgattgcacgcgcagtgaagcaaaggccgccctggccagctgtcatcagcactgccgcaccgcgatcctgatgctgctcagcgggcttgacgcctggcacgcgcgggagctgctaaccaaacatcacgatcatctgcgtctcgccctgcgtgaagcccagcgtagcgctgtcactcccgcccagtaa

SEQ ID NO: 259076 - DNA, 1647 bp, Klebsiella pneumoniae
atgaaaaaaacgattatttccttaaccgcattagcgatgttggtcagcgcggcgacgcatgctgaagcggatacctcgaaaaaaaccgacttcctgctgattggcggcgggatcatgagcgcctcgctcggcacctggctgcaggcgctgcagccggactgggatctgaccatggtggagaaactggacggcgtggcgctggagtcttccaacggctggaataatgccggtactggccactcggcgaatatggagctgaactatacgccggagcgggcggacgggtcgattgacgtcagcaaagcgctcgatattaacgagcaatttatgatttcccgtcagttctggtcggcacaggtgaaacgcggtattttgcacgatccgcactcgtttattaattccacgccgcatatgagcttcgtctggggtgataatgtggattatctgcagaagcgttataacgcgctgcagcagaccaccttattccaggggatgaaattctccaccgatcacgcgcaaattaaacagtgggcgccgctggtgatggaaggccgcgatccgcagcagaaagtggcagccacctggacgccggtgggtaccgatgtcaactacggcgaaatcactcgccagctgatcggcagcctgaagaaaaataaccacttcaccctgcagacctcctctgaggtaacggatttcaaacgtaatgccgacaactcctggcacgtaacgattaagaatgtgcagagcggggaagcgcagactattgacgccaaatacgtctttatcggcgccggcggcggcgcgttgaagctgctgcaaaaaaccggtattccggaagcggacaactatgccggcttcccggtgggcggctcgttcctgatgaccgagaacccggcggtcactgcgcagcacctggagaaagtgtatggccaggcttcagtcggcgcgccgccgatgtcggtgccgcaccttgatgcacgttacctcgacggtaagcgcgtggtgctgtttgggccattcgccaccttctcgaccaagttcctgaaaaatggttcgttcttcgacctgctcagcactaccaccaccaataacgtgctgccgatgacccacgtcggtctcgacaacttcgatctggtgaaatacctggttagccaggtgatgctcagcgatgatgaccgtttcgctgcgctgaaagagtactacccggacgcgcgtaaagaagactggaaactgatccaggccggccagcgcgtccagatcatcaagaaagacgcagagaagggcggcgtgctgaagctcggtaccgaagtggtggtcgatcagcagaaaaccatttccgcgctgctcggcgcttcgccgggggcttccaccgccgcgccgatcaccctgaacgtgctcaagcagatgttcccgcagcagtttaactcgccggagtggcagagccgcattcacgctattgtgccgagctacggccagaagctgaacggtaacgtggcgctgacccagcaggtttgggatgacaccgctgcgaccctgcagctgacgaaaccgccggtgatccagatgccagcggctgcgcctaccgcgaccgccaagccggcagagacgccgcgcgaggcctcgccgcagcacgatatggcgctgtaa

SEQ ID NO: 259077 - DNA, 927 bp, Klebsiella pneumoniae
atgcaagaggatattaaccaggagatcaccttccgcaagctgtcggtctttatgatgtttatggcgaaaggtaatatcgccagaaccgccgaagcgatgaaactcagcagcgtcagcgttcaccgcgcgctgcataccctggaagagggggtgggctgcccgctgtttgtccataaagggcgcaacctgctgccgctgcaggcggcgtggacgctgcttgaatactgccaggatgtgataagtctgatgaaccgcggcctcgaggcgacgcgcaaggttgcaggcgtcggtcaggggcggttgcgcatcggtaccctctattctctgaccctggaaaccgttccgcgcatcattatggggatgaagctgcgtcgcccggagctggagctggacctgacgatgggttcaaatcagatgctgctggatatgctggaagacgatgccctcgatgccatcctgatcgccaccaacgaaggggagttcaataataccgctttcgacgtggtgccgctgtttgaggacgatatttttctcgccgccccggcgaccgaacggctggatgcctcacggctcgccgatctgcgcgattacgccgaccgcaagtttgtttcgctggcggaggggttcgccacctatgccggattccgggaagcattccacatcgccggcttcgagccggagatcgtcacccgggtgaatgatattttctcgatgattagcctggtgcaggctggcgtcggttttgccctgctgccggggcggatgaagaaagtgtatgagaaggatgtacagctgctaaagctggcggaaccctaccagatgcgccagctgatctctatcgtctattcgcaccaccgcgagcgcgatgccgacctgctggcgctggcggcggaagggcgcatgtacgcccgcagtcttaatcgctaa

SEQ ID NO: 259078 - DNA, 903 bp, Klebsiella pneumoniae
atgaagattttatttacctttcccggccagggcggccagcgccccggcatgctggcggcgctccccgatcgcgaagcgatcctcacccaggcgcgcgccgtgctggggaatgaagtcgctactctcgatagcgccgatgcgctacaacacacccgtgcggtccagctctgtctgctgatcgccggtgtcgcctgggcgcgcgagctacagcgtcagggcgtggatccgcagatggtcagcggcctgtccatcggcgcgtttccggccgcggtgattgccggtgcgctcgatttcgccagcgcgttgcggctggtggccctgcgcggggacttaatggaacaggcgtatcctgaaggttacggactgacggcgattatgggcctgacccgcccgcgggttgaggcgctgatgcagggccacgaggtttatctcgccaacctgaacgccgaaacgcagttcgtgattgcgggccgtgatgaggcaatggccgaggtggcgcagctggcgctgcgggctggcgccagtaaagtccagcggctggcggtcagcgtgccctcgcactgcgcgctgttggataaacctgccgcagccctggcaaaagcctttgccgacgtcaccttaacgcgccctcagcgcgcctatttaagcggctcgacggcgcgcgtgctgtgggatccgcagcggatcgccgacgatctggcgatgaacatggcgcgcccggtccactggcaggaggcgatggtcgccgccgatgagcgcgatgcgcgcttagccattgagatgccccccggcggggtactcacctgcctgacccgccaggcgggctggcgcggggagaccattgcgctggagcgcagcggcatggacgtcgcccgccatctggcgcagcggcttagcgattaa

SEQ ID NO: 259079 - DNA, 618 bp, Klebsiella pneumoniae
atgtcagcaacgccgcgtccccatgatctagtttggttaaaccacgccagcgccctggaagatattgccgagccgtgggtggctcagcagtggcgagccgcgctgccggtagtggtgaggcgcgacgttgacgaccaggcccgcgtcccggttggggtgcggggcatgaagcgcgagcagcgcgccgccggctgggtacaggcgcgcaatatcgtgcgcagcgtcaccccggagatgcttgttgatcgtgaggtcttactccattcgccttttgtctctcagccgccggtccagggggctatcgccctcaccttacaccgctggccctggggctggggcgtcaccggcagtaccggctacgcgctggcaaccgagatcccggtgctgcatgcggccagcgatctggatctgctgatccgcgcgccacagccgctggaccgcgaggcgctgctggaatggcagacccgggtggcccaactcccatgccgcgctgatacccaggtcgaaacgccgtacggcgccttcgcccttaatgaatggctgcgcgacgggcgcgcgctgctgaaaacgtcccgcggcgcgcgcttaaccgcgacgccgtggcacagggaggaataa

SEQ ID NO: 259080 - DNA, 960 bp, Klebsiella pneumoniae
atgacttatgtgattattcatgctcttgccccgattttcgttatcatgctgctgggcttctgggccggtaaggccgggatggtagataacaaaaacgtctcgctgcttaatatttttgtaatggattttgccttacccgccacgctgtttagcgccacggtacaaacgccgtgggccgggatcgtcgcccagtcgccgctggtgctggtgttgaccggcgcgatgtggatcacctatgccgcgatctacttcctcgccaccagcgtgttcaaacgcacgccgcaggatgccgcggtgctgaccctcaccgtcgccctgccaaactatgcagcgttaggtctgccgatcctcggcagcgtgctgggtgaaggcgcgtcaacctcactgtcggtagcggtctctatcgcctgcggctcggtactgatgaccccgttttgcctgctgattctggagcgtgaaaaagcccgcgccgcgggagaaaacagcggttctacgctggcgatgctgccggtgctgatgtggcgttcggtgaaaaaaccgatcgtctggggcccgctgcttggggtggtgctttccgcgatcggcattaaaatgccggacctgctgctggcgtcgatcaaaccgctgggccttgccgccaccgccgccgcgctgttcctcaccggggtgatcctgtcggcgcgtaaactgcagctcaatgcgctgatcgctacatcaaccatcgtgaaactgctggtgcagccgtttattgcctggggtctggtgatgttacttgggctgcacggttccattgccattaccgcgatcctgatgattgccctggccgccggcttctttggcgtggtcttcggcaaccgcttcggcgtccagtctccggatgctgaagccgtgctgctgttgagctcggttctgtgtatcctgtcgctaccgctgtttatctctttgacttcaggactgtaa

SEQ ID NO: 259081 - DNA, 801 bp, Klebsiella pneumoniae
atgagtcagttcccaaaccgcgccgcgctgtggctgaacaaactggtgcccgacgcgccgctgatgagcggcctgtgcccttccgtccaggtggcagacggccagattaatggcgaaaacgtgcgttttatcgccgtggtcccggatgctaacaaccactacccgcgcgccgccggcggcgaagttggcctgctggaaggctggacgctggcgaaagtggttaatgaaaccattgccgccgacgccgaccagccagtcaaacggccgatcgtcgccgtgatcgatgtgccaagccaggcctatggccgccgcgaagaagctttcggcattcaccaggcgctggccggggcggctggcgcttatgccaaagcccgtttggccggccacccggtaattggcctgatcgtcggcaaagcgatgtccggggcgtttctggcccacggctaccaggccaaccgcctgatcgcctttaacgatagcggcgtgctggtccacgcgatgggtaaagcgtcggcggcgcgcattacgctgcgtaccgtagaggcgctggagaaactggcggctaccattccgccaatggcctacgacgtcagcaactatgcgacgctcggcctgctctccgccctgctggatattaataatccggatgcccctgacgaccacgatctgtcgttggtcagcaacacgctgcgcgacgccatcgctgatgcgcgcaccgatgcctcactgaagtgccgcctgggcgcggaaaaccgccgcagctcgcagctggtccgcgatcgcatgcgcgccagctggtaa

SEQ ID NO: 259082 - DNA, 834 bp, Klebsiella pneumoniae
atgcgtaacgatcgcagctttatcgaactgcgcgctcgcgaacgtgcccacgccctgctggacgacggcagctaccgcgaactgctggatccgtttgacggtattatgtcgccgtggctcggcgcccagggcatcgtcccgcagtccgacgacggtatggtggtcgccaaaggcacgatcaacggccagcctgcggtggtgattgccatcgagggcaccttccagggaggcagtatgggcgaagtgtccggcgccaaaatggccgccgcgctggagctggcggcggaagataaccgcaacggtatcccgacgcaggcggtgctgtgcctcgaaaccggcggcgtacgtctgcaggaggccaacctcggtctggccgccatcgctgatattcacgcggcgattgtcgatctgcgccgctacacgccggtagtcggcatcatcgccggcaccgtcggctgctttggcggtatgtctatcgccgccgcgctgtgcagctatctcattgtcactcgtgaagcccgtctcggcctcaacggcccgcaggttatcgagcaggaagccggcattgaagagtacgactcccgcaaccggccgtttatctggagcatgaccggcggcgaaattcgcgccgccagcggactggtcgacgcgctggttaacgatggcgttaacgccgttaaaaccgcaatgaatgaggcgatcgccaaaggcgtaccggtacagcaccgcagcgacaactatgacgattatctgcgtcgcttgagccagttcgacacccgccagcaggcggataccgcgcagattaaacagctttttgcccgggaggataaataa

SEQ ID NO: 259083 - DNA, 300 bp, Klebsiella pneumoniae
atggaacagattacattgtcatttcctgccagccgcgccctgagcggccgagcgctggcaggagtcgtgggttcaggcgatatggaagtactttataccgccgcacagagcgccacgctcaacgtacagatcaccacctcagtggataacagccaggcgcgctggcaggcgctgttcgacaggttgaacctgatcaacggcctgcccgccgggcagttgattatccacgacttcggcgccacgccgggcgtcgcccgtattcgtattgaacaggtttttgaggaggccgctcatgcgtaa

SEQ ID NO: 259084 - DNA, 843 bp, Klebsiella pneumoniae
atgaaaaatctctcccccctgcacgcagaaagccgcgtcagctggctggcgcataccgccagcgcctgtctgattgacgaagcccgtctgagcccgaaaccgggtctggtggatagccgcggcaacggcgcgcatcaggacctgaatctggcgctgatggagcgctccgcccgcagcctgcagccgacctttcacgcgctggccgagcaaagctggcgtcgcccggcggacatcgccctgcgcgaaaccgtcggccgccttggccgcgaaggcgaagcgcagatgatgctggcgacggggggggttaacacccaccgcggcgctatctgggcgctaggcctgctggtcagcgcggtggcgatgttgggtggagagggtcagtcacaggcgatcgccgacgccgccgccgccctcgcccgcctgcccgacggcttcgcgccgaaaagctttagtaaagggcttcgcgccagccgccgctggcaggtgccaggcgcccgcgaggaagcgcagtgtggtttcccgcatatcacccgcctggcgctgccgcaactgcagcacagccgggcgcgaggcgccagtgagccgcaggcgcagcttgatgcgctgatggccatcatgacctcgctgagcgatacctgcgtgctgtcgcgcgccggtatggccgggctgcaggccatgcagcaaggcgcttgtgaggtgctggcggctggcggttgcgccagtttcgccgggcgcgccaccctggcccgcctggacgcaatcatgctggcgctaaacgcctcgccgggaggcgccgccgatctccttgccgccaccctgtttctcgacagagttgccggctaa

SEQ ID NO: 259085 - DNA, 363 bp, Klebsiella pneumoniae
atgttttattggattttattagctttagcaattattgctgaaattaccggcaccttgtctatgaaatgggcaagcgtgagcggcgggcacaccggctttattttaatgctggccatgattgccctgtcatatatttttcttgcctttgcggttaaaaagattgccctcggtgtggcctatgcgttgtgggaagggatcggtattttactgattaccctgttcagcgtgctgctgtttgatgagagtctgtccctgctgaaaatagccggcttgaccaccctggtgatagggatcgtcttaattaagtccggcacccagaaaaaagcgtcttcaaagcaggaggtggcccatgcagcagtttga

SEQ ID NO: 259086 - DNA, 813 bp, Klebsiella pneumoniae
atgcgtagagacgttctgttattactgtgttcattttatctgttacctctgggcgcacatgccgatgatagcggactgagcgccaaagatattaagacgttgtttttcggtcacgatgaccgcaaagcggtgaaccgccccgaggagagtccgtgggacgcgattggccagctggaaaccgccagcggcaatctgtgtacggcgacgctcatctctccgcatctggcgctgaccgcgggccactgtctgttaacgcccccgcgcggcaagccggacaaagcggtcgccctgcgctttatttcccgcaagggcaactgggtctatgagatccacggcattgacgggcgagtcgatcccagcttaggcagacgcctgaaagccgatggcgacggctggattgtcccttccgctgcggcgccgtccgattttggcctgatcgtgctgcgctatgctccgtctggcattacgccgatcccgctctttccgggcagcaaggccgatctcaccgccgcgctgaaagcggcggaccgtaaagttacccagtctggctatcctgaagatcatctcgataatctttacagccaccaggattgcatcgtgacagggtgggcgcaaaccagcgtactgtcgcatcagtgtgacaccctgcctggcgacagcggctcgccgctgctgctgaaaacggaggacggctggcaggtgatcgccgtgcagagttcggcccccggcccgcaggatcgctggcgggcggacaatcgtgccattgcggtgactggctttcgcgataagctggaggcgcttgccggtgagtaa

SEQ ID NO: 259087 - DNA, 372 bp, Klebsiella pneumoniae
gtgtttagtggttttgtggtgttttttcgctgcctgcgctttctgggctgccggtttagccgcagctttgtgatgctttttcgccgcctgagctttctgcggagcagctggtttagctgctacttttttgtgttttttagcggcctgggctttctgagcagcggctggtttagcttctgcttttttgtgttttttggcagcctgagctttctgctctgcggccggttttgccgcggctttgtggtgttttttgtgatgggtggtcttggcagccgtgctgtgggtggcagccggtgcctgagtggtgcttactgcgtcagcagcgaaagcggcggaagagagacccatagcagcggcaacgaccagagctaa

SEQ ID NO: 259088 - DNA, 804 bp, Klebsiella pneumoniae
  misc_feature (791)..(800): n is a, c, g, or t
atgccctggcctaagccttttactctccggaaacgggtattcgcgctcatgaaatcaatgcacattgccgccagccgcgagctggtatcccacctgtccacccaccgtcgcgtggtggccctggacagtactgattttaccgatgtggcggcagtcgtcattaccgtggcggacagccgcagcggcatccttgcgttgctgaaacgcacgggctttaacctgccggtctatctgttcagcgaagctgagcacgaaaaaccagaaggcgtgacggccatcgttagcggcaaagagcaggagtggctcgaactggaagccgccgcctgcgactatgaagagaacctgctgccgccgttcttcgatacgctgactcagtacgtagagatggataacagcaccttcgcgtgccccggccatcagcacggcgccttctttaagaagcatccagcggggaggcagttcttcgacttctttggtgagaacgtctttcgcgccgacatgtgcaacgccgacgttaagcttggcgatctgttgattcatgaaggatcggccaaacacgcgcagaagttcgcggcgaaggtcttcaacgccgataaaacctattttgtccttaacggtacctcggcggcgaacaaagtggtgactaacgcgctgctgacccgcggcgatctggtgctgtttgatcgcaataaccataaatcaaatcatcatggggcgctgattcaggcaggcgcgacgccggtctatcttgaagcatcgcgcaacccgttcggttttatcggcgggattgnnnnnnnnnnatga

SEQ ID NO: 259089 - DNA, 987 bp, Klebsiella pneumoniae
atgctgaccgataccaaagatacccgccagggtgtccatcttatcggcaatcgctaccgcgcaggccaccggattagacggcagcgcgtcgccagcaaatcgcggctgatactgctcgttcagcgccacggccacgtcttccgcttcgccgtcatggcgcgcgtagtgcatccccatcacgccctgggtgtcggtgaactcgaagaccatgttggtcatcaggtcgcacttggacagcaggcccgcgcgggttgcgtggttcacgtcagcgccaatctgttcggcaatccagcccgccagcgcctggatgcgatcggtcttgtcgcgcagggtgcccagctgctgctggaacagcacggtttccagacgcggcaggttatcttccagacgttttttacggtcggtattgaagaagaactcggcatcggccagacgcggacggaccaccttctcgttaccggagatgatctgctgcggatctttggactcgatgttggccacgaagataaagttcggcagcagtttgccggcgttgtcgtagaccgggaagtacttctggtcgcccttcatggtgtaaaccagcgcttcagacggcaccgcgaggaatttttcttcgaacttcgccgtcagcaccaccggccattccaccagcgaggtgacctcttccagcaggctttcgctcagatcggcttgaccgccaatcttacgcgccgcctcttgcgcatcagctttgattttggctttacgctgttcgtaatcggcgatgactttaccgcgctccagcaggatctgcgggtactggtcggcatggtcgatggtgaactccggctcgcccataaagcgatggccgcgaatcacgcgatcggacggaataccgaggatagtggccgggatcactttgtcacccagcagcaaagtcaccgtgtgtaccggacgcacgaagtggacgtcagacgcgccccagcgcatcagtttcgggatcggtag

SEQ ID NO: 259090 - DNA, 834 bp, Klebsiella pneumoniae
ttgaagctttttgattatctgaaaatggagtttccggacctgactcctgaaaccaccaaagttcaccttgcgcaaatgaatgactacaaagaggacccgctggttaaatttcgggaaggaacttttgacgactggcagtgttggcagaagcgactggaatttagccgcaggtatgtcgtttcactgctcagggtcccaggaacagaaacctggctgtttgcaggagcatttcagcaaactggttacgcgggaaagcaagcctatcctaaccgtgatgagttgtattatcagtactaccttcaaaaaatccttgagactgaagaatacgcggggcggatgtatatcagctttaaaaatccgactcgcaacttcatccgccatggtgaaaatattcagaacgaactggttgttagtgctatctcaccagcacgtctgacttttagcgagtttccaggttaccgcaacgtcgtactggacagaaacagcatcggcacaatcctcagacttaatctgcaatcctggcgcacagcactatccgtggttaaaggcatctatgtattaaccgatcgggatggaggaaaactttacgttggaaaagccgacggactcgaggggatttggggcagatgggaatattattttggttccggccatggcggtaatgtaggcctaaaagaagcgttcggaactggcgatgaaaaccggctgcagaatatctctttcgcaatccttgaggtcatggatcccaatgccgaagacagtgaaattgaccgccgcgaaactcactggaaacaaatactactgtcacgggagtttggtcataaccggaactaa

SEQ ID NO: 259091 - DNA, 804 bp, Klebsiella pneumoniae
atgaaaccaggagcctctttagaacaagatgtgcaacgtgtttattcattcttgcttaatatgcgtgatgagggagtggtcgttgctaatcgagtatttatgacaggaaagtctggagttcagcatgaagtggatgtttattatgaatttattcgtgcaggtatcagacatcgagtagccattgaatgcaaagactgggcgactccggtttcaaaagggcagattcaagaatttgagtcaaaattgcgtgatatcgggaatatcactggtgttgttgtttctagaaacggctatcaaagtggagcagatgcatttgccaggcattgggatatattaccccttctttttaatgacctcccgtcttttaatgtcctgttagccgaacgattgaaagcggtggctctgcctaacgaagattacgtcggtgaaccattttggatcattatggaggtccatgatggaaaggtaacaggatctcattatggaacaaaagatcctgcgtcaggtaaggggttaattcctctaactttttccaaattacatgcagagcgactttttcttgaacaaggtctcgatcctaacgaatgggctattcgcggtttacctcgttatgcattacgcgcatttctcatccatttagagttttatgaaaaatttatgaattctgaagctgttatttgcttcttaccacctggagctccaccgggtgaaaagtttattgccatcaaagcgtcaagagaagacctgattcgcgactactatggcgaaacaatcccatcgattgacaaaagtattaatatttag

SEQ ID NO: 259092 - DNA, 1134 bp, Klebsiella pneumoniae
atgacaccgtacattcaggcgctgatcgacacgaccggcaacaagctccagcagcgaatgcagaaggatccgtcctcaacctccgacagcctgctgtttatgggcaacgcacatgacacggttccgcgtcgcttattgcaggatccgctgttatcgcccagggataaattcgcctggcaggttattcggatgcaggcgcaggagaacggcggcgcggtgttcccctcctacagcgaactgcaggtgcagctctctaaccgtcccctaggcgaaaaagcctcgcgcagcaccgtcagccgggcattactgatgctgcgcctgacgcgctggctaagcctgtgccacaaagcgcgggaccgcgtttccgggcgtattctgggcaatatctacgctctgcacgatgaaccgctcaccgtcctggacgccgtgcgttttgatgccagctatctgcatttgctggagcagtgctcacggcacgagaacaaaaccatccgcgccaccgcgcaaggcattttgtatgacattcgccaggataccagcctgcgctacttatcatcacgtattgatctgctggaagaacatgcccgctggcaacaacgccagtcctctgaggagactaagcccaaaacgcccggtcccaatacggtaccaggtgaaattttacctggtaccgaatcgggactaagccggaaaccggggcctggcggcttagtctcaaatcaggaccaggcttatgtacgtactgtatctacagatatttgtaatagtactaccgcgcgcgcgaacgactcaccgcctaactggccgccagaaatcccactgacgcatcccgaaaaacagcttgtcctgcaggcgatgaagaacatgccgccagtattgcgccaggaagtgcttgatgacgcggcccggcgcgtcgctcgcggcggcgtgcaaaacccgcttgcctacctgttggcaacgctgcgcaaagcgcaggatggcgagtttaatcagtatcgacgggataaacctgctgtgccggagtttgtgccacctgcggttccggagccagaagaaccggctaagccacgcaaaaagcgggatatcagtaagttggttgcggagatccgggcgcagtgtctggggagtggctga

SEQ ID NO: 259093 - DNA, 540 bp, Klebsiella pneumoniae
atgctgccgacgattaaccaggccgttttgtcacaggtgatacaggctttgaaggacggcaatgtgcgctattgcgaagcgctgggctttgaccgcgaggagctgaatgaactgaacgccctgacttttgaagagctgatgcatttgggcaacacctcagcgcagtttctgaaaatcaccatcaaccatgacgtactgcgcaaaatgctggtccaggtacggcaggaacaaaaatttcagcagattgtcagccaggcggtacaactgggcggctccatcgccctgattagccactatttctgcatctcgaccgctgaaatcagcgcccgccgtcgattattggggatccacgttcgtcaggggcgcaaccaggttcccggcgaagaggaagaagccgcgctctggaaacgctggcaggaaattaaggtcgataacatcgactcgattccagcactggaagccatgatgctgctggctcaggaacgttcgctctcgctgacggtggtctggaacctgatccggcagtgggaaacgagctga

SEQ ID NO: 259094 - DNA, 1485 bp, Klebsiella pneumoniae
atgaacacgaaactgacatcgctggagcttcagtctcgcctgctacagggtaattttgatcgggaacgctcacctgacgagcgctttgccgaaccgctgacggaaaccgcaatggtcgtgacgctggagcagctccgcccttacgatctcaatccccgactgatgcgtaaccccaattatgacgatatcaaagcctcgatccgccagcgcgggctggacacgccgccgccgatcacccgtcgtcccgatcaggactactacatcatcgccaacggcggcaatacccgtctgtcgatcctcaatgagctgtggcgcgaaacgcatgacgagcggttctggcgcattcattgcctgttcaagccgtggggtggaacgtccgaacagccagtgctgggcgaactgcgttgcctgatcggccacctggcggagaacgatctgcacggcaaactcagctttatcgagcgagcgctggggatcaataaagcgcgggagctgtaccagcaggtggaaaagtgccagctttcacagcgggaactggcagagcacctgagaaacgacggctacccgatccaccagtcgcatatcagccggatggaacagacgctggagtatctgctgccctgcattcctgaagtgctgtacgccggaatgggccgtccgcaggtggaaaaactgctgtccctgcgggcagcggcgctgcaaatctggcaacgccatgccaccggggacaccggttcctttgagagtctcttttcctctgcgctgtcgctgttcaacgatcagcctgaagacttctttatcgaacgggtacaggatgaactgctggggcggatgagtcaggcgctgaatgttgattacaacctgctgttgctggacgtcgatccttcagagcagaagcgccagaccgtactcggccccacgccggagccgccgccttatatccctcccgatgaacctgaaccacgccctgttgcgcgcaggcgcaaagcggacgaaggcgaaatgcgtgggggaacggttattccaccgccggagtcaatgccagatgcctcgccgctgtgcgaaggcaatgaacccattacggatatctggcgtatttcaccgctctttgactcaaccgaagcattacagtcgataagcgatcggctggcatgggatctggcagagtgttgcggtatcgaagatcgggtgatcgcggataacgatgaagtcggcgttggctaccgattcaatacgcttgcttctgatcaccctatgtattcccggccacagtcccgcgcctgctgggcgctgctggcggcactcaatgatatcccactgacagaagatttgtccgccacactgacacccgccctgtttattcaacgcgatacgggcggtttcttcttcagcgatctgtttcttattaaagcattccggctgatccgtattgtccgccggatcagagaattacagcaggaggcacaacatgctgccgacgattaa

SEQ ID NO: 259095 - DNA, 672 bp, Klebsiella pneumoniae
atgctgcgccccacccagccagtgcaaatctacagcatggaaatgtcgtcggagcagttactgctgcggctggtttctctgcttgggcgtgtctcacaaacgcgactacgcagcggcgatctgagtgatgatgactggcaacagatcggcatcagcgccaacgttctgatgacagaatggaaagatcgcctactgatcgacgactccgggatcatcaccccttccattatgcgcagtcgcgccagacgatcgctgcgtcagtatgggcttccctcgctgatcgtcattgattacctgcaactgatgcgcagcggcggcgcggaaaatcgcaatcaggagatctcaacgatctcgcgctcgcttaaggcgctggcgaaagagctggattgcccggtactggcgctctcgcagctcaaccgggcgctggaatcgcgccttaataaacgcccctgcaatgccgatctgcgcgattccggctctatcgaacaggatgccgacgtgatcttattcctctaccgcgatgagctgtacgatcccaatacgctggatcgaggtattgctgaagtcatcgtcagtaaacagcgcaacggcccggtcggcacggtgcgcacgcgatttatcagcgatcagactcgctttgaatcgctcgccctgcgaggaggcacgtcatga

SEQ ID NO: 259096 - DNA, 528 bp, Klebsiella pneumoniae
atgactaagcgtaagcgcccacaaccgccccactccgtcgaggcggaacaatcggtgctcggcggcctgatgctggataacgatcgctgggatgacgtcgccacgcagacttccgcgcaggatttctttatctccgcgcatcgcactatctatagccatatgcaaaccctgatcgaacagggaaaccctatcgatctgatcaccctgagcgaatcgctggaacagcaggaacggctcgaacaggtgggcggcttcgcctatctggcagagctgtcaaaaaacacgccaagcgccgccaatatcattccctacgcgcaatacatcgccagctacggtgaactgcgccagcttctgcttctgggcaatgagctgagcgatatggcgggtcagccgcgcaacaatgttgccgacgtactgaactttgccgaacaaaagctgtttgccattgcgcagtcgcatcaggatggcggtttgaccgatatcaatacctgttttgacaacgtgctggcaggcatcgctcagcgctag

SEQ ID NO: 259097 - DNA, 375 bp, Klebsiella pneumoniae
atgaaacggaaaatctggcgggcattttgctcgtactacgcccaacaaccctatgaaaaagacgatgaagtactcgtgtactttgaagccgccgaccgtgaagaggcgcgggaaaccctgccggtgttaatgtcgctgctctggcatatcccaccggaaaaagtggactgctacaacctggaggatgaagacgagctacgtgataactccggctctctgaccgcgcccagagactggccgctgtttgaaatcggctggtccagcaacaagccgctctactccagcgatttaccgctattgctgctgccaccgcatcagcaaacccgactgtgggaagcctttctggcctgtcaggagggaaatcgcgatgactaa

SEQ ID NO: 259098 - DNA, 885 bp, Klebsiella pneumoniae
atgaaacacgcaaatccccctgttttatccacgctcgtcgctgcaattctttccaccaaaggcggcgtagcaaaaaccacggataccgccaatcttggcggctggcttgccgatcaggggctgaaagtcctgatgattgacgccgatatccgtcagccaaccctcagcagctactaccctctcgactacgaagctcccggcgggatctacgagcttatcgcgcataatgagctggatcccgtgatgatcatctcgcacaccgccattcccggcctggatatcattatctccaacgatccgcgcggcgagctgatgagcctgcttcaggccgcgccggacggcgtgatccgtctgcgccatctggtacgccagatccccggctacgacatcatcctgatcgataccatcggcgcacgcaccatcgcgttggaaatggtcctgctggcaagcgatctggtggtctctccggtgctgccggaaatgctctctgcacgcgagttcctgcgcggtacgctgcaaatgtatcaggatctccagccctttacccgctacggcatcccattaccgccgctaaaggccgtgattaataaactcgaccacaccaacgatgcccgcgagatccaccacaacctgctacaggtattgcagcataaacaacaggagcaggaactgctggttcctaccgatatcctgacgaccccggtttacgccagcgtggcctaccgccgggcggcgtcgctgggaatgccggtgcatcggctggatgccgccagaccgaaaggacgcacaaccccctgcgctgccgaaactatgcgctcgctggccgaggaactgttcccacagtttatttctctgccatccctgaatagggagggcatcgcatga

SEQ ID NO: 259099 - DNA, 2022 bp, Klebsiella pneumoniae
atggcgctgctgaatctgaaaaccggcgacaccatcgacgtgggcgacgccacgctgcgcattgccggagaggtaatacaggagccggatgccggttttaatcctttccagatggcgccgcggctgatgatgaacaccgccgatgtggcgaaaaccggcgcggtgcagcccgggagccgcgtctcctggcgctataagtatgccggaaccccgcagcagctggcggactacgaaaagtggctgctgccgaagctggggcctgagcaccgctggattggcatggagcaggacgacagcgcgctgggtaaatcgctgcaacgttcgcagcagttcttgctgctgtcggcgctgttaacgctgctgttagcggtcgccgcggtggcggtggcgatgagccattactgccgcagtcgttacgatctggtggcgatcctcaaaaccctcggcgccggacgggcgcagctgcgcaaactgattgtcggccagtggttgatgctgctggcgctggcggtgattgccggcggggcgatgggcgtcgggctggagcatattctgctggcgatgcttaagccggtgctccctgcggcgctgccggcggcgagcggctggccgtggctgtgggcgatcggcgcgatggtggtgatttccctgctggtcgggctgcgtccctatcggctactgctggcgacgctgccgctgcgggtgctgcgccaggacgtcgtcgccaacgtctggccgctgaagctctacatcccgatcgtgtgcgcggtggtggtgacgctgctggcgctgctgatgggcggcagccccctgctgtgggcggttctggcgggtgccgtagtgctggcgctgctgtgcggcctggcgggatggggcgtcctgtggttactgaagcgtttgacgttaaaagcgctgccgctgcgcctggcagtgaaccgtctgctgcgccagccgtggtcgaccctgagccaactggcggccttttcgctgtcgtttatgctgctggctctgctgctggtgctgcgcggcgatctgcttgaccgctggcagcagcagctgccgccggaaagtcctaactatttcctgattaacatcgcaccggagcaggtggtgccggtgaaaaccttcctcgccgagcatcagacccgcgccaccgagttctatcccatcgtgcgcgcgcgcctgacgcaaattaacggccaggcaacggagggcaataaagatgaagccctgaaccgggagcttaacctcacctggagccgcgagcgtccggatcataatccgctggttgccggtagctggccgccaaaagcgggtgaggtgtcgattgaagaggggctggcgcagcgtctgggcgtgaagctcggcgatagcgtgacctttaccggggatactcaggactttagcgcgaaggtgtccagcgtgcgtaaagtcgactgggaaagtctgcggccgaacttcttctttatcttcccgcagggggcgctcgacggccagccgcaaagctggctgaccagcttccgctgggataacggcaacgggatgctcacgcagctcaaccgcgaattccccaccgtcagcctgctggatatcggcgcgattttgcaacagattggccaggtgctgacccaggtaagccgcgcgcttgaggtgatggtgattctggtcaccgcctgcggcgttttgctgctgctggcgcaggtacaggtcgggatgcgtcagcgctaccaggagctggtggtctggcgcacgctgggtgccggtaagtctctgctgcgcaccacgctgtgggcggagttcgcgctgctgggcgtggtatccggcgtcgtggcggcgattggcgcagaggttgcgctggcgctgctgcaaagcaaaatctttgacttcccgtggtctccggactggcggctgtgggtgatgctgccgctgtgcggggcgatactgctgtcgctgtgcggcggctggctggggctgcgtctgctgaaaggtaaagcgctgttccgccagtttagccagggatag

SEQ ID NO: 259100 - DNA, 729 bp, Klebsiella pneumoniae
gtgcagcgcttcgtcgcgggcgatcagacggataatcttggcgttaccttccatcagcttgcgctcggcaaaggcgaaagagcaggcgaagctgacgtaaaaacggatggcttccagcgcgttcacgctcatcaggcacaggtacagtttcttcttcagctcgcgcaggttcacggtaatgcttttaccgttcacgctgtgggtgccttcgcccagcagatgccagtagctggtcagctcaatcaattcatcgtaatagctggaaatgccttccgcgcgtttttggatctgctcgttggtgacgatatcgtcaaataccatcgccggatcgttaacgatattgcggatgatatgggtgtaggagcgcgagtggatggtctccgagaacgcccaggtttcaacccaggtttccagctcaggaatggaaatcagcggcagcagggcaacgttcgggctgcgtccctggatcgagtccagcagcgtctgatatttcaggttgctgataaaaatgtgtttttcgtgttccggcagcgcctggtagtcgatacggtcgcgggaaacgtcaacctcttccggacgccagaagaaggagagctgtttttcaatcagcttttcgaagatgtcatatttttgctgatcgtagcgggcgacgttcaccggctgaccaaaaaacatcggctcaagcagctgatcgtttttagtctgagaaaaagtggtatatgccattga

SEQ ID NO: 259101 - DNA, 2286 bp, Klebsiella pneumoniae
atgaatcagagtctgctggtgacaaagcgcgacggtagcaccgagcgcatcaatctcgacaaaatccaccgcgtgctggattgggcggcagaagggctgaataacgtatccatctcccaggtagaactgcgttcccacattcagttctatgacggcattaaaaccgccgatattcacgaaaccattatcaaagccgctgcggatctgatctcccgcgacgcgccggactaccagtatctcgccgctcgtctggcgattttccacctgcgcaaaaaagcctacggccagtttgagccgccagcgctgttcgaccacgtgtcgaaaatggtgaaaaacggcaaatacgatactcatctgctggaagactacacggaagaagagttcaagcagatggattcgttcatcgagcacgatcgcgatatgaccttctcctacgctgcggttaagcagctcgaaggcaaatatctggtacagaaccgcgtcaccggtgagatctacgaaagcgcccagttcctgtacattctggtggccgcctgcctgttctccaactatccgcgcgagacgcgtctggactatatcaagcgtttctatgacgcggtatcgacgtttaaaatctcgctgccgacgccgattatgtccggcgtgcgtaccccgacccgtcagttcagctcctgcgtgctgatcgagtgcggtgatagcctggattctattaacgcgacctccagcgcgattgttaaatacgtttctcagcgcgccggtatcggcatcaatgccggccgcatccgcgcgctgggtagcccgattcgcggcggtgaagctttccacaccggctgtattccgttctataagcacttccagaccgcagtgaaatcctgctcgcagggcggcgtccgcggcggtgccgccaccctcttctacccgatgtggcatctggaagtcgaaagcctgctggtgctgaaaaacaaccgcggtaccgacgccaaccgcgttcgtcatatggactacggcgtacagatcaacaagctgatgtacactcgcctgctgaaaggcggagacatcaccctgttcagcccgtccgacgttccgggcctgtacgatgcgttcttcgccgaccaggacgagttcgagcgcctgtatacccaatacgagcaggacgacagcatccgcaagcagcgcattaaagccgtagagctgttctcgctgatgatgcaggagcgtgcctccaccggtcgtatctacatccagaacgtggaccactgcaacacccacagcccatttgacccggttgtcgcgccggtgcgccagtccaacctgtgcctggaaatcgccctgccgaccaagccgctggaagatgtaaacgacgagaacggtgaaattgcgctgtgcaccctgtccgctttcaacctcggggttatcgatagcctggatgagctggaagagctggcggtgctggccgttcgcgcgctggatgccctgctggattaccaggactacccgatcccggcggccaaacgcggcgcgatgggccgtcgtacgctgggtattggcgtgattaactttgcctactatctggcgaagcacggtaaacgctactccgacggcagcgctaacaacctgacgcataaaacgttcgaagcgattcagtactatctgctgaaagcttctaacgagctggcgatcgaacaaggcgcgtgcccgtggtttaacgaaaccacctatgcaaaaggcattctgccgatcgatacctacaagaaagacctggatgctatcgtcagcgaatctctgcactacgattgggagcggcttcgcgagtcgatcaaaacgcacggcctgcgtaactccacgctctccgcgctgatgccgtccgagacctcttcgcagatctccaacgccaccaacggcattgaaccgccgcgcggtcacgtcagcatcaaagcgtcaaaagacggtatcctgcgccaggtggtgccggattacgaaaaactgcagaacggctacgagctgctgtgggaaatgccgaacaacgacggttatttacagctggtcggtattatgcagaagtttatcgaccagtcgatttccgccaataccaactacgacccgacgcgcttcccgtcaggcaaagtgccgatgcagcagttgctgaaagacttgctcaatgcctataagttcggcgtcaaaacgctgtactatcacaacactcgcgatggcgcggaagatgcccaggatgacctggcgccgtccattcaggacgacggctgcgaaagcggcgcatgtaagatctaa

SEQ ID NO: 259102 - DNA, 1029 bp, Klebsiella pneumoniae
atgaaaaagatacttatatttattagcctattttttatctgcaagcctctaatggcgaattgtaaatatagtgattcaggtaatggtacagccgttggtgtgacatttagttcaaagattatgtctgataccacgctgcctgcaggtagcgtacttgctgtgaaaacggtcggtggtaatgttgcaaatatgaagacatttaatagttgcggtgctggagatgtttatactatatccacatcacctgcagtaactgaggttgtcggagtgaagggggtgcggggggggccagtatatgagactgggattccagggattggttttgaaatatccgatgctcgaatcggttcaaacagtcagccaataccagcaacattaggctctatctctgcatatggtttaagtgacccaggtgtccaacaaatcactgtctggttaataaaaaccaaagataacattgatacaagcataacaaaaaaacgccaagtgtcagtgtcttatctagcagggacaacttcgcaggtctctgcaaactcaacaattgccaggttacttcgtgtagatattaatattgggcctttaacctttagagaaacatcctgtagtatctcgccaaacggtgggggcactatatatttatcaaacattgaagcttcacaacttaagtcaatgcctcagggcggaacaacctcaaaacaaaaagaattcacgcttaatatagattgccctacatcttccatgggagcaaagtatatttattggtttaaccccataactgaaaactcatcatcaaaagatggagttttattaaattcaattccaacctcccttggcggagccaaggatgttgcctttgtaattaaacaacaaaatacccccataaaatttttcgattatacaagttactctattgcaaaggttactaaaaaccagtcaattaactttactgctgactactacaaactttcaaactccatacaaccaggaagtgttagagccatgtttgagattattattcaagaagaataa

SEQ ID NO: 259103 - DNA, 2124 bp, Klebsiella pneumoniae
atgaataaagaactatttaaaaccattaccgataagcttaatttctcattccgtcataaaacgccggttattttacagtcggaagccgccgaatgcggtatcgcctgtctggcaatggtttgcggcttttacgggcttaatatcgacctgttcaacttccgccatcgttacggtagcccttctcagggcgttacgctcatgtcgctgagcaaaacggcggaacatgccggtctgaaaagccgggccctctctctggatctggatgaaatcaagcagctgaagctaccctgtattatccactggggaatgaatcattacgtcgtgctcactaaggtacgtaaaaacagctttattgttcacgatccggcgctgggtaagcgggttattggtatccaggaaatgtccaataactttaccggcgtagcgctggagctatggccggaccaaaactttcagcaagaacaggcaaaatcacgcctgcgtctattagacctgatgcgcaatattgtgggacttaaatcggtcctgctaaaaatctttgccttttcggtggtggttgaagctatcggcctgctattacctattggtacgcagctagtgactgaccatgtcatcatggcgcacgaccagagcctgctttcggttatctgtatcggcctggtcttcttcacgcttttccgtacctttattagtatgctgcgagcgtggacctcattaacgctaaatacgctgacgaacatccaatggaaaaccacgctgttcgatcatctgacgagcctgccgttatccttttttgaaaaacgtcatttaggggatattcagtctcgtttttcgtcgctggatactatccgttccaccttcaccaatagcattgttaccggcattatcgactcaatcatgacgattggcctgctggtcatgttaacgctgtacggcggctggctggtttgggtcgtggttgggttcaccttatgctatgccatcatgcgttttgccacctacagcttctaccgtcgcgttgccgaagagcaggttatcaagggcgcacgctccagttcgcactttatggagtccctatacggtatttccaccattaaagcgctgaacttaaaagagcgtcgttcgcagcactggttaaatatcaacattgacgcctgcaatgccggtatcaaacagactcgcttcgatatgatgtttggcggtattaatacttttattacctctatcgatcaggtcgccgtactctggctgggcgcgatcatggtcattgataacaatatgaccctcggtatgtttatggcttttaacgcctatcgtgggcaattctcccagcgcgcatcaagcttgatcgacctggtcatgcagctgcgaatgctgtcgttacataatgagcgtctttcagaaattgtatttagcgagccggaaaaagagctgcctgcacgccgggtttttgcagaaaatactggcgtgaaattagaagtgaagaatctcagctatcagtacgatccgttctcacaacctattttttctaatttaaatattaccgttgagcccggcgaatccatcgcgctggttggcccttccggcgtcggtaagaccacgctgctgaaagtcatgtgcggtctgttagcgcccaccagcggtgacgtgatagcggataaccttgatattcaaaaaattggcatcaacaactttcgtctcgggacggcctgcgtccttcaggaggaccgccttttctcaggctcgcttatcgataatatcagcggctttgaagataatgccgatatggactttatcgttgagtgcgcacgcagatgtaatatccatgatgaaatcatgaaaatgccgatggggtacgaaacgattgtcggcgagcttggcttaggtatctcaggtggacaaaaacagagaattttaatcgctcgcgcgctctatcgaaaacccagcattctgtttatggatgaagccaccagccatctcgacctgaaaaatgaatcggtcattaaccagtctatctctggtttaagcattacccgaatcattgttgcccatcggccatccaccattgcctcagccgatcgcatcattgatatgtcacagttccatatgcaggcaccagcgtaa

SEQ ID NO: 259104 - DNA, 354 bp, Klebsiella pneumoniae
atgcaggtaaaatatttagcagggattgtcggcgcagcattgttgttagcaggttgcagctccagcaacgaattgacctctggtggccagaacgtacgctttgttgaagataaaccaggttctgaatgccagctgttaggtaccgcaagcggcacacagagcaactggctgtccggacagaatggtgacgaaggcggctccatgcgcggcgcggcaaacgccctgcgtaacaaggccgcagagatgggtggcaacgtcatttacggcgtcagcagcccgacgcagaatctgctgtccagctttgtgccgaccgatagccaaatgaacggccaggtttataagtgcccgaactga

SEQ ID NO: 259105 - DNA, 858 bp, Klebsiella pneumoniae
gtgtccttcgcgtttcagcagagtcacgatacgctctttgtgcaacggcgccaggcgcgcaaacagggtggtacgttttgccagctcggccagttcatcatcgctcagcgcttcaacctggctgccgatcaccacatcccccgcatccagacctacttcgtggcagactttggccgccaccagctcgctgtctccggtcaggattttgaccgtaataccgctggccttcagcgctttcagcgccggggctgtggtctctttcggcggatccaggaaggcgatatagccttcaaggatcaggtcggattcatccgcgcgctggtagtcgccttcgcgggcgggcagatacttcgtcgccaccgccaccacgcgcaatccctgacgattgaggctgtcggtcacccgacggatgcgccgcagcatggtgtcgcccagcggtacgatgtcgccgttatagcgcacctgggtcgagacgttgaggatctcctgcagcgcccctttgcagatcagttgatgaacgttgctctgctcctgcaccaccaccgacatgcggcgacgctcaaaatcgaacgggatctcatccactttctgccagcgttccgccagcccgcgcgccgactcctgttcaacgccttccagcactgcggtatcgagcagattcttcagtccggtctgatagtggctgttcagccaggccgtatgcagcacgcgttcgctcaccttgccggagacatcggtgtggttctccagcacgattttatcctgcgtcagggtaccggttttatcggtgcacagaatgtccatcgcgccaaagttctgtatcgcgtcgaggtgcttgacgatcactttctgttttga

SEQ ID NO: 259106 - DNA, 342 bp, Klebsiella pneumoniae
atggtattcggcattccgctggtgatgaacccgtacttcttcttgccgtttattttgacgccggtcctgctggtgattgtctcgtataccgcgatggccaccgggctggtgatgaagccggcggggattgcgctgccgtttaccacgcctatttttatgagcggctatctggcgaccggagggcatatttccggcgcggtgctgcaggtggtgaacctggcgatctcgctggtgatctattatccgttcttccgggtatgggatcgcctgaaggcgaaagaagagcaggcgtccgcgcagccggaggccagcgcgacgctgtcggcggctgaccgtatttaa

SEQ ID NO: 259107 - DNA, 741 bp, Klebsiella pneumoniae; identical to SEQ ID NO: 176161

SEQ ID NO: 259108 - DNA, 645 bp, Klebsiella pneumoniae
atggaacaaaataaaggtttttggtatgccgactggtcgttcccgatctttgttggtctgctctccgccggcgtttttgccgggacgcatatgtactacctctacggcatcggcgcgtttaacgaagtcgccttcgtggcgatgctgaaagcgggaattgataccggtgcctacggcgcggtcgcggcgttcggcgccagcttcctgttcgcgcgtattatcgaaggctcactggtggggattctggatataggcggggcgatccagaccggcgtcggcttaggcgttccggcgctgctgctcggcgcgggctttgttttcccggtcgccaactttgccgcctcgctggtcaccggcctggtgctggggctcgccattggctacatcattatcctggcgcgcaaattcaccatcaaccagagcgactccacctacggcgcggacgtcatgatgggggccggtaacgcctcaggccgcttcctcggaccgttgattattctcagcgccatgaccgcttctattccaatcggcatcggttccctggcgggcgcgctgctgttctacatctggcagaagcctatcaccggcggcgcgatccttggcgccatgcttcttgggtcaatcttcccggtggcgattagttaa

SEQ ID NO: 259109 - DNA, 210 bp, Klebsiella pneumoniae
gtggtttttgatgactttatcttccacgatgcccatgccggactcggcaaccgccattttggccagcggaatgcgggcatcggcggcggccagcgcggcggcgcgaaagattttatcgaccttctcctgagaaaagctggcataggcctgttgcgcctttcgtacccgcgcgaccagggcatcgaggtcgtcattactggtgatgagtga

SEQ ID NO: 259110 - DNA, 324 bp, Klebsiella pneumoniae; identical to SEQ ID NO: 176149

SEQ ID NO: 259111 - DNA, 282 bp, Klebsiella pneumoniae
atgccgcccatatccaccagcttcaccgctttctccacggcatcggcgaaatccttcgcccggtacatggcgagcgtgggcgacagcttttcgtgggcaaaaggctcgctgtcgtcgatgtcccggacttcgccaatcaggattttggtgtccgcaggcaccgcgatcccggccattccggcaatattgaccgctgactgcccgacaatagccgcgttgagtgcgccgtttttcagcagaatcccctgcacggccttcagctcctgcccctgcagcagatag

SEQ ID NO: 259112 - DNA, 612 bp, Klebsiella pneumoniae
atgaacacacagcttgttgatttcccaacgctatattttgggacacctgtcgcgattttatccaatcaaaacactgatgggacaacaaatctcactccgatatcatcatggtggatactcgaaaagagtatcgttatcggccttggaacatcaagtaagtgttatgaaaatctgttacataaccccgatatagtcctcaatatccctgacagcactttgtggacgaaaattgaagctttaggagcaacaacaggaaaagacgtcattccttcttttaaggagaaactgggattccgtatcgaaaaagataaattttcatgcagcggtctaaccgaaaccaaaagccttgctgttagtccgggaagaatacaggaatgtcctatacagattgaagcaaggattattaatagtatgtttattggtaatagcggaatggaactagtatcgctggaagcgagcatattgaatacttatatttccgataatattctatgtgaagtagataacaattacagattcaatgtggaaagatggcaaccgttatattatgtttttcgtcattatttctctttgggaaaatatttaggaaagaatttcagatgtgatgaataa

SEQ ID NO: 259113 - DNA, 207 bp, Klebsiella pneumoniae
atggatcgcgaaagtaaaaggtcaagaacagaaaaaacattaaagcaaaaagtggtatttgctaaaattaaaattaaccgccttacgtcaatggaaaaagcagagcaaaagagagttgaaacaggactcaaagttattcttggggaggaagtggctatggctatgaatagtggcgtcgaacaggtggatgaagaactttttatataa

SEQ ID NO: 259114 - DNA, 240 bp, Klebsiella pneumoniae
  misc_feature (164)..(173): n is a, c, g, or t
atgaaaaagattggctttttatcatttggtcactggactccgtcgccgcagtccggaacgcgttcagccgctgatgcgctgttacaatccatcgaccttgccgtcgccgccgaagaactgggcgcggacggcgcctatttcagggggcatcattttgctcgccnnnnnnnnnngcctatttcagggtgcatcattttgctcgccagctcagttccccgtttcccctgctggctgcgatag

SEQ ID NO: 259115 - DNA, 273 bp, Klebsiella pneumoniae
atggacgatcgcgatcgtctctatttcggttcaggccgtgacgagagtgattcgatcggtttcctcgatgagaaaacccgcgctattttcggtcgcagctacgccgcagagccggacaagctcatcacgcagctgaaacaggatgaggccatcgccgaagcggatacgctgctgttgacggtaccgaaccagctgggcgtggaatataatgcgcatgtcattgagtcgattctgaagcacgttgcgccggcaatgggctggcgcgatgcctga

SEQ ID NO: 259116 - DNA, 1311 bp, Klebsiella pneumoniae
atgagtcaggcattaccgctagtcacccgtcagggcgatcgtatcgccatcgtcagcggtttacgtacgccgtttgcccggcaggcgacggctttccacggcgttccagccgttgatttaggtaagctggtggtcggcgaaatgctggctcgcagcaatatccccgcggatataatagacctgctggtatttggtcaggtggtacagatgccggaagcaccgaacatcgcgcgggaaattgtgctgggtaccggtatgagcgtacatactgatgcctatagcgtcagtcgcgcctgtgcgaccagctttcaggcggtggccaacgtcgcggagagcctgatggcgggaaccattcatgcaggcatcgccggcggggccgactcctcttccgtattgcccattggcgtgagcaaaaaacttgccagaacgcttgttgatgccaacaaagcccgcactttgggacagcgcctgaagctcttttcccggctgcgtttccgcgatcttctccctgtgccaccagctgttgccgaatattccaccggtctgcggatgggcgataccgctgagcagatggcgaaaacgtggggtatcacgcgtgagcggcaggatgcgctggcgcttcgttcgcaccagcttgcggcgagggcctgggaggaagggaaattaacggcagaagtcatgactgcctacacgccgccgttccgtgaacctctggaacaggataacaacatccgtaagaattcaacgctggcagattaccaaaagttacgtccggccttcgatcgcaaacacggtagcgtgaccgccgctaacagtacgccgttaaccgatggggcggcggcggtgatcctgatgaccgaatcccgggctaaagcgcttggcctaatcccgctgggctacctgcgcagctacgcttttaccgcgattgatgttcgccaggatatgctgctgggtccggcgtggtcgacgccgctggcgctggaaagagccgggctgacgctggccgatttaaccctgattgatatgcatgaagcctttgctgcgcaaacgctggcgaatttgcaatgcatggccagcgatcgatttgcccgtgaggtgcttggccgctctcaggctatcggcgaagtcgatgagagcaaattcaacgtgcttggcggttcgattgcctacggtcatccctttgccgccaccggcgcgcgaatgattacccaaacgctgcatgaactgcagcgtcgcggcggaggatttgggctggttaccgcctgcgcggcgggtgggttgggttcagctatggttctggaggccgaatga

SEQ ID NO: 259117 - DNA, 300 bp, Klebsiella pneumoniae
  misc_feature (64)..(73): n is a, c, g, or t
atggtaactactgggacggtggcggctggcgcgaccgtgattactggcgtaaacactatgaatnnnnnnnnnngtaactactgggacggtggcggctggcgcgaccgtgattactggcgtaaacactatgaatggcgcgataaccgctggcgtcgtcacgataacggctggcatcgcggctgggataaaggtaaagcctacgaacgcggctatcgcgaaggctggaaagatcgcgacgaccgacgcggcggctggggacgtggccatggcggccgcggccatggtcacgggcatcattaa

SEQ ID NO: 259118 - DNA, 315 bp, Klebsiella pneumoniae
atgggggatctgcgcgaggccggcggaggcctgcggtgtcgccagcgaacccgccgcgccgctggcgtcaatggcgatggggtcgccctcgggcggcacgataagccagaaaccatcgccgccgaggccgttcatatgcggataaaccaccgcaatggtcgcggcggcggcgaccatggcttcgatggcgcttccgccttcgcgcagtaccgccagcgcgctttggctggccagatgatggggggcgaccgccatcccgtgggcagcaacatgactttgcatgaattttcctcaattaagcgactcgtccgctga

SEQ ID NO: 259119 - DNA, 723 bp, Klebsiella pneumoniae
atgaatagttttcaaacttggttgttaaatgatccttctcataacatcaatatttacgattattttgacaaagaaaaggtctggatttttgaagaaggggaaaatatggaggatgtcaccctgaccgttcataatggtgacttaagaataaatactgtcgcagacttacccaaaaatacacaagttttaatggttaaaggtaatttaactatcaatgatacgttgactctggtgggttactatcccgagccttttactctgggaggcttgattgtctgttgtgatttgaaatgtaaaagcatgcatttatcttggggtgatattgttgttatggggaatgcctatattgaagagtatattttttcttactctcccgaatttgagcaaagttcggtccatattcgaggtgaaatttcaatcccttatatattccgcggtaatcaatctaacccgcattattattttgataaaaactcaaaattaggtcattaccttgatatcaatttcaaaacaaatgaaaccacatcaaatccccgaatgcatataattgagcatatccgtataaatgaatctaatcctgaaattaaatttacagcaacaacggtagaaggtaagagagttaagtttacactggattctttttatctgtattgcaaagaaaataaattcaccacaaatcaagggtatccagtgtggaaagaggaagcctcactaatgctataa

SEQ ID NO: 259120 - DNA, 1047 bp, Klebsiella pneumoniae
atggaagttttaatatcccataggtatcctccttataaacaaaagacaaaaataatgagcaatgattataaaatttatttttccgataatctcatcactgactgtgctattggcgagaacggtgcagtaggtttcactttacatattgatgatagagattgggatcaggatgagattgatgaaaaaggttcaattcaatacgccttgcggatttatacagataaaccagaaaagcaacaaattaaaaaaagcaagctaactaactggtatcgtctttattgtgcatacagtcaattgccgaacgatcttttcgtgtacgttgatgagagtggttatgtataccaggcagggacagaaaaaggtcaacgagaaaaaaacatagccgaaagtttaataccaggcaaaaacctaccagaacatttacaaaataatccagtaacgttctcagtttttaaacttaaaacgctgtttggtcatgtctgggcttgtggcccacgtggtaatgtagccaaaagagtgggtgaaaatgcatgggaatataaagggcacccatttcctgatacattagatgtcgatgaattaggtaaacaagtttttttagatattgatggattttctgaaaatgatatgtatgccatcggacaaaaaagtactgtatggcattatgatggttcattatggaataatttcgacatccctggtaacgatctggaattccgtacaatttgttgcggtgaagatggttggatttatattggaacagaaactgggaacatatttaaaggtaagaaaaatgtatggcttatgcttcctttatgttatcccggatgtaattacaatgatatggtctggtttaaagatcgcatctggatcacatcatcagctggcctctggtatatcaaagatggtcattttgaaaaattagaatatcctaaagaaatcattcagcaagcagaacaaatggccgtcagtgatgaaaaattactcgtttcaggtagctatggtgcggcaacttttgatggtactgactggaatatattgttttaa

SEQ ID NO: 259121 - DNA, 1059 bp, Klebsiella pneumoniae
atgatgcttatagatcaagcaatgtgggaaaaattcttcaaaggtttctacatatatgatgcgacatatggttttaatcacggaagaatagggcttttattaaatgaggaagtggatgaagatcatgaagagtacgatgacccctggtacatcccacataaaaaattaatatcgatagtcattgataacccaccagaaacacgtattttctccatgcacttaggtcaccgaccattaacaaccatatcttctggctgggccccatcacagtcagaattagtcatagccgccaatgattgtcaggtcataagttataaaacacgagaatataaagggcctgagaataaaattgacacttcaatccctggcttcaaaaatgtacgagtagcaattagtaaattagtgagagtagggacaagtgtttattctatctgcaccggactaagaatatataaaagaattaatcatcaaatctggaaagaatgtactcaagatttaccaataccagatgaatatatcaaatgcacagcagatggaatcattaataatatattatatgatctagctggattttctgaatcagatatgtatgccgtagggggaatgggaagcatttatcactttaatggcattaactggagaaaaattcctttccactcaaataaaaatttacataccgtatgttgcgcgggtgataaatttgtctatatttccgattctgatggttcaatctggaaagggcgtaataatgaatggacacgaattatagatcacggaacgcttctctggccttttgatagtatggtttggtttgatgatcgcctctggtgcgccaaccaccaggatatcaaagtgctggaagagaacaggttgatcttcgctacccaagcgaaatataaaccacttcctgacgaggttgattcattaggggaatacgttcatgataaaagtattgaggtttcaccagatggaaccatcatgatggtttgtggctcacgcggggttgccctatataatggtaatgaatggaatgtactattcaacttatggaagttttaa

SEQ ID NO: 259122 - DNA, 927 bp, Klebsiella pneumoniae
gtgatgttcacgatgcctctcgctccacagggcgcccacattgcgcgccaggaaaagctaccgcaggcttatcgtagccgttattacgccaggcttgcctaccgggcaatgcagacggaagcccggctgacgcctaaacccggtctggttgacggacgaaatagcggcgctcaccaggatatggcgctgcctgattttctgcgcagcgccagcgcaattgctcgcgatctccccctgttcgttgaagagggggccgccagcgcggcgcgggatcccgactctgtactggatcgcctgaagcctatcgggctgcgttgcgaaacggccatgctgcgcgcgacgggaggcgtcaacacgcataaaggcgccatctttatactcggactgttttgcgccgcgatcggtcgtcacgaggcgacgggacaagcgatctcacctgccgcgctggccgccaccgtgggcgcgttttgtcaaggtatcgtcgaacgcgagttggttgaactccgcggtctgaccccactcaccgccgggcagcggctgtttattactctgggtttcaccggcgcgcgcggcgaagcgcaggccggatacccgttagtcatcgacaccgctctcccccgctatcgtcagctgcgaggtgaaggcctgagcgaggagctggcactgctcaataccctgctgctcattatgtcgcgcaacgatgatacctgcgtcgcctcgcgcggcggcattaaagggctgcgctggctacagcgtcaggcgcagctattgctcaacgtcggcgagatccgctcgccggccaacctctctctgctgcagcaattcgatgagctctgtatttcccgcaatctcagtcccggcggcagcgccgatctgctgatactgacctggtttctttcacactttcacgacgaggagagtcaatga

SEQ ID NO: 259123 - DNA, 1059 bp, Klebsiella pneumoniae
atggacaccaccacgattatcagcagagtgccccgaaaaaatgcggcaaaaattgctgaaataatccgttttcttcaggctaataatctggatatcgaccctcacgttaccgattttgtggtgatttaccaacaagatgaaattgttgcatgcggtggcgttgacggcgacattattaaatgtatcgctatttcccggcacctccgtggccagggagtattacttaagctggtcactgagcttattaatatcgccatggagaatggcaacagtacattattagtgtacacccgcagccataacgaacgtctatttatcgactgcggtttcaccaccctggtttcgattccgggctgcatggtattaatggaaaatagcggttctcgcctgacgcgctatctgcaaaagctggcacagctgcgtaaaccaggcaaccgcattgccgccatcgtgatgaatgccaatccgtttaccaacggccatctgcatcttattcgctatgcttcagaccattttgactggttgcatctgtttctggttaacgaagatgccgcccagtttcctttcacggaccgcctcgcgctggttcaggatgcgacgcagagaatgacgaagctgacggtgcatcctggttcacaatatatgatctcacgcgccacctttccggcttactttctgaaagaacagccgctcgtcgagcgctgctacacgcaaatcgatatcacgctttttcgtcaatatatcgccccggtgctcggcatcacgcaccgtattgtcgggaacgagcccttctgcccgataaccgcgcgctataaccaggacatgcgccattggctcagcacgccggcgcttcccttcgccccagtggaactcgtcgagatttcacggctgcagtggcaaggcacgcccgtttccgcttccagagtccgtcgtctgttgcagcaaaatcgccttagcgaggtcgcccccctggtacctgacaccaccctacgttatctgaagcgccaccagaaaactgacctggcgagcatgaccacaacccctacaggagcattatga

SEQ ID NO: 259124 - DNA, 1302 bp, Klebsiella pneumoniae
atgaacatcagcatgatagtaatactctctattgtcatctcgattgcgttaggttaccggacaaaaataaataccggtctgttcgccattgtatttgcctactttataggttgtttcctgttggatatgaaggccggagaagttatcaaaacatggccgatcggtattttctttgttatttttgccgtttcgcttttttataactttgcattaatcaatggcaccttagaaaagctggctatgcatttgctctacttatgccgccactttccgaaatttttaccgctggtgatttatttcgccgccacctttgtggcgagcctgggggcgggtttctttaccgttctcgccttcttcgcgccgttaacgttgctgttgtgccgcaaaacaggaatgaataagctggttgccgccgtcgctgttaactatggcgcgctgggcggtgctaattttatgaccagcgccagcggtgttgtatttcgcgggcttattgataatgcaggctacagcgcaaactcttttatctacacgtcatctatttttctggtttctttcatcctaccgatagtggttattcttttattaatctttctcaccacccgtgggaataatgcggtcagcggcgctttgcaggttgaaaaacccgcgccattcgatagtaagcagaaattaaatctgctgctgattttcgcgatgctgctggtggttctggcattccccgtcatgcatctcattatgcctgacgctaaggacatcaagtttatcaacgccagagtcgatgtcggcctggtctctatcgtattcgccgttatctccctgtttctcaagctcggcgatgagaaaaaagccatcgctctggtgccgtggaatacgctgatcatgatttgcggcgtcgggatgctgattcaggtcgcgattaaagcaggcaccattgatatgctggcaagctgggttggttcgagcctccctgccgccatcgtccccttcgctctggcgattattggcggcatgatgtcgttcttcagcagtactctgggcgtcgtctgtccggccctgttcccgataattccgtcaatagcctccgccaccggtattaacgccatgatcctgtttaccgctacggtaattggcgcgcaggcaacggcaatatccccgttctcttccggcggcagcctgctgctcggctcctgctccgaagacaaagaacgtaatgaactatttcccaccctgttgtttaaagcggtgccgatgtgcgtgttcttcgcgctattaagcgtagccatcatgatgttgtttttttaa

SEQ ID NO: 259125 - DNA, 795 bp, Klebsiella pneumoniae
atgcattttgatactcatgctcatgtttttaccaccggtttgccgctggcagagcattgccgctacgtaccagagtatgatgctactccggcccaatatctggctcaactggatcggcaccatatcgacaaagcgatactgatccagccgagttttctgggtaccgataatagctatatgctggaagcaattcgtcagtcgccggaccgtttttacggcgtggcggtcatcgatccagatacgccgctttgtgcgatggaaacccttaaacagcagggaatcatcggcgtgcgcctgaatcttatcggacaagagctgccagatttaactatgccggtgtggcagcagcatctgcgccatattaacgcgcttggctggcatattgaacttcatcgcccagcggcggacctggttccgctccttggcgtactgctcgccgccgatgtaaaaatagttattgaccactttggcctgcctgcgggaaaagacaacgacccgggttttatctatcttctcaaatatgcagaaaccggtaaaatatgggtgaaaatttccgccagctatcgcaacggcagcgcacaaaagccaactgataacacggaaatgctcatgcccttattattaaagcactttggtgccgagcgcctgctatggggcagcgattggccgcatacgcgttacgaagatcgcatgacttacacaaaagccatcgatgagatttatcattgggaattaacaaatactcaacgtaataatatccttagccaaagcgttatagagcttattaatcgttga

SEQ ID NO: 259126 - DNA, 2589 bp, Klebsiella pneumoniae
gtgctggaagaataccgccaacatcaggccgctcgcgccgcagaggggcttgtcgccaaaccgctgaatgccggacaggtccaaaaactcaccgaactgctgcaacaccctcccgtcggcgaagaggcatttttatacgatcttttcgttaaccgtgtcccgcccggcgtcgacgatgccgccagggtgaaggccgattatctggcagcgctagccgcgggagatctcgtctcaccgctgatcgacaaaactcgggcgatagcgctactcggcaccatgctcggcggctacaatattcccgccttaatcgccgcgttagataaccccgaattagccccagccgccgcggacgcactttcatacaccctattaatatttgataattttcagctcgtggaagctaaagctgcagcgggaaacctatcagctcagcaggttctacgggcatgggctgatgctgaatggttcttaaaacgccccgccgttggcgaaaaaatcacggtcagcgtatttaaagtgccgggcgaaaccaatactgatgacctctctccggcgcaggatgtctggtcgcgcccggatattccgctgcacgcactcactatgctgaagaacccgcatgatggcattgaagcggaccagcctggcgtcattggcccgcttagtaaaatcgcgcagcttaaggagcagggattcccgctggtttttgtcggcgagacggtcggcaccggttcatcgcgtaaatctgccgccaactcgctgctgtggcacatgggcgaagatatccccttcgtgcctaataaacgcggcggcggaatggttatcggcggaaaaatcgcaccaatttttttcaacactctggaggactccggcgcgctgccgattgaagcggatgtaagccagctgaatatgggcgacgttattgacgtatatccctataaaggcgagatacgccgtcacgacgataataaattattaacgaacttcacgctgaaaaccgacatgctgctcgacgaagttcgtgccggggggcgaattccgctgatgatcggccgcgccttagtggccagggcccggcaggcactcagtctgccaccagacactatttttcgtcaggccaatgcacccgcagagagcagccgcggcttctcactggcgcagaaaatcgttggccgcgcctgcggcgtagcaggcatccgccccggaacctactgcgaaccgaaaattacctccatcggttcacccgataccagtgggccgatgacccgcgacgaactcaaagatctggcatgcctgcgcttttccgccgatctggtgatgcagtctttctgtcacaccgccgcttatccaaagcagatagatgtccagacacatcagacgctggcggactttatgcgcgaacgcggcggcatatcgctacgcccgggagatggcgttatccattcatggctcaaccgcatggtattaccggataccgttggcaccggcggcgactcccatacgcgcttcccgatcggcttatccctgcctgcaggctccgggttggtggccttcgccgccgccaccggtatcatgccgctggatatgccggagtcggtgcgcgtccgtttccatggcacaatgcgtcccggcatcaccctgcgcgatctggtacacgctattccgtattacgccagcaagcagggcctactgaccgtcggcaagaaagacaagatgaacatcttctccggtcgtatcctggaaattgaagggctggaggcgctcaccgtcgaacaggcgtttgaactcaccgccgccaccgccgagcgttcggcggcaggatgcaccattaagctgaacagcgcgtcgatcatcgacagtatcaaaggcaatgttgtactgctgaagtcgctgatcgccgaaggctatggcgatcgcgacgcgctggagcgccgtattctggcaatggaagagtggctggtcgatccacagctgctcgaagctgatgccgatgccgactataccgccacgattgatatctatcttaacgatatcaacgagccgttgctgtgcgcgccgaacgacccggatgatgtcagaccgctatccgccgtcgcgaatcatcctgtaaatgaagtgtttatcggttcctgcatgaccaatatcggtcattttcgcgccgtcggtgaagtactcaacgctcacgagggccagctcccggtacgcttgtggctggcgccgcccaccaggatggacgccagtaagctcaaggatgaggggtggttcagcattttcggccagcgtggcgcgcgtattgaaattcctggctgttccctgtgtatgggtaaccaggcgcgggtagcggatggaacgacggtggttgccacctctacacgtaactttcccaatcgtctcggcgcaggcgcccgggtttacctggcgtcggctgaacttgctgcggtcgcggctcgactcggcaagctccccacaccagaaacgtaccttagcctggtcgaacagattgacgagcgcgtttatcattatctgcaattcgatcggcttgataactatatggaaaaagccgctgagatgatttttcaaacccgttgttaa

SEQ ID NO: 259127 - DNA, 672 bp, Klebsiella pneumoniae
atgccatcatcatctttgcgttttgcgattaatttaggcaatgctctgcttgcagagcagtccgctaccggtgaacttcaggggctgacggtcgacctggcgcgaagaatcgcgcgctcctgccagcagacggaacggctaaaaccctattcagcggcgaaacgcatcgttgaagatgcccaacataatcaatgggatatcgcttttctggcggttgatccggctcgtgagaatgaactgtgttttaccacaccttatctgacgattgactgtaccctcctggtgcgtcgctgtagcgaagtctcgtccgtgacggagatggatcgtgagggcgttacgattaatgtcggcaaaggttctgcctattcactgccgctcatgcgcacactaaaacatgcccgtcttaacgaatatccgaccactcagcaggcgctgagcgcttttctggccggtgagggggatatggtggcgaatattcgtcaactgctggaggctgctgctttacaaaacggggcggttcgcctgctgcctgacaactatagccagattcaacaagcaatctgcgtgccgcgcacggctccgcagtatttcgagcaggtagaggcgttggtagctcagtggcagcaggacggcacgctggcggcgctggttgcccgctatatttatgcctga

SEQ ID NO: 259128 - DNA, 303 bp, Klebsiella pneumoniae
atgcataaacagggcgttttcacgaccgatatccaccgccagctgccgaatcgcttcaaggaacggcagcgactcgatatcgcctacggtaccgccgatttcaaccagcaccacatcatgaccttcgccgcccgccagcacgcgctctttaatcgcgttggtgatgtgcgggatcacctgcacggtcgcgcccagatagtcgccacgacgctctttgcgcaggacatcagagtagatacggccggtggtgaagttgttgcgacgagtcatcttggtgcgaatgaagcgctcgtagtgacctaa

SEQ ID NO: 259129 - DNA, 213 bp, Klebsiella pneumoniae
atgccgaccggcccctcaataaagggtttactgcccgcgctctggtccggcacgccgatgcggatagtgcgtagcgtttcggcctggacgctggacgccaggccgatgaccgcgaccagcgccagcaaggtgcggttgaatattgctttcatcataacgtgttgctcccttgagttttttctcaccctaaagagccgacgggcaacgtgttaa

SEQ ID NO: 259130 - DNA, 285 bp, Klebsiella pneumoniae
atgcttaccttccagctgctgattattatcgtgctcggcggcctgggcagcaccaccggcgcgctgcttggcaccgtactggtggtcggcagcggcgagtggctgcgctttctcgatcagccgctccagttcttcggtcacgatctcggcgcgtatccgggcctgcggatggtggtgttctcgctgctgctgctgatcatcatgctgttcgcccgcgaaggtctgctgggcaaaaaagagatttggcaggtgggcaaaaggagacgcggcgatggcgcaaaataa

SEQ ID NO: 259131 - DNA, 849 bp, Klebsiella pneumoniae
gtggctaacgcactgaccggctacaactttgcctacctcgacgagcaaaccaaacgcatgatccgccgcgccatcctgaaagcggtggccatccccggctaccaggtacccttcggcggtcgcgagatgccgatgccctacggctggggaaccggcggtattcagcttactgccagcattatcggcgaaaatgatgtgctgaaggtgatcgatcagggcgccgacgacaccaccaacgcggtatcgattcgtcagtttttcaaacgcgtaaccggcgtcgcgaccaccgaacgtaccgaggacgccacgctgatccagacccgccatcggatcccggaaacgccgctaaccgaagatcagattctcatcttccaggtgccgatcccggaaccgctgcgctttatcgagccgcgcgaaaccgaaacccgcaccatgcatgcgctggaggagtacggcgtaatgcaggtgaagctgtacgaagatatcgcccgcttcggccatatcgccaccacctacgcctacccggtgaaggtcaacggccgctacgtcatggacccatcgccgattccgaaatttgataatccgaagatgcatatgatgcctgcgctacagctgttcggcgccgggcgcgaaaaacgcatctatgcggtgccgccttataccccggtggagagcctcgatttcgacgatcatccgtttaccgttcaggagtgggatgaaccctgtgcgatctgcggctcacgccacagctatcttgatgaagtagtgctcgacgacagcggcaagcggatgtttgtctgctccgataccgactattgccgccaacagtgcgaggagcagaaaaaatga

SEQ ID NO: 259132 - DNA, 1065 bp, Klebsiella pneumoniae
atgtacgtagccgtcaaaggcggcgagaaggcgatcgtcgccgctcacgccctacaggaacagcaacgccgaggcgatggacggcttcctgaaatcagcgttgaccagattagccaacagctcaatctggcggtggatcgggtgatgaccgaaggtggtatcgccgaccgggagctggcggcgctggcgctgaagcaggccagcggcgatagcgtcgaagcgatttttctgctgcgcgcttaccgcaccacgctgcaaagactggcggtcagcgagcctgtcgacaccgccgctatgcgccttgagcgccggatctcggcggtctataaagatatccccggcggccagatgctcggcccgacctacgattacacccaccgtctgctcgattttaccctactggccaacggcgaaacgccgccgctggcgaccgatagcgcgccgcaggaagccacgccgcacgtttttaatctgctcgtccagcagggactggcgaaggcggagcaggatactgacgcgcagcccgacgacatcacccgccatccgccggtttatccctgttcgcgctcgtcgcgcctgcagcagctggtgcgcggcgacgagggctacctgctggcgctggcctactccacccagcgcggctacgggcgcaaccatccgtttgccggggaaattcgcagcggctacgtcgcggtggagatcgtcccggaagagctgggcttcaccgtcactattggcgaactgttgatgaccgaatgcgaaatggtcaacggctttgtcgaccctcaggatgaaccgccgcacttcacccgcggctacggcctgacgtttggcatgagcgagcgcaaagcgatggcgatggcgctggttgaccgcgcgctccaggcgccggagtacggcgaagaggcggcgggtccggcccaggacgaagagtttgtgctggctcatgccgataacgtcgaggcggccggtttcgtttcgcacttaaaacttccccactatgtcgatttccaggccgaactggcgctacttaaacgcctgcaacgggagaatcaacgtggctaa

SEQ ID NO: 259133 - DNA, 234 bp, Klebsiella pneumoniae; identical to SEQ ID NO: 203834

SEQ ID NO: 259134 - DNA, 1779 bp, Klebsiella pneumoniae
atggtcgagtgtaccgacgagcttcgtgaactggcaggcgcggaaggcgcgcaggaaccctatcgttacctgatgaaaaaactgcgcacgcagctaatggagacgcaggcctggctggaagcgcgcctgaaggggcagaagctgccgaaaccggcgggccttatcacgcaaaacgagcagctatgggaaccgctctacgcctgttaccagtcgctccaggcctgcggtatgggaattatcgccaacggcgagctgctcgataccctgcgccgcgtaaaagcctttggcgtaccgctggtgcgtatcgatatccgtcaggaaagcacccgtcacaccgaagcgctgggcgagatgacccgctacctcggcatcggcgactatgaaagctggtcagaagctgacaaacaggccttcctgatccgcgaactgaattccaaacgtcctctgctgccgcgtcagtgggagccgagcgaagaaacccgcgaagtgcttgagacctgcaaagtcatctccgaagcgccgcgcggctctattgcagcctatgtgatttcgatggccaaaacgccgtcagacgtcctggcagtacatctgctgctgaaagaagccggtatcggctttgcgctgccggtcgctccgctgttcgaaaccctggacgacctgaataacgccgacgacgttatgacccaactgctgaatatcgactggtatcgcggctttatccagggcaagcagatggtcatgatcggctattccgactcggcgaaagatgcgggcgtaatggccgcctcctgggcgcagtaccaggcgcaggacgcgttaattaaaacctgtgaaaaggccggcattgagctgacgctgttccacggccgcggtggttctatcggtcgcggcggcgcgccggcgcacgcggccctgctctctcagcctccgggaagcctgaaaggcggcctgcgcgtcaccgaacagggcgagatgatccgctttaaatacggtctgccggaagtcaccatcagcagcctgtcgctttacaccagcgcgattctggaagccaacctgctgccgccgccagagccaaaagcgcaatggcgcgacatcatggccgagctatccgacgtctcctgcgagatgtaccgcggctacgtgcgtgaaaataaagatttcgttccttacttccgttccgctacgccggagcaggagctgggtaaactgccgctgggctcgcgcccggccaaacgtcgcccgaccggcggcgtcgagtcgctgcgcgccattccgtggatcttcgcatggacgcaaaaccgcctgatgctgccagcctggctgggtgccggcgctgcgctgcaaaaagtcgtcgaaggcggcaagcagagcgagctggagagcatgtgccgcgactggccgttcttctctactcgtctcggcatgctggagatggtctattcaaaagccgatctgtggctggcggaatattacgatcagcgtctggtgaagcccgaactgtggaagctgggcgaagagctgcgcgaactgctgtctgctgacatcaacgtggtgctggccatcgccaacgattcccacctgatggccgacctgccgtggatcgcggagtccatccagctgcgtaatatctataccgacccgctgaacgtacttcaggccgaactgctgcatcgttcacgcctggcggaagagaaaggtgaaaaaccggatccgcgcgttgaacaagcgctgatggtcaccatcgcaggcgttgcggctggtatgcgtaacaccggctaa

SEQ ID NO: 259135 - DNA, 582 bp, Klebsiella pneumoniae
atgcgtctgtgcgatcgagatatagaagcctggttggatgagggccggctggccattaatccgcgcccgcccattgagcgcattaacggcgcgacggtcgatgttcggctgggaaataagtttcgcactttccgcggccacacggcgggatttattgacctgagcggccccaaggcggaagtcagcgcggcgctggaccgggtgatgagtgaagagattgttctgccggatggcgaagcgttctttttgcatccgggcgaactggcgctggcggtaacctacgaatcagtgactctgccgccggatctggtcggctggcttgacgggcgctcttcgctggcgcgtctgggcttgatggtgcatgtgaccgcacaccgtatcgatccgggctggtccggctgtatcgttcttgagttctataattcaggtaagctgccgctggcgctgcgtccagggatgcttatcggggcgttaagctttgagcctttatccgggccggctctacgtccttataaccgccgcgaagacgcgaaatatcgcgatcagcagggcgcggtagcgagtcgaatcgacaaggattga

SEQ ID NO: 259136 - DNA, 267 bp, Klebsiella pneumoniae
gtgcacgatcagcggctggtattcggcagcggttttcagctcgtcgttggtcgccacctgccagcggtgggtggcatcctccagcgccccctgcggtttacgcacgttggcgttgctgatggcggtgcgcaccgcgtcgagcgacacgccctggttaaacagcgcctgtgggttgaggtcgacgcgcaccgcgggcagcgagctgccgccgacgtcgacgtcgccgacgccgtcaatctgggcaatggtctgcgccagttgggttga

SEQ ID NO: 259137 - DNA, 489 bp, Klebsiella pneumoniae
atgttttccagcaccacgatggcgtcatcaaccacgaagccggtagcgatggtcagcgccatcagcgacaggttgttaaggctgaagccgcacaggtacatggcggcgaaggtgccgatcagcgaaaccggaaccgccaccgccgggatcagcgtcgcgcgccccgagcggaggaagaggaagaccacgaggatcaccagcgccaccgagatcaccagcgtttgctcgacttcctccagcgaggcgcggatggtcggcgaacggtcctgggcgatttgcagatcgacagaggccgggatggtgcgctgtaactccggcagacgggcgcgaatgctgtccaccgtttcaatgatattggcctccggcagcttacggatcatcagcaaaatcgccggtttggcgttagtcatcccggcgttgcgcacgtcctgcaccgaatcggtgacgttggcgacgtcgccgaggcgcaccgccgcaccgttgttgtag

SEQ ID NO: 259138 - DNA, 888 bp, Klebsiella pneumoniae
atgtatgctcgctttgaatggtcttcagcaaatgcaggcgcacttactggcgatcatatctatacgacatccgtaccaggtattggtttaagagtgaaagtctggctgaatattaccggtgaatatgatggcgatactgacgattttctccctgattacactgagcattatattggcgactcagagttttatcttggaaaaccaggggggtttttagattactatgccacaacaaactattcccccgcctaccagctacagctggtcgccacgggaggcgcaatcgccagcaacagttctctgtcgataaaggaccctatctcatcggtttcgcttaaagatagcactggtacgatggttatttcccagctgcatatcagcggtacgacgcaaatcaagctgacgccgatgggctgtacggcaggtacgaccgcgctgaatttccctatgggctccgtgaaaacgagtgagtttactctttcctcgacagtcggctccgcccagcaaacgctgacgctttcttgcgaacccggaaccaatatatcaatgcgtgtgacggcgactgaagccgaaggcgataatccgaacaggagcgttattgcgttaacggcgggggaaaacgtagcaaccggtgtgggtgtgcagttaagcctcaacgggaaggtcataccgttaaacaccagtttttatttaagtacatccagcagaagtgtaacgttgaatgccggagctgaggccagctacgcaacctttacctatccgaataatcccggcggcgctgccgcatcgaattcgctcatcttttcaaccaactattacaaaaccggggctgaagtgacgcctggaacggccaacgccagcggaacgataacatttatctataactag

SEQ ID NO: 259139 - DNA, 609 bp, Klebsiella pneumoniae
atgaacaatctcaatatattgtgttttgagcacaccactaaaatgatagcgatgcggatacaccatgctcaatcgccattgcggctagcgacagctgcaatagtagggatgctggccagtgcttcatctgcctgggcctatgatgctacgagtaccgtcaattttaatgtcaccggcaatattgaagaacctgtctgtgaggtttttgtaaaaccgtccaatgctatcagcctggggacggtttcttctcagcgtctgaccggtaaaccgggggccagtagcgataccacaaccgtttccctggcatttgataactgctcaaccggtacgtcgtcagtcacgataacgtttagcggtgctccgtttgatagtactcatcccgcgatttatatcagtgagctgattgatggggcaaagggcgttggcttacagcttgtgagtgccgcggatgggaaaacgctgggtccaaacgagagttatacctatgcatttacggactcccctggcgggcacgcctttgatatggcggccagaatgtatacgccatacggaaaagtaacgccaggaaacgttgcctatacggtcactttcaacgtgtcatacaaatga

SEQ ID NO: 259140 - DNA, 1017 bp, Klebsiella pneumoniae
atgcatctcgccctgcttgaaggcctgcatcaccgcctgcttctccgccggtttcatccgcccgtggacgaggccgatattgagctccggcagcgccagtttgagctcttcccaggtggcttccgccgcctgggcttccagcagatcggactcttcaatcagcgtacagacccaataggcctggcgaccttcatgggtacaggcgttgcgcacgcggtcgataatatcgctgcgccgggtgtcggggatggcgacagtggtcaccggagttcggcctggcggcagctcgtcgataatcgaggtgtccagatcggcgtaggcggtcatcgccagggtgcgggggatcggggtggcggtcatgatcagctgatgcgggtggaatccctgctgctgacctttctcccacagcgccagccgctgatgcacgccgaagcggtgctgttcgtcaataatcaccagcgccaggccgttaaactgcacctgctcctggaagatggcgtgggtgccgacaatcatctgcacctcgccgctggcgatagcctcctgctgcgcctggcgggctttgcctttctgtttgcccgccagccagccgacttcaatacccagcggttcgaaccagttgcggaagttattggcatgctgctcggcaagcagttcggtgggcgccatcagcgccacctgtttgccgtggacgatagcgcgcaaggcggccagggcagcgaccagcgttttaccggagccaacgtcgccctgcaccaggcgcatcatcggcacgtccagcgccatatcgtgttcaatctcggcggtaacccgcgcctgcgcgccggtgggcttaaagggcagggaggccagcagttggtttttcagggtatcgttggcgccgagcggcagggcgtgatagcgctgggcgcctgcccgcagcgccagcatgctgaggttatgcgccagcagctcttccagaatcagacgctgctgcgccgggtgcttgccgttttccagctcgctaagttgcaatga

SEQ ID NO: 259141 - DNA, 1884 bp, Klebsiella pneumoniae
gtgctggtcagaaccttcgagatacatatcggcggcgtgaccggcaaattccggacgcacgtcaacaacggaggagtgggtcgatccggagtcaaaccacacgtccagcgtatccggcaccttctcatagctatcggcatcggcgccgaggatgtcgcgggaatcgagatcccaccacgcctgaatgccgtcgatctcaacgcgtttcgccacttcttccatcagttcgagagtacgcggatgcagctcctgcgtctctttatgcacgaacagcgacatcggtacgccccaggtacgctgacgggaaatacaccagtcaggacggttggcgaccatcgattcaatacgcgcctggccccagtcagggatccactgcacgcctttgatttcggcaagcgactgcgcgcgcaggcctttctgatccatgctcacgaaccactgcggcgtggcgcggaagatgatcggcgttttgtgacgccagcagcacgggtagctgtgctgcattttctctacgtgcagcagcgcgcctttttcagacagcagcgcaacgacaatatcgttggctttaaacacgtttacgccatccagcgtcgggtaagttcccggcagataggcgccgtccggacccaccgggttagcgacttccaggccatatttttgaccgatgacatagtcatccgggccgtggcctggcgcggtatgtaccgcaccggtacccgcgtccagagtgacgtgatcgcccaggatcgccgggacgtcgaaatcgaggaacggatgcttaaagcgcatcagctccagctcggcgccgtttaccaccgcaaggatggtgtaatcagcaatgccggcgcgtttcatgacgctgtcgaccagatctttcgccaggatcagcgcctggccgtcaacctgcaccagcgcatagtcaaactccggggacagggagatggcgcggttcgctggcagggtccacggggtggtggtccagataaccagagaaaccggaccgttaacgtcggccacgccgaatttcgccagcaccgccgctttatcggtcgcgtggaacgccacgtcgatggacggagaagttttgtcgtaatactcaacttccgcttccgccagcgcggaacggcagtctacgcaccagtgcaccggcttagcgcctttgtgcaggtggccgttgccgatgattttacccagcgcgcggatgatgttggcttccgttttgaagtccatggtcaggtacgggtgcgaccagtcgccgagcacgcccagacggataaagtctttgcgctgcccgtcaacctgagtggcggcatattcgcggcacttggcgcggaactcggcggcggtgaatttctcgcccggcttgccgtattcctgctctaccttcagctcgattggcagaccgtgacagtcccatcccggtacgtacggagagtcatagcccgccagccctttggacttaacgataatgtctttcagaatcttgttaaccgagtgaccaatatgaatgctgccattcgcataaggagggccatcatgcagaatgaaggtttttttgccttttttggctgcacgaatgatgccgtacaggtcatcatcggtccaacgcgccagcattcccggttcacgcttggcgaggtcgccgcgcatcgggaaccctgtttccggcaaattcagggtcgatttatagtcactcatcagattctcggttccgtatttcggtttgataaacaccgtcagggttatgcctgcccggttagcccaaagaagtcgcgggccgttaactcatcacgtgcgatttgcgcttttagctcatcaagcgacgcaaatcgctgctcgttacgtatttttttacgcagtattacatctatatggcgaccgtag

SEQ ID NO: 259142 - DNA, 219 bp, Klebsiella pneumoniae; identical to SEQ ID NO: 256110

SEQ ID NO: 259143 - DNA, 219 bp, Klebsiella pneumoniae
atgatcataccctggcaagagctcgctcccgaaacgctggatagcctgatcgaaagttttgtcttgcgcgaaggcaccgattatggtgaacatgaacgttcgctggttgataaagtctctgatgtaaaacagcagctaaaatgcggagaggccgtgctggtatggtcagagctgcacgagacggtcaacatcatgccccgcaagcagtttcacggctaa

SEQ ID NO: 259144 - DNA, 633 bp, Klebsiella pneumoniae
atggtgcttggcaaaccgcaaacagaccctacccttgaatggttcttgtctcattgccatattcataagtacccatcaaagagcacgctgatccaccagggtgaaaaagcagaaacgttgtactacatcgttaagggctccgtggctgtactcatcaaggatgaagaaggtaaagagatgatcctctcttacctcaaccagggcgatttcatcggtgaattaggcctgtttgaagaaggtcaggagcgtagcgcctgggtacgtgcgaaaaccgcatgtgaagtggccgaaatctcctacaaaaaattccgtcagctgatccaggttaacccggatatcctgatgcgtctctcttcgcagatggcgcgccgtctgcaggttacgtcggaaaaagtgggcaacctcgctttcctcgacgtgactggccgtatcgctcagacgctgctgaacctggcaaaacagccggatgcgatgacccacccggacggtatgcaaattaaaattacccgccaggaaatcggtcagattgtcggatgctctcgcgaaaccgttggccgcatcctgaaaatgctggaagatcaaaacctgatctcggcacacggtaaaactatcgtcgtctacggtacccgttaa

SEQ ID NO: 259145 - DNA, 1023 bp, Klebsiella pneumoniae
atgaatattaaacatattggtctcgacctggcaaaaaatgtcttccagatacatgccgtggatcaccgtgagcatgttgtccttcgtaaaaccctgcgccgtgaccgcatggcggcctttttcacccaactctcaccgtgccttatcggtattgaagcctgtggctctgcccactactgggcccgggagctgacccgtatggggcataccgtacgcattatcccgccccggcttgttaagccttatcttaaaggccagaagaatgatgccaacgatgccgaagctatctgcgaggctgtcagccgccccgggatgcgcttcgtggcgataagaacggaaaggcagcagacgctgcaggcggagcaccgcgtccgggccagactcatccgtgcccggacagccctgagcaatgagatacggggtctgctgggggagttcggtgtggtgttgccagcgggaatagcgcaactgcgtaaggcgctaccggagatagtgtcgcagcaggtgcagtgggatgagtgttttattcgtctgctgtgcgaactgtcagaagagctgcagggactggatgagcgtgtcgcccgccacgacaggcggcttcagcagtcagcacgggatgatatccggataaaaagactgctggcgatagaggggatgggtccggtggtggccagtgccctggtggctgcagtgggtgatggcagacagttcaggagcggccgggaaatggcggcttatctggggctggttccgcggcagcactcaagcggaggaaaggcgcgactgggccatatcagcaagcggggggaccgctacgtgcggacgctgataatccatggagcgcgggcagtgctgaatgtgtgtcagaataaaactgacaggcgcagccagtggttgcagggggtgtcggagagacgaaaccggaacatcgcgacggtggcgctggcgaacaagaatgcccgtatagcatgggcgctgctgagtcgtgaagaggattaccatgggatacaggtcaccggttaa

SEQ ID NO: 259146 - DNA, 1023 bp, Klebsiella pneumoniae; identical to SEQ ID NO: 259145

SEQ ID NO: 259147 - DNA, 174 bp, Klebsiella pneumoniae
gtgcggcgacgcaacaggatgaccaccagcgttagcggccagcgcgccgccgagaccggaacctccggccagcagcggatactcctgcagcgcctgagccagggtatggagatcggtgtcgtccagcgtatcgacaatcacatggcgcgttccttcaatctgatagcgttctaa

SEQ ID NO: 259148 - DNA, 2016 bp, Klebsiella pneumoniae
atgagtaaaccgttcaagctgcattctgctttccgtccctccggcgaccagccggaagccattcgtcgcctggaagagggtctggaagatggcctggcgcatcaaacgctgctcggggtgaccggctcaggcaaaacttttaccatcgccaacgtcattgccgacctgcagcgcccgacgatggtgctggcgccgaacaaaacgctggcggcgcagctatacggcgagatgaaagagttcttcccggagaacgcggtggagtatttcgtctcgtactacgactactatcagccggaagcctatgtgccaagctcggacaccttcatcgagaaagatgcttcggtgaacgaacatattgaacagatgcgtctgtcggcaaccaaagcgctgctggagcgtcgtgatgtggtggtggtcgcctcggtctccgccatctacggtctcggcgatccggacctctatctgaagatgatgctgcacctgacggtcggcatgatcatcgaccagcgcgccattttgcgccgcctggctgaactgcagtatacccgcaacgatcaggccttccagcggggtaccttccgcgtgcgcggcgaggtgatcgatatcttcccggcggagtctgacgacgtcgcgctgcgcgtagagctgttcgatgaagaagtcgagcgcctgtcgctgttcgacccgctcaccggccacatcgagtcgacgatcccgcgctttaccgtctacccgaaaacccactacgtcactccgcgcgaacgtattgtccaggcgatggaagagatcaaaaccgagctggcggagcgtcgtaaggtgctgctggaaaacaataagctgctggaagagcagcgcctcagccagcgtacccagttcgatctcgaaatgatgaacgagctaggctactgctcggggattgaaaactactcgcgctatctgtcagggcgcgggccgggcgagccgccgcccacgctgttcgactacctgccggcggatggtctgctggtgattgatgaatcccacgtcacgattccgcaaatcggcggcatgtaccgcggagaccgggcgcgtaaagagacgctggtggagtacggtttccgtctgccgtccgcgctggataaccgtccgatgaagtttgaagagtttgaggccctggcgccgcaaacgatctacgtttcggcaacgccgggcgcctatgagctggataaatccggcgacgaagtcgtcgaccaggttgtccgcccgaccgggctactggatccggtcatcgaagtgcgcccggtagccactcaggtcgacgacctgctgtcggaaattcgcctgcgtaccgcgatcaacgagcgcgtattggtcaccacgctgaccaaacggatggcggaagacttaaccgaatatctggaagagcacggcgagcgggtgcgctacctgcattcggatatcgataccgtcgagcgtatggagattatccgcgatctgcgcctcggcgagtttgacgtgctggtagggatcaacctcctgcgtgaaggtctggatatgccggaagtctcgctggtggcgatcctggacgccgataaagaaggcttcctgcgctctgaacgctcgctgattcagaccattggccgcgcggcgcgcaacatcaacggtaaagcgattctctatggcgataaaattacgccgtcaatggcgaaagcgatcggtgaaaccgaacgtcgccgcgagaagcagcaggcctataacgaagagcacggtattgttccgcaggggctgaataagaaagtggtcgacattctggcgctcggtcagaatattgccaaaacgaaaactaaggggcgcggcaagtctcgctcgccggttgaggcggatgtcgtggcgctcacgccgaaggcgctgcagcagaagatccacgaactggaagcgcagatgatgcagcacgcgcagaatctggagttcgaagaggcggcgcaaattcgcgaccagcttcatcagctgcgcgatctgtttatcgccgcttcgtag

SEQ ID NO: 259149 - DNA, 207 bp, Klebsiella pneumoniae
atgcagggtcaggtgggtcgtctggaagaaggtatgccacgcggtcaggccgaccatatgacggttatgcagaccttccttaaccggcaaatcatcccagttaaaaatcggatagccgggccgaatatcgccgaggcggctaacgccagagcctgtcgcttcaagcccggcgacaacattgccgaactccccgcgctgatgcagtag

SEQ ID NO: 259150 - DNA, 366 bp, Klebsiella pneumoniae
gtggcgctggacaccaatacgctggccaataacgtcgaccttgatgatgcggtggtcagtattgtgcccacccacggggcgattgcgcgcgccgaatttaaggccagcgtcggcatgaagctgctgatgacgctgactcacaacggtaaaccggttccttttggcgccatagcctccgctgtcgacagccagggcagcagcatcgtcgccgataacggccaggtctacctgagcgggatgccgctggcgggcaaggtgcgggcgaaatggggcgaaggtccgaacgccagctgtgaggccagctacagcctgccgccggaaaatcagaaccagacgctgagccagctctccacggagtgccgctaa

SEQ ID NO: 259151 - DNA, 543 bp, Klebsiella pneumoniae
atggcgtattctgggcagcgacacagctgtttagcattcgctttgtggaacgattcgatatcccggtttatcaccctgacgtgcgggtctgggaaatcatcgacgctagcggcgagggtatcgcacttttttatggcgactatttctcgcgggatagcaaaagcggcggggcgtggatgggcgtatttgtcgaacaatccaccctgcgtgcgcagcatccggttatctacaacgtctgtaactatcagaaaccgaaagccgggcacagcgcgttgctttcctgggatgaagttatcactttatttcacgagtttggccatacgctgcacgggctgtttgccagccagaagtacgccagcctgtcgggaaccaatacgccacgcgattttgttgagtttccttcgcagatttatgaacattgggccagcgagccgcaggtctttgcccactatgcgcggcattaccaaaccggcgaggccatgccggcagcgcttcgtgacagcatgttccgcgcggcgaagtttaataaaggctacgatatga

SEQ ID NO: 259152 - DNA, 603 bp, Klebsiella pneumoniae
atgaacataatccaccgccaggccacccgattttaccgccgccagcaggcgctgttggaactggctttgcagcgccgccgcttcggtattcagcgcgcgcagcgccgctttttgctcttccgcaagcgtggctcccgcaagggtaaagcgttgccaggttacctccaggagacgactggactcggcgtcaagggagagcgattctcgccgctcccacaccagcttcacccgctgaaaaagagcatcgttgagccagatatcgttagccagttcagccagctcggcggaaaactgctcatcgagggcctgaatggtcgggttagtctccgcgcctgccatcgcaaaaaagacgttggttacccgcgccagcagctgaccgctctgctccagggcctccagggtattggcaaaatcagccggctgcgggttattaacgatagcggcaatttctttacgctggcgacgaacgccttcgtcgaaggcgggtcggtaatggctgacgtcaatcagatcgaaacgcggcgcctgataaggcagcaggctaacgctgaaaaaaggattgttctccgacatcttcatctcctgaaaacgattatcctgtaa

SEQ ID NO: 259153 - DNA, 168 bp, Klebsiella pneumoniae; identical to SEQ ID NO: 173942

SEQ ID NO: 259154 - DNA, 1638 bp, Klebsiella pneumoniae
atggaaaataagagcggagaagcgaaggtgcaaaaggtgaagaactggtcaccggtgtggatcttcccgatagtgacggcgctaattggcgcctggattcttttttatcactatagccaccaggggccggaagtgaccctgatcacaaccaatgccgaaggcattgaagggggaaagacccgcattaaaagccgcagcgttgacgtcggcgtgattgaaagcgcaacgctgacggacgacctgactcacgtggaggttaaagcccgactgaattctggcatggaaaaactgcttcatcaggattcggttttttgggtggttaagccgcaggttggtcgtgaaggtatcagcggcctcggcacgctattgtccggcgcctatatcgaactgcaaccggggaccaaaggctctgtccctgcgcagtatccgctgctggattcaccgccgctggcctcacccgatgcgaaaggcattcgtattctactggaaagtagcaaagcgggtcagctgtcacccggcgacccggtgcttttccgcggctatcgtgtaggttcggtggaaaccagcaccttcgatgcgcaaaaacgcaatatcacctatcagctgtttattagcgcgcctaacgatcggctggtcactaataacgtgcgtttctggaaggacagcggtattgcggtggatctgaccgcggccggcatgcgcgttgagatgggatcgctgtcgacgctgtttggcggcggcgtcagctttgatatccctgaaggactcccgctaggggaaccggtggcgaataaaaccgaatatcatctgtttgacgatcaacgcagcattcaggactctgtgttcactcaacacattgactacgtgatgttctttaaagattctattcgcggtctgcagcccggcgcgccggttgaattccgcggtatccgtcttgggaccgtaggcaaggtaccattctttattccaggcctgaagcagaacataaacgacgattaccgtatcccggtagaagtgcgaattgagccggaacgcctgatcaatcagttaggcgccgatcctgatattcgtaagcatatcgatgatctaatgaatcgcgggctgcgcggttcgcttaaaaccggcaatctggtgaccggcgcgctgtatatcgatctcgacttctatccgaaagcccctgcgcgcggcaagatgcaggaatttggcggttatccgattattccgaccgtaagcggtggtctggcgcagatccagcagcgcctgatggatgcgctggataagattaataatctgccaattaatccactgctggagcaggcaaccagtacgctggcgcaaagtgaaaaaaccatgcagcacgtacaggcgacgctcgacagtctgaataagatcacctcaagtcagtctatgcagcagctgccgggtgatatgcagagtacgctacgtgaacttaatcgtagtatgcagggcttccagcctggctccgcggcttacaataagatggttgcggatatgcagcgtctcgaccaggtgctgcgcgaactgcagccggtactgaaaacgcttaatgataagagcaatgcgctggtatttgaggcgaaggataaaaaagatccgcagccgaagggagcgaaataa

SEQ ID NO: 259155 - DNA, 1908 bp, Klebsiella pneumoniae
atgtctttaattagtatgcacggcgcctggctctctttcagcgatgcgccgctgctggataatgctgaactgcatatcgaagataacgaacgtgtctgcctggtggggcgcaacggcgcgggtaaatcgaccctgatgaagatcctcaaccgcgaacagggtcttgatgatgggcgcattatctatgagctggatctggttgtggcgcgtttgcagcaagatccgccgcgtgacgtcaccggaaccgtgtatgactttgtggcggaagggattgctgagcaagcagcatacctcaagggttatcacgatgtttcgcagctggtgatgaccgatccgagcgacaagaatctcaatgagctggcgcgtctgcaggaacagttggacaatttagggctgtggcagctcgacagtcgtattaatgaagtgctggaacagctgaatctggatcctaacgccgagctatcatcgctctccggcggctggctgcgtaaagcggccctcggtcgcgcgctggtcagcgggccgcgggtgctgctgctcgatgaaccgaccaaccacctcgatattgaaaccatcgactggctggaaggtttcctgaagatgtttaaaggcaccatcatctttatttcgcatgaccgttccttcattcgcaatatggcgacgcgtattgtcgatctcgatcgcggcaagctggtgacctatccgggtaactacgatcagtatctgctggataaagaagaagcgctgcgcgtggaagagctacagaacgcggagttcgatcgcaagctggcgcaggaagaagtgtggatccgtcaggggatcaaagcgcgccgcacccgtaacgaaggacgcgtgcgggcgttaaaggccatgcgtcgcgaacgcggcgagcgtcgtgaagtgatgggcagcgcgaagatgcaggttgaagaggccgcgcgttcgggcaagattgtgttcgaaatggagaatgttaactaccaggttgatggcaaggtgctggttaaagacttcaccgcccaaatccagcgcggcgacaaaattgcgctgattggcccgaacggctgcggcaaaactacgctgctgaagctaatgctcggtcagctgcaggcggatagcgggcgtattcatgtaggcaccaagctggaagtggcctacttcgaccagcaccgcgcggaactcgacccggacaaaacggtgatggacaacctcgcggaaggtaaacaggaagtgatggtgaacggcaagccgcgccacgtcctgggctatctgcaggattttatgttccatccgaaacgcgcgatgacgccggtgcgtgcgctatcgggcggcgagcgcaaccgtctgctattggcgcgtctgttccttaagcccagtaacctgttgattctcgacgaaccgacaaacgatctggatgtcgaaaccctcgaactgctggaagaacttgtcgacggctatcagggaaccgtgatgctggttagccacgaccgtcagtttgtcgataatacggtaacagagtgttggatctttgaaggcgcagggcaaattggccaatacgttggcggctatcatgacgcccgcggtcagcaagcgcagtacctcgcgcgtaagcagccggtttccaaaaagagtgttgaagttgctcaaccgaaagcagaaagtgtcaaacgtgctgccagcaaactaagctataacctgcagcgcgagctggaacagctgccgcagaagctggaagaactggaagcccagctgcagaatttgcaggagcaggttgccgacccttctttctttggtcagtcgcatgaccatacgcagcaggtactggcgcagctgagtgaagcggagcaggcgctggaagccgccttcgaacgctgggaatatcttgaagggctaaaaaacggcgcataa

SEQ ID NO: 259156 - DNA, 2031 bp, Klebsiella pneumoniae
gtggactgccagttggtccagggcggggtccattttcagggagatacgcggctgctgtatcaaagcctgatgtggagccgactggcttcgcggattatgctgccgctggggcagtgcagcgtatacagcgacctggatctgtatcttggcgtgcaggccattccatggacggagattttcagccaggatgccacttttgccgtgcattttagcgggctgaacgaagagatccgcaacagccagtatggggcgctgaaggttaaagatgccatcgtcgacagctttacgcgtaagaatttgccgcgtcccaacgtcgatcgcgaaaaccccgatctgcgcattaacgtctggctgaataaagagaccgcgcatatctctctggatctcagcggcgagggcctgcacctgcgcggctaccgcgacggtaccggtatggcgccaatcaaagaaaacctggccgcggcgatagtgatgcgttccggctgggctaccggtacgccgctgctcgatcccatgtgcggttccggtacgctgttgattgaagcggcgatgctggcgaccgatcgggcgccgggtttacaccgcggccattggggtttcggcggctgggcgcagcatgatgatgctatctggaaagaggtgaagtccgaagcgcaaacccgcgcccgtcaggggctggcggcgtatgagtcgcgcttttacggttccgacgttgacgcccgggttatcgaacgcgcgcagcgtaacgcccgccgtgccggtattggcgagctggttaccttcgaagtgaaagatgttgcccagctgagcaacccgttgccgaagggcccttacgggacagtgattagcaaccctccatacggcgagcgtctggagagcgagccggcgctgattgccctgcatagcctgctggggcggattatgaaaaaccagtttggcggctggaacctgtcgctgtttagcgcctcgccggatctgctgagctgcctgcagctgcgcgccgataagcagttcaaagcgaaaaacggcccgctcgactgtgtacagaagaattaccaccttgcggaaaacgaaggcggcaaaaccgcgatgctggcggaagatttcgccaaccgcctgcgtaaaaacctgaaaaaatatgagaagtgggcgcgccaggaaggtattgaatgctatcgcctgtatgatgccgacctcccggaatacaacgtcgctattgaccgttacgccgattgggttgtggtgcaggagtatgcgccgccgaaaaccgttgacgcgcataaagcccgtcagcgtctgttcgatattattgctgccaccattgccgtgcttgggattgcgccgaataagctggtgttgaaaacccgcgagcggcagaaaggtaaaaatcagtaccagaaaatgggcgaaaaaggtgaattcattgaggtgcaggagtataacgcgcgtctgtgggttaatctgaccgactatctggataccgggctgttcctcgaccaccgtatcgctcgccgcatgctggggcagatgagtaaaggtaaagacttcctcaatctgttctcctataccggcagcgccagcgttcacgccggccttggcggcgcgcgatccacgaccacggttgatatgtcgcgtacctacctcgaatgggctgagcgtaacctgcgcctcaatggtttaaccggtcgcgcgcatcgcctgatgcaggccgatgtgctgggctggctgcgggagacgaccgaacaattcgacctgatctttatcgatccgcccaccttctccaactcaaagcgtatggatgacgcctttgacgttcagcgcgaccatttgcgtctgatgaccgatttaaaacgtctgctgcgtaaaggcggcacgattatgttctcaaacaacaaacgcggtttccgtatggatcatgacgggctggcgcagctgggcctgaaggcgcaggagattacgcaaaaaacgctgtctcaggactttgcccgcaaccgtcagattcacaactgctggctgattaccgcagcctga

SEQ ID NO: 259157 - DNA, 297 bp, Klebsiella pneumoniae
atgatcgatacggcgttcaaacgattcaaagcgcgccatcgcctcatcaatcttgccgctgtccagctgacgacgaacgtcgcgggaggaacttgcggcctgatggcgcagcatcaacgcctgctgacgggcgcgcgtttcgctcagtttattctccagctcgccaatctcttttttcatccgcgccagcgtttcatcgaccagctgcgcttcattttccaggctagcgatcaggtcggtcagcttctgcttctcgatcagcgccgcacgagccagatcctctttctctttacgtag

SEQ ID NO: 259158 - DNA, 612 bp, Klebsiella pneumoniae
ttgattgattttgcgctgtttcgtaaccgggcctacagcgccgcggtgctgtcgaattttctgctcaacggcgccatcggtaccatgatgattgccagcatctggctccagcaggggcaccatctaagcccgctggagagcggaatgatgacgctcggctacctggtcaccgtgctggcgatgatccgggtgggcgaaaagctgctgcaacgctacggcgcgcgcttgccgatgatcgccggcccggtttttaccgcgcttggcatcctgcttatttcctgcacctttctcgataaatcgacctatatcgtcacggtctttttcagcaacgtgctgtttggctttggactgggctgctacgctactccgtcaacggacaccgcggtggtcaacgctcccgagaataaggtcggggtggcgtcgggaatttataagatgggtagttcgctcggcggggcgatgggtatagcggtgacagcgtcactttttgcgctgtttttaccgctgggaatggccagcgcggcgcagtatgcgctgtggtttaacgccgcgctctgtctcggttcaatgacgctgagcgcgctgctgctgccgcgcatagctcaaagctga

SEQ ID NO: 259159 - DNA, 1239 bp, Klebsiella pneumoniae
  misc_feature (977)..(986): n is a, c, g, or t
gtggatcatcattcaggcgactttcaggttacggttcgcgatatccgccagttgagccagcaggaaaacgagacgctgacgctactatggctgcttgagggcagcgtcgaactccgcgatggcgagtcgggccggaacctgcaggctgatgaactggcgatagtgaatcgccatcgcccctggagcctgcacagcaagacggcgaacgtcgtgatggcgctgtcgctgagcgctggatggctgacccgcctcgacggcgatttttttgcctctgcctaccagagcagcaacgaaacccgcgatgccgaagataccctgcgctacctgatgcgccagctgctggtcctcggtctggtcaatccgcaggcccactaccggctggaggccaaccgctggcttagcgaaattgctcttctgctggcgtcacgcttcagccgtcccctcaccgccctggcgcctcgcggagccgaacgctggagtcagcgaataaatcgggtagtggcgcgaatcgacgccaactatcaacggcgcctgtcgctgcaggagatagccgccgccgaatttgtttctgaggcctggctatcgcgtctgttccgcaaagaggtgggcgtcagctttatgcaatacatcaccgggcttcgcctgcgtaaagctgctgagcagttgacgatgacgcgtaaatcgatacagcagatcgctcagcaacagggctttgccagcagccgggtgatgagcgacctgtttaaacgcgaacacggtctgacgccgcgccagtttcgccagcagcatccgcaaacggcggttgaatcccctcgtccacgcgttcaacgggctgagctgtggcaaccagtgtctatagacaggctatattcccggctcaatgcgccgcagatcaatgggttggatagcccgccgctgcggctcaatccccagcaaacccgtcatcttgatgtgcgccagcgaccggcgcgcggtannnnnnnnnnggtacgccgctgcggcacacgcgcatcgtcgttaccgttcgggaactggatgacctgctgcgcgaggatgtccgccaggagctcgaagaactgcacaactcgctgccgatattcgccatcgacgttcacgatccgtttctcagtagccgcctgttcggtaccggctgggacgatgcgcagctggccgggtatgcgtgctggtataacctgcagcgcatttttagctggctggcgtcgatgggctgggcggtaa

SEQ ID NO: 259160 - DNA, 144 bp, Klebsiella pneumoniae
atgcagttgctcatcatgttcgctcaggagcaaaacctttgtccctggcgccacgttgtatcggccgactggttctggatcataggcgatatcacgctcagcttctttggcaaggtaaaccagatattcttcgcgtgtatgtga

SEQ ID NO: 259161 - DNA, 414 bp, Klebsiella pneumoniae
atggactgtattgctgtcaaagtccgtcagaatggcagcgtaatcaacaaagccctcttcctggcgctgggtatcaacatcgaaggccagaaagaattactgggtatgaggttggccgaaaatgaaggcgcaaagttctggctgagtatgctgacagagcttaaaaatcacggtcttcgggacatcctgattgcctgcgaggacggtctgaagggtttcccggatgcgataaacagcgtctacccgcaggctcacatccagctgtgcatcatccatatggtgcgtaacagcctgaaatacgtgtcctggaaggactgcaaagccctcaccagcgggctaaaatctttatcaggccccgatcgaagaggcggcgctgatggcgctggatgcattcacagaagcatgggaggataa

SEQ ID NO: 259162 - DNA, 315 bp, Klebsiella pneumoniae
atggcgctggatgcattcacagaagcatgggaggataagtatccccaaatcagcaaaagctggcgtgcacagtgggaaaacctgaacacgttcttcggctacccaccggatatccgcaaggccatctacaccacgaatgctgtagaatcgctgaacagcgttatccgggcggcgataaagaaacgcaaagtattcccgacggatgactcggtacggaaagttgtttatctggtgatcaaaaatgcatcaaaaaatggagtataccgatccagaacttatgactgcgatgagtcgttttattatcgagttcggtga

SEQ ID NO: 259163 - DNA, 984 bp, Klebsiella pneumoniae
ttgcgtttctttatcgccgcccggatactgcggttgcaggaagccttaaagagtaacgaggcaaaagagcagacggcacgtgtgattggcgcattgaccggggcactcattacgcacacacccgaaggggtatacagcggtgcagacagtgcccagaacgtctatcgctacaacatgacggaacatatgctgcagcagtatgccctggataatcagcgggatattctggccgcgagtaaaggagatgcggcggcggcgaagcgtgttcaggcccggagagaagcggcgattatcgtggcagcggccagcggtgggtgtatggcactgacagcaggtggtatgactctgattggtgctgcttccgagctggtgctggctgcaaggctggttatcgccggttgtaaaacaaatcctgcgctctgcctgaatcaggcgggtatttatgcggcagatattgtggcaccagaagcacttatcggtaccggagccattaccacttccagtacgctgattatcgggaaaaccgaagatagcctgaagaagctttcgcagcagttggtgaaggtctatgatgaactaaatataacaaaaacattaaatattcaatctgttgccagctttatcaaaggagaaacagcctccggggctaatcttactacgaaaacggcagattatgtacgtgatattcagaaagttaatactagccagttagtcaagcttttcgataaatcacagccagatggtaatattaatatttttggcaagcccatagcgcaagtgttaggcgatggaggaagtaacaagaaaggcacaacaaaagttttggcttcagaatcacttaatgataaagatatctatacttatgcacaatcacttgctggaagcacacctcttatcgaggtgagaaacgcaaaaggtgttgtgtactacgctaagtatgacgggaaaattataaatctgagaaattattcagttagtgcgtaa

SEQ ID NO: 259164 - DNA, 306 bp, Klebsiella pneumoniae
atgttatggaaaaatattgacccagagagtgtggatggtgcctataaactaacctatcaggaagaaaaagctctatatatctggttcatttcacgcttactgaaggatggtgacattaaactcgctcgctatggaaaatttctcccaggaagcattgaaaaacagatcgatgtttttgaaatggcatttcccaaaactgaggatgaaatggattgtgatgcatttgaaggattttggtttttaagtgaaaactgccccgcaggtattgtctggattcacgaaaatggctatcaggattggacttag

SEQ ID NO: 259165 - DNA, 408 bp, Klebsiella pneumoniae
atgctgggtttaatgcagcgtacattccgtttctgctccaaccaaggggttattaacgtaaactctatagaaagcttaagacgcgctgatgtcgggctgactgctgcggtaaaagaacgctggttaagtgatgaggaaatcaaaactgtatggaatgctctgccggagatgaagcacaggcagcagctgattatgacgtttcttatcatgaccggttgccatagtactgagataagaacggctaaatgggaatggtttgatttccaggagggaacctggactattccagcaagtgattacaaaaccggtaagtcagaaaggcgggcgctacctgaagcggtggtcaaaatgctgaagacagaaaaagaaacatccgtctcaaattatgttgtgacactgtcacgataa

SEQ ID NO: 259166 - DNA, 588 bp, Klebsiella pneumoniae
  misc_feature (531)..(540): n is a, c, g, or t
atgccaataaacgaaaatgcccctcggccgcaggagttcgctgcggtcgacctcggttcgaacagttttcatatggtgatcgcccgtgtcgttgacggagcaatgcagatcatcggtcgtctgaaacagcgcgtacatctggccgacggcctggatgaaaactctgtactgagcgaagaggctattgcgcgcgggctgaactgcctgtcgctattcgccgagcgcctgcagggttttgacccatccagcgtctgcatcgtcggcacgcacacgctgcgccaggcgacaaacgccgcagaattcctcaagcgcgcggagcaggtcatcccctacccgattgaaatcatccccggcaatgaagaagcgcgtctgatttttatgggcgttgagcatacgcagccggaacgaggccgtaagctggtcatcgatatcggcggcggctctaccgagctggttatcggcgaggatttcgaacctcgcctggtggaaagccgccgtatgggctgcgtgagcttctctcaggcctatttnnnnnnnnnnaggatttcgaacctcgcctggtggaaagccgccgtatgggctgcgtga

SEQ ID NO: 259167 - DNA, 897 bp, Klebsiella pneumoniae
atgatgacgctcaatctgggaaatctggcgacgttccgcctggtcatacagcgcgggagcttctccgctgcggcagacgtactgggattgtcgcagcctgcagtaagtctgaaggtacgtcagctagagcaatttctacagaccaggttaattgagcgaactggacgaggcatcaaagcaacggcggccggaatcgcattgctggcgcatagtgagcagattgaactggcggtgagcgcggcggtgcaatcggtgagcgagttcaattgtgaaattagcggctcgataacgctgggtaccggagcaaccgcctgtatccatcttttacccccgctgttgctgaaactgcgtgagcagcatccactgctgaccgttggcgtcaccaccggcaatacgctggatattgtgcgggctgttgaagaaaatcggcttgatttagggctggttacgctccctgcaatcgggcgtaatctggcggtgacgccggttatagacgaagagtttgtctgtattcttgccagcaaccaggaggcattaccgccagccgtgaccccagaggttttgcaaactctgccgttaattgcatttgaatcgggaagcggaacccgggatctgatcgatggctggtttcttgccgatgggcgggcggtagcgccagtcatgcagttaggcagcattgaggcgattaagcgcatggtacgtgcggggttggggttcagcattgtgccgagaatggcggtagagcatccgcaggatcgtattggcttaaatgttcaatcactgactccgctgctgcatcgtcagttaggcataatcatgcggcaggataaaattatcagcaaaggtattgctgagatcctgcgtttactgcagaagttggagaatggtcaggcgtag

SEQ ID NO: 259168 - DNA, 378 bp, Klebsiella pneumoniae
atgaaaagctttttaactctcctgatgctgtttctttttcccatagcctgtaccgctgaatcacaacctgttgaaccgcgcgttaagcctgcttatccagcgaaagccgcaaaaaaagggataccgggtcaggttaaagcgcaatttgacgttgacgagaatgggcgggtgactaacgttcagttattaagctccgatccctccggaatgtttgataatgaagtcagggccgcaatgggaaaatggcgatacgttaaagggaagccttccagcaataacatcattaccattcatttcacgccggggccgtgttccgttgaggtgccagcgccaaatcagcccggcagtattcaaagcggggacgtcccttttcgctaa

SEQ ID NO: 259169 - DNA, 756 bp, Klebsiella pneumoniae
gtgcgagtgcaggcgttccacctccagcagaatggcgcggatcatctgcgcccgctccggcaccacgatgcccatcgcgttctccaccgaggtggtgtaagcggtgctgtgggcgaagccgcagatgccgcacacccggtccgacaggaaggtcacttcgttataacccatgcgggtttccgccagcttttccatcccgcgatggacgtagaacaggcggtagtcggcgtcgataatgttctcgccgtcaacgaacaggcggaagtggccaggttcatcagaggtgacgtgcagcgggccaatcggcaccacgttgtttttcttgctgccgagctcgttaataaactcgtaggtttcggcgtcggtggtcggcgccggacgctggcgataatccatgctgtctttgcgcagcggatagagttcgtccggccagtcgtccggcagcaccagccggcgttcgtccggcaggccgaccggcaccaggccgtacatatcacgcacttcgcgctcgccccataccgccgccgggacgcgcggcgtcaccgacgggtattccggtttgttggcgtccacttccacgcgcacggtgatccagcatttggtgccctgctccatcgacagcacgtaatagaccgcgtagtggccgttgagcttacgttcatcgttgccgaacagcaccgacagccagccgccctgctggtagtagagaaactccaccacttccggcaggtagttgaccttcacggtgatggttaa

SEQ ID NO: 259170 - DNA, 1233 bp, Klebsiella pneumoniae
atgggaattaacgaaatcatcatgtacatcatgatgttctttatgctgattgccgccgtggacaggatcctgtcgcagtttggcggctcggcgcgctttctcggcaagtttggtaaaagcattgagggctccggcggccagttcgaagaggggtttatggcgatgggggcgctgggcctggcgatggtcgggatgaccgcgctggcgccggtactggcgcacctgctcgggccggtgattattccgctgtatgaaatgctcggcgccaacccgtcgatgtttgccggcacgctgctggcctgcgatatgggcggcttcttcctcgccaaagagctggcgggcggcgacgtggcggcgtggctctattccggcctgatcctcggggcgatgatggggccgacgctggtgttctccattccggtcgcgctcggcatcatcgaaccctctgaccgccgctacctggcgctgggcgtgctggccgggatcgttacgattccgatcggctgtatcgccggcggcctggtggccatgtactccggcgtggagattaacggtcagccggtagagtttaccttcgcgctgatcctgatgaatatgatcccggtgcttatcgtcgcggtgctggtcgcgctggggctgaagtttattccggaaaaaatgatcaacggcttccagatcttcgccaaatttctggtggcgctgatcaccatcggcctggcggcagcggtcatcaagttcctgctgggctgggatctgatcccggggcttgatccgatctttatggctcccggcgaccagcccggcgaggtgatgcgcgccattgaagtcattggctcgatatcctgcgtgctgctcggcgcttatccgatggtgctgctgctgacccgctggtttgaaaagccgctgatgcgcgtcggtaatctgctgaaaatcaataatatggccgccggaggcatggtggcgacgctggccaacaacatcccgatgttcggcatgatgaaacagatggatactcgcggcaaagtcattaactgcgctttctccgtctccgccgctttcgcgctgggcgaccatttaggcttcgccgccgccaacatgaacgccatgatcttcccgatgatcgttggcaagctgatcggcggcattaccgccattggcgtggcgatgctgctggtgccgaaagatgaaaacgcaccggcggcggcgacaaccgaagcggagacgcaatcgtga

SEQ ID NO: 259171 - DNA, 624 bp, Klebsiella pneumoniae
atgtctgaaacaacaatgcccaaatatactgccgcccggatcaccagacccatactggcgagctacctttaccagtcgctggagcaggtctgcgaactggcctccggcttaaaaatactccagctgccggtcaacgacaccacgagaaccgcgacggtgctgacagagcccgtctacgcggccgccgggttacgccttgcccgtcagcaacctctggcacaaaacccgctctgcgatgatgttctgcggcgttttcgtcatgcgccagccctgacggcgaatctgcccgacctgattgagaccgtgcgcagcgtagcgctgccggtctggtcacgcctgcgccgcgacggacacagtgacaatatcgccgttcgccagacgctactgcacattctcgcctggagaagcaagtcgccatggctgcaggatcaggcgcagagaatactctggcagggtggcgtgctgggtgaaaggggggaccgcgtgctagcctccctcgacgatgaagcggcccaccgatgcatcgggttctgcgggctgagtgaactactgaccaccaccggttttttagtccactttccggcagggcctctgttttctgatgaaaatagtgagagtcattaa

SEQ ID NO: 259172 - DNA, 246 bp, Klebsiella pneumoniae
atggcccaagcgggagaagagcaggatgttcggccgctattctatgagctggcacagcgggtgccgcaacatggaggtgtactgatgactctggcagaaaagtggcttgaggaaggcataaaagagggcaaacgcgctgcgctacttaacgtcgcaaaggccatgctcgagcggggcattgatactactgcggtgatggaaatgaccggtctcacgtccgacgatttgcagcagctccatcattaa

SEQ ID NO: 259173 - DNA, 1917 bp, Klebsiella pneumoniae
atgggtaaaattattggtatcgacctgggtactaccaactcttgtgtagcgattatggatggcactactgcacgcgtgctggagaacgccgaaggcgatcgcaccacgccttctatcattgcctatacccaggatggtgaaactctggttggtcagccggctaaacgtcaggcagtgacaaacccgcaaaacaccctgtttgcgattaaacgcctgattggccgccgcttccaggacgaagaagtccagcgtgacgtttctatcatgccgtacaaaatcgtggccgcagataacggcgacgcatggcttgatgtgaaaggcaccaaaaccgcaccgccgcagatctctgctgaagtgctgaagaaaatgaagaaaacggctgaagattacctgggcgaaccggtaactgaagcggtaatcaccgtaccagcttacttcaacgatgctcagcgtcaggcaaccaaagacgccggccgtatcgcaggtctggaagtcaaacgtatcatcaacgaaccgacagccgctgcgctggcttacggtctggataaagaagtcggcaaccgtactattgcggtatacgaccttggtggtggtactttcgatatctccattatcgaaatcgacgaagttgacggtgaaaaaaccttcgaagttctggcgaccaacggtgatacccacctgggcggcgaagacttcgacacccgtctgatcaactacctcgttgacgagtttaagaaagatcagggcatcgacctgcgtaacgacccgctggcgatgcagcgcctgaaagaagccgctgagaaagcgaagattgaactctcttctgctcagcagaccgacgtgaatctgccgtacatcaccgcagatgccaccggtccgaaacacatgaacattaaagtgacccgtgcgaaactggaaagcctggtagaagatctggttaaccgttccatcgagccgctgaaagttgctctgcaggatgctggcctgtccgtgtctgacatcaacgacgttattctcgttggcggccagactcgtatgccaatggtgcagaagaaagttgctgagttctttggtaaagagccgcgtaaagacgttaacccggacgaagccgtggccattggcgcagctgtccagggcggtgttctgaccggtgaagtaaaagacgtactgctgctggacgttaccccgctttctctgggtatcgaaaccatgggcggcgtgatgactgcgctgatcaacaagaacaccactatcccgactaagcacagccaggtgttctctactgcggaagacaaccagtctgcggtaaccatccatgtgctgcagggtgagcgtaaacgcgcatctgataacaaatctctgggtcagttcaacctggatgggattaacccggcgccgcgcggcatgccgcagatcgaagtcaccttcgatattgacgccgacggtatcctgcacgtttccgcgaaagacaaaaacagcggtaaagagcaaaagatcaccatcaaagcctcttctggcctgaacgaagaagagatccagaaaatggttcgtgaagcagaagctaacgcggaatctgaccgtaagtttgaagaactggttcagacccgtaaccagggtgaccatctgctgcacagcacccgtaagcaggttgaagaagcgggcgataaactgccggctgacgataaaaccgctatcgagtctgcattgaccgcgctggaaacttccctgaaaggtgaagataaagccgatattgaagcgaaaatgcaggcgctggcccaggcttcccagaagctgatggaaatcgctcagcagcagcacgcccagcagcaggctggcggcgctgacgcttccgagagcaacgcgaaggacgacgatgttgttgacgctgagttcgaagaagtgaaagacaaaaaataa

SEQ ID NO: 259174 - DNA, 600 bp, Klebsiella pneumoniae
  misc_feature (582)..(588): n is a, c, g, or t
atgcaattagcgggtcaaatcatcgaaaaatttcttcacgccatcgaagaaacttttggagcgcgggctattcttttcacccgttgggccaccaaagctttcctgcagatctttcagcagctgcttttgtttatcgttcagaccaaccggcgtttcgacaaccacgcggcacagcagatcgccctgcgcgccgccgcgaacggacttcacgcctttaccgcgcatccggaacagcttacctgtctgcgtctcgcccggtattttaagatttacacgaccgtccagcgtcgggacttcgatttcaccgccgagagcagccatagtgaagttgatcggtacttcacagtacagattatttccttcacgctcgaaaatggcgtgctgcttaacctgaacctgaacatacagatcgcctgccggtgcgccatgctcgccggcttcaccttcacctgccagacgaatacggtcgccggtatcaacgcccgccgggattttaaccgacagcgttttcgttttctcgacgcggccatgaccgtgacatttattgcacggatctttgatcagcgtaccgcgtccctgacnnnnnnnacggatctttga

SEQ ID NO: 259175 - DNA, 1098 bp, Klebsiella pneumoniae
atgctaaaagttattcaatctccagccaaatatctccagggaccggatgcatccacgttgtttggcgaatacgctaaaaacctggcggacagctttttcgtgattgccgatgacttcgtgatgaagctggcgggtgagaaagtgttgaacggtttgcatagccacaatatcagctgccatgcggagcgcttcaacggcgagtgcagccacgttgagatcaatcgcctgatcgccattctgaagcagcacggctgccgcggcgtggtgggcatcggcggcggcaagacgctcgatacggcgaaagcgataggctattaccagaagctgccggtggtggtgatcccgacgattgcctccaccgatgcgccaaccagcgcgttgtcggttatttataccgaagccggtgaatttgaagagtatcttatttacccgaaaaatccggacatggtggtgatggatacgacgattatcgctaaagccccggtacgcctgctggtggccgggatgggcgatgcgctttcaacctggtttgaagccagggcctgctatgacgccagagccaccagcatggccggcggccagtcgacggcggcggcgctgagcctggcgcgcctgtgctatgatacgctgctggcggaaggcgaaaaggcccgccttgccgctcaggccggagtggtgaccgatgcgctcgaacgcatcgttgaagcgaatacctaccttagcggaatcggctttgaaagcagcggcctggccgccgcgcacgccattcacaatggtttcaccatcctcgaagagtgccaccacctgtaccatggcgagaaagtcgcgtttggtaccctggcgcagctggtgctgcaaaatagcccgatggaagagatcgaaacggtgctgaacttctgccataccgtcggcctgccggtcacgctggcgcaaatgggcgttaaagagggcatcgacgagaaaattcaggcggtagcaaaagcgacctgtgcggaaggcgaaaccatccataacatgccgttcccggtcagcgcgcagagcgtgcatgcggcaattctgaccgccgacctgcttggacagcagtggctggcgcgttaa

SEQ ID NO: 259176 - DNA, 633 bp, Klebsiella pneumoniae
atgtcattaagcagaacgcaaatcgtagactggctctatcgctgcggcgatatcttcaccaaagagagcgattttttgaccggtctggaccgggagatcggcgatgccgaccacggcctgaatatgcatcgtggttttagcaaggtggtggaaaagctgccttcgattgccgataaagacattggtttcattcttaaaaataccggcatgacgctgctgtccaacgtcggtggggccagcggcccgctgttcggcaccttctttatccgcgccgctcaggtgacccaggcccatcagagtctgaccctggacgagctttatcaagccatccgcgaaggcgcggaaggcgtggtgaatcgcggcaaagccgagccgggcgataaaaccatgtgcgacgtctggctgccggtagtggaatcgctgcgccagtccagcgaacagcacctgtcgatccaaagcgctcttgatgctgcctgcgaacaggcgcaagccgccgtccaggccaccatcgccatgcaggctcgcaaagggcgggccagctacctgggcgaacgcagcatcgggcaccaggatccgggcgcgacctcggtaatgttgatggttcagatgctggccgcagcggccaaagagtaa

SEQ ID NO: 259177 - DNA, 945 bp, Klebsiella pneumoniae
atggcagcttttgacgccgtctttgtcggcctgactattctggatatcgccggtcgcccggtgatcgacatcccgccgcgcggcggggtggcctttatcgaacaaattcgtctgaaccccgccggaaccgccgccggagccaatattaatgccgctaagctgggcattcgtaccgccgcggtggcctgcctcggcaaagatgaaaaggccgattttatactcgccagctatgcacggctgggaatcgactgttcgctggtccagcgtactgcgcagcaggaaacgtcggcgacgatcctccctatccgccccaacggcgagcgcccggcgctacactgccggggcgcttccgatacgctttttatccgcgaagaggagtttgatgccgtcctcgactgccgcttcctgcaccacggcggcaccggcctgctggcggcgatggatcgcgggcagagcgcccttctgctgcaagcggcgaaggctcgcggcgtcaccaccagcttcgatttgattgcccccaatgaacataccctggaactgctgcgcccgctgctgccgtcggtggactactttatgccctccctggaagaagcggcgtatctctccggggagacccagccggaagcgatcgcccgcttcttttttgcccttggcgtcgggacctgtattttgaaggacggcgagaacggttcctggctgctgacccgcaacggcgccgttgaacatatcccggcgtaccgggtcgatgccgtggataccaccggctgcggcgacagctactgcggcggctttattgccgcgctggcccgcgggctaagcgtcagaaaggcatgcgaggtggcttccgccgtcgccgcgctggtggcgaccgggatggggtcggatgcaggggtggtggactggccgcatacccggcagtttatggcggcaaaccggcgcggataa

SEQ ID NO: 259178 - DNA, 1065 bp, Klebsiella pneumoniae
atgaaaaagataacgctttcactcatcgcgctgggattgtttaacgcgacggcagcttttgctgaaaccccggcgccgcttccgacagcgatcgccgaccatagcgggccgattcgcattgcggtgatccgcaacctgggctccgacgataacaccacccagtttgtctccggagcggtccaggagggcaaaaagctcggctttaaaatcagtaccttcctcagcaacggtgatgacgccaaattccaggacttcgttaaccaggcgattagccagaaatacgacggcattattctttctcagggacgcgatccctacgccaccgcgctggtgaaaaaagcggtggacgccgggatcaaagtctcggtcttcgataccgcggtaaacggccagatcccgggcgtcaccgtcacccagcaggatgacgcttccctgaccgggctctcctttggccagctggtgaaagatttcaacggcaaagccaatatcgtcaaactgtgggtcgcggggttcccgccgatggagcgtcgccaggcggcctaccagacgctgcttaaacaaaatcccggtatcaaagagctggaatcgatcggcgccgtctcatccgatgtgcagggcgatacggccaacaaggttggcgcgatcttagcgaaatacccgaaaggtaaaattgatgctatctggggaacctgggacgcgttcagccagggcgcttataaagcgctgaaagagaacggtcgcagtgagatcaaactctacagcatcgatatttctaaccaggatctgcagctgatgcgcgaatccggcagtccgtggaaggtgagcgtagcggtggatccgaagcttatcggcgccactaacgtgcgtctgatcgccaataagattgccggcgaaccaacccctgcaacctacgactttaaagcggcggcgattccgcaggcgctgctggcggcgcagccgggagcggtcaacgtcgcttcgctgggtaaaattattccaggctggggccagactgaagactttatcgccccgtggttcgccactctcgaagcgaaaaacaaataa

SEQ ID NO: 259179 - DNA, 303 bp, Klebsiella pneumoniae
atgatgaatgctcagcgcctgctcgcgcagatgcgtcagccgccctgcgctggcgcgcgcctcctcagcgaaacgctgggcgacgtagcggccaaactgaccgcgctgcggataaaccgcgccatcctccagcagcgcctgcggatcttctgcaaaagcaggctggctgcggtaccagcgatcgaacgcgccctcctcttcaccggcaagctgcattcgcgcggcgggaacgttgattctgtggctcggttcggtcgtggagtaggccacgcccgcgccgggcacctcgcgcggctccagtag

SEQ ID NO: 259180 - DNA, 1023 bp, Klebsiella pneumoniae
atgaagaaaatgttacgtttcatcctgctattggtggtggtgctgggcatcgccgccggcgtcggtatgtggaaagttcgccagctggcggacagcaaattactgattaaagaagagaccatctttacccttgagaccggcacaggtcgcctggcgcttgggcagcagctctacagcgataaagtgatcaaccgacctcgggtatttcagtggctgctgcgcattgagcctgagctatcccactttaaagccggaacctatcgcttcacgcctgagatgacggtacgtcaaatgctgcagctgttagccagcggcaaagaggcccagtttccgctacgcttcgtggaagggatgcgggtgagcgactacctgcgccagctgcgcgatgcgccctacgtaaagcatacgctggcggacgatcgctatgaaaccgtcgcaaaggctctcgatctggagcatcccgattgggtcgaaggatggttctggccggatacctggatgtataccgccaacaccagcgatgtggcgatccttaagcgcgcgcatcagaagatggttgccgcggtcgataaagcctgggaagggcggatggataatctgccgtacaaagataaaaatcagctgctgaccatggcctcgatcattgagaaagagaccgcagtggccgaagagcgcgaccgcgtagcctcggtgtttatcaaccgcttacgtatcggcatgcgtctgcaaaccgatccgaccgtgatttacggcatgggtgcgggttataatggtaagttgacgcgtaaagacctggaaaccccaaccgcttacaacacctatgtcattaacggcatgccgcccggcccgatagccgcgccgggggaagcctcgctcaacgccgccgcgcatccggcaaaaacgccgtacctctattttgtcgcggacgggaagggcggacatacgtttaataccaacctgatcggccataaccgctcggttcaggactatctgaaagtacttaaggaaaaaaatgcgcagtaa

SEQ ID NO: 259181 - DNA, 1434 bp, Klebsiella pneumoniae
atgtttaagaatgcatttgctaacctgcagaaggtcggtaaatcgctgatgctgccggtatccgtactgcctatcgcaggtatcctgctgggcgtcggttccgcaaacttcagctggctgccagccgtagtttcccacgtcatggcagaagcgggcggttcagtcttcgctaacatgccgctgatttttgctatcggtgtcgcacttggcttcaccaataacgacggcgtatccgctctggcatcggtcgtcgcttacggcatcatggtgaaaaccatgtccgtggttgcgcctctggttctgcatttacctgctgaagagattgcggctaaacaccttgcagataccggcgtactcgggggtatcatctcgggtgccatcgcagcgtacatgttcaaccgcttctatcgcatcaagctgcctgaatatctgggcttctttgcgggcaagcgttttgtgccaattatctccggtctggcagcgattttcacgggcgtgatcctgtcctttatctggccgccgatcggtactgccatccagacgttctcccagtgggctgcttaccagaacccggttgtcgcgttcggtatctacggcttcattgaacgttgcctggtgccgtttggtctgcaccatatctggaacgtacctttccagatgcagattggcgaatacaccaacgcagcaggtcaggtcttccacggtgatattccgcgctacatggcaggcgacccaacggcgggcaaactgtccggcggcttcctgttcaaaatgtacggtctgccggctgccgctatcgctatctggcactctgctaagccagaaaaccgcgcgaaagtgggcggtatcatgatctccgcagcgctgacctcgttcctgaccggtatcaccgagccgatcgagttctctttcatgttcgttgcgccgatcctgtacattatccacgcgattctggcgggcctggccttcccgatctgtatcctgctgggtatgcgtgacgggacgtcgttctctcacggcctgatcgactttatcgttctctccggcaacagcagcaagctgtggctgttcccgatcgtcggtatctgctacgcgatcgtgtactacgtggtcttccgcgtgctgattaaagcgctggatctgaaaaccccgggtcgcgaagatgcaaccgaagacagcaaagctggcgcgaccagcgaaatggctccggcactgatcgctgctttcggcggtaaagagaacattactaaccttgacgcatgtatcactcgtctgcgcgtgagcgtggcggatgtggcgaaagttgatcaggctggcctgaaaaaactgggcgccgcaggcgtggttgttgcaggttcgggcgttcaggctattttcggtactaaatccgataacctgaaaactgaaatggatgaatacatccgcaacagctaa

SEQ ID NO: 259182 - DNA, 426 bp, Klebsiella pneumoniae
gtgcgcggagccgctggcgggacgggggtcaacgtcgctgtaaataacgtgggcgggcataatagcatccagacgctgctcgccgatcagcgtgcggaacacggccatatctttcgcgcgaatttccgcttccgcacgcggatcgcgcggcgtctctttgtgagagtctgccgtcaccgccccatgccctgggaagtgcttgccggtggttttcatacccgcgccgtgcatgccatcgatgaaatggcgagctatcgccagcgccttgtcggggtcctgatgataagaacgctcgccaatagcggcgctgatatgtccgacatccagcaccggcgcaaagctgatatcaatatccatagcgatcatttcgctggccatcagccaaccggcttctgcggccagccggccgccctcttccatgcctag

SEQ ID NO: 259183 - DNA, 972 bp, Klebsiella pneumoniae
atgctgcatacactcttgcagcgctttgcggatttcgaccggatcttcgccattccggttgccgttccagcggttcagacgttccagagaagcgtcgatctcgtcatccgtcgcatcgcgcagtacgccctgctcggcgatagactcttgcagatgcagacctaccgcgcggccaaagaccaccaggtcaagcagcgagttgccgcccagacggtttgcgccgtgtaccgatacgcaggcgatttcgcctaccgcaaacagccccggaatcaccacgtcttcgccctgctcgttgacggtcagcgcctggccgctcactttggtcggaataccgcccatcatatagtggcaggttggaatgaccggaatcggctctttcaccgggtcgacgtgggcaaaggtacgggagagttccaggatacccggcaggcgggactcaagcacttctttaccgaggtgatcgagtttcagcttggcgtgcgggccccacggaccgtcgcagccgcgaccttcacggatttcgatcatgatggaacgcgccaccacgtcgcgacccgccaggtctttcgcgttcggcgcataacgctccataaagcgctcgccgtgtttattcagcagatagccgccttcgccgcggcagccttcggtcaccagaacccccgccccggcaataccggtcgggtggaactgccacatttccatatcctgtaccggaacgccggcgcggatcgccatgccaacgccgtcgccggtattgatatgcgcattggtggtggactgataaatacggccggcgccgccggtcgccagcacggtggcgcgggctttgaagtaaaccacttcaccggtctcgatgcacagggcggtacagccgaccaccgcgccatcggcgtttttcaccagatccagcgcgtaccactcggagaaaatcgtggtgtgatttttcaggttctgctgatagagagtatgtag

SEQ ID NO: 259184 - DNA, 585 bp, Klebsiella pneumoniae
  misc_feature (559)..(568): n is a, c, g, or t
atgaattttcagcaaacctggctgtactggctggcgggcgtcgttctgctggtggtggcggtgatgtcatggcgcgataaggctaatccgcgcaggctgacaaccggtctgttctggggtctgtacggcgtggtctttctgttcggcgactggacctatgcgctggtcggcgacaagcgcctcgtcaatatcggcgttggcgtggtggtcgtggtgctggcgctgatcgccggatttggcggcgtgcgtctcggtcgttatcaccagcgctcgcaggaagaacgcagcgccagcgccgcgcgcctcggcaatcggctgtttttcccggcgctggcgatcccggtagtgacggtgatcggcgtcctgctgtttaataatttgccctcgctgcaggtcgtcatttttggcccgggcaatcacgccacgctgattacgctgttttcaatgaccgcgggcacgttgattggtctggtgatggctatccgcatgacccatgaaacggcggttcagccgttacaggaagctcgccgtctgctggattctgtgggctgggcgtttnnnnnnnnnngaccgtacatcacgtga

SEQ ID NO: 259185 - DNA, 216 bp, Klebsiella pneumoniae
atgctggtcggccgcttcgcggtgattatcccggtgatggcgattgccggttcgctggtgacgaagaaaattcagcccgccggcagcggcacgctcgccacccatgacgcgctgtttatcggcctgctgatcggcaccgtactgttggtcggcgccctgacctttattcccgcgctggcgctcggcccgctggcagaacatttttccttactttaa

SEQ ID NO: 259186 - DNA, 4071 bp, Klebsiella pneumoniae
atgacgcggcaactggtgattattggtaacggtatggcggccacgcgcctggcgcaggcattggtagaacgggatgcgcagcggtttagcatcaccattatcggcgatgaacccggccaggcctataaccgcattcagctgtcgcctgtgctgggcgcagagaaaacagcaggcgagacgagactgctgcccgagacgtggtatcaacggcataacgttaaggtacgcgccggcgagacggttacggcggtggatattcatgcccgtacgctgcaaaccaccgcaggggtagttagctgggatgaactggtgttcgccacaggctcgctaccgtttgtgccgccgttaccgggcattacgcagccgcacgtttttgctttccgcactctggcggacgtcgagggcatcctggccatcgacggcccggcggtggttatcggcgggggcgtactcggcgtagaggccgccgcggcgctgcggcgttatggtgacagtgtcactttacttcatcgcggaagcgggctgatggagcagcaaatcgatgcttttgccggcgagcagctgcaaatgctgcttgccgatcgcgggattcgctgcgtgatggagagccgtatcgccgctattgatgcacatcaggtgcggctggaggacggccgcgcgtttgccgcctcgcgggtggtgctggcgaccggcgtgcagccgaacaaacggctggccgagcgcagcgggctggcctgcgcccgcggaatcctcgttgaccgccagctggcaaccgtgcagccgggcgtcagcgccatcggggagtgctgtgaaatcgacggtcggacctgggggctggtggcgccatgcctgcgccaggcggaggtgctggctgcccgcctgtgcgctaccccaggcgaagatttttgctggcaggatagcggcactcgtctgaaggtcagcggtatcgagttgttcagcgcgggcgagctgcgggccgcagaacaggatgaaagctgtatcagctgggacccgctggaccgccactaccggcgcctgctgctgcgcgacggtaagctgcgcggcgtactgctgctgggcgattgcagcagcgctgcgcccctcaccgctctgctgggggcggatgccccggcgccggcagagtggctcttcgatccctcttcaacgatgcagccgcgcgctgcgggaaaaattatgatgacaaaacctgttttagtgctggtcggacacggtatggtcggccaccattttcttgagcaatgcgtcgaccgtcgccttcatcaacggtatcggattgtggtgttctgcgaggaacgctatgccgcctacgaccgggttcatctgactgaatatttcaccggacgcagcgcagaatcgctgtcgctggttgagggcgattttttcgctcagcacggtattgagctgcgcctgagcgaatcggtcgccagcatcgaccgcgaagcgcgggtggtgcgcgatgccttcggccacgaaacccactgggataagctggtgctggcgacggggtcttacccgtttgttccgccggtgccgggtcatcatctcgagggctgttttgtttatcgtacgcttgacgacctcgaccagattgccgcccgtgccgcaaccgcccgacggggtgtggttatcggcggcgggctgctcgggctggaagcggccaacgcgctgaagcaattggggctggaaactcacgttgtcgagtttgcgccgaacctgatggcggtgcagctggacaacggcggcgcggcaatgctgcgagaaaaaatcagtcaactgggcgtcggggtgcataccagcaaggcgacgacggagattgttcgcaacgaacaggggctacagctgaactttgccgacggtagctcgctggcggccgatatgctggtgttctccgccggtattcgcccgcaggacgggctggcgcgcagcggcgggctggaagtgggcgaacgcggcgggatttgtatcgacaaccagtgtcgtacctccgacccggaggtgctggcaatcggcgaatgtgccctgtgggagaacaaaatttatggtctggtggcgcctggctatcagatggcgcgcgccgcagcggctaccctggcgggcgaggaaggctgctttagcggcgcggatatgagcactaagctgaagctgctgggcgttgatgtcgcctcgttcggcgacgcccaggggcgcaccccgggctgtcagagctatcagtggaccgatgggccgcagcagatctacaaaaaaattgtagtcagcgcggagggcaacaaactgctcggcggggtgctggtcggggatgccagcgactatgccacgctgctacagatgatgcttaacggtatggctttacccaatcacccggaaagcctgatccttccggcgctggagggcagcgcgccaaaagcgctcggcgtggcggcgttgccggacagcgcgcagatttgctcctgtcacaacgtcagcaaaggcgatatctgccaggcggtgaacggcggcgcgggcgatatggcggcgataaaaagctgcaccaaagcggcgaccggctgcggcggctgtagcgcgctggtaaaacaggtgatggagtatcagtttgccgagcagggcgttgaagtcaaaaaggatatctgcgagcattttgcgtggtcgcggcaggagatctatcacctggtacgcgtcaaccatattcgcaccttcgaacagctgattgcccgctatggacgcggtcacggctgtgagatctgtaaacctctggcggcctcggtgctggcctcctgctggaatgaatatctgctgaagccggcgcatttgcctcttcaggacactaacgaccgctacttcgccaatattcagaaagatggcacctattcggtggtgccgcgtatggcggcgggagaggtgacgccggacgggctgattgcgatcggccagatcgccaaacgctatcagctgtacagtaaagtgaccggcggccagcgtatcgatctgttcggcgcgcgcctggagcagctcccggcaatctggcgcgagctggccgaggcgggatttgaaaccggccacgcctacggcaaatccctgcggacggtgaaatcctgcgtgggttcaacctggtgccgctatggcgtccaggattccaccggcctggcggtaaccctcgaacatcgctataaggggctgcgcgcgccgcacaaaattaaaatggcggtctccggctgtacccgcgaatgcgcggaggcccagggcaaggatattggcgtcatcgctacggagaagggctggaatctgtacgtttgcggcaacggcggtatgaagccgcgccatgccgacctgttcgccagtgatctggatgaagccacccttatccgcagtatcgaccggctgctgatgttctatattcgtaccgccgaccgtctgcagcgtaccagtacctggatggataatcttgagggaggcgtcgactatctgcgcgcggttatcctcgaagacagccttggcatcggcgaagagctggagcaggagatggcgcgggtggtcgagagctaccagtgcgaatggcaaaccacccttaacgatccgcagcggctggcgctgttccgctcctacgtgaacagcgatgagccggacgaagcggtgcagcggcaaaccctgcgcggccagccgcagctggccccgttcgcggcgcaggccgaaccggcgctgccgtcccgcccgtggcaggccatttgcgatctcgacgccatcccgcagcaggcggggattggcgcgcggctcggcgagcggcagattgcgctgttccgctttggcgatcaggtatatgccctcgataatcttgaaccgggcagcgaggccaacgttctttcgcgcggcctgctgggcgatgcgggcggtgaaccgatcgtgatttcacctctgtataagcagcgtattcgcctgcgcgatggccgccagtgcgacgacggcgaactggcggtacgcgcatggccggtaaaagtggagaacggtaaagtatgggttggcaaccagcagctgctggcgcgcgcggaggcctcgtga

SEQ ID NO: 259187 - DNA, 669 bp, Klebsiella pneumoniae
atggataacgactcatcaataccgaatatgaaactctccttcgaagatgtcctggtcggcggctataagatatgcctgatgatttttacgctgtggctgggttgggtaatttttgatgaagtcaaaatgcagcgggatgcagtaacaactttagcacaagtggccaaagcatccagcgctagcgcctatgaaagcgcgcttgaaggcgagtgttatctgcacggtcgttcggcgaattgccgggatagaaattctctggtcattaactaccaggcaggcggtaacaattaccaggcagaattgagcaatattctctctccccccggtgtgcatccatcaatatgtattaattatgtaaaaaacagtcctgacattgtaaaacgctgcgagagtcgttggttcaaccagcataaagattatgtcattgcgccgcttattttctggtcgtttaaccttattggcgcatttttcatcgccgtattctacgccggggaaaaaattaaacggcagtttgctgataataaaagcggaaacatggaactggtcgcgcctgagcacaatacagatatcgtccccagtcagcccgccgtggctaaaaataagaacaaaaaaagaagcggtcggcgcaaaccgaccgccaaaagcggatttaaagctcgcgtccgttag

SEQ ID NO: 259188 - DNA, 864 bp, Klebsiella pneumoniae
atggcagaacgtattactggacacaccgagctgattggcctgattgcgaccccgattcgtcacagcatgtcgccgactatgcataacgaagcctttgcccatctgggactggactacgtttatctggcgttcgaagtaggtaatgaagagctgaaagatgtcgtacagggttttcgtgcattaaaactgcgcggctgtaacgtctccatgccgaacaaaacggagatttgccagtatctggacaaactctcgccggcggcagaactggttggcgcggtgaataccgtggtgaacgacaatggcgtcctgaccggccatatcaccgatggcaccggatatatgcgcgcgctcaaagaagaaggcattgatatcatcggcaaaaagatgaccgttctgggcgctggcggtgcggccaccgcgctctgcgttcaggccgcgcttgatggcgtcaaagcgatctccatctttaaccgcaaagataaattcttcgccaacgcagaacagaccgttgccaaaatccgtaataacaccaactgcgagatccacctgttcgatctggacgatcatgacaaactgcgcgcggaaatcgacagcagcgtcattctgaccaacgccaccggcgtggggatgaaaccgtttgaaggccagatgctgctgcctgacgacagcttcctgcgcccggacctgatcgtttctgacgtggtctacaacccgcgcaaaacttatctgctggaagtggctgagaaaaaaggctgccgcaccatcaacggtctggggatgatgctctggcaaggcgcgcgcgcttttgaaatctggacaggcaaagaaatgccggttgaacacgtcaaaaatatcctgttctaa

SEQ ID NO: 259189 - DNA, 852 bp, Klebsiella pneumoniae
atgagccaaacatcaacactaaaaggccagtgcatcgcagagttcctcggtaccgggttgttgatctttttcggcgttgggtgcgtcgctgcgcttaaggtcgcgggagccagcttcggtcagtgggaaatcagcatcatctggggtctgggcgtcgccatggcgatttacctgaccgcaggggtttccggtgcgcaccttaacccggcggtgaccatcgcgctgtggctgttcgcctgctttgacggtcgtaaagttgttccttttatcattgcgcaattcgctggcgccttttgcgctgcggctttagtttacgggctttattacaatcttttcttcgatttcgaacatacccacaatatggtgcgcggtagcgtcgaaagtcttgagctggcgggtattttctctacctatccaaacccgcatatcaattttgtgcaggccttcgcggtagaaatggtgattaccgctatcctgatgggcgtcattctggcgctgaccgatgatggcaacggcgtgccgcgcggcccgctggcgccgctgctgattggtctgctgatcgccgtcattggcgcatccatgggcccgctgaccggcttcgccatgaacccggcgcgtgatatcggaccgaaagccttcgcctggctggcaggctggggcaacgtcgccttcaccggcggcaaagatattccttattttctggtgccgctgtgtgcgccaatcgtcggtgctgcgctgggcgcattctgctaccgcaagctgattggccgccacctgccttgcgacacctgcgtcgttgaagagaaagaagccgcatctccctctacgacacaacacaaagcttcgctgtaa

SEQ ID NO: 259190 - DNA, 1443 bp, Klebsiella pneumoniae
  misc_feature (1150)..(1159): n is a, c, g, or t
atgtccgttaacaccgcagaatcagaaaatgcgcaaccggttgcgcataagcaaaccagcgaattaatctaccgccttgaagaccgcccgccgctaccgcaaacgctgttcgccgcgttccagcacctgctggcgatgtttgtcgcggttatcactccggcgctgttaatttgtcaggctctgggcctcccggctcaggatacacaacacatcatcagcatgtccctgttcgcctccggcgtggcatccatcattcaaattaaagcctggggcccggtgggttctggtctgctttcgattcagggcaccagctttaacttcgtcgctccgctgattatgggcggaaccgcgctgaaaaccggcggcgccgatgttccgaccatgatggccgcgctgttcggcaccctgatgctggccagctgcacggagatggttctctcgcgcgttctgcatctcgcccgccgcataatcactccgctggtctccggcgtggtggtaatgattatcggcctgtcgctgattcaggttggcctgacctccatcggcgggggctatgccgccatggccgaccacaccttcggcgcgccaaaaaacctgctgctggcggggatcgtgctggcgctgattattatccttaaccgccagcgcaacccgtatctgcgcatcgcttcgctggttatcgcgatggcggccggatacctggcggcatggctactcgatatgctgccgaccaataccgcaccgacggaaagcagcctgattatggttcccacgccgctgtactacggactgggcatcgactggaatctgctgctgccgctgatgctggtgtttatgattacctcgctggaaaccatcggcgatatcaccgccacctctgacgtttccgagcagccggtttccggcccgctatatatgaagcgtctgaagggcggcgtgctggccaacggtctgaactcgtttgtttcggcagtattcaacaccttcccgaactcctgctttggccagaacaacggcgtgattcagttgaccggcgtcgccagccgctatgttggttttgtggtcgcgctgatgctgatcgtgctcggcctgttcccggcggtgagcggcttcgtgcagcatattcctgagccggtgcttggcggcgcannnnnnnnnngcgtcgtgcagcatattcctgagccggtgcttggcggcgcaacgctggtgatgttcggcaccattgccgcctccggcgtgcgtatcgtctcccgcgagccgctgaaccgccgcgcgatcctgattatcgccctgtcgctggccgtcggccttggcgtttcccagcagccgctgatcctgcagttcgcccctgactggctgaagaatctgctctcctccggtatcgccgccggcggtatcacggcgattgttctgaatctgattttcccgccagagaaaaactga

SEQ ID NO: 259191 - DNA, 1380 bp, Klebsiella pneumoniae
atgaaattaaccgtgttaggcgggggcggcgttcgctctgcattcctggcaaaatctctggcatataacgcgcaccgcattggtttaacggaagttgtatttctcgacagctccgctgagaatctggcaatttttggcgaaatcgcccgctatgtgtttaatacgattcgcccggatattcacttcagcgtaaccagcgacccggtgccggcactcaaaaatagccactatgtcatcaccaccctgcgggtaggcggcgatgagagtcgcattcgcgacgaacgtatcgccctgcagcacaacaccctgggccaggagaccaccggcgcaggtggtttcgccatggcgatgcgttccattccgacgattcttcactactgccgcctgattgaagagcacgccgccgaagacgctattctttttaacttcactaacccgtcagggctggtcaccgaggcgattatcaaatccggctttaagcgccgggtgtacggcatctgcgacgcgccgtcggagctgattcgcgagctgccggcaatcctcggctgcgacgagcgcgatctcggcgttgagtgctacgggttgaaccacttctcctggtttacccacttcaccgtaagcggcgaggatgtcaccgagcgcctgattaccagtcctgagctgtatcgtaagacggcgatgcagtatttttcgccggagctggttcagctatgcgataagcaactgcttaatgaatatctttactactactactatcgagaagtagctttaaaagcgattcagaacgcagcggaaacccgcggcgagcagattgcccgtatcaatcacgatatgcgcgaagagctgcggaccgtggatgtgaaagccaacccggaagcggcgtttaccatctggatgaagcactatctgcgccgggaaaatagctatatgcagaacgagtcgcagcaggaaaaattccatacccgcgagccgttaaccttaaagcagtttatcgaggagccggataccggcggctacgcaggggtggcgctggatattctggaggcggtcaacagcaccaccaccaagcgtattgtggtgtcgatgcccaacaacggcacgctggacttcctgcgcccggacgacgtgattgagatcagctgcgacctcagtaaagagggcctgaagccggtgacgccgaagcatgtgccgacagcgcagaaaaacatgatcgccagcgtaaaggagtatgagcggctggcggtggcggcgattctgcagcgggataagtcactggcggtacgggcgctgatggcgcatccgctggtcggctcttattcgctggcaaaagcgcttgttgaagcttatctcgatgataagcagttcaccgactggcaataa

SEQ ID NO: 259192 - DNA, 720 bp, Klebsiella pneumoniae
atggatttagaaaacatttttcgtgacgttaagctaagcaaaaccgaaatgaccgtgctgcgttttattcagaatgaccctgagcaatgtgtgcgcgaggggatccgcgccgtcgcggaacactgttatagcaacccttcctcgctagtgcggttggcgaagaaactgaaattcagcggctggctggagctggtctattttattaaattcaatatcaccatgccgaaactcgatgtcaccaacgatatcgactacatgagcattcagccgatagagcggataactcctctactggaaagcctgcaacatcatcgcattttgattcacggcagcggcttttcgcagctgatcgcccagtatatttacaataaatttttggtgaccggggtaaacgccagcctggcgctgtggccggattacgaaattcttgagcagaagaacgccgccaaatttgattcgatctggattatttccaaatccgggcgcagcagttcggcgctgaactgggtgaaggcgctggaagggaagaagattaatctggtctgcttcaccggcgattatcaaagcccgctggcgcaggcggcggatacggcgtttattattcacgacccgcagaaattcgatgatgatatttactggagcaacccgttttttggctactgcatactcgggtttgagcggctgctgaagatgtggtttacacacacggggagcccctga

SEQ ID NO: 259193 - DNA, 1395 bp, Klebsiella pneumoniae
atgaaagatcatattttgtccgtcaaagagaagattggctacggcatgggcgacgccgctagccacatcattttcgataacgtcatgttgtatatgatgtttttctataccgatatctttggtatccctgccggctatgtcggtaccatgttcctgctggcccgcgcgctggacgcgatatccgacccttgcatggggctgctggccgaccgtacccgtagccgatggggaaaattccgcccgtggatactgtttggagcgattccgttcggtctcgtgtgcgtactggcctacagctcgccggacctgagtcataacggcaagctgatatacgccgcggtcacctacacgctgctgaccctgctctacaccgtggtcaacatcccctactgcgcgctgggcggggtcattaccgacaatccgacgcagcgcatctccctgcagtcctggcgctttgtgctggcgacggcgggcggcatgctctccaccgtcctgatgatgccgttggtgaactttatcggcggcgaagataaagcgtttggcttccagggcggcatcgcggtgctctcggtgatcgcgttcctgatgctggcgttttgcttcttcactaccaaagagcgcgtcgaagcgccgccgagctctacctcgatgcgggaagacctgcgcgatatctggcgcaacgatcagtggcgagtggttggcctgctgaccattctcaatattctcgcggtctgcgttcgcggcggcgcgatgatgtactacaccacctggattatgggatccgcgggtctgttcaccgccttcctcaccacctactgcgtcggcaatctgattggctcggcgctggcgaagccgcttaccgactggaaatgcaaagtcagcgttttctggtggaccaatgctctgctggcggcgctgagcgtggcgatgttcttcgtgccgatggacgccgaaatcaccatgttcgcctttatcttcgtaattggcgtgctgcatcagctggtgacgccgattcagtgggtaatgatgtccgacaccgtcgactacggcgaatggtgtaacggcaaacgcctgaccggcatcagctttgcaggcaccctgttcgtgctcaagctgggcctggcgctgggcggcgcgctgattggctggatgctggcgggcggcggttacgatgccgcggccaaaacccagaacagcgccactatcaccatcatcatctcattgttcacccttgctccggcggtctgctacctgctgagcgcggttatcgcgaaacgctactacaccctgaaaacgccgttcctgaaaaagatgatggcggaactggctcagggcgcgcgccgcaacgaacacgacttcacttcagcgccgacaggcaaagaattgcaaaactaa

SEQ ID NO: 259194 - DNA, 1260 bp, Klebsiella pneumoniae
atgaatcttaccgaattaaagaatacgccggtttctgagctgattactctcggcgaaaatatggggctggaaaacctggcccgtatgcgtaagcaggatattatttttgccatcctcaagcagcattcgaagagtggcgaagatatctttggcgatggcgtactggagatactgcaggatggatttggtttcctccgttcagcagacagctcctacctcgccggtcccgacgacatctacgtatctcccagccaaatccgccgcttcaacctccgcactggtgacaccatttccggtaagattcgtcctcctaaagagggtgagcgttactttgcgttgttgaaagttaacgaagttaactacgataagccggaaaacgcccgtaacaagattctgtttgagaacttaaccccgctgcacgcaaattcacgtctgcgtatggaacgcggtaatggctcaacggaagacttaaccgctcgcgtgctggatctggcatcgccgatcggccgcggtcagcgtggtctgattgttgcgccgccgaaggcgggtaaaaccatgctgctgcagaatattgcgcagagcattgcgtacaaccatcctgattgcgtgctgatggtactgctgatcgacgaacgtccggaagaagtgaccgagatgcagcgtctggttaaaggcgaagtggttgcttctacctttgacgaaccggcctctcgccacgttcaggttgccgaaatggttatcgagaaggcgaagcgtctggttgaacacaagaaagacgttatcatcctcctcgactcgattacccgtctggcgcgcgcctacaacactgtagttccggcttccggtaaagtgttgaccggtggtgtggacgccaacgccctgcatcgtccgaagcggttcttcggcgccgcgcgtaacgtggaagagggcggtagcctgaccatcatcgcaacagcgctgatcgataccggttctaaaatggacgaagttatctacgaagagtttaaaggcaccggtaacatggagcttcacctctcacgtaagatcgctgagaaacgcgtcttcccggctatcgactacaaccgttccggtacccgtaaagaagagctgcttaccactcaggaagagctgcagaagatgtggatcctgcgtaaaatcattcacccgatgggtgaaatcgacgcgatggaattcctcatcaataaactggcgatgaccaaaactaacgacgacttcttcgatatgatgaagcgctcgtaa

SEQ ID NO: 259195 - DNA, 330 bp, Klebsiella pneumoniae
atgagcgataaaattattcacctgactgacgacagttttgacacggacgtactcaaggctgacgggctaaccctcgtcgatttctgggcagagtggtgtggtccgtgcaaaatgatcgccccgattctggatgagatcgctgaagagtatcagggcaaactgaccattgcgaagctgaacatcgatcagaacccgggtactgcgccgaaatacggcattcgcggcatcccgaccctgctgctgttcaaaaatggtgaagttgcagcgactaaagtcggcgcgctgtctaaaggccagttgaaagagttccttgacgccaacctggcgtaa

SEQ ID NO: 259196 - DNA, 1158 bp, Klebsiella pneumoniae
gtgctgctcttcgacgtccagcgtcacgttctcgaacggctcttgcttacggccgtcgatttcgcggaagataactttcggacgggaaaccgccatttcgaaaccttcacgacgcatgttttcgataagaacggacaggtgcagttcaccacggccagaaacgcggaatgcgtctgcatccggagtttcttcaacgcgcagcgccacgttgtgcaccagctctttattcaggcggtcaaggatctgacgagaggtaacgtacttaccttctttaccgcagaacggagaggtgttaacgcagaagaacatggaaacggtcggctcatcgacggacagcgccggcagcgcttcaacattctgcgtatcgcagatggtgtcagagatgttcagctcgcccagaccggtgatcgcgatgatatcgcccgcttcagcgatgtcgctctcgatacgctccagacccaggtgggtcagaactttaccgactttaccattacgggttttgccttcgctatcaacgatagtgacctgctggttcggcttcactttaccgcgcttgatgcggccgatgccgatgacgccaacgtagttgttgtagtccagctgggagatttgcatctgcagcgggccatcaaggtcaacgttcggtgccggtacgcgatcgacgatagtctgatacagcggagtcatatcctcagccatatcttcgtgatccagacccgcgataccgttcagcgcggaagcgtaaacgatagggaagtccagctgttcgtcggtagcatcaaggttaacgaacaggtcgaatacctgatcgacaacccagtcagggcgcgcgccaggacggtcaactttgttgataacaacaatcggcttcagaccgtgggcaaaagctttcttggtgacgaagcgcgtctgcggcatcggaccatcaaaggcatcaaccaccagcagcacagaatctaccatggacatgacacgttcaacttcaccaccgaagtcggcgtgcccaggggtatcaacgatgttgatacggtaatcattccatttgatagcagtgtttttagcgaggatggtaatcccacgctctttctccaaatcgttggagtccatcactcgttcttgtgcttcagtacgcgcgtcgaacgtaccagattgctgtag

SEQ ID NO: 259197 - DNA, 2118 bp, Klebsiella pneumoniae
  misc_feature (2071)..(2080): n is a, c, g, or t
atgtacggttcggttaaggtctggcaggaaataattacattacctacgtggacaacgggggcggaggatccgaaccccatgtttctggaaaaacgcgtttatcaaggttcttccggtaacgtctatccctacggcgtgattgacaccctgaccggcgaacgtgagatgcgcgattatcaggcagtatggatggagaatgatttcattcgaattatgctgttaccggaactcggtggccgtatacatcgggcgtatgacaaggttaaacagcgcgatttcgtgtattacaatgaagttgtgaagcccgccctggtggggctgctggggccctggatctccggcggtatcgagttcaactggccgcagcatcatcgcccgacgacctttatgccggtcgacttttcgatccagtgcggggaaaacggcgtgcagaccgtatggatgggggaagcggagcccatgcgcggtttgcaggtcatgaccgggtttacgctttatcctgaccgcgcgctgattgaaattaccggtaaggtctttaatggtaacgccacgccgcgccatttcctgtggtgggccaacccggcggtaaaaggcggcgatgctcaccagagcgttttcccgcccgacgtcaccgccgtgttcgatcacggcaagcgcgatgtttccgctttccctattgccaccggtacctactacaaagtcgactattctgcgggcgtcgatatctcccgttataaaaacgttcctgtgcccacctcgtatatggcggagaaatcggattacgattttgtcggcgcttatcaccatgacgagcgcggtgggctactgcatgttgccgatcatcacatctctccgggcaaaaaacagtggagctggggctatggcgactttggccaggcatgggaccgcaatctgaccgacgaaaatggctcttatattgagctgatgactggcgtctacaccgataaccagcctgactttacctggcttgcgccttatgaagagaagatttttgtgcaaaatttccttccctatagcgagttgggaatggtgcaaaatgccaatacgcagctggcgctgaagctggttcgcgagtctgagcagctacagctcggcgtttacgccattgcgccgctggaaaatatcgttgttgaactcagtgctgaacagcagccgctgtatgaaactcagcttacgctgaagcccggcgagagttggcggcatacgctgccggaacatgacgccggtcgcttgaccatcaaggtgaaaagtgcagacaagcaagtgctactggattatcacgaacatattactcagcagacgccgctgcctgaaccggcgtcagcgccagcgatgccggaagagattcacaacggtgatgagctctattttatcggccagcatcttgaacaatacaatcacgccagccgctatgccgcagattactatcgccgggcgatagccctcgatccgcaggattatcgcaataatgttgccctcgggacgctggcgtttaaccaggccgactgggttttagcggagcaatgctcccgcgccgcgctacttcgcgcccatcgtctgaataaaaatccgcgcgatggcgaagccagtatgctgcttgccagcgcgctggaaaggcagggagatgaacaaggcgcctgggatcactattacaaagcatcctggagcggtaactgccgcgatgctgcatggtgggcgctggcaaggctggcgatgaagcgtggtgatacggccgacgcgctggaaaaggtcaacaccagtctgcagttcaacgccagcaaccatctggctatggggctgaaagcgctggcgttagcggacagcgggcggacgaaagcggcgcaggagtatattttcgcctgtcttaaacaatacccgttgagctatccgctgcactgcgcgcgctggatgattgagcccagcgacgaagcgcgagagaacctactgcgggtaacggggcgtagagggatcaacggcagcctgctggcgggctggctgctttctatcggacagaagcaggcggcgaaagaggtgcttgaggtgctggatnnnnnnnnnntcaggaggcgctgccgatgctgtggcgagcctcgttaa

SEQ ID NO: 259198 - DNA, 1188 bp, Klebsiella pneumoniae
atgctgtggcgagcctcgttaagcgatgacgccaataaacggcaacggttgattgccgaagccgagcgctgccatccgcaaaaagtgcgtttccccaatacgctcgatgaagttcagatgctgcaaaccctgagcgacagcgctttcgcccgctatctgctcggttgcttctggtacagcaaacgacgctatgaagaggcggtcagctgctggcgcgagacgctggcaaaatcacccgactatgcgcccgctcatcgcctgctcggggtttacgcctggaataaacaacaggatgcggcgcaggcgctggcttatctacagcgcgccgtagagcttgagcctgaaaacgcgcgcttcctctttgagcttgattttctgcaaaaatcactgggtacgccggtaaacgaacgactggagaagctggcggcgcgcaaatcggtggtgctgaagcgggacgatctgaccgctgagctgctaagcctgtggaatgcttccggtcattatgccgatgccgccgctattctcggtacgcgcgtgtttcatccctgggaaggcggggaagggaaaatcaccggtcagtatttgctcaatcagctgcatcgggctttccagtttattgaacgcgaggcgtttacgcaggctgcggactgtctgaaagacgcattacgctatcccgataatctgggggaggggcgactgcccgggcagacggacaacgatatctggtatttgctgggctactgcgcggaacaggctggggatgcgcagcaggcagaggaatattatcagcttgccctacaaggaggctcaacgctggacgccgggcgttactacaacgatcagcccgctgattaccttttctggcagggcatcgcgctgcgtaagagcggtaacccggcgcaggccgagcagcacttccagaattttatcacctgggccgggcagcatcgggatgacgttccgcaagccgacttttttgccgtctctcttccggacttggtggtgcttgatgtctcagcgcagcagcaacatcagcagcactgcttgtttattgaagtgctgggccatctggggctggggaatgtatccgccagccagcaggcgatgcagcggcttctgcaactgaacccggctcatgataaggcgcatctgattcgtcatgccctgcaaagcggcattttttcctga

SEQ ID NO: 259199 - DNA, 666 bp, Klebsiella pneumoniae
  misc_feature (595)..(604): n is a, c, g, or t
atgatgacagtgattgaaccaccatctgtgctttccagtccacagcgccgtagccaggtgctcctgatgttttatctgcccgggcagtccgtgacgcccgaatggctgggtaacctcacccaggttgatgaggataccgcccggcaggacatcgcggagacgggacgcgaaattcagcgttatcaccgcttgaccctgacttcacaagcggacggcagctatcggatggaaggcgccgcgctcgatcaacgcttatgcctgctgcacggcctgcgccgcgggctgcgcctgtgcccgcattttgtcagccaccattttaccccggctctgaaaacgcagcttaaacagcagggtatcgcacgcacgctctatgatgacaccaatcttcaggcattggtcaaccgctgctcgcgcgccctgaaccggcagtttgactgccgcgacgtgcattttctgcgtctttatttacagtattgtttgctgcagcaccaccttgggcagagtccctctttcactcacgagcagcagcgctgggcgcaggccgccgccgaatttgccctcgccgaggagattgtccgccactggcagcggcggnnnnnnnnnntgtccgccactggtagcggcgggttgcggcagcgccccacgcaggagaacagctgtttttga

SEQ ID NO: 259200 - DNA, 687 bp, Klebsiella pneumoniae
ttgtataatctgattagcctgagacaaacgggttgggaaatcgtaccctttgctgtacacggccagctgctgattgccggtttcgtgctggtttttttccacccgggtcacggtaagatgccgcttgttgcctggatgctgcatcaccaccccacgcgcagacatttttttgtctggatagtccgtagctggctcccgcagtgcggtttcttcatcattattttctggcgcgttgggtttatgcaggatatccccagagatacgctgctgcgttttatctcaattttcaattacatctgctatttcgccacgttgattctggggttgacgctggttcatgatgcctggcgcctggtgaaaacacctgaaatcccaatcagcaatcttcggctaccgctgattttcgcgctggggttttatttgccgtttcagatcgtattgctgctgcacggcgcaagcgaaaatgactatgtgccgttggtgtggctgctgtttgcgccggtcatggtgggcattttattgtcccgactcgccaccggcgggatagcctgcctgatacgtcgcctggttggtgaggcgggaggccagaaatggcgcgcgcatttcgccctgtttaacggcgtggcgatattgtgtatggcgataaataccgcggtgcggattgtgtcatccttgcttaattcttag

SEQ ID NO: 259201 - DNA, 885 bp, Klebsiella pneumoniae
atgacttttcccggcggcaagcgcggcgccaaatacttttttattctgtttattgtggcagtatgcgtttatctactgcctcgcgtcgccatcaatgctttttactatccggataatgaagtctatgggcaggatccctggtctgccgaatccgttacattcaccgctaaagacggtacccgcctgcacggctggtttattccatcagctactggccctacagataatgcggtcgcaacggtgatacatgcccacgggaatgccggaaatatgtcggcgcactggccgctggtcagctggctgccggaacgcaattacaaccttttcatgttcgactatcgtggatttggcaaatctcagggcacgccttcgcaacaaggcctgtatgacgatacgaaaagcgctatcgactatgtgcgccagcgcagcgacgtgaacccacagcgtctggtgctgctggggcaaagtctgggaggcaataacattcttgccgcaattggctactgcatgcactgcgttaacgaacgttcggcaaagcgctcggggatccgcgccgttattctcgactcaacttttgcatcctattcgtctatcgccaatcagatgatccccggcagcggctttttgctcaatgatagctatagcgcagaccgaaatatcgcatccatcagccctatcccgctgctgattattcatggtaaagcggaccatgtgatcccctgggagcatagtgaaaaactctatcaactagctctccagccgaagcagaaaatccttattccggatggcgagcatattgacgcattttccgaacgccacggcgatcgctaccgtgatgagatggtgcgctttatgcaaaacgcgctgtcagaagctaagaattaa

SEQ ID NO: 259202 - DNA, 657 bp, Klebsiella pneumoniae; identical to SEQ ID NO: 179777

SEQ ID NO: 259203 - DNA, 492 bp, Klebsiella pneumoniae; identical to SEQ ID NO: 174579

SEQ ID NO: 259204 - DNA, 1053 bp, Klebsiella pneumoniae
atggctgaataccacggtcgggatgttgctgtagtccagatgttcgtccggcttgttgttaaacagacgctcggagagacggcggccggcggcaacggcgaccggagtcagctcgacggcaccggtattatcgccgacggcgtaaatacccggaacgttagtattctggaatttatcgacgacgatatagcctttatcgttagtttccactccggtagcggcgagattgaagttatcggttgccggttcgcgaccgatcgcccaaatcaggcagtccacggtctggctgcggccatcttccagctccagggtcaggctgccgtcggcgttcttcactaccgctttcggaatggcatgggtatgcagctgcgggccttcggcgttcatcacctcaaccagcgtttcaacgatcagcggatcgaagctacgcagcggcgcgtgtttacgcacgaacagatgggtctccgcgcccagtccgttaatcacgcccgccagctcaacggcgatatagcccgcgccgacaaccgcaacgcgcttcggcagcgccggcagttcgaagaaaccatcggaatcaataccgtactcgacgccgggaatgctcggatggctcggacggccgccggtggcgatcagaatatggtcggcggttatcgtctcgccgttaacttcgacggttttcgcatcgacaaaacgggcgaagcctttaatgacatcgaccttgtttttgcccagcacgttatcgtaagaggtgtggatacgatcgatataggcgctacggctggcgaccagcttatcccagtcgaagtgattaattgtggtatcaaaaccgtaatccgggccatacagatggatggcttcacggatctgcgccgcatgccacatcactttcttcggtacgcagccgacgttcacgcaggtgccgcccaggtctttggcttcaatcagcgcacacttttggccgtacatagcggcacggttaatggaggcgataccgccgctgccgccgccaatggcgatatagtcataatgcttgctcatgagtcttatccttaa

SEQ ID NO: 259205 - DNA, 849 bp, Klebsiella pneumoniae
atgttcgcgggcgtaaaggtcgaggtagaagctgccgcgcagctcgttattttcgtcgtacagttcaaagaagcgcacttccggatgccagacgtcgacgtcagtacgctctttcgcagtaatgccgtaaatacgcttaacgacttcaaacaggccgttaaccgctttgttttccggaaagtacgggcgcagctgttcatcgctgatgctgtaaagatgttgcttctgtttttcgctgtagtaagcgatatcccacggctgcagttcatccacgccgaattcggctttggcgaaggcgcgcagctgagccagttctttctcaccctgcggacgggcgcgtttagccaggtcgctcagaaagtcgagcacctgctgcggattctccgccattttggtcgccagcgacttatcggcatagctgtcgaagcccaacagctgagccagctcgtggcgcagggcgaggatttccgccattaccggactgttatcccacttaccggcattcggcccctggtcagaagcgcgggtggaataggcgcgatacagctcttcacgcagcgcctggttatcgcagtaggtcattaccggcagatagctcgggatatccagggtcaacagatacccttcctgctctttggcttcagcctgagctttcgccgcagcaagcgcgctttccggcatcccggagagctcggattcatcggcgatcagcttcgtccagcccatggtggcatcgaggacattgttactgtactgattgcccagttcagacaggcgtgcggcgatttcgccgtagcgtttctgctgctctttggccaggccaataccggagagttcaaaatcacgtag

SEQ ID NO: 259206 - DNA, 3012 bp, Klebsiella pneumoniae
atgttcagtttccacctgaaaggaggtcatactatgacactggaaattgaacaaacatgttataccctgcaatctgcgccctggctggataatgccggttttgaaaaaggacgccggcacgatcgtcagccgctgggctttattctgcccgccaatacggtgctgcaaatccgccagccggatatgagtaacggtaatgcgacgctgcgcctgctctgcgacgataccgcggcagaaaaaacctgtacgctggccaccggctggaaaacggtcagcgcagccgttgataccgtcccttttatcgatacgttgtttaccgaccagccctgcgagttcaccgtcatctatcagcaacccgcggcaactaaaccactaccctgctggaaagcgggccaatctgaggatgaatttttccttaactgggaaaaaaatagatcgtcattcgcgctgcttgatttggatgttatcaatctgctgctgccctatgccgaccgcgataatgcgttgaaagcgggcttacccgcgttacacgcttattacactcacctttttaaatgctataacgactgggctgggttaagcgataagccggattcgccgttgaatcaggatattgccacccgctattttgtaagagccgataaacatggcgtcggtgcggcttattacgataccggatggtgcgggcatacttccgcaaccattggcgaaggctggctggataatgtcaccacacagtgggtgatcctgcatgagattggccacggctatcagggcaaatttatgcaggacacaacgctgcccgtcaacgaagtgtggaacaacatttacgcttccttctaccagcagctcacgttgagccaggacgatcatctctatattgatggttggctctatgactatggtcagcaggccgtgcaggaagtacagctgatgacctgtattaaagaccagacgcccgtcgcccgctggggcctgcgtccgcgtctgcaatttctgatgctgatgctgctcaaagcgggaactaaagccttccgcgccttcaaccagaactatcgtgtactggccaatagcaatggcttccagccatccgatcaccagcttgccgatatgctggctaccgctattgctaccgccgcagggtatgatgtcactccgttcattgcgctaggcggtctccccctggaaaacgccactcgggaatatatcgctacgctggcggcaaaaccgctttatccgctatatcttcttctgccacaaaatgaatgggatagcgcacgtcgtcagctggggctggactctttcgtctggctggtggataacagcgaactggcggctttaggcaaaacaggtacgctatctctgacgctcaatatcgaccagccggatcaaatctatggtcggacgctgactattaaggataattgcggtacgcgttattcactgatagtcgatgataactccttgaccctgaatgaccttcccatcggcatttaccagatcgatccaccgaaaggccgttcacaaaaatatcgtccggacatcagccatatcgtcgtcaaagaaggcatcaatacggctaccgtcaactacacccgacaaagcgataccagcgtgcgtaacgtaacgatgagctttttaggtcttggcgatgcgccatttgcgcgccttgatatcgattatgaaaatcagcaacttattctaaacgttatcagcaccacgccgcatagctactatcccgatacgctctatgctggcgtatgcgtcctttcagccagcggcgaaaaggtatttgagcgcaaaatgaacggtacgaactgcgccaccggtaaggagattattcccttcggtcctcactatcacttatatattactcacgtcgagccgggacgactgaaagcctctccgggatatttaacgctggtcgcaggtgagaaattccagctgatgcgcattgatgataatgggctttataactttatcctcgacaataatccggcggatgacttacaggctattttcgaacacaacgctcagacgatacgtagccagccttcactgctggcgcaggaagagagcgtaagtaaaaacgatctctggctgctgctctctcatatggaagagcctcagcgcagcaaattgctcaaagagtatgccgacgtcctgcctcaggataatagcgaaccgggcgaactgacgggcaaaagcgttaccctcaatctcagagggcaaggcaataaagatttttgccagatcgttatcgataatcagcagcacgcaatgacggtcgctacgcgtaccggcgcgccgcacccgtattatgtctcccatacctatgccagcattacggtaaccggagcagacgaaacggtggtttatcaccgcagctatgccggagcgaccaacaacctggcaaacagcgagactatcgcgctcgctgaaaatatgatcatcgaggttttccatgatgagccattccgctccagcgccagcaacgatacgactcatcgcgccattacgctgaagcagcacaaccgctggcgggtagtgaaggatgggctgacgacctgttcgcttatacccgaggagcaggatgaggaaacccctgatgctgaggagggggcaacagagctttacggcgatctcttcacctggcagctgctcggcgaaaataatacccgtttcgcgacgatggagatggatattggcggcggcgcgctgacctttaccgccaaccctggggtgccgaataagcaatttacgacgacctatgccacggtaaatgtctacaatacgcgcggctcggtggtttatcgccagtccattaaaggctcatcgcagcttggcgattatatagatacggcaatacttgatgagggctatatcgtcgaagtctttcatgccgaagccggagatcgctccgtcatcatcaatccgttaaatggtcattcctgggcacagcctaataccgtctcctggcaagtcacggcccgcgggctgcagcgcctgtaa

SEQ ID NO: 259207 - DNA, 930 bp, Klebsiella pneumoniae
atgacaacgcaatcttctcccacctcgcatgatgctatcttcaaacagctactggcgcataccgacacagccagagactttatcgatatccatcttccggcagatctgcgcgcgcagtgcgatctcaatacgctacagctggaatcaggtaattttattgaggaagacctgcgcgcctactattccgacgtgctgtactctttgaaaatcaataataagaccggctatatccacgtacttattgagcatcaaagctcgccggacaaacagatggcgtttcgcctgatgcgctatgccgtcgccgcaatgcagcgccatctggaagcgggaaatacgcatcttccactggtggttcccattcttttttatcagggcaaaacctcgccctatcccttcacgatgaactggtacagcctgttcgactcgccggagtgggcaaaaataatctataaccgcccttttccgctggtcgatatcacggtgatccctgacgacgcgattatgcagcaccggcgcattgcgatactggagctcctgcagaaacatattcggcaacgggatctcatgcttctgctggagcaattggggggcctgctgaacacgggatatactaccgccgaacagctaaaagtgttatttagctacatggggcagcgcggttataccgcaaaccctaaggcttttttcaatggactggtaagtcatataccgcaggaggagtcaatggaaacgctgaacgaatggctggaaaaaaacggcaaagagctttttattgaatggggcattgaaaaaggtgaagcaaaggcccgactaaaaattgctaaccggatgctggaaaacggaatggaacagtcgctggtcatccagctcaccgaattaacggaaagcgaaatcaaacagctgcaggacgccgctataaatccggcctga

SEQ ID NO: 259208 - DNA, 165 bp, Klebsiella pneumoniae
atgccgcatatggcgatctccggcctgattggcggggtgctgctggttttcgccgactggtgcggccggatgctgatgtttccgtatcagatcccggcgggattgctgtcgacgtttatcggcgcgccatactttatctatctgttgagaaagcagagtcggtag

SEQ ID NO: 259209 - DNA, 477 bp, Klebsiella pneumoniae
atgaggatcgtcaatgatggcggcatccagaccgacggccagaagctcttcgcgcgtaaagcgtcggctgcattcacgaccttccagcagattttgccagaacgtttcgccatccggcgattcaggaaaatggcaggcgtagccgataaccgcgacaggttcgcagtccgggtagtgttgagcgatcgatgcatcaatggaatctgctgtcggcgcagaagagaagcgcaagttatccataatcggtcccgtttcctaagattcacaaagtcaatggaacgccatgcgttcgcgatggcgttccggggaaaatcagtttgcttcgcgctagatccgccgctgacgacggcgaacagggcgaggtcgttttgttttctccaccgtggcgacgccggccagataatcggccagggcagcaggagaagggtgggtgaagaggtcaagcaacgtcagggtggaaaattcgtgacgttgtaa

SEQ ID NO: 259210 - DNA, 222 bp, Klebsiella pneumoniae
atgagcctgctggagcaggggaggctggcggagctggacgccgtcagtaacgaagagctgtcggcaatggccgggaaatcaacgcacgaaattaaaacctgggtggccgcctttgccgcgctatccgcatttggccgctggcgctgcgaaggtcgctattaccgaccaatccccgagtggattgccgggtttggctcgctgagcgccacagtgcagaactga

SEQ ID NO: 259211 - DNA, 840 bp, Klebsiella pneumoniae
atgagctaccaaccgcaaaccgaagccgccaccagccgctttctcaacgtggaagagggcggagaaacattacgcatccattttaatgactgcggccagggtgacgaaaccgtggtgatgctgcacggctccggccccggagctaccggctgggccaactttagccgcaatatcgacccgctggtggagggccccggctgggggaaaagcgatgctatcgtcaatcgcggctcccgctccgacctgaacgcccgggtgctgaaaagcgtcattgatcagctggatatcagcaacgtgcatttgctgggcaactcgatgggcggacacagcgcggtggcctttaccctcagctggccggagcgcgtcggcaaactggtgctgatgggcggcggaaccggcggcatgagcctgtttacgccgatgccgacggaaggcatcaagctgctgaacggcctgtatcgcgaaccgaccatcgaaaacctgaaaaagatgatgaacatctttgttttcgatacccgcgatctgactgacgccctgttcgacgcgcgtctcaacaatatgctatcgcgccgggagcatctggataatttcgtcaaaagtctcgaagccaacccgaagcagttcccggactttagcccgcgtctcggcgaaatccgcgcgcagacactgatcgtctgggggcgtaacgatcgcttcgtgccgatggacgccgggctgcgcctgctggcgggcattaacggttctgaactgcatatctatcgcgactgcggccactgggcgcagtgggagcacgcggagagttttaaccaactggtgctcgattttctggcacgtgcctga

SEQ ID NO: 259212 - DNA, 468 bp, Klebsiella pneumoniae
atgaaattgaacccgttcgctttaactcttgcgccgctgctggccgtcggcgcgttttctgctcatgccggcccgcaggcccacgtggtctgcgcttatcaccatacgttgggcgatgacgctattatgatgttcggcaaaccgaatcaggctatgtggcatgatttttttggcaacacccatactgacgcagtgtcgacctatcagacgctgcgcgaccagccggaaaccacctgcgataacaaagccgacagctccgcctactgggcgccatcgctgaagctgcctgacggtcaggtggtcgcgccggcttatcaaaaaaacctactaccagaccagcaaagtcgaacagcatccgctgcatccgttcccggccggtctcgaactgctggcgggcgatcatcacggttctgctcccagttcgcgcattacctttctctgcgccaacggcaatggctataccaataa

SEQ ID NO: 259213 - DNA, 390 bp, Klebsiella pneumoniae
gtgattgcggccaaaagctggcgtcttcacgccggggcgctgcgcgactgcgcggaaaaaggctgggtgcttaatcccgacggctgcggcctgcgggccgggctgattcgcgagctgcagtcccaggggctgcgtctggcgctgaatgtggagaccgccggcgctcagctgcaaatcagcctcgtggcgcaagggctggggcttggcctggtcccgcgcgccgcgctggccgccagcccgtggcgcgatgaggtgacaatattgacgctggcggatttccagcccgaggtgcatctgtggctggttcacgcgcagaatctggctaatctgagccagccgctgacttttttcgccggcaaagtcgttcagcagctaaacgtatctggctga

SEQ ID NO: 259214 - DNA, 1779 bp, Klebsiella pneumoniae
atggtgcagagcctgctgcaggagttctcgctctcgtcgcaggaaggcgtggccctgatgtgcctggcggaggcgctgctgcgcattcccgacaaagccacccgcgatgccctgatccgcgacaaaatcagcaacggcaactggcaatcgcatatcggccgcagcccctcgctgttcgtcaatgccgccacctgggggctactgtttaccggcaagctggtctcgacccataacgaaaccagcctgtcgcgttcgctgaaccgtattatcggcaagagcggcgaaccgctgattcgtaaaggcgtcgatatggcgatgcgcctgatgggcgagcagttcgtcaccggcgaaaccatcgccgaagcgctggccaatgcccgcaaactggaagacaaaggcttccgctactcctacgatatgctgggcgaagcagcgctgaccgccgacgatgcccaggcctatatggtttcctatcagcaggctattcatgccataggcaaagcctcgaacggccggggtatttatgaagggccgggcatttcgattaaactctccgcactgcatccgcgctatagccgcgcccagtacgatcgcgcgatggatgagctttacccgcgcctgaaatcgctaaccctgctggcgcgccagtacgatatcggtatcaacattgacgccgaagaggccgatcgcctggagatctcactcgatctgctggaaaaactctgctttgagccggagctggcgggctggaacgggattggctttgtgatccaggcctatcagaaacgctgcccgttcgtcattgactacctgatcgacctggctacccgcagccgtcgccgcctgatgattcgtctggtaaaaggcgcctactgggatagcgaaatcaaacgcgcgcagatggacgggctcgaaggctatccggtctatacccgcaaggtttataccgatgtctcctatctggcctgcgcgaaaaagctgctggcggtgccgaacctgatctatccgcagttcgcaacgcataacgcgcataccctggcggcgatttatcagctcgccggacaaaactactaccccggtcagtatgagttccagtgcctgcacggcatgggcgaaccgctgtatgagcaggtgaccggcaaagtcgccgatggcaaactcaaccgtccctgccgtgtttatgcgccggtgggcacccacgaaacgctgctggcctaccttgtgcgtcgcctgctggaaaacggcgctaacacctcgttcgtgaaccgcatcgccgacagcaccctgccgctggatgagctggttgctgacccggtcgccgccgtggaaaaactggcccagcaggaaggtcaggttggcctgccgcatccgaaaatcccgctgccgcgcgatctctacggcaaggggcgcagtaactcagccggtctggatctggccaacgagcatcgcctggcctccctctcttcctcgctcttaaacagcgcgctgcataaatggcaggcgctgccgatgctggaacagccggttgccgaaggcgaaatgcagccagtcatcaacccggcggagccaaaagatatcgtcggccacgtgcgcgaagccagcgaggctgaagagcgcggtcaacaacgcgccgatctggttcgccaccccgccgcaggagcgcgcggcgatcctcgaacgcgctgcggtactgatggaaggccagatgccaacgctgatgggcatcctggtgcgcgaggcgggaaaaaccttcagcaatggcattgccgaagtgcgtga

SEQ ID NO: 259215 - DNA, 393 bp, Klebsiella pneumoniae
atgcctaaacaggtgattattccgccaggcaccaccgcgcctatcgcaccgtttgttcccggcacgctggccgacggcgtggtttacgtctccggcaccctgccgttcgataagcaaaataacgtggtttacatcggcgacccaaaggcgcaaacccgccacgtgctggaaaccatcaggagcgttatcgagacggcggggggcagtatggcggatgtgaccttcaacagcatctttatcaccgactggaaaaactacgccgcgattaacgaagtctacgcggagttcttccccggcgacaaaccggcgcgtttctgcattcagtgcggactggtgaagcccgaagcgctggtggagatcgccaccgtcgcccatatcgggaaaccggcatga

SEQ ID NO: 259216 - DNA, 450 bp, Klebsiella pneumoniae
atgcatgatggaaaccaggatggtgtcgtcacgcatcgccgcttccagctctttcagatcgataatcccgttgctctgcggcgccaggtaggtcacttcgaagccttcgcgctccagctgacgacaggtatccagaaccgctttatgctcggttttgctggtgatgatgtgcttgccttttttctgataaaagttggctgcacccttgatcgccaggttgtcggattcagtcgcaccagaggtaaagacgatttcgcgcgggtcggcgccgaccagctcggcaatctgattgcgggcgatatcaaccgcctcttcagcctgccagccaaaacggtgggaacgggaggccgggttaccaaaggtcccgtccatggtcaggaactgcatcattttctcggcaacacgcgggtccaccggcgtggttgcggagtaatcgaggtaaatcggtaa

SEQ ID NO: 259217 - DNA, 513 bp, Klebsiella pneumoniae
gtgcttcatcaccataaaggccataaagctggcgccgaacagcagcaggaccgctttaataatctgcacccaggtggtggcgagcatgccgccaaacaggacgtagagcaccatcagtacgccgacaagcactaccgcgacgtggtagttgaggccgaacagcagttgaatcagcttacccgcgccgaccatctgggcgatgaggtagagcgccactaccaccagcgaaccgcaggcggaaagggtgcgaatcggcccctgtttgagacgataagaggccacgtcggcaaacgtgtagcggccgaggttacgcaggcgttcggcgatcaggaacagaataatcggccagccgacgaggaaaccgagcgagtagatcagcccgtcgtagccggaggtgtaaaccagtgcggaaataccgagaaacgaggccgccgacataaagtcgccggcaatcgccagaccgttctggaaaccggtaatgttgccgcccgcggtgtagtagtcgctgcgtga

SEQ ID NO: 259218 - DNA, 810 bp, Klebsiella pneumoniae; identical to SEQ ID NO: 213593

SEQ ID NO: 259219 - DNA, 912 bp, Klebsiella pneumoniae
atgatttctgcgagtaccttgaactcagaactcatcaataaaatcgcacaggattttgcgcaagccaccagtctggcggttgtggtcgtcaatattcacggtgatgagatttctgaattgtttaatttcacgccgttttgccagctgatgcgtcagcacccggagcacagcggacgctgtcgcatgagcgaccgctgcggcgggctggaagcctcaaaaaaagaccagctgtgtatctaccgctgtcatgcggggttaaccgatttttccatcccgctggtgatcgccggccacctggtcggtttcgtgctgtgcgggcaggtgcgtctgagcaatgatgttgaactggttgatatcttgaacgtcgatgaccgctggcaggacgatccggcgctggtccaggcgtttcgcgatgtgccggagatggactattcgcgggttatcgcttcggcggatctgctgaagctgatcgtcgagaattgcctgaaaaaacagctcaactttgtggttatcaaagataacccgtcgcagaacgatccggcgcaggccagccgggcgccctcgccgcacgatggcaaaatgaagaaggcgctgcgctatatcgacgcgcatctctccgatgagctgcgtctggaggatgtggcggcgcatgtctatctcagcccgtactacttcagcaaactgtttaaaaagtatcaggggatcggttttaacgcctgggtcaatcagcagcggatggcgagcgcaaaagagctgctatgccacagcgactggagcatcgccagcatcgcgcggaatttaggtttttcgcaaaccagctatttttgcaaagtgtttcgccagacctatcaggtaacgccgcaggcatttcgtcagcaaattaatgccggatcacaaactgagtctttttaa

SEQ ID NO: 259220 - DNA, 1377 bp, Klebsiella pneumoniae
atggcaaccaggcgtgcgttcattcttgcgggtaccggcagcggttgtggcaaaaccaccgttacgctcggcctgctcagcttgctccaacagcgcggtatgcgggtgcaaccctgtaaagtagggcctgactacctggataccgcctggcacaccgccatcagcggcatcgcttcccgcaatctcgacagctttatgcttcccgccccgatactcaacgcgctgtttaccgaacagctacagcaggccgacatcgcggttatcgaaggggtgatgggcctgtatgacggctacggcaccgaccccaactactgcagcagcgcggcaatggctaagcagcttggctgcccggtgattttgctggtggatggcaaagcggtgtcgacctccatcgccgccacggtgatgggttttcaacattttgatccggctctcgacatcgctggcgttatcgtcaatcgggtcaacagcgacgcgcacttccagctgctgaaaagcgccattgagcgctactgtcaggtgccagtgctcggctatgtgccgcgcgtggaaggcgtggcgctgcccgaacgacatctgggactggtgaccgcccgcgagtcggtggtcaatcagcaggcatggcgggattttgccagcctgctggggcgcaccctcgacatagaccggctgctggccctcagcgaactggccgccatgccgatcggcgagtggggagaacagcttgccgccgatgccggcgaaggactgacgttggccctcgccgacgatgaggccttcaatttttattaccccgataacctggcgctgctggcgcgctgcggcgtgaagatggtgcgctttagcccactgcgcgatcgccagctgccggcctgccagatgatctggctcggcggcggctatccggagctgcatgcggccgggctatccgctaaccacgagatgctgacacagcttcgcgcggcgcaccggcgcggggtggcgatctacgccgagtgcggcggcctgatgtacctgggcacgaccctggaagtcatcagcggcgagcgctacacgatggcggatattattcccggacacagccgaatggggacgcgtctgacccggttcggctactgcgaagcgcaggcgcagcagcagacgctgctggcagcccctggcgagtggctgcgcggccatgaatttcattactccgatttttctcccgccacccccgccgtactggcctgccgtaaacagcgagacggtaagacgctccagcagtggcagggaggatggcagtccggcagcgcctttgccagctatctccatgtccattttgcccagcgtcccaccatgctcaaccactggttgcgggcagcaaggagggcgctatga

SEQ ID NO: 259221 - DNA, 960 bp, Klebsiella pneumoniae
atgacccttctcgcctggtgtgtagcctggatacttgatgtcgtcattggcgatccgccgcactggccgcatccggtgcgctggataggtcgcctgatcgccgtcagccagcgtgtagtgcgacgcgtctgccatagcgaccgggcgctgcgcatcggcggcggggtgatgtggctggtggttatcggcctgacatggggcgtggcctggggcgtactggcgctggcgcacgggatccacccctggcttggatggctggtggaagtgtggatgatcttcaccgcgctggcgggacgctgtctggcacagtcggcgatggcggtggcccggccgctgcaggccggagatctcgccgaaagccggcataagctctcctggattgtcgggcgcgatacctctcagctccagccagcgcagatcaaccgtgcggtggtggagaccgtggcggagaacacggtagatggcattatcgcgccgctctttttcctgctcctcggcggcgcgccgctggccatggcctataaagcggtcaacaccctcgattccatggtcggctataaacacgaaaaataccgggcgatcggcatggtcagcgctcgtcttgatgatgtagccaacttccttcccgcccggctgagctggctgctgctcagccttgccgcagtgctatgccgggaagatggcgcccgggcgctgcgtacgggctggcgcgatcgctatcagcacagcagtcctaactgcgcctggccggaagcgaccgtcgccggcgcgctggggatccgccttggcggcccgaacgattacttcggccagcgcgttgaaaagccctggataggcgacgccgtccgcgacatcgcggtggacgatatttcccgaaccattcgattaatgtgggtggcgtcaagcctggcgctggcgctgtttatcggcgtgcgctactggctggtcggcgcggcctga

SEQ ID NO: 259222 - DNA, 636 bp, Klebsiella pneumoniae; identical to SEQ ID NO: 221311

SEQ ID NO: 259223 - DNA, 1140 bp, Klebsiella pneumoniae
atgagcgatcagacctttgacgccccggtgtggcatcacggcaaagcgctgcgcaagggctacaccaccggctcctgcgccacagcggcggcaaaagtggcggcgctgatggtgatgcgccagcatctgattcatcaggtctcgatcgtcaccccctccggcgtcaccctgtgcctgaacgttgagtccccgcacgtcgaagggcagcaggcggtcgccgcgatccgtaaagacggcggcgatgatgtcgacgccacccacggcatgctgatttttgcccgggtgatcctcaatgacagcggagagattagcctgcagggcggggagggcatcggcacggtgacccgcaaagggatcggcctgccgacaggcagcccggcgataaaccgcactccgcggcacaccatcgagaccgccgtgcgcgaagcgataggtcctacccgcggcgcgcaggtggagatttttgctccggaaggcgtacttcgcgcgcaaaaaacctataacgcccggctggggatcctcggcggcatctcgattatcggcaccacggggatcgttaccccgatgtcggaagagagctggaagcgctcgctctccctcgagctggagataaaacgcgccgccgggctggagcgcgtggtgctggtgccgggcaaccacggtgagcgctttgtccgcgagcagatgggcatcgacccgcagatggtggtcaccatgagcaacttcgtcggctacatgattgaagaggcggttcggctcggtttccgccagattgtgctcattggccatcccggcaaactgatcaaaatcgccgccgggatctttcatacccacagccatatcgccgatgcgcggatggaaactctcgtcgctcatctggcgctgcttggcgcgccgctgccgctgctgacgctggtcagcgagtgcgacaccaccgaagcggcaatggagcatatcgacgcctggggataccagcgcctctataaccatctggctgagcgaatctgccagcgtgttcttgagatgctgcgcttcactcagcaaccgcccacctgcgacgcggttctgttttcttttgataaccaggtactgggcagcagccgtccgctggcggcgattgcccgggagctgacatgttga

SEQ ID NO: 259224 - DNA, 606 bp, Klebsiella pneumoniae
atgttgacggtcgtgggaatgggcccggcggggctgcagtggctgaccccggccgcgcgcgaggcaatcgccgccgccgaggcgctggtgggcggcagccgtcatctccagcagtttcccgacttcgccggcgagcgcttcgcgctgggggccgatatgccggcgctgctggcgtggattgaggcccgtaccgggcgccgcgtcgtggtgctggcctctggcgacccgctgttctatggcattggcacccgactgattacccattttggccgggaacgagtgcaggtgatccccggcatcagcgcggtgcagtacctctgcgcccgggcgggcatcgacatgaacgatatgtggctgaccagcagccatggccgggcggtgagcttcgatgctctggccgcccaccggaaagtcgccatggtgaccgacggccgctgcggaccgcgggagatagccgcccagctgatggcccgcggcaaaggccatcgctggatggtgataggcgagaacctggcgatggaaaacgagcggatccactggctgccggtcagcgccgtggaggacgaatatgagatgaatgcggtggtgatcctcgatgaaagatga

SEQ ID NO: 259225 - DNA, 570 bp, Klebsiella pneumoniae
atgaaagatgagctgtttttgcgcggcgcccaggtgccgatgaccaaagaggccgtgcgcgcgctggcgctggcgaagctggagctgcaccgggcgcgccatctgattgatatcggcgcgggtaccggcagcgtcagcattgaggctgctctacagaacccggcgctgcgggtgacggcgattgagcgtcaggccgacgcgctgcgcctgctggcggagaaccggcagcgctttggctgcgacaacatcgctatcgtggcgggcgttgcgccgctggcggtcgccgacaaagccgacgcgatctttatggggggcagcggcggccacctgacggcgctgatcgactggtcgctggcgcagctgcatcccggcggccggctggtgatgacttttattttgcaggaaaaccttcatagcgccctggcgcacctgcggcagagcggcatccacgaggtggactgccagcagctggcggtctccaccctggctaccctgggcagcggccactacttcaaaccccataatcccgtttttgtcatcgcctgtcagaaggaagaaaaccatggctga

SEQ ID NO: 259226 - DNA, 774 bp, Klebsiella pneumoniae; identical to SEQ ID NO: 139156

SEQ ID NO: 259227 - DNA, 1056 bp, Klebsiella pneumoniae
atgaataccgtaaagcctgaatccattgccctgttttgcctgacgcccggcggcgtgcggctggcaaaacggctggcggccatgctgccgcttacctgttacaccagcgaagcgctgcaggaagaggggtttatccccttcaacggcggctttgccagcgctgcccgcgaggcgttcagcagcttctcggcgctgatttttatcggcgccaccgggattgccgtgcgggtgctggccccgctggtgaatgacaagctcagcgacccggcggtggtggtgattgatgagcgcgcccggcacgtcatcagcttgctctccggccatgccgggggggccaatgcgctgacccgctatctcgccgggatgctcgacgccgacccggtgatcaccaccgccaccgacgtcaacgagctggccgccctcgacacgctggccttccagctgaacgcccggatgaccgattttcgcgcggcggtgaaaaccgttaaccagatgctggtgagcggtaagcgggtggggctgtggtgcgacggcgaatttaccggggcgctaagccgctgcgaccggcgcgggtttatcccggtaagcgacctggcgcgcttgccggcgctcgacgccctgatctgcgtcaccctgcgccggtcgctgccgccgctgccggtgcctcactggaagctggtgccccagcgggtggtggcggggatcggctgtcggcgcgacaccccctgcgcgctgctcagtacgttgctggatcgccagcttgccgctcagcgtcttgacccgctggcgctgaaagcgatcggcagcgtgagcctgaaggcaaacgagccggggttgcgccagctggctcaccgctgccgggtgccgttcgaaacctttagcgccgaggcgctgcgcgagcacgagcaccgctttccggcctcgtcttttgtccgggagacggtcggcgtcggcagcgtctccggcccggtggcctggctgctgagtcagggaaacctgtccggcgaaaccctgcgtgagcagggcgtgaccattactttgggagtaacacactga

SEQ ID NO: 259228 - DNA, 726 bp, Klebsiella pneumoniae
atgttaagcgtaatcggaattggccctggctcgcaggcgatgatgaccatggaagccgtggaggccctgcaggcggcagagatcgtggtgggctacaagacctacacccacctggtaaaagcctttaccggcgacaagcaggtgatcaaaaccggcatgtgcaaagagattgagcgctgccaggcggccatcgagctggcgcaggccgggcacaacgttgcgctgatcagcagcggcgacgccggcatctacggcatggcggggctggtgctggagctggttaataagcagcagctggacattgaggtccgtcttatcccagggatgacggccagtatcgccgccgcctcgctgctcggcgcgccgctgatgcatgatttctgccatatcagccttagcgatctgctgacgccctggccggtgattgaaaaacgcatagtcgccgccggggaagcggacttcgttatctgtttctacaacccccgcagccgcggccgcgaaggacatctggcgcgcgcctttgcgctgctggcggccagtaaaagcgcagatacgccggtcggcgtagtcaaatccgccggacgcaaaaagcaggagaaatggctgaccaccctcggggagatggattttgccccagtggatatgaccagtctggtgatcgttggcaacaaagcgacttacatcgacaacggcctgatgatcaccccgcgaggctacgcgctgtga

SEQ ID NO: 259229 - DNA, 786 bp, Klebsiella pneumoniae
gtgaatcacggcgacgtgctggttatcgggggcaccagcgatgcgcgggcgatctgccagcagctggacgccgccgacgtgcgctacaccctgtcggtggcgacccctaccggcgagcggctggccggcgatatccgcgggcagatacgctgcgggcgtatggagtggcagcagatggcggagtggctcagagcgcagcgcacccgctgggtgatcgatgcctctcacccctacgccgaggtggtcagccagaacattgtgcgcgcctgcgccagcgtcggggttctgctcagccgctatcaaaggccggagcagctgagcgatctgcgccatccgctacttcacgtggtcggcgatctgaacgaggcctgcgcggtggctcgtcgcatcggcgagcggatcctgctgaccaccggcagcaaagatctggcggcctggcgggcgggactggcggagaaaacgctgctcgcccgggtgctgccggtgccggaggtggttcagcactgtagcgatctggggtttggcgtcggggagatcttcgccctctgcgggccgttcagcgccgaatttaacgccgccttttatcgccagtgccgggccgatgttgtggtgacgaaagcctcgggggcggaaggaggctatcaggaaaaagtacaaccctgtcttgatgcggggatcccctgcatcgtcattacccgtccggcgccgctggtgacgggcgatgaactactgcaaagccaggccgatttcactgcgcggttgacgcgctggctgtcggcgacttga

SEQ ID NO: 259230 - DNA, 795 bp, Klebsiella pneumoniae
atgaaaaaagcacttctggtggtgagctttggcaccagctatcacgacacccgcgagaagaacatcgccgcctgcgagcgcgatctggccgccagctgcccggaccgcacgctgttccgcgccttcacctcggggatgattattcgcaaactgcagcagcgcgacggtattcatatcgatactccgctgcaggctctgcaaaagctggccgagcagggataccaggatgtggcgatccagtccctgcacattatcaacggcgacgagtacgagaagatcgttcgcgaagtgcagagcatgcgcccgcgctttcagcgtctgacgctgggcgcgccgctgttgagcggtcatggcgattacgtgcagctgatgcaggccctgcgccagcagatgccgccgctggcggcgacggagcgagtggtgtttatggggcacggcgccagccaccacgccttcgcggcctacgcctgtctggatcatatgatggcggtgcagggttttccggcgcgggtgggggcggtggaaagctatcccgaagtggacatcgtcattaacgaactctcccgccagggcgtgaccggcgtgcatctgatgccactgatgctggtggccggcgatcatgccattaatgatatggcctccgacgaagacgattcgtggaaaacccgcttcaatgccgccggtatccccgccacgccatggcttaacgggttaggggagaatccggcggtgcgggcgatgtttgtcgcccatctgcagcaggcgctgaacaacacgatggagaaagcagcatga

SEQ ID NO: 259231 - DNA, 711 bp, Klebsiella pneumoniae
atgagcggcaaactatacgccctgagcagcggcccgggggcggccgatctgatcaccgtgcgtgcggcgcggatcctcggccagctggatgtgctgtatgcgccagccggccgcaaaggcggcgacagcctggcgctctccatcgtacgcgagtacctgggcgcacacacggaggtccgctgctgccattttccgatgagcgccgacagcgcggaaaaagaggcggtgtggaacgacgttgccgcggcgctggcccaggaggtggcggcgggcaggcaggtcgggtttatcaccctcggcgacgccatgttgttcagcacctgggtctttctgctgcagcggattggctgcccggactggctggagattgtccctggcgttacctccttcgccgccattgccgcgcgggcgaaaaccccgctggccatggagcagcagtcgctggcggtgatctcctgcaccgcgccggaagcggacattgccgcggcgctgcgccagcatgacagtctggtgctgatgaaagtctacggccgcttcgcccgcattaaggcgctgctggcgcaggcggggctgctggatgcggcgctgatgatgtcagaggccaccctgccgggcgagcagtgctggcgccgtctgcgcgaggtcagcgatgaccagccgctgccctatttctcgaccatcctggttaacaaacagtgggaggaggcgtaa

SEQ ID NO: 259232 - DNA, 738 bp, Klebsiella pneumoniae
atgaatcaggtgaaatcgctgaagcagctttcgtatggggggctggcggccgctgttctgctgatcatcgtcccgcaggaggcgttcgccatgcatatcatggagggctttttgccgccgatgtgggcgctggcgtggtggctgctgtttttaccctgcctgtggtacggcctggtgcgcctgcggcgtatcgttcaggaagagagcaatcagaaggtgctgctggccctctgcggggcgtttatttttgttctttcggcgctgaagatcccgtcggtgaccggcagctgctcgcatccgaccggcgtcggtctggcggtgatcctcttcgggccgggcgtggtggcggtgctgggggcgatcgttctgctgttccaggcgctgctgctggcgcatggcggcctgaccacccttggcgccaacgggatgtcgatggcggtgatcggcccgatggtcggctatctggtgtggaagctggcctgtcgggcggggatccgtcgcgatgtcggggtctttctctgcgccatgctggcggatctgatgacctactttgtcacctccgtccagctcggggtggcctttcccgatccggcaaccggggcaggcggatcgatcgccaagtttatgggcatcttctgcctgacgcagatcccgatagccatcgcggaaggcttgctcaccgtgatgatctacgatcagctaaccaaacggcggctgatcgccgcggagggacattaa

SEQ ID NO: 259233 - DNA, 282 bp, Klebsiella pneumoniae
atgaaaaagaccctgatcctgttggcgatggtggccgccctgatgatcctgccattttttattaaccacggcggcgagtttggcggctcggacggtgaagcggagagccagatccaggtggtggcgccggattatcaaccctggttccagccgctatatgaaccggcgagcggcgagattgagagcctgctgtttaccctgcagggctcgctgggcgcggcggtgattttttacattctcggatatgcgaggggcagacagcgccgtgatgaccgggtttga

SEQ ID NO: 259234 - DNA, 678 bp, Klebsiella pneumoniae
atgaccgggtttgaccgactcagctaccagagccgctggctgcaggtggcgccagagcgtaagtttctgctctggctgctgctgatggcgctggcctttacgctgccggcgtggggccaggcgctgacgctggcgctgaccgccgcgctgacctgctggctgctgcgggtctcattctggcgctggtgccgctggatggcgctaccctttggctttttgctggtcggcgtgctgaccattctgttcagcgtcagccgcgatccgcagatgctgttagcgagcttgcggctgggcgctttctcgatagggatttccgcccaggggctggccgtggccggggagaccttctggcgcagcctggcggcgatggcggcgacgctctggctggtgcttaatctgcctttcccgcagttgattattttactcaagcgcggtcgcgtaccgcggctgttgacggagcagatcctgctgacatggcgcttcatttttattctgttggacgaggcgatggcgattcaccgcgcgcaaactttgcgttttggctatggtagcgtgccgcagggctatcgctcgctggcgatgctggtgggactgctgttcacccgcgtcctcctgcgctatcagcagatgagcacggcgctggatatcaaattgtaccagggtgattttcacctctaa

SEQ ID NO: 259235 - DNA, 1212 bp, Klebsiella pneumoniae
gtggctcttatgacgcatgatgctttttcccttcgcggcctcgcggcaggctgcgcgcttttatttctcgtcgcgcctgcggtgcaggctgcggaacaactccccgatgcgccatccattgacgcgcgcgcctggatcctgatggactatgccagcggcaaagtactcagcgaaggcaatgccgatgaaaaactcgatccggcaagcctgaccaagatcatgaccagctacgttgtcggccaggcgctaaaggcgggtaagattaagtctacggatatggtgaccatcgggcgcgatgcgtgggccaccggtaacccggcgctgcgcggctcctcggtgatgttcctcaagcctggaatgcaggtgtcggtggaagatcttaacaagggcgttatcattcagtccggcaacgacgccagcatcgcgattgccgactacgtggcgggcagccaggatgcgtttgtcagcctgatgaacggttatgcgcagaagatgggcctcaccaataccacctttaagaccgtgcacgggcttgatgcgccgggtcagttcagtaccgcccgcgatatggcgctgctgaccaaagcgatgatccatgatgtgccggaagagtatgcgatccacaaagaaaaagagttcactttcaacaaaattcgtcagccgaaccgtaaccgcctgctgtggagcacgaaccttaacgctgacggcgtgaaaaccggaaccaccgccggtgcgggctacaatctggtctcttccgcaacgcaaaacgacatgcgcctgattgccgtcgtgctcggcaccaaaactgaccgtatccgatttaacgaatctgaaaaattgctgacctggggcttccgcttttatgaaaccgtgacgccgattaaacctgatgccaccttcattacccagcgcgtctggtttggcgatagcagtgaagcgaagcttggcgcgggcgatgccggttccatcacgctgccgaaaggccagttgaaaaacctgaaggccagctacactttgaatgatacgcaactgaccgcaccgctgactaaaggtcaggttgtcggcaccatcgactttaaactgaatgataaaaccattgaacagcggccgctgattgttatggaagcggtcaatgaaggcgggttctttagccggatgatcgatttcgtgctgatgaaactgcacggctggttcggcggctggttctcgtaa

SEQ ID NO: 259236 - DNA, 759 bp, Klebsiella pneumoniae
atggaaactcgtcgtgacgaacgcatcagccagcttattcaggcactcaagcgcagtgataaactgcatctaaaagaagcggccaccctgcttggggtgtcggagatgactattcgtcgcgacctcaacggccacagcggcccggtcgttttgctgggcggctatatcgttctggagccgcgcagcgcgacgcactatctgctaagcgaccagaaaacgcgccttgttgatgaaaaacgccgcgccgcccgccatgcggcaaagctgcttgaggctcatcagatggcctttttcgactgcgggaccaccacgccgtggattatcgattccatcgacaacgccctgccgtttaccggggtctgctattcgctcaacaccttcctttccttgcaggaaaagccacagtgccgcgcgattttgtgcggcggtgagttccacgccagcaacgccatttttaaaccgctgagcctgcaggatacgctaagccatctttgccctgatatcgcgttttattccgccgcgggcgtcgattgcgagcagggagcgacctgctttaacctcgaggagctgccggttaaacactgggcgatgaaaagcgcgcgctaccacgtgctggtcgtcgatcacagtaaatttggcaaagttcggccggcgcggatgggcgatttatcgcagtttgacgtgattgccagcgacgtgtgtccggatgacgagctgcttacgctggcgaaagaaaaacaaatttcactcctttactaa

SEQ ID NO: 259237 - DNA, 219 bp, Klebsiella pneumoniae
atgcgggtggcggtttccggcatcgcccgctgtagcccgaagaaggcgatagcggccagtacggcaaacagaacaaacatcatctcccacggcaggatatgtacccaggccgcgcccaccagcggcccaagcagcggcgcaatcaacgcgacgttggccattaaggcggtaatcttgatgcataccgcctcttcaaaagactcctgtatcgccgcatag

SEQ ID NO: 259238 - DNA, 351 bp, Klebsiella pneumoniae
atgctgataggtttccagccagtcaaccgggaagaagcccgcttcggccagcacgcagtagtagcagcccaccgcatggcctttcgactggatgtagatatcgcgctggtcatcatccacgcggtccggcgcgacgttcataatgcgaaaatagagcgcagtgagcagttcaacctgcgacaggtcggcgccggtgtgcccgccagcagggctattggcattcaatctgacgatatggcgacgtacggcgcgggctttacgctcaagtgcctggacatcatagctatagggattcatttaatacctctgaatttattttcaacttggaatatttattccgtcagggactaa

SEQ ID NO: 259239 - DNA, 951 bp, Klebsiella pneumoniae
atggctaagcaggatgaacaacggctattagttaagattgccacgctctactatctcgaaggacgcaagcagtccgacattgctcaacttctctcgctttctcagtcatttatctcccgagcgatcacccgctgccagaaagagggcgtggtgaaaattagcgttgttcagccatcaaatatttttcttaaccttgaaaaaggtcttgaggatcgttacggaattaagcaagccatcgtggtggataccgaagaggatgccagcgatcacaccatcaagcgcgctatcggttccgccgctgcccactacctcgaaacgcgattacggccaaaggatctgattggcgtctcttcgtggagttccaccatccgcgcgatggtggatgaggtacacgcgcaaaacctgaaagccagcggcgtcatccagctgctcggcggcgtagggccgaacggcaacgtgcaggccactattctcacccagaccctggcgcagcatctgaactgtgaagcctggctgctcccttcccagagcattgaaggatccaccgaggagaagaatcgtcttgttgccagtaaagatgtcgccgacgttattgcccgctttgatgaagtcgatatcgcaattgtcgggatcggtattcttgaaccttcgcagctgctgaaaacatccggcaactactatcacgaagatatgctgcaggtgctggcggaacgcggtgccgtgggtgacatttgcctgcactattacgataaaaacggcagagcagtgttacgcgatgatgaagatcctgttatcggtatggcgctggagaaggtgaagaagtgccctaacgtggtggccctggccggcggcagcgagaaggtcgcagctatcaaaggtgcgctttcgggcggttatatcgatgttctgatcaccgattacccaacggccagactgcttattgccggttaa

SEQ ID NO: 259240 - DNA, 687 bp, Klebsiella pneumoniae
atgggtgtcgcacggcgcgccgcactgatgacagtgcgcgataacgtcattggagatccgctcgcccatccgctcatcaaagacaaagtttttaccaatgaaacgcaccggcagcccctgctcgcgggcgcgacgggcgtactcgatgatgccaccctcgatgtgccagaccttattgaagccgttatgcttcatccaagcgctggctttttcacagcgaatgccgccggtgcaatacatgacaattttcttgtctttatggtcctgcatcatttccactgctttcggcagctggtcgcggaaggtatccgccgggatctccagcgcgttttcgaaatggcccacctcatattcatagtggttgcgcatatcgataaacacggcatccggatcgtcaagcatcgcgttgacttccgccgccttgagatactcccccacgttggaggcgtcaaacgagggatcgtcgatgccgtcggcgacgatacgatcgcgaactttcaggcgcagcacccagaaagacttaccatcgtcctccacggcgatattgaaacgcagccccgccagcgccggatcgaagccatagagaaactcacgcagagcctcaacgttgctttgcggcacgctgatttgcgcgttgatcccttcccgggccagatagatgcggccaaagaccttcagctgggttaa

SEQ ID NO: 259241 - DNA, 411 bp, Klebsiella pneumoniae
  misc_feature (351)..(360): n is a, c, g, or t
atgattgcgcgcatctggtccggcgaatcgcctttatggcggctactgcttccgctctcctggctctatggcctggtgagcggattaatacgactaagctataaactgggatggcggaaagtgtggcgagcgccggtgccggtagtggtggttggcaatttgaccgccggcggcaatggcaaaacgccggttgttgtctggctggtggaacagcttcagcagcgcggtattcgcgtcggcgtggtgtcacgcggctacggcggaaaagccgcgaactatccgctgctgcttaatgtggatacgcataccggggaagcgggcgatgagccggtgctgatttatcagcgtacnnnnnnnnnnggacgaagctgcataggtatctctcccgggcgggcgatgagccggtgctga

SEQ ID NO: 259242 - DNA, 537 bp, Klebsiella pneumoniae
  misc_feature (496)..(505): n is a, c, g, or t
atgccggtattgtccctctcgcttaaagaagctcgccatcttcacctggccgcgcaggggctgctgaaaaagccccgccgtcgcgccaaacccgaggatgttctgcaaaccattaagcagatgtccctgctgcaaatcgataccatcaacgttgttgcccgcagcccttatctggtgcttttcagccgccttggccactatccgcagcgctggctggatgaggcgcttcgcgccggtgaactgatggaatactgggcgcatgaggcctgtttcttaccgcgcagcgacttttcactggtgcgtcaccgtatgctgacgccggataaaatgggctggaaataccataccgcatggatgaccgagcacgctccggccattcaggaactgctggcccatattgctgaaaatggcccggttcgctcggcagactttgaacatccgcgtaaaggcgccagcggatggtgggagtggaaaccgcataagcgccatcttgaannnnnnnnnngccagcggatggtgggaggggaaaccgcataa

SEQ ID NO: 259243 - DNA, 666 bp, Klebsiella pneumoniae
atggcaaagcgcttttgctctttccagcgcctgcagcgcctggttgtactgaatcgcacgggtctgctgcacgtccagcgcctgctggtagtcggcaagctggtttttcagctcatccacttccagctcggcggcttcggcgcgggcttcgttctcttcctgctggtcaaccgcttccgcaacgacttcattttgctcttcgaggcgaatctgcagttcatcaagatccgcctcatagcgctcgattttttcctgctggcgcagagcggtctgcaccaggttcagatggtcgctggcggcctgataatcggcttccagatcgccttccgcgccgttatgttcctgcagctcgcgggccatatcgacgtgcttatactgttcagccgcgagctgagcgcgggagctgaacagatcgcggcgatactccagcgctttgtcgagatgaatgcgtcgctcgtttgcgtggcgcatatagtcggcggcaacgtagttggtggcttcgctgatcagatgtttgaacaggtcgcgatccgactgcgttacgcggatcgcttccagggtcatgcggttttcacgcagcgccgcttccatatcctggaatgctttacgcacgccgctgttttccggcagcaggtagtcgcgcagcgagcgggtaatggtgcttga

SEQ ID NO: 259244 - DNA, 2070 bp, Klebsiella pneumoniae
atgcatcgcactatttctgagttttatcgcattccccctttacttattcgggcgctaaaaagcggaatttcctccgtggtggagtttcatctcagcagggggttacccaaagattcacgagattctctgggaaacagcccattgatgattgcggcccagtatgggcatttcgctatttgcgaaatgttgttgcgtgcgggtgttgatgttgaacatcaaaacaacctcgggttgtgtgccagtgacctcgcgcaggagcaaacgctgcgcgatctgttggcccgttatcggcaatctcctccgcctgccgggcagcaacctgcgggggagccagttgatgatgccgaagttgaaattgaagccaaagccgaagcagatgctgacgttgaaacagaaccccccaaaactgaaaccgcaacggattttatgcaatgggatgctgaggttgaatcggaacccgccgaagataatctgacattacgacatgcttccgcgaaagctcagcaattattatcccgctatcgcccgaaagatgactctgctgagtggagcgatatcgaactaacgctccctgatccaccgacgtcagtttctcactccccgcaaaattatcctcgtctctcaacgttgctcaccggcgcactggataccggtcgtgtctctgtgcgtgacatcctgcatgccggggaagaggatttcggtatgccgtggcctgaattctggctcagcgtagaggcattgatcagggacttaccgctgattgtggatgacgatgatgttattccgccagactctgctccggcgacattagcggcgagtgattctcttgaaccctggtttgatgctttcaatgcattgcggcagttcggtatcgttgaaaactatcttgtggatatccgccagtgggatgtcgtggataaaacaaaagaagaacgactcggacagcgcatggatacggcgctaatcaatctgataaaaatcttggcgggtttatccgaagcggaatatctgcagttgctgcagccgaattaccttccggtgccagcgcctgaaatttctgaaaaggaagacgtcacggaagaagcggatgaggaaatgcctgccgtatccgatgacgataacgatgacactatcagctttaccgagctgctatttctgctgagaagtgggaaagcagacgagtatcaggataatcatatcccccgaccggagtatgccgacctgcaacagatagtcgagcgcgcccgaacgctcatccctgatgaaggccataaaatgagtctgtatgtcagcagttacagagaggcctgggaggggctgatccacgtcaatttgcgtctggttgtcaccatcgcgaataaatatcgcgggcggggattagatgtcgaggacctgatccaagaaggtaatcttggtttgatcaaggccgttgaaaaattcgactatcgacgcggatttaaattctccacgtatgccacctggtggatccgccagaagatcacccgcgcgattgctgatcaggcgcagctcatccgtttacccgttcacttctatgagcaattcaggctctggcgaaaaagtcgggatcaattgcagtatcgccaggggataacgcccacgatcaaacggctgcaagaattgactgaccttccagaaaatcaactcaagcggatggcaaaatatgaagaacagacggtgttgattggcgattttcatgatgacacccaggacctcgaagcggcgctgtccggggacgcgatcttgaccggaaaggatgtcaccagtgctcccgttcagtctctcgagctaagagaacgtgtttcattggtgctggaaacgttgttgccacgcgaaaaacagatcataaaaatgcgttttggcatcggtatgacgcaagatttcacgctggaagaggtgggtaaacagtttgaggtcacgcgagaaaggatacgtcagatagaagccaaagcgctccgtaagctccgttatcacagccgggcgtcgaaattaggcggcttcgtcgaacagtgggaaaccgcgttgagcgagatgcaggaagaagaagaatga

SEQ ID NO: 259245 - DNA, 705 bp, Klebsiella pneumoniae
atgtcggactacaccttcaacatgggtcccctgcgcagtgcgatccatattcagcttcacacccataacgccacccggctgtggaccgggcgacgggcgaccgagaacggccctgcgccaatcatcggcatgccgcgctttatcgaaatcctcaaccagatacgcatcgcttcagagcatgacgatccctacgccgacctgtggatgctgcgtatagaggaaaagctcgcgcagtcgcgcaaaataatgcaaatgatgctggagcaggcgaaagcgctgtttaacgaattaccagaaggcatcgatattgaaagctgcctcaacgtacagcccgcccgtttcccgctatttatcaacgcaccgctggcataccagggcgtctatctgctgaccgatttcgaccagctcgcccgccagcttctgctggcttcgcatatcgccgtgctgtcgcgccgggatatgcaccactggctgaaccggggcgcatcggtgatccgcagtgccttcagcctggcgcagaaatatcagatttccggtctgaagcgcagggattttatcgatgatacgccgcaggccagggctgtcatcacccgctgcggcccgctgccggaggcgatactgagcggcaaactgcgctcctcatactcaccgccgttatcctctgccgcccagaacactacaccgggagcctcccatgatgaataa

SEQ ID NO: 259246 - DNA, 519 bp, Klebsiella pneumoniae
atgatgaataacccgacaaccggctaccagcctctggctgatgacgactataaaatgcaggtttacgtctcctcgctaaaaggccttttaaagccttttaagagtaaaggggagcttgagctactggaaagcaacgccagagccgcccgtgagatgatggaaccgctgatgcgacgcttgatccagagcgcccggcgctaccccgtgcgccagcttccgctgatcttcaccatcggcccggctccttccggcgcaaattttctgcgctggcgtaaccagcagaataataaaaccggtactccggcattctgtcacctgatcggcgacccgaaagtgccgcaacgcgccagagataccctgctggaaatcgagaaagatcgcatcgtgttcaacatgcagatgtcagtgctgacttttatcatccgccaggcgcgggagtgccaggaaaaagtcgagcaggcggaaagattgcacatggggttgctcaccctgccggaaaataatgaacgcgggagataa

SEQ ID NO: 259247 - DNA, 411 bp, Klebsiella pneumoniae
atgaacgagaaaacctatttcaacctgtacaccagcggcctgggctacgttaaccgtgtccgcaccgtgaccccgaaacgcggcgagccttttttatgctgtgatattgcggcgctatgtggggcagccgatgcggtggaatatgtccgctttgactgcaaagtcaccggtaacgaagcgcggaaactgattgcccgctgcgagcaggcggtcaatgaaaagcgcaaagtgctgattcacttccggctgggcgatttatatgtcgatatgttcacctacagcaaaggtgagcgtaaaggcgaaaccggcgtcagcctgaaagcccgactgctctatatcggtcttgtcaaaatcgacggtgaagtcgtctggcaggccagcaatcaggaagcagaagaagatgccgcctga

SEQ ID NO: 259248 - DNA, 1119 bp, Klebsiella pneumoniae
atgaaaaaacgtatactgctcagtattattgccggaactgtaatgatgagcgctcaggcaagcaatgtttatgacaataaagagaaaggtgcgaaggtcgatattacaggctcattacgtctgatgttagaaaattcatcgaaacgcggaagaaccgacggcgacagtgattcaaaattgaaagatgagggttctcgcgtcggcgttaaatacgtacaaagactaacacaagaaatcgatgccgtaggttattttgaatatggtggtgatacgcaaaaagctgatgacaattttacctttaacaatcgtcagtcttatggtggtctgaaattcaaaaacatcggagagcttgattttggtcgggtgacgtctccttttgattatgtacaccgctcagattacagctatgagtacggcaacagtggcgctctctattatggtggaggaaaaatagcgcgcgtcggtggtggtgacaataactatataaagcgtgtatctaatacaataaaatttatgagtcagtcatggaatggcttacaggcaggtgcaacttataccatgcagactggcaccaatgttaacgatgttaaggacgcctggactatgggaatattttataaatccccatggaacctgcagataaatgccggtatcggccatcagacaacgaatggctccacggacgccaatgcaaaatatggttattccgatgtgaaatcggcaaaagaagatatttgggggattggcatgagatatgacatcccggaaattaatctctctgtcgggctggattacggcggttatcaaatcaaggatggtaacgagggtgaggatgacgactatgcgccttatcccgataaaatcaaagcaaaactatacggcgctggtgctaaatggacttatgaccaatggggcttttatggcgtttatggcctgcgcgatggtgataaagccgcagataattatcaggagacgcgtatcattttcggttcagattatgccttcaacaaactgtttaaactctggcttgaatataccaacctgacggcttcttccgacgatcccgacgaccgggttagtgatgacaaatttgctttaggtcttcgttattacttctga

SEQ ID NO: 259249 - DNA, 141 bp, Klebsiella pneumoniae
atggcagagtgggaaacaacgcagaactcattaccggcattgaaaaaaaagggcctgcatgcaggccaatatggttccaacaaaaagaaaagcagtggctattctggtaatgaccacttaggagaaatctattccgcgtag

SEQ ID NO: 259250 - DNA, 447 bp, Klebsiella pneumoniae
atggttatcacactgctgatgctgggcggctgcaactcaccgcaacagcccgctgtgcctgcgccaaaaccaacactaccgcccgcgcctgaagtggtgcgctatgaccgctatctgctgattaacacccgccctgacgaagcccaacgcaacccgctgcaccaaatcgtcaacatcaacctgccgctgaacctgaagctcaccgttggcgacgccttcgcctggctgctgaaacagagcggctacaacctatgcgccgatgaccatccaacgcagtttctggctggcaaaccgctgccgctttcacaataccggctcggcccgatgcgactggaagaggcgctgaatacgctggccgggccgggctggctgatgcagaccgatgtactgaatcgcgaagtctgttttcacctgaacacgccaggaacgggagaccatcatgcttaa

SEQ ID NO: 259251 - DNA, 609 bp, Klebsiella pneumoniae
atgcttaaacgtctggcctacctgattaccggcagcgctctcctgctcttggcggcggcgatgttctggagtttcaaccgcttgaacaccctgacgctgacgcagcaacagacacaacgccagatggtgcaatggcacaaccaaccgcagccagacgacaattaccgagaactgaaggttgccgtaaaaaacatcaccgatcgcacggaagcccttgccagacagcttaacgatgccgccagcgcgcaggccgaacagcttcaacccattaatgaacagatcaaggcgctggagagacaggtccagaccctgagcaccagttatcaacacctgcaacaacagtccgccacgcgcagccgcgcaaaggcaaaaagccccatcccatctccgctttgggccgcaaaggcccctttttctcttatcagcagcgagtttcgcgccgggcggcagttcgccgtcatcgcgccatccggctatcgctcgctctcacagcttcagcttattgcccctggcgacaacgtgcagggctggcaactgctgcaactggacggcagtcacgccactttccgtaaaggcagtcagcggttgacgctgaacgccggagagtaa

SEQ ID NO: 259252 - DNA, 663 bp, Klebsiella pneumoniae
atgcgcagatacctgttactgtgccttttgctactgccgctgtttgccagcccgcagcaaacccgcattgaagaacaagccatcacccacacgcaggcgcaggcgcaggcgcagcagtggggattaaccgacagcgaatggcagcactaccagcaactgcggcagggcgagcgcggtatctggtcgccgggactcgatccccttaccaccctcggcgtggaggccaacagcgacgccgaacgccagcgctacgccgagctgctggtccgtaaagagcatcaacgggtagagaaagagctggcgttccagcgtgcctacgaccaggcgtggaagcggctttacccgacgcttacgcccatccgcagcgtcgtccagccacgtctggcgctgttcgtcagcgaaaaatgcccggcctgcgagacgctggcgcagaagctcatcaacgacgaccgcccgctggacatctggctggtcaacagccgtaacgaggatgccagcctgcaacgctgggctcagcgccagcatattgatatgcgcaaagtcgaacgcgggcagataacgcttaatcacgataacgggcgctggcaacgcctcggcggcggaaagctgccgttattactggaacaacagggggagcaatggcgtcccgtctctgcaccctga

SEQ ID NO: 259253 - DNA, 534 bp, Klebsiella pneumoniae
atggcgtcccgtctctgcaccctgacagtcggcctgttcatcagcgcccacgcctgcgccgtgccgccgctgtatgcgcaaatcgcccgccagcagcaggttccggcggaactgctctacgcggtggcccgcgcggaaagcggtacccggctggcgcaagggctacatccatggccgtggacgctgaatattgccggaaccgactaccgttaccccagccgttcttcagcctgccgggcattgctggacttcgcccgtaccagtagcctgaaacgcatcgacgccgggctggggcaaattaacctcggctggaacggccagtggtttccctcgctgtgcgccagttttgatccagcggacaatctcaccgtcaccgccctgctgctgcgtcagcactacaatgcctcccccggaagctggctggacgctgccgcccactaccaccatcccgccggaggcaagcccgccgccgtttaccgccagaaaatcagccagcaaatccggctgctctccgcatcaggaacgtcgccatga

SEQ ID NO: 259254 - DNA, 408 bp, Klebsiella pneumoniae
atgaaacaccttattccagccatgctgctgtttactgccgccgcgattgccggacctgccgttcccatgcaggcgctggatgaggccaggttactgccggtcatcacccacaatctgcatcccggtcagcaaccccgtctggcgctcagcctgccggggatgacgccgctgtttttaatcggcgacgatccgttgtccacagaatggctgcgccagcaccaggacgcattaaaaaacctgcacgccaccgggctggtcgtgaacgtcgccacgctggcgcggttgaatgccctgcggaccatcgctccagcgttaacgctgctgccagtcagcgccgacgatatggcaaaacacctgcccatcaccgcgtatccggtgctgatcaccgacaaggggctcacacagtga

SEQ ID NO: 259255 - DNA, 2034 bp, Klebsiella pneumoniae
gtgaggctcgattttatcctgcgcccggcggtggaactttacagcgccagcgcggccctgctggcggcggtatggtgcatagcggctccgcaaacgctgctgctgacgccttattccggctggctgctggcgctggccttgcttgcgctgtctgccctgcggctaaagcagggattacgcatcctgcgctttcgccgccgcgtgcgtcatcttccactctggacgctctctgccagccgtatcccgctgttacccgacgccctgtttcttgggcgcggctttcgctggctacccacgcatacccagcggctgtatctgtgtcgcctgccacagtgtgagcactggctacggacggatcgcccttccgccagcggcggcgatccactgctgcacggcgtggagctgtacgaaggcagcgtcacgctgccgctgcgcgatcgaccggggcatacgctggtgctcggcactacccgcgtcggtaaaacccggctggcggaactgctgattgctcaggatattcgccgtggcgacacggtgattgttttcgaccccaagggcgatgccgacctgctgcgccgcgtgtgggcggaggcgcaccgcgccgggcgggaaagcgtcttctggttgttccatctcggctggccggagatctccgcccgctacaacgccgtcggacgctttggccgcatttcagaagttgccagccgtatcgccggacagctctccaccgaaggcaactccgctgccttccgcgagttcgcatggcgcttcgtcaacatcatcacccgcgccctggtggcgctgggccagcgcccggactatgcccgtatcgcccgtcacgtgataaacatcgacgagctgtttatcgactacgcccgcgtctttctgcccggtcacgacaggctggcatgggacaacgtggtgcggattgccggtggcatcaccgagaaaaatacgccgcgtaatcttcagggacgggacagctacgttgtcgcgctggagcagtacctttccaccacccgattacacgacccgatcctcgacggcctgcgctctgccgtgcgctacgacaaaacgtatttcgacaagatcgtcgcctcgctgctgccgctgctggaaaaactgaccaccgggaaaatcgcccaactgctggccccggactacggcgatctcaacgacccacgcccggtgttcgactggcagcaggcgattcgccagcgggcgattgtctatgtcgggctggatgcgctgtccgatgcggagattgccgccgccgtaggcaactcgatgtttgccgatctggtcagcgtcgccgggcatatctacaaacacggcgtgatggatggcctgccgcaggcggaagaaaaagcagccatcaacctgcactgcgatgagttcagcgagctgatgggcgacgaatttattccgctgatcaacaaaggcggcggcgcaggcgtgcaggtcacggcctacacccagacgctctccgacatcgaagcccgcatcggcgaccgcgccaaagcgggacaggtggtcggcaacttcaacagtttgatcatgatgcgggtgcgggagaccgccaccgccgaactgctgaccagacaactgccgcaggtggatgtgctcagcaacagcgtcagctccggcgtcaccgacagcgccgacgctcagggcaatatcgggttttccagcaacacccaggatcgggtgagcagcgtacaggtgccgctactggaacccgcctcgctggtccagctccccaaaggccaggcatttgccctgctggaaggtggccagctctggaagttacgcatcccgttaccggataccgcgcacgatccgctgatgccggaaaacatcgcgcaaatcgcccgctatatggaaaaacagtacgacagcgcgcccgcatggtggaaccgcccggagacagttgtaacggcgaaaaatgaccctattttatggctgaatgacagcgaaaccacggagaaactgaccgatgatatcccggacacaccgccagctcgtaagcgttga

SEQ ID NO: 259256 - DNA, 1779 bp, Klebsiella pneumoniae
atgtttaaattcaaggtttcctatgttgcgctggcggcagcgctaagctcatccgttgtttatgccgacccgtcaagctatacgcataaatcaggagcaaatgttattgatattgaagcgcctaatgccgcaggcgtctcgcataacttatatcgcgaattcaacgtcggccctaacggcactattttaaacaacagcgccagcgacgttaatcacagcacgcacggtaatatcgctaagaataataatctgaccaacggcagcgcttctgttattttgaatgaagtcacctccaatcaaatgagtaacctgcagggctttatcgaggtgaatggacaaaaagccgatgtcgtgatcgccaaccccaacggcatcacctgctccgggtgcagttttatcaacaccaacaacgcaatacttaccacaggtcaggtcaacctgagcgataccggcgcgattgagagctatacggtcacgcaaggcaagatcaccatcggtgataaaggtatggatgcctctactaactatgccgccctgcttgcggatgccattgcgattaacggcaccgtgaccgccgccaacgcaacattaggtgcgggtaacttcacgtttgacaacaataccgggaaaatagctaccctggggaaaacggcgacggttatgcagatggttacaccagaatatagcattgatatcagcaatctgggcggaatcaaggctaatagcattagtatggtgggtaataccttaggacttggcgtgcgtaataaaggcactattgccaccaacaacgtactcgccatgaccagctatggttcgctgattaatgaaggttccatcaatacggacggcactatggctactatggtatccgctggcggaataaaaaatacgggtacgattaatagcacagcttacataacgcagctctccagcatgggcgccctgaccaatgaaggctccattaccagcagcaaacagctggttgtcggcgccagcggcgacctccttaacacgggaaatattaagggaaagcaagcgctatcggtagtcagcgacggcaatctcactactcgctatgggtcatatatcagaaccgatggtcagttagtggtttccgccaaaaacatcgacaacggcggagcaatctggggaaatatcacgaacgtcgcgttcagtggcgatcgccttagcgtcaccggcaacctttggggctattccagccttacagtacaatcagtgaagggtaaaaatatcggttcgggtgaaatacataattcaggaactattaacggtggcaatgtagcgcttatcaccgacggaattctgaaccaggagggtaaccttattgggcaaaattcgttgacgctcaaaactaaagtcatagacaacacttattatatttacggccgctctctgaatatagagagtgattaccttcgcaacagggcaacaatcgatggggataattcaaacatcaccgcagtcaacggcattcttaatgaaggccaactttctgcaagcggcgatatgacgctgtatacccaaacgaatgctgacatcactaactacaataccattaaagctaatggcaccctgacgatgagcaccaggaatgtcaaaaatggcggctaccgctgcggctttttctatctgtcaacctgcggtaaaggatctatttcctctaacaaactggtcctcaactcttatcataactacgcctcggaaatgggcggtaatcagcaatataaaagtgccgaaataaatactatccgttaa

SEQ ID NO: 259257 - DNA, 342 bp, Klebsiella pneumoniae
  misc_feature (215)..(223): n is a, c, g, or t
atgaacagcgcctgggtaaaacacgcaattagtgaaattaatgccgattatcagcgttccgccgacacgcaccttatacgtctggcgctgccggcgttccctgggatccaactctatctgaaggatgaaagcacccatccaaccggtagcctgaagcatcgcctggcccgctcgctgtttctgtatggcttgtgcaacggctggattaaagaagnnnnnnnnngccttcctgtacggcaaagcgtaaaattgaacaaattgagttttacggcggtcgctgccatttcgtcgacagcgcctgtgaaatctatgccgcctccgaaacgctggcgcgcgagctga

SEQ ID NO: 259258 - DNA, 348 bp, Klebsiella pneumoniae
atggtgaaactgatagataaagcccagttcgcgattgcgcagatcggcgcgggcggcggcggagagccggctcattggctggccggaaaagataacgtcaccggaggttggcgtgtccagcccgcccagcagatgcagcagcgtacttttgccggaaccggaggtaccgacaatcgccatcatctcgccctcttcaatgctgaagctgacatcgtgcaacacgtcggtctgcacggtgccttcctgatagcgtttgcacaggttgtcgcattgcagcaggatcttattcataacgtaaagcctcagcgggttgagtggcggcagcgcgccatgaaggatacaacgtag

SEQ ID NO: 259259 - DNA, 1332 bp, Klebsiella pneumoniae
atggaatccctggccggtctctataaaaatcatatcgttaccttacaagaacgcacccgcgatgttctggcccgctttaagctggatgccctgttgattcactccggtgaactggtcaacgtctttcttgacgatcatccgtatccatttaaggtcaacccacagttcaaagcctgggtaccggttacgcaggttccgaactgctggctgctggtggacggcgtcaacaaaccaaagctgtggttctatctgccggttgattactggcataacgtagaaccgttgccgacgtcattctggaccgaagaggtggaggtgatcgccctgccgaaagcggatggtatcggcagccagctgcctgccgcgcgtggcaatatcgcttatatcggaccggtaccggaacgtgcgctggggctggatattgcggcggataaaatcaacccgaaaggggcgatcgattatctgcactactatcgctcttataaaactgactatgagctggcctgtatgcgtgaagcgcagaagtcggcggttaacggtcatcaggctgctcatgaagctttcctctccgggatgagcgagtttgatatcaaccaggcctatctgaccgcgaccggccatcgcgacactgatgtgccgtacagcaatattgtggcgctgaacgagcatgcctccgtactgcattacacaaagcttgatcatcgtgcgcctgcagagatgcgtagcttcctgctggatgcgggcgcggaatacaacggctatgcagccgacctgacccgtacctgggcggcgcatggcgataatgactatgctcacttgattaaagacgttaatgatgaacagctggcgctgattagcaccatgaaggcgggcgtgagctacgtggattatcatgtccagttccatcagcgcatcgccaaactgctgcgtaaacatcagatagtcaaagacatgagcgaagaagcgatggtggaaaatgacctgaccggaccatttatgccgcacggtattggccaccccttaggtctgcaggttcatgacgttgctggttttatgcaggatgataccggtacccaccaggccgcgccggcaaaatatccttacctgcgctgcacgcgcgttctgcagccgcgcatggtgttgacgatcgagccgggtatctactttatcgaatcgctgctggcgccgtggcgcgaaggacagttcagcaaacactttaactggcagaaaattgaagcgctgaaaccctttggcggtatccgtatcgaagacaacgtcgtgatccacgaaaacagcatcgaaaatatgacgcgcgatctgaaactggcgtaa

SEQ ID NO: 259260 - DNA, 567 bp, Klebsiella pneumoniae
atgggcaacgtcgagctggtcgccggcgaactgcggctggatgatttaagcctgccgcagatcgaccttgcggatattcgccgcaacgccactttgctcacccaggaggcgcggctgtttcacggcaccctgcgcgagaatttaatccttgggcggccagcggcgacggatgatgaaatcttctcggtgcttaccctgtgcggcgctctggagtttgtacgcaaactgcccctcggcctcgaacatattgtcatggaaggcggggtggggctttcaggcggccagcgccagtcgctgctgctggccagaaccctgctgcgcgatccgaacatcgtcctgcttgatgaaccgacctcttatttcgacgagcgaacggaaaaggcctttgtggaacagctggcgctgtgggccggcgagcgaacgatgattatcgccacgcataaagcggcggtgctcaatatcgttgaccggattctggtcattcaggatggacagctggcgctggataaacctaaagccaccgtctttgaacaagagaaagcccgcggccaggtggtgaatatatga

SEQ ID NO: 259261 - DNA, 1653 bp, Klebsiella pneumoniae
atgcactttatgaagcaaggcgttgcgctggcgctatttacggcgctatcgctggggagcctgtcagcgcaggcttatgagcaggataaaacttacaaaataaccatcctgcatactaacgatcatcatggccacttctggcgtagcgactacggcgaatatgggctatccgcacaaaaaacgctggttgacggtattcgcaaagaggtggcggcagaaggcggcagcgtgctgctgttatccggcggcgatatcaacaccggcgtgccggaatccgatttacaggacgcggaacctgatttccgcgggatgaacctgattggctacgatgcaatggcggtgggtaatcatgaatttgataatccgcttagcgtactccgtcagcaggaaaaatgggcgaagttccctttcctttcggcgaatatttatcagaaaagcaccggcgagcgtctgtttaagccgtgggcgctgttcaaacgcggcgggctgaatattgcggttatcggtctgacgaccgacgatacggctaaaattggtaatcccgagttctttaccgatatcgagttccgtaaaccggcggaagaggccaaactcgttatccaggagctgcagcagaatgaaaagccggacgtgattctggctactacccacatgggccattatgacaatggcgctcacggttcgaacgcgccgggcgatgttgagatggcacgcagcctgcctgcgggagcgctggcgatgatcgtcggcggtcactcgcaggacccggtatgcatggcgtcggagaacaagaagcaggtggattacgttccgggtagcccgtgcgcgccggacaagcagaacggtatctggattgtgcaggcccatgagtggggtaaatatgttggccgcgccgattttgaattccgcaacggcgacatgaagctggtgcgctatcagctgatcccggtcaacctgaagaaaaaggtcacctgggacaacggcgagagcgagcgcgtgctctatacgccgcaaatccccgaaaatccgcagatgctctccctgctgacgccgttccagaataaaggcaaagcgcagctacaggtgaaaatcggtagcgtaaacgcgcatctggagggcgatcgcagcaaagttcgtttcgtgcaaaccaatatgggacgtttgctgctggcggcgcagatggcgcgcagcaatgctgatttcgcggtgatgagcggcggcggagtgcgtgattcgattgaagcgggtgatatcacctataaagatgtgatgaaggtccaacccttcggcaacgtgctggtctatgtcgatatgagcggtaaggaagtgaccgagtatctgaccgccgtggcgcagatgaagcccgattccggcgcctatccgcagtttgccaacgtcggttttgtggctaaagacggcaagctcaataatttgaccatcaaaggcgaaccggtcgatccggcaaagacctatcgtatggcgaccctgagctttaacgccaccggcggcgacggctatccgcatatcgatacgaagcccggctatattaataccggctttatcgatgccgaagtgctgaaagagtatatccagaaaaactccccgttggatgcggcagcttatgaaccgaaaggcgaggtaagctggcagtaa

SEQ ID NO: 259262 - DNA, 1221 bp, Klebsiella pneumoniae
atggcaatgaatcagaccgcacaacccttatccggccctgctgctgcgccgcaaaaagcacgcacctcgtttcgcattctcggcgccatcagcctctcccatttgctaaacgatatgatccaatcgcttattctggctatctacccgctgctgcaggccgagttttcgctgacctttgtgcagataggtatgattaccctcaccttccagctggcctcatcgctattgcagccggtcgtcggctatctgaccgacaaacatccgatgccgtggtcgctgccgataggcatgtgctttaccctgagcggtctggtgctgctggcgatctcggggagctttggtatggttctgctggcagccgcgctggtcggcaccgggtcttcggtctttcatccggagtcttcacgcgtggcgcgtatggcttccggcggtcgccatggcctggcgcagtcgatatttcaggtcggcggcaactttggcagctcgttaggcccgctgcttgcggccctgattatcgctccttacggtaaaggtaacgttggctggtttgtcctggcagcgctgttggcgatcgtcgtgctggcgcaaatcagccgctggtatgccgctcagcatcggatgaataaaggtaaaccgaaggcgctgattgtaaatccgttgccaaaaaacaaagttattctggcggtcagtatcctgttactgctgattttctcgaaatacttctatatggcgagcatcagcagctattacaccttttatctgatgcaaaaattcggattgtcggtgcaaaatgcccagtttcatctgtttgcctttctttttgccgtcgcggcaggaacggtgattggcgggcctgtcggcgataagattgggcgcaaatatgttatttggggctctatccttggcgtagcgccgttcacccttgttttaccctatgcatccctggaatggaccgggattttaacggtgattattggttttatccttgcctcagccttttccgctattctggtctatgcccaggagctgttaccggggcggatcggcatggtttctggtttgttcttcggttttgcttttggcatgggtggccttggcgccgcggtactggggctcttagctgaccataccagcatcgaactggtctataaaatctgcgctttcctgcctctaatcggcatcctgacgatatttctacctaacaaccatcaaaagtcatga

SEQ ID NO: 259263 - DNA, 138 bp, Klebsiella pneumoniae
atgggccacgccgttggcgaatgcccgctcggtactttcccattgttcaagatcggcttccagcgccagcgcctggcaaccgacggcgttcagcgccgccgccagttcgtgaacatagcgagatcggtcaatcaatag

SEQ ID NO: 259264 - DNA, 1383 bp, Klebsiella pneumoniae
atgcaaaaaatgttcaccacattaaaagataaaatcaccaatgcattaattgtcgatcgtgaaaagcatatttatcgctgccatcgctcaatatttaccgatccgcagctatttgattttgaaatgaagcatgtttttgaaggaaattggttgttccttgctcatgaaagccagattgcgcagcctggagattattacaccctgactcttgggcgccagccggtaataataactcgcgacaaaaagaatgaactgcatgcgctaattaacagctgcgcccaccgcggggcgatgctgtgtcgccgtaaaaccggtaataaaagttcctttacctgtccatttcacggctggacattcagtaataacggcaagcttttaaaagccaaagatgaaagtaccggcggttacccggagactttcaagcatgaaggctcccacgatttaaagaaactgccgaggtttcaatcgtatcgcggcttccttttcggcagcctgaatgccgatgtacagccgctggaggcgtacctgggcgaaacctgcaaaattatcgacctgatcgttgaccaggcgccggaagggctggaggtgcttaacggatcatcgagctacgtttatgaaggcaactggaagctgggggcggaaaacggtgctgacggctatcacgttagcgtggtccactggaactacgcttccaccatgtcgcgccgcaactacgaagcggaagggacgcatgcggtagacgcaaacggctggtcgaaaagcgtcggcggcggttacggctttgacaatggacatatgctgttgtggacccgggtgctgaacccggaagtgcggccggtctacgaacatcgtgaacggctgcaggcggaattcggccagtcccgcgccgagcagatggtcaacgaaacgcgcaacctgtgcctctatccaaacgtctatctgatggatcagttttcgacgcagatccgcgtgatacgccccatcgcggtggataaaaccgaagtcaccatctggtgcttcgcgccgaagggcgaatctgaccaggcgagggcgctgcgtattcgccagtatgaggatttcttcaacgttagcggcatgggaacgcctgacgatctggaagagttcagcgcctgccagcgcggctatctcggtgagaatctggcatggagcgacctcagccgcggggcgctgcactgggtcgacggccctgacgaacacgctcttcaggcgggcttcaggccgcagctaagcggggtgaaatcggaagatgaagctttgtatatcgcccaccatcatcactggcaaaacgtgatgctggcggcgctggaaaaagagcagcagcgctacgagcaatcgatcacgcaacgcgtggaggtggtctga

SEQ ID NO: 259265 - DNA, 564 bp, Klebsiella pneumoniae; identical to SEQ ID NO: 253550

SEQ ID NO: 259266 - DNA, 1479 bp, Klebsiella pneumoniae
gtgacaaccaacagctatctggaatactttctgacactgctcggctgggtggtcaataacgggctgtggaatgcgatcagcgcgaccggattattcgccctcccgctgctgattaagttgctggcgctgtggctacaggccagaagtcagggggcggatgaaggcaacaaagctgcgctgtccctgatatggaccgagcacctgatgtacacctcgctgctggtgattatgttcacctgcgtgccgctgctgaatatcgacctcgataccatcaaatatgacaccacacgctcgaagcagtgcggaatgtcggtaccacagcccgccgataccggctatcagccgattattaactcattggatggcaaaaccgccgccgttccggtctggtggtactttattcatgtgatcagcaaaggtatcaccagtgcaacgattgctactctgccctgccagcctgacctgcgtcagatccgctttgaggtgcagcacatccgcattaaggatccagcgctggcacaagaactgcgggatttcgttgaggagtgttatgccccttcccgcgcccgcctgaaattccgcgccggggaactggacgatgacaccagtgacgatacggcctggctgggatcatcttattttctcaacacggctggttactacgatacagaccatgcgctttcaccacacagcgcctggccgtacagtgcatcacgagacgccgggctggccgatacgggcgcgggcggctaccccacctgtaaacaatggtgggccgacgataccgttgggctgaaggcccggctcctgcaactcccggccccggatatatggacagcttttaaaaaaatcggccagccgcaggcagtatatgaagaggccgtgctgcgctcactggtcagtgaacgcaatatgcaggtatcgcagaacgggcgcgtttatccaggctatggcggtaacgttgatggcaccgtcaccaatgccgccacccggctggcatccagcaccggaaatattctcggcagcatagccgcgttcccggcgttcgacagcatgcgccaggcactaccgatggtgcaggctctactgcaaatggcgctggtgatctgtattccgctggtaacactctgttcggcatgggatgtgaaggtggtgatgacgctgacgtttgtgcagtttgctctgttctttctcaccttttggtgggaactggcgcggtggctcgatagctggctgctggatgtgctctacaacagcgatacccacagtagctggaatctggccgggatacagaatacgcaggatgacgtgattatcaatctggtgatggggtcgatgtttctggtgctgccgactttctggctaggagcgatgacgtggactggagtgagggttggcgtgacggtgaatggcgcgctggcaggcggggttaaggtagctcaggatagtggggggaaggctgggggaaagttgttgtaa

SEQ ID NO: 259267 - DNA, 258 bp, Klebsiella pneumoniae
atgaaacggctgatactgtccggctccctgctgctgatctgcatggcagtgatgttttatctggctgctgacaatacaccacaaattaaccgcagcgacctgctgccctgccgcataacgctgtacgctgcgatttccggtgtgggctggcatctgtatgaccgcttgccgccacatcgtccggcaatccgccgtatcgcgctgatatttatcgtactgattgtactcaacgaaatcgggccggaggtgttccggtga

SEQ ID NO: 259268 - DNA, 1368 bp, Klebsiella pneumoniae
atgcgctcagcctggtgtcttctgttcatcgccttcctcgccccggctgccgacaaatatcaatacaagcaacagggggcgatcagcgactggatgtattaccgcatcggcggcggtgcagctatctctccaccgccaacccggcgcaacaccttcccgctgacggcagacgtaagctggaacagcgacatgatgtgcggcaatttcgatatcgataccacggtgcgcaaccagcttaacggtgtgacggacggcttccagcaactgatgggagaggttatcgaaagcgcgaccagcgcggtcgctagcctgcccgcgatggtgatccagcgcgccaatcctcagctctacgatctgctgaccaacggcgtacttcagggtcggctcgacttcgataaatcgctgttaagctgtcagaaaatggcgggaaaaatgaccgattacgcgcttggcccagcttggacgcagagcgcccaggcagagaactatcagggaattgcggccagcgaaaaagacgccgttcgcgccgaccagcgagcagccgaagaagcggcagagaaaggcaaacgctgggttggtggcgagcatcgcggcggcaaaggtcaaccgcccatcaaactggttcgcgatacgacggttgcaggctacaacatcctcaataatcgcagcgcaaccagcaccagttcggtatccagcaacgactgtcagggggaactttgccaggtatggagcaagcctgacgatgccgcgcagtggctaacgcgggtggttggtgaacagaccattaacgtcgccccggataacgatcaatccggcgacactgaccagcaaagcggcgcacaatctggcgtcgggctgacgccgctgattcaggaagaacaggataagatccagccgctgattatcgatatggtgaaccgcagccagcccgttaacgatgacacgctggcgcaggccagcggcggcgaactgcatctgacgcgcggcgtgattgaggcgctacgcgacgatcccgatgctgcggtacttatccagcgactctccggcgaactggcgctctcccgcgtgatggagcaggcgctgatggcccgacgcacgctgctggccggaatgcgcgaacccaatgtatccggtgaaaaagaggcacaaaccgcgctgacccagaccactgcccagctcgaccaggaactgtcacagcttaagctggaactggatatgcgccaggcgctggcggataacgccgcactggccatccttgaacgccagacgatgcgcgcgcagaccaaaggcctggctgtcggcgtagaagacgacaccgacaaacgagtggacgatctcagcaaatccacgggcggggatacgcaatga

SEQ ID NO: 259269 - DNA, 933 bp, Klebsiella pneumoniae
atgaatctccaccggacattactttgcttactgataatgatgccgtgcgcaggtaaagccatcactaccccggaaattgccgcctcagccctgtcgccgacgtgcataaaatatcaggtagtcggtgtctgctactggctgttttgcacaccgtttggctgctcggtgcgcacgtcggtgaaggtacgtcatctccgaccggatctggtgatatcagcctacagcgtgaccggacaaaacccgtgggttgagatgtcgccgttaagctcgccgctgccaggtatcgccgaagccggtggcgataccaaccctcgcgccgtcggccagcacagcaaagtccgcttcaagaacgccgatgcaataggctttcctgccggtgatgcattggcaaatttcttctctcagtttggctacgtctgtgccccgtcatcacagcctttcctcccctactttctcagcacgttggatgcactcgcctggcgcagcggtgtacctgaaatgttctacccgggggcgttaacgccaggactgcgtgaagtgagtaaagacggcgatatgtggggtaatgtctacccacgagccggggcactcagccagacgcatgactataaaactggggctgtcatcgcccaacgcgccgccgatctggtaacacgcagcggccagtcgcatgtttatattccactgacagccagctcacacgatggctactggcctccagatccggttacggaaggtgacaacagtaaccaccagtggcagatgctggttcccaaaaaatccacatcctgcactatcttcccggatggctcttccaccgattcttacgccgataaactggcggaggatggcgcatatgtctggacgctgtggcggccctataaatgctgtccgcgtcgtgggcagacctttcttggcagcagcggaggttaa

SEQ ID NO: 259270 - DNA, 1296 bp, Klebsiella pneumoniae
atgtcagatatcaatccacgcgatgagttacccctggaccgggaatcgctcttcaatctcgtctggcgtgagcctgcggagcgcatagccgcgcaatatggcatcagtacaaagttactggcaaaacgatgtacagaaatgcggatacccaggccgcttgctggttactggaaagcgctggcgaaagggactgcccctgcagtgccagcattgcccgatttggagaaaggcaaggcagaaaaagcttcaagcaaagccagtttggccgttccgtcacccacaaaagtaccatctaaagtagcagtgccagcaccgcgaaagcgagcaaggacagcgggtagtggctatgcactgattgatgatctcaaaacctaccttcccgtctcttccgtcacaaaagacggctactacaaaccaacgaaaaagaagctactcgatctgaatgtttcagaaacgggattcaacagtgctatcgattttctgagtcggttctttgccgctctgggaaagcaagggtattgggtacgattagctgagggcaatgagggacttcattgtcagggcatcgatatcaaagaagatccaaaagagggaggtttgcgctatgacagtttatggcgcccttgttcagccagcattatttgcattgaagataagctgttcggctttagtttggctgaaatgacggaatatgttccagcaaaagaaattaatggtcgatacattcgcgatgaaacgatgagccgctggatgaggggaaagtatgacaagccatttcgctacgtcattaggcatgccttacctacagggcgatttctgctacagctctactcgccgtattcgtcaacaaactggcaggtgcaatttcgacagacaaagcaatgtggccttataagccagatcccgaagctcatttcagcgatgcgtaatgctgttccgttgattaagaagcaacaggaggaggccagagtcaaagctgaaaaacggcggattcagtgggaacttgatgagaagagatatcgggagcaggatcggatcagaagggagaaagaggcatacaacgccagcttggccgagctaaaagctattatggtgcagtgggcagaagataagcgtatagagcagttttttcgtgaggcggagctggatgtggcaatgttggatgggcaaaagaaggcactggtaatggagcgtttgcaactggcccgtcagctcttatcagtggatacggcagttgaacgattgctgaaatgggaaacgccgcaggaacggttggtgaaaaggtatgcttgctaa

SEQ ID NO: 259271 - DNA, 135 bp, Klebsiella pneumoniae
atgcatccagatatcaaaaattatattaccaaaggaagtaataccccctacttatttatcattatatatttcaatatttttcctcaaccaaaaacgctgctggcaaaaattaaagaaatttttttatctgggtaa

SEQ ID NO: 259272 - DNA, 1137 bp, Klebsiella pneumoniae
atggatttattcataccccaagtggctgacgaacgtttacacccgcttgttaaacagatcatagctgaacctgtctatcacccaacaataaagactatcaatagttggggaaaaggaattttagaacggcgaggagagggagataaattcattaaagaattccagaccacatttaactcaagcttttgggagttataccttaacaaagcatttatcgacttaggttttaacattgactatagttacgaatctccagacttccatcttattcattcatccggcgtgcatctaaacgttgaagcagtaacatcaaataatataaataatgaaaatgaagaatattattcacccaactcactccatgaagccgcacagattgaacttgatgagttcatggataactcatctatcaggcttattggaaagataagggataagaagaatttatttatcgataacgggaagaaaaaacatccttattcaaaactaccacatgtaatgggaaatccgtttattctcgcaatagcaccttttgataatctattatcatctggacaaaataatagagcaataaataggatcctttacggtattgatacactccctgatggaacagtaaaaagaataccttctataagaacaaaagctggcaatactatcgaacttggaatatttacaaatgatagttataaagaaatcagcgcgataattttttcaactgtcggcatgttcagcaaggctataatagaagccaaaatcccctgcaaggttagagcaactaagtatcgccaattcaccattcatgagtttaaaaaactttcagatatgggtatcgaaaagcttgggaaaaatttcaaggaatttgaaaatcaagatatagttttgacatttagatatccatccgggaattatatcgttggctgcgatatgtattttgttgactcaacccgttataaagaaacacatgttgatggattacacatatattacaacccattcgcatcgattccattagaacaaaatatattcagctctgattttttgtcatgcaataattatgatattcataacaatcgtatgctcacggaccataatgatggttcccttgtttcaagaaatacatatgttacattctga

SEQ ID NO: 259273 - DNA, 906 bp, Klebsiella pneumoniae
atgagcaacagaagagatttggttgaaatatttggatatagtcctgtagatctttctcctgaagtaagatctttgtggaacttaggcgcttgccctttcctgaataaagaatgtataaaaatcaaccatgaccaaactattatttatggtacttgtagcgtaacatctccatacggggatgttattatttgcccgaatagattatatgcaaataactatgaaagcttattaaaggtcagtcatgatgcttttggctctgacatcccttttttaacatatggccaatttatagcacaaagggctaatcatcaagattgtataattgcgcttggtaaaaactcaggaaaagaggttcaggttggaagagctctctctatggactgggttttagttagaatgactaatgggcaaataaatgaatatgtaggaatagaaatacaaagcattgatattactggaaattatcgcgacgcttggcatgcatataaaaatttcaagccaacagatgagcgcattgatttacccacatctcaacatggtttgaactgggctaatgttcataaacgactaataccacagcttattagaaagggggttgtttattctcgatccaactatgtcaagaaagggttgtattttatactacctgatattgtgtataagaaatttgaagatgttattggcgatgatattccattgttagattatcaaaataacaaaacaataactgtttatacttacggattaggtgataatgtacctgaaggtcaacaaagaacattattacaaaatagaaaaataacattcgaccttgatgaattttctaaacgttttaccactggacctaatttgccaagcggtgaagaactcgacgttgtgataaaaaaagcactaggtgtactttag

SEQ ID NO: 259274 - DNA, 1203 bp, Klebsiella pneumoniae
atgaatagtaaattgatttctttggatttattcgctggagcaggaggtcttacctgtggcctggacatggctggttttcaaccaattctagcaaatgaattggttccggctcatgctgaaacttacgctttcaatcatcctcagacagaggttgtggttgatgatgtaagggcaattgctgaaagtaatctgatgaaacaactatcattaaaaccgggcgagttagatttattggctggtggacctccatgccaaggcttttctatcaatgcaccgatcagatccttagatgatgaaagaaatcatttgtttaaagatttccttagaatcgcttcagctttaaaacctaaagcgattctaatcgaaaatgttcctggtattgtttcattaggcaaaggtactgttgttgagcaaatttacaaggaactagagtcattagggtatagcgtggatcaccgtattctttttgcgggccattatggcgttccacaaatgagattcagaactgtttttatcgctatttatggcaaaaataaaaaaataaacttccctgatcctaaatacaatgccaaagcagttgctaatttttctggagccaaagagctatgcctgccaatatcgccattgttttcaagtgaattaaaacctcatacaacagtttgggatgcaatatcagatttaccgcagatcgctggtggagtagataataatggactcccttatgcttcagaacctacttgtgattaccaaaaaattctacgaggagattcgaaattagcaataaatcacgtcgctgctaatcttggggctatcaacctcgaacgcttgaaacatataccgcaaggtggaagctggagggatattccttttgatttattaccggctggcttgaagagagcgagaagaagcgatcatacaaaacgctatggtcgtttacatccagatggattatgctccacgatactcacaaaatgcgatcctcattggggaagttttttccatccaactcaaaatcgcgtaatttctgttagggaagcagcccgtattcagtcattccctgaccattatgttttcaaaggtaatcttacccagcaatatgagcaggttggtaacgcagtgccaccattgatggcaaaggcgattggggaagaaatcattaatatgattggatatggacatgagcaacagaagagatttggttga

SEQ ID NO: 259275 - DNA, 903 bp, Klebsiella pneumoniae
atggagatcacggcccgcctgatgatcaccggcggcgagctgaaagaggacgcccgtctcacccgttctgaccgggcattaatccgcgaagcgattctgcacgcgtcccggctcaccgctcgtgagcaaagacagacactgacgcaggatatccgcgatgccctgttcacgctggcacaggatgcggcgctaccggaatcccgtcgtaaccggctgtgggagatgggcgaagcgatgaatatgttttgctccgggtttgagggcgaactgtttaaccaggagggcgaggcgtggccggaagcggatatcaccctggtggacctggcaatgtttgcccgcgaagggtacgaagcccagctggcgatcgcctatatttcgctgattaaccatatcaacaatcttggcgagcgcgaccagcatctggcgcggcccatcgtcaatatcaccgatgaggcacatatcatcaccatcaacccgctactggcgcggtttctgaccaagggttcgaagatgtggcgcaagctggggatctggctgtggctggcaacgcagaacctgagcgacttcccgaatgatgcgaagaagctgctcaatatgatcgagtggtgggagctactggtgatgccacccgaggaggtggagcaggtcagccgctttaaatctctgacaccggaacagcgacagctcctgctgagcgccaccaaagcgccggggaaatataccgaaggcgtggtgctttcaccgagagtggaagcactgttccgcgtggtttcccctgccctgtggctggcgctggggatgacggagaaacatgagaaggcagagagaatgcggattatgcgggagtttgggtgtagtgagctggaagcggcactcaaagttgcaaagggacattttttctaa

SEQ ID NO: 259276 - DNA, 852 bp, Klebsiella pneumoniae
gtggacgtcacctatgacggcccgaccgaaccgagcgtctccggccaggtgcagctgatcaacaacttcgtcaaccagggctacaacgcgattatcgtctccgccgtatcgccggacggcctgtgcccggcgttgaagcgggcgatgcagcgcggggtcaaggttctgacctgggactccgataccaaaccagagtgccgcagcatctatatcaaccaggggacgccgcagcagcttggcggcctgctggtggagatggcggaaaaacaggtgacgaaacccaccgccaaggtggcgtttttctactccagcccaacggtgaccgatcagaaccagtgggtaaaagaggcgaaagccaaaattgaaaaagcgcatccgcagtgggaagtggtgaccacgcagtttggctataacgacgccaccaaatcgctgcaaaccgccgaggggatcttaaaagcgtacccggatctcgacgccattatcgccccggacgccaacgcgcttccggccgccgcccaggcggcagagaaccttaagcgccagggcgtggcgattgtcggcttcagtaccccgaacgtgatgcgcccctatgtagagcgcggcacggtaaaagccttcggcctgtgggacgtggtacagcaaggcaagatcgcggttaacgtcgccgatcgtctgctgaaaaagggcgatcttaacgtcggcgacagcgttgatgtgaaagatctcggcaccctgaaagtcgagcccaacagcgtgcagggttatcagtatgaagcgaaaggcaacggcatcgtgctgctgccggagcgggtggtgttcaccaaagagaatatcaataactacgatttctga

SEQ ID NO: 259277 - DNA, 438 bp, Klebsiella pneumoniae
atgaagtggcaacaacgtgtacgcgtcgcaacgggtcttagttgctggcagattatgttgcatctactggtcgtggcagtactggtgatgggttggatgagcggcgcgctggtgcgcgtcggattaggtttgtgcgtgctgtacggcgtcacgttactgtcgatgctgttcttgcagcgtcaccatgatgagcgctggcgcgacgtcggtgatttccttgaggagctcaccaccacctggtacttcggcgcggcggtaatcgtgctgtggctgctgtcgcgcgtgctgcataacaacctgctgttagccctcgccgggctggcaatactggcaggtccagcggtggtttcactgctggcgaaagataaaaacagatacgctaaatcgttcgagctacaacaaggcggcaacgcagcgaatccccagaagcatagataa

SEQ ID NO: 259278 - DNA, 750 bp, Klebsiella pneumoniae
atgccgcgattttcgctaaacgtgctgacaattaacactcataaagggttcactgccttcaatcgccgctttattttacccgagctgcgcgaagcggtgcgtagcgtcagcgccgacattgtttgcctgcaggaggtgatgggtgcgcacgaaattcatccgctgcatatcgaaaactggccggatacgacccactatgaatttcttgccgataccatgtggagcgattacgcctacggtcgcaatgcggtttatccagaagggcatcacggcaacgcggtactttctcgctttcctatagaacattatcaaaatctggatgtttcggtcggcaacagcgaaaagcgcggcctgctctattgccgcatcgtcccgcccgaaagcgggatcgctatccatgtgatctgcgcgcatctgggtctgcgttctcatcagcgccaggcccagctgacgatgctggcggactgggtaaacggtttgcccgcgggcgagccggtggtagtggccggtgattttaacgactggcagcagcaggctaaccgccagcttaaagcccaggccgggctggaggagatttttacccgcgccagagggcgcccggcgcgaactttcccggtcagcttccctctgctgcgcctcgaccgcatatacgtaaaaaacgcccatgccagccagcccaaagcgctggcgttaaaacagtggcgtcatttgtccgatcatgcaccgcttagcgtggagatacatctgtga

SEQ ID NO: 259279 - DNA, 672 bp, Klebsiella pneumoniae
atgaaaattttagtcattgaagacgatgcgctcctgttacaaggattaattctggcgatgcaaagcgagggctacgtgtgcgacggcgtctctaccgcccacgaagccgcgctctcgctggccagcaaccactacagtctggtggtgcttgacctcgggctgcccgatgaggacggcctgcactttctggcgcgcatgcggcgagagaagtttagccagccggtgctgatcctcaccgcccgcgataccgttgatgaacgtattagcggcctggataccggcgcggatgactatctggttaaacccttcgctcttgaagagcttaacgcgcgcatccgcgccctgctgcgtcgccacaacaatcagggcgataacgagctgactatcggtaacctgcgcctgaacgtcacccggcggctggtctggctcggcgaacagtccctggatctaaccccgaaagagtacgcgctgctctcccgcctgatgatgaaggcgggcagtccggtacaccgcgaaattctttataacgatatctacagctgggacaacgaaccggccactaatacgctggaagtgcatatccataatttacgcgataaggtgggtaaatcgcggatccgcaccgtccgcggcttcggctatatgctggtcgataatacaggagccgaataa

SEQ ID NO: 259280 - DNA, 2124 bp, Klebsiella pneumoniae
gtggtgctggtcggctcgaacgccgcctgggcgcatccggtgctgttccagcggctggcgcaggcgaagcgggataatccccgattgcggatcgtggcgatcgacccccgacgcaccgctacctgcgagatcgccgaccgccatctcgcgctggccccgggaagcgacggcgggttgtttgcggggctgcttaacgccctggctgaggcaggagcctgcgtcgatggctttcgcgacggcccgcaggcgctggccgccgcccgcggctgggacgtggcgagggtggcggccttttgcggtctgcctgccgatgaggtggcgggattctatcgcgagttcatcgccgccccgcgggcgatcaccctctacaccatgggaatcaatcaatccgccagcggcagcgacaaatgtaacgccatcatcaacgtccatctggccagcgggaagtatggccgccgcggctgcggccccttttcgctgaccggtcaacccaacgccatgggcggccgcgaagtcggcgggctggcgacgatgctggcggcgcacatggattttgtgccagacgatctgcagcggctggcccgcttctgggggacggaacggctggcgcagacccccgggctgactgccgtggagctgtttgccgccattggccgcggcgaggtcaaagcggtctggatcatgggtaccaacccggtggtgtcgctccctgacagccacgcggtgagccaggcgctggccgcctgtccgctggtgatcgtctcggatgtcgccgcccagaccgataccggacgtttcgcccacatccgctttccagcgctggcctggggcgagaagaatggcacggtcaccaactcggagaggcggatctcccgtcagcgcagctttctgccgccgccgggggaggcgaaagcggactggtggatcatcgccagagtgggccaggcgctggggtatcgcgaggcgtttgcctggcagcatccgcatgacgtcttccgcgagcatgcggcgctgtccggtttcgaaaacgacggccagcgggcgtttgatatcggcgcgctggcggatctcagccgtgaggcgtgggacgccatgccgccggtgcgctggccggtcagccgcagcgaggtcgcctgggatatcacgcgcggctggcatggcgatggcaggctgcggatggtgccggtgacgcctcaaccgacccgggcgacaaccgatgccttttatccgctgatcctcaacagcgggcggatccgcgatcagtggcacaccatgacccgtaccggcgcagtgccgcggctgatgcagcatatcgcggagccaatggtggaggtggcgccgcaggatgccgttcgctatcagcttcccgctgacgggctggcgcggatctggtcgcggcatggggtgatggtggcgaaagtggcgatcagcgaagggcagcgccccggctcgctgtttgttccgatgcactggaacaaccagtttgcccgtcaggggcgggtgaataacctgctggccgccgtcacggacccgtattccggccagccggaaagtaaacaggcggcggtggcgattgccgcctggcaaccggcctggcacagcgagcttttttgccgcgaaccgctaccatttcctgcggcctggcactggcggcggcgggcggcgccaggcgtgctgcactactcgctggccggggaggcatctgcccgacagtggctcagcgcgtggtgcgcccggcgcggctggcagttacaggtggctgacggcggcgcggtgtggaacctgctggcctggcatcagggaaggctgatgctcggctggtggagcgatgcgcgcgagccggcggtggattgcgcatggataagcgctgcctttgccgcgccgccgtccgatgctgtccaacgacatgccttgcttagcggccgaccgggcgccgccgtcgcaccgcgggggcggatcgtctgcagctgctttggggtgggggaatggtcaattaacgaggccatcgccagcggctgcgccagcgtcggggcgctgggtgggaagctgaaatgcgggaccaactgcggctcttgcgtgccggagctcaacgcgctgctggcggcgcaacgaacccgggcgtaa

SEQ ID NO: 259281 - DNA, 1050 bp, Klebsiella pneumoniae
  misc_feature (989)..(998): n is a, c, g, or t
atgcaaaagggaatccaggcgctggtgctgtggatgctggtgggatacgcgcaggcagcctgccccgcgtggccgcaggcgagggccgaacaggaaatggaacgcctcagccagcagataacggaatggaaaaacgcctactggcagcaggggaacagtgcggtaagcgatgaagtctatgaccagctggcggagcggctggcgttctggcggcgctgcttcaccggcgaggctcccgctcacgatgctcttccgccgctgaggggggatgtcaggcatccggtcgcgcacaccggcgtgcgtaaactgccggaccgcgctgcggtggcgcgctggatgcgcggtcaatccggcttgtgggtacagcctaaagtcgatggcgtcgcagtgactctggtctatcgacaggggcgcctggtgcaggcaataagccgggggaatggtcttgccggagaagactggacggccagggttttacagatcccctccgtgcctaaagtctcttacggtgcactggccaatagcgttctgcagggagaactgttcctgcttcgcgcggggcatgtgcaaaagcagatggggggcatgaacgcgcgcgcaaaggtggccggcatgatgatgcgccagcaggctgcggcggaacttaatcaactgggcatctttatctgggcatggcccgatggtccgcaggagatgcaacagcggctgacgctgctgcggcagggcggctttgtttacagcgcgcgcttttcgcatcctgtcgcgaatgcgcagcaggtggaacagtggcgccagcgttggtttacttcgccgctgccttttgccagcgatggcgtagtggtgcggcggggaaaagagtcagccgggcgcttctgggtaccgggacagggtgattgggttatcgcctggaaatatcctcctgcctcacgggttatggaggttcgcggtatcagcttcagcatcgggcgtagcggtaaaatagcggtggnnnnnnnnnngggggggaatagcggtggtggcgcatctggagccgcagctgctggacgataa

SEQ ID NO: 259282 - DNA, 654 bp, Klebsiella pneumoniae
atgctgaccgatgccaaagatacccgccagggtgtccatcttatcggcaatcgcaaccgcgcaggctaccgggttagacggcaggtcatcgccagcaaagcgcggctgatactgctcgttcagggcaaccgcaacgtcttccgcttcgccatcatggcgcgcgtagtgcatgcccatcacgccctgcgtatcggtgaactcgaagaccatgttggtcatcaggtcgcacttggagagcaggcccgcgcgggtggcatgattcacgtcagcgccaatctgctcggcgatccagccggccagcgcctgaatacgatcggtcttatcgcgcagcgtacccagttgctgctggaacaggacggtttgcagacgcggaaggttatcttccagacgttttttacggtcagtattgaagaagaactcagcatccgccaggcgcgggcgaaccactttctcgttaccggagataatctgctgcggatctttcgactcaatgttggcgacgaagatgaagttcggcagcagcttgcccgcgttgtcgtaaaccgggaagtacttctggtcgcccttcatggtgtaaaccagcgcttcggcaggcaccgcaaggaatttctcttcgaacttcgcggtgaggactaccggccattccaccagtga

SEQ ID NO: 259283 - DNA, 1179 bp, Klebsiella pneumoniae
atgtcgaagaacacgtctgaaatgaaactcaccccgcccgtctccggggctttttccgggctaaaagggatgaatctccaagtattcgtgatgatcgccgctatcgtggccattatgctgtttttcacctggactaccgaaggcgcttatctgagcgcgcgtaatatctctaacctgctgcgccagaccgccatcaccggcattctcgcggtcggcatggtgtttgtgattatttccgccgagatcgatctttccgtcggctcgatgatgggcctgctcggcggcgcagcggcaatatttgacgtctggctcggctggccgctgccgctgacgattgtggtcacgctggcgcttggcctgctgctgggcgcatggaacggttggtgggtcgcctaccgtaaagtcccgtcgtttatcgtgacgctcgccggtatgctggcattccgcggtattctgataggtatcaccaacgggaccaccgtctctcccaccagcccggcgatgtcgcaaatcggccagagctatctgcctgatggtattggctttggtatcggcgtggcgggaatggcggcctttattatctggcaatggcgcggccgtatgcgacgtcaggctctgggacttgccacgcccgcttccgcttcgaccgtaggtcgccagacgattaccgccgttattgtgctgggcgctatctggctattaaacgactatcgcggcgtcccgacgccggtactgattctcgccgcgttgctgctggcgggtatgtttatggccacccgcaccgcgtttggccgccgcatctacgccatcggcggcaacctggaagccgcgcgtctatccggcattagcgtggaacgcaccaagctggcggtgttcgccattaatggcctgatggtggcgattgccgggttgattctcagttcacgtctgggcgccggttctccttctgccggcaacatcgccgaactggacgccatcgccgcctgcgtgatcggcggaaccagcctcgccggcggcgtcggcagcgttgccggcgcggtcatgggcgcgtttatcatgtccgcgctggacaacggcatgagcatgatggatgtcgccaccttctggcagtacatcgttaaaggggtcattttattactcgcggtgtggatggattcagccaccaaacgccggagctga

SEQ ID NO: 259284 - DNA, 342 bp, Klebsiella pneumoniae
atgctgccagttttccggcgctgtctcgagcccctgatagaccacgccgcgatatttctctctggcgaccagctgacaaaaagcatgctcgcgctctgcggcccagcctttacagctggatgtgggcaggccataaaaggcaaagcggttgatgcccttttccttcagatggaggaaggcgctctcgaccagcgcggcgttgtcggtagcgatgtagtgaaccggcggatagcactccgggcggtggaaggagccgccgacgccgacaattggaacattaacgtcgagcagcaggttttcaatctccgggtcgtcgtaatcggcaataacgccgtcgcctaa

SEQ ID NO: 259285 - DNA, 717 bp, Klebsiella pneumoniae
atgttctctaaaaagtcgctttctgcgctatgcgtttgcgctgctattgtttctgctgcgggcgttaatgctgctacggatactactctcaccgttaaaggaacctttgttccggctgcgtgcaccccggagctgagcaacagtggtgttgttgattacggctctatgaacaactcggttctcgaaaagccggtcagcggtagcaccctggttcagttgggcaaaaaatccattactctaacggttagctgcgatgcggcgaccagcgtgggcatcgtggcgaaggataaccgtgccagttctaaagttgagatttcaagctcggcgtatattgctgactatatcccggggcaaaatatgacaacggaatctgcggcgtttggcctcggtaccgttaatgacatgaagatcggtgcttattccgttacggcaatgaaggatggattaactgctgatggcgcggcagtggatatgatcgtgaaaaatagagggggggcaaatagctcgtgggagaatgcaaatagcggtgctttatattactccgacgctacccgtatcgttaccgttgctgaaaccggcaaaaccaccccaatgctgtttaaagatttagtgatgccgctggatatcgtttccgccgttcagaacaatggtgtactgggtgccggaacgcaaattgagctggatggtaatgccacgctgagtcttgtttatctctaa

SEQ ID NO: 259286 - DNA, 774 bp, Klebsiella pneumoniae
atggatcgtattattgaaaaattagatcgcggctggtgggttgtcagtcacgaacaaaaattatggttgcctggtggagaattaccacatggcgaagcggttaatttcgatcttgtcggccagcatgcgctgcatattggcgagtggcagggcgagtccgtgtggatggtgcgccaggatcgtcgccatgacatgggatcgttgcgccaggtgctggatcaggatccgggactcttccagctggctgggcgggggatccagctcgccgaattttatcgctcgcataaattttgcggttactgcggccacccgatgcatgccagcaaaagcgaatgggcgatgctgtgcagccactgccgcgaacgttactacccgcaaattgccccctgcattatcgtggcaatccgtcgcgacgatgcgatcctgctggcgcaacatacgcgccatcgcaacggcgtgcacaccgtgctggccggctttgtcgaggtcggcgaaacccttgagcaggcggtggctcgcgaggtgatggaggagagcggtattcgggtaaaaaatctgcgttacgtgacctctcagccatggccgttcccgcagtcgctgatgaccgcctttatggcggattacgcagatggcgagatcgtggtcgacaaaaaagagttactgaccgcggactggtatcgctatgacgacctgccgcttctgccgccgccggggacagtggcgcggcggcttatcgaagataccgtcgcgatgtgtcgggcagagttcgagtga

SEQ ID NO: 259287 - DNA, 498 bp, Klebsiella pneumoniae; identical to SEQ ID NO: 136661

SEQ ID NO: 259288 - DNA, 813 bp, Klebsiella pneumoniae
gtgtttaacttcgaaggcggctgctatgccaagaccattaatcttgacccgcatgccgaaccggaaatttacggcgcgattcgtcgtaacgcgctgctggaaaacgtggtggtcagagccgatggcagcgtggattacgccgacggcagtaagactgaaaatacccgcgtttcttatccgctgtcgcatattgacaacatcgtgaaaccggtatcgcgcgcgggccatccgtcgaaggtcatttttcttgccgccgatgcttttggcgtgctgccgccggtatcccgtctgacaaccgagcagatgcagtatcatttcctgtcgggttttacctcgaagctggccggaaccgagcgcggcattactcagcccacgccaaccttctccgcctgctatggcgcggccttcctgctgctgcacccgacgcagtatgccagcgttctggctgcgaaaatggcggcatcgggcgccgaggcctggctggtgaataccggctggaacggagagggcaagcgcctttcgctacgcgatacgcgcaatatcatcagcgcgatcttaaacggcactaccggcgagctgcgcgaggagacggtccctgtgttcggtctgtctattccgcaaaccgtgccaggcgtggatagcgcgctgcttgacccgcgtagcggctggtcttccgccgacaaatggcaggagaaggccgaaagcctggcgcagttgtttatggataacttcaggcaatatagcgataccgaagccggcgcccgcctggcgttagccggtccgacgctgacaaaatcagccgtcacggcctaa

SEQ ID NO: 259289 - DNA, 1425 bp, Klebsiella pneumoniae
atggcgacttttccacagggatttttatggggcggcgcgctggccgccaaccagtccgaaggggcatatctggagggcggcaaagggctgactaccgtcgatatgattcctcacggggctcaccgcctcgcggtcaagctggggcaggagaaacgcttcgcgctatgcgaagatgagttctacccgagccacgaggcgatcgatttttatcatcgttataaagaagatatcgccctgatggcggagatgggctttagcgtcttccgcacctctatcgcctggagccgcctctttcctgagggcgatgagctggaaccgaacccggaagggatcgccttttatcgctcgctgttcgaggagtgcaaaaagcaccgcatcgagccgctggtgacgctgtgccatttcgacgtgccgatgcacctggttaccgaatacggctcctggcgcaatcgaaaaatggttgagttcttcacccgctacgcccgcacctgttttgaagcctttgatggtttggtgaaatactggcttaccttcaatgaaatcaacattatgctgcatagcccgttctccggcgccggtctggtgtttgaagagggggaaaatcaggagcaggtgaaataccaggccgcccatcatgaactggtcgccagcgccttagcgaccaaaatcgcccacgaggtgaatccgcaaaatcaggtcggctgtatgctggcgggcggcaatttctacccttactcctgtaagccggaagacgtgtggatggcgctggaaaaagatcgcgagaacctgttctttatcgatgtccaggcgcgcggcgcgtatccggtgtgggcggcgcgggtattccgccagaaaggcgtgactatcgccaaagagtccggcgatgatgagatcctgcgccataccgtcgatttcgtctccttcagctactacgcttcgcgctgcgcatcggcggagatgaatgccggcaacaccagcgccgccaatatcgttaaatcactgaaaaacccgcacatcaaggccagcgaatggggctggggcatcgacccgctcggcctgcgcatcaccatgaatatgatgtatgaccgctaccagaaaccgctgttccttgtggaaaatggcctcggcgcgcgcgatgaggtggaggctaacggcgagattaacgacgactatcgcatcagctatctgcgcgagcatattaaagcgatgggtgacgccatcgaggacggcattccggtgataggctacaccagctggggctgtatcgacctggtatccgcctccaccggtgagatgagcaagcgctacggctttgtctacgttgaccgcgacgatgccggatgcggcacgctggcgcgaaagcgcaaaaagtcgttctggtggtataagaaggtgattgccagcaacggggaagatttggcgtag

SEQ ID NO: 259290 - DNA, 1443 bp, Klebsiella pneumoniae
atgtctaaaaattatgcagctctggcgcagcagattatcgcggcaatcggtggcgcagataacgttgccgccgtcacccactgcatgacccgcctgcgtttcgtggtcaaagacaacgagcgggtcgacagcgccaccctcaaagggctgaaaggcgtgctcggcgtggtgcgtagcgataaccagtgccaggtgatcgtgggcaataccgtctcccaggcgtatcgcgaagtggtcgcgctgctgccgggggatctgcgcccggccgaaccgcaggggaaaccgcctattaccctgaaacgcatcggcgccgggatcctcgacgcgctgatcggcaccatgtcgccgctgatcccggcgattatcggtggatcgatggttaagctgctggcaatgatcctcgagatgaccggcgcgctgcccaaaggcgcgccaacgctgactattctgacggtgatcggcgacggcgcgttcttcttcctgccgctgatggtcgccgcttccgcagcggtgaagttcaaaaccaatatgtcgctggcgattgccattgccggggtgctggtgcacccgagctttatcgaactgatggccaaagccgcccagggcgagcacgtggagtttgcctttattccggtgacggcggtgaaatacacctataccgtgatcccggcgctggtgatgacctggtgcctctcttatatcgaacgctgggtcgaccgtatcaccccggcggtgacaaaaaacttccttaaaccgatgctgatcgtactgatcgccgctccgctgtcgattctgctgatcggcccgctcggcatctggatcggtagcgccatttccgcgctggtctatacgatccacagctatctcggctggctgtcggtggcgatcatgggcgccctgtggccgctgctggtaatgaccgggatgcaccgggtctttaccccaacgatcattcagaccatcgccgaaaccggcaaagagggcatggtaatgccgtcggaaatcggcgctaatctgtcgctgggcggctcgtcgctggcggtggcgtggaaaaccaaaaacccggagctgcgccagacggcgctggcggccgcggcttctgcaattctggcggggatttccgaaccggcgctgtacggcgtggcggtgcggctgaagcgaccgctgatcgccagcctgattagcggctttatctgcggcgcggtggccggcattgccgggctcgccagccactcgatggcggcgccgggcctgttcaccagcgtccagtttttcgacccggccaatccgatgaccatcgtctgggtgtttggcgtcatggcgctggcggtggggctgtcgtttgtcctgacgctgatgctcggctttgaagatattccgcaagaagaagccgccgccgacgccagacagcgtcaggccggcacccaggcttctcacgcctga

SEQ ID NO: 259291 - DNA, 351 bp, Klebsiella pneumoniae
  misc_feature (230)..(239): n is a, c, g, or t
atgaacggggtgcagatccgcattcgcggtaaagtgcagggggtgggattccgccccttcgtctggcagctggcgcagcagctggggctgcgcggcgacgtgtgcaacgacggcgacggcgtgctggtgcgccttgtcggcggtgatgcgccatttctcgccgcgttaacccggcgctgcccgcccctggcgcgtatcgacagcgcggcagcggcgccttttgtctgggnnnnnnnnnngtctgggacgctgcgccgccaggctttaccattcgccaaagcggggccggaagcatgcgcacgcagattgtgcccgatgccgctacctgcccggcatgcctggcggaaatga

SEQ ID NO: 259292 - DNA, 1503 bp, Klebsiella pneumoniae
atgtctattctggttaaaaataacattcattgggttggccaacgcgactgggaagtgcgtgatttccacgggactgaatacaaaacgctgcgcggcagcagctacaacagctatcttatccgggaagaaaaaaatgtgctgatcgataccgtcgatcataaattcagccgtgaattcgtgcaaaatctgcgcggcgaaatcgatctcgccgatatcgattacatcattatcaaccacgcggaagaggaccatgccggcgcgctcaccgaactgatgacgcaaattccggacacgccgatttactgcaccgccaacgccatcgactccatcaccggacaccatcatcacccggagtggaatttcaacgtggtgaaaaccggcgacagcctggatatcggcaacggcaagcagctgattttcgtcgaaaccccgatgctgcactggccggatagcatgatgacctacatgaccggcgacgcggtgctgttcagcaacgacgccttcggccagcactactgcgatgaacatctgtttaatgatgaagttgaccaggttgagctttatgagcagtgccagcgctactacgccaacattctgaccccgttcagccgtctggtgacgccgaaaattaccgaaatcctcggctttaacctgccggtagatatgattgccacctcccatggcgtggtctggcgcgataatccgacgcaaatcgtcgaaaaatatctcgagtgggcggcggattatcaggaagaccgcatcacgattttctacgacaccatgtccaacaatacccgcatgatggccgatgcgatcgctcagggcattaccgacgtggatccgcgcgtggcggtgaaaatcttcaacgtcgcccgcagcgataaaaacgacattctgaccaacgtgttccgctcgaaaggcgtgctggtcggcacctcaaccatgaataacgtgatgatgccgaaaatcgccgggctggtggaggagatgaccggcctgcgttttcgcaataagcacgccagcgccttcggttcccacggctggagcggcggcgcggttgatcgcctgtccacgcgtttacaggatgcgggctttgaaatgtccctgagcctgaaggccaaatggcgtccggatctcgacgcgctggagctgtgccgtgaacacggtcgcgaaatcgcccgccagtgggccctctccccgctgccggcgagccaggccaaacacgccgcgactgaggtaacgccctgcgcagcgccagcggcagccgatctcggcccgaaaatgcagtgcagcgtttgccagtggatttacgaccccgaacagggcgaaccgaaccaggacgtccagccgggtacgccgtggagcgaagtcccggataacttcctctgtcctgaatgttctctgggtaaagatgtatttcgcggcccgtcagctggtgaaaaatattcgcaagcaggacccgaatatcccgctgaccctgatcgctgccgacagcatggatga

SEQ ID NO: 259293 - DNA, 726 bp, Klebsiella pneumoniae
atgcagacggctttcggcgttggtatcctgcggatcggaatctttcggccccaggtggctatagggatcgttaaacagccccatatcgtatttgacgttcagcacgtggcgggtcgcgtcatcgagctccgccatcgtcaccttgccggacttcaccagcccgggcagatacttactgtagtattcatcgctcatgctcatgttgatgccggacttcagcgccacgcgcaccgcgtcttccgggtccgcagccacgccgtgtttgatcaactcttttatggccccatggtcggacacggtgatgcctttgaagccccactggtcgcgcagcacgtccttcagcagccaggaatccgaggttgccggagtaccgttaagcgagttgagcgcgaccattaccgcgccgctgcctgcgtccagccccgctttatacggcggcatatagtcgttaaacaggcgctgcgggctcatatcgacggtgttgtactctttgccgccttcgaccgcgccgtaggcggcaaagtgcttaacgctggtcatcaccgagtagcggtccgccgggcttttgccctgcatggatttcaccatctcttcccccatgatggtggtgagataagtgtcttcgccaaagccttccgaggcgcggccccagcgcgggtcgcgggagacgtcgaccatcggcgcccaggtcatgttcaggccatcgtcggccgcttcgtaagctga

SEQ ID NO: 259294 - DNA, 507 bp, Klebsiella pneumoniae
gtgggtaatcgccaccacggtaccttcgaagtcgtgaaggaaacgttccagccacgctacggattccgcatccaggtggttagtcggttcgtcgagcagcagcatgtctggcttttcgagcagcagacggcacagcgcgacgcggcggcgttcacccccggagagattggcgattttcgcgtcccagtccggcagacgcagggcatctgcggcgcgctccagctgcacgttcaggttatggccgtcgtgcgcctggataatctcttcaaacttgccctgctgagcggcgagcttgtcgaagtcggcatccggctcagcgtacttcgcgtacacctcgtccagacctttcagcgcattgaccacttcggccaccgcctcttcaaccgactcacgtacggtctgctctggattgagctgcggctcctgcggcagatagccgattttcaggcccggctgcggacgagcttcgccttcgatatcggtatcaatgccggccatgatgcgtag

SEQ ID NO: 259295 - DNA, 1617 bp, Klebsiella pneumoniae
atgaagtatcctgtcaaattgacatgcggcgcgctgtggttagccagcgtctcttctcttgcctttgcggcgaatgtcccgcccggcaccgtattagccgaaaaacaggtgctggtgcggcacataaaagatgagcccgccaccttagatcccgcgaaagccgtcggcctgcctgaaattcaggttatccgcgatctttttgaaggtttagtcaatcaggatgagaaaggcaacctaataccaggcgtggcgactcgctggcagagcaatgataaccgcgtctggacgtttaccctgcgcgataatgcccgctggtccgatggaacgccggtgacggcagaagattttgtctatagctggcgacggctggttgaccccaaaaccacttcaccctttgcctggtttgcggcgctggccggtatcgccaatgcgcaaaatatcattgatggtaaagccgcgccggatacccttggcgtcaccgccgtagacgcgcgaacgctgcgcgttcagctggataaaccgctgccgtggttcagcaatctgaccgccagctttgcgttttatccggtccagaaggcgaatgttgagagcggtgacagctggacccgtccgggaagcctgattggcaacggcgcgtacgttttaaaggatcgcgtggtgaatgaaaaactggtggtggttcccaatacgcactactgggacaacggcaaaacggtgatccagcaggtcacgtttacgcccattaatcaggagtcagcggcaactaagcgctatctggccggtgatatcgatattaccgagtcgttcccgaaaaatatgtatcagaagctgatgaaggatattccggggcaggtttacactccgccacagctgggcacctattattacgcatttaacacacagaaagggccaaccgccgatgagcgcgtccgcctggcgctgagtatgactatcgaccgccgtctgatggcggaaaaaattctgggtactggtgagaaaccggcctggcgttttactccggatgtcactgccggcttcactccccagccgtcgcaaatcgagagcatgagccaggctgagctgaatgcccaggccaaagcgctgctgcaggcggcgggctacggcccgggtcgcccgctgaagctcagcctgttgtataacacctcggagaatcatcagaaaatcgccattgcggtagcgtctatgtggaagaagaatcttggcgtcgacgtgaagctgcaaaatcaggagtggaagacctatatcgacagccgtaataccggcaacttcgatgtgattcgcgcttcgtgggtgggggattacaatgaaccttcaacgttcctgtcgctgctaacctcgacgcacagcggtaatatctcccgcttcaacgatccggcctacgacaaaactctcactcaggcggcgctggaaacgtcggaaaaggcgcgcaatgacgattacaacgcggcggaaaaaatcattatggcgaaagcgcctatcgcgccgatttaccagtataccaacgggcgactgattaaaccgtggctgaaagggtatccgattgccaatccggaagacgtcgcctatagccgcacgatgtatatcgtgaagcactga

SEQ ID NO: 259296 - DNA, 450 bp, Klebsiella pneumoniae
atgcattgccctttctgtttcgccgtagataccaaggttatcgactcacgtctggtgggcgaaggctcttccgtgcgtcgtcgccgccagtgtctggtctgcaacgaacgctttacgacgtttgaagtggcggagctggtgatgccgcgagtcgtaaaaagcaacgacgtgcgcgagccttttaatgaggacaaactgcgcagcggcatgcttaaagcactggaaaagcgtccggtcagctcagatgacgtcgaaatggcgcttaaccacattaaaacccacctgcgcggaactggcgaacgtgaagtgccgagcaaaatgatcggcaatctggtgatggaacagctgaaaaagctcgataaagtggcctatatccgcttcgcttccgtctatcgcagtttcgaagatatcaaagagtttggcgaagagatcgcccgcttacaggactga

SEQ ID NO: 259297 - DNA, 216 bp, Klebsiella pneumoniae; identical to SEQ ID NO: 179768

SEQ ID NO: 259298 - DNA, 765 bp, Klebsiella pneumoniae
atgggaaatggaagagtagccgagcagacgtttgatgttggtctggctcagggccatcaggttaccaaagataatcgatgcaaaggcgatcagacccagaaccacccgcactgcttcgctgtcgcccaccggcatgtaaaggaacagacgcatgaccacgccgaagatagcaatcttgctggcggtggccagaaaggtcgataccggggcaggcgcgccctggtagacgtccggcgtccacagatggaacggcaccagcgacagcttaaagccaagaccgacaatcatcaggccgagaccggccagcagcagcggctcatgcagcatgccatccgtcaggctcttaccgagcgccaggaaggagaggttaccggaattggcatacaccagcgccataccgaacagcaagaacgaagaggcaacggcggacaggatcgtatatttgatactggcctccagcgaacgtttctggcggaaagcgtagccgaccaggccaaacagcggcagcgaaatcagttcaatgccgaggaacagcgccgcaagatggttagcgcccgccagcagaatgccgcccagcgcggcaatcagcaccagcagatagaactcttctttgttgtccttgtaaccctcaagccacgggtaggcaaaggtgcaggttgccaggctggccagcagcaccaggccggtatagagcatggcgtagccgtcaacgcgaatcagcggcgtgacgtccatcgccccgttctggcctacgaaccagagtga

SEQ ID NO: 259299 - DNA, 1530 bp, Klebsiella pneumoniae
atgttattaccctggctaatattaattcccttcatcggcggcttcctgtgctggcagactgaacgctttggcgtaaaggtgccgcgctggatcgcgctgatcactatgggattgacgtttctgcttggcctgcagttgtggatgcagggcggctattctctcacgcaatctaccggtattccgcagtggcagtcggaattcgtgatgccgtggatcccgcgattcgggattagcattcatctggctatcgacggtctgtcgctgctgatggtggtgctgaccgggctgctcggcgtgctggcggtgctctgttcatggcgcgaaatcgagaaatatcagggttttttccatcttaacctgatgtggatcctcggcggcgtgatcggcgtattcctggctatcgacctgttcctgttcttcttcttctgggaaatgatgctggtgccgatgtacttcctgatcgcgctgtggggccataaggcttccgacggtaaaacgcgtatcacggcggcaaccaagttcttcatttatacccaggcgagcggtctggtgatgctgatatccatcctggcgctggcgtttgtgcacttcaacgctaccggcgtatggaccttcaactatgaagagctgctgaagacgccgatgtcgcacggcgtggaatacctgctgatgctgggcttctttatcgctttcgcggtaaaaatgccggtggttccgctgcacggctggctgccggatgcgcactctcaggcgccgaccgcgggttccgttgacctcgcggggatcctgttgaaaaccgcggcctacggcctgctgcgctttgcgctgccgctgttcccgaacgcttccgccgaatttgcgccgatcgcgatgtggcttggcgtgatcggtattttctacggcgcgtggatggccttcagccagtacgatattaagcgtctgatcgcttacacctccgtctcccatatgggcttcgtgctgattgctatctacaccggcagccagctggcttaccagggggcggtgattcagatgatcgctcatggtctgtcagcagccggtctgtttatcctttgcggtcagctttacgagcgtctgcatacgcgcgatatgcgccagatgggcggtctgtggagcaaaattaagtggctgccggcgctgtcgatgttctttgcggtagcgaccctcgggatgccgggcaccggtaacttcgtcggcgaatttatgattctgttcggtagctataagaccgtgccggtgattaccgttatttctacctttggtctggtgttcgcttccgtgtactcgctgtcgatgctgcatcgcgcgtacttcggtaaagcaaaaagcgaaatcgccgccaaagcgctgccgggaatgtccctgcgtgaactgtcgatcatcctgctgctggttgttctgctggtgctgctgggcttcttcccgcagccgattctggacacctcgcactctgcgatgagcaacattcagcagtggtttgttaattctgtttctactacaaggccgtaa

SEQ ID NO: 259300 - DNA, 2727 bp, Klebsiella pneumoniae
atggctacgattcatgtagacggcaaagagtacgaggtcaacggagcggacaacctgttagaagcttgtctctctctgggtcttgatattccttacttttgctggcatccggcgctgggaagcgttggtgcttgccgccagtgtgcggtgaagcaatatcagaacgcggaagacacgcgtggccgcctggtgatgtcctgtatgactccggcatccgacggcacttttatttctatcgacgacgcagaagcgaagcagtttcgcgaaagcgtagttgagtggctgatgaccaaccacccgcacgactgtccggtgtgcgaagagggcggcaactgtcacttacaggatatgaccgtgatgaccggtcatagcttccgtcgctaccgctttaccaagcgtacccaccgtaaccaggatctggggccgttcatctcccacgaaatgaaccgctgcatcgcctgctaccgctgcgttcgctactataaagactatgccgacggtaccgacctgggcgtctatggcgctcacgataacgtctacttcggtcgcccggaagacggcgtgctggagagcgaattctccggcaacctggttgaagtctgtccgaccggcgtctttaccgataaaacacactccgagcgctataaccgtaaatgggatatgcagtttgcaccaagcatctgccagcagtgttccatcggctgtaacatcagccccggcgagcgctacggcgaactgcgtcgtatcgaaaaccgctataacggtaccgttaaccgttacttcctctgcgaccgcggacgttttggctacggctatgtgaatctgaaagatcgcccgcgtcagccggttcagcgtcgcggcgacgatctgattacccttaacgccgagcaggcgatgcagggggcggcagatattctgcgccagtcgaagaaagtgattggtatcggctccccgcgcgccagcattgaaagcaactttgcgctgcgcgagctggtcggcgccgacaacttctataccggcatcgccaagggcgaacaggaacgcctgcagatgatgctgaaagtgctgcgcgaaggcggtattcataccccggcgctgcgcgagatcgaatcttacgatgcggtgctgatcctcggtgaagatattacccagaccggcgcgcgtatcgcgctggcggtgcgtcaggcggtgaaaggcaaagcgcgcgaaatggcggcggcgcagaaggtcgccgactggcagatcgccgcgatcctgaacatcggccagcgtgcgaagcatccgctgttcgtgaccaacatcgacgacacccgtcttgatgacattgcggcatggacctatcgcgcgccggtggaagatcaggcgcgtcttggcttcgccatcgcccatgcgctggacgatagcgcaccggcggtcgaaggtctgagcagcgagctgaaaggcaaaatcgaggtgatcgttcaggcgttagccggagcgaaaaaaccgctgattgtttccggaactaacgccggcagcatcgaggtgattcaggctgcagcgaacgtggcgaaagccctgaaaggccgcggcgccgatgttggcgtgaccatggtcgcccgggcagtgaatagcgttggtctcgggatgatcggcggcggctcgcttgaagaggcgctgagtgaactggaaaccggcgcagccgatgcggttatcgtgctggaaaacgatctgcaccgccacgcttcagccgcccgcgtagatgcggcgctggcgaaagcgccgctggtgctggtggttgaccatcagcgtacggcgattatggaaaaagcgcatctggtgctctccgcggcaagctttgcggaaagcgatggcaccgtggtcaacaacgaaggtcgcgcccagcgcttcttccaggtttacgacccggcctattacgatgcgaaaaccgtgatgctggaaagctggcgctggctgcactcgttgcacagcacagtgaacaatcgtcaggttgactggacgcagctggaccacgtgattgacgccgccattgccgccctgccgcagctggccgggatcaaagacgccgcgccggatgcgaccttccgcattcgcggtcagaagctggctcgtgaaccgcaccgctacagcggacgtacggcgatgcgcgccaacatcagcgtgcatgaaccgcgtcagccgcaggataaagacaccatgttcgccttctctatggaagggaacaaccagccgtccgcgccgcgttcgcaaattccgtttgcctgggctccgggctggaactcccctcaggcgtggaacaagttccaggatgaagtgggcggtaaactgcgccacggcgatccgggcgtgcgtctgattgaagcctccgccagcggtcttgagtactttaccgcggtaccggcaagcttccaggcggaagaagggaaatggcgtatcgcgccttactaccatctgttcggcagcgacgagctgtcgcagcgtgctccggtattccagagccgcatgccgcagccgtacgttaagctcaacccggcagatgccgcgaagcttggcgtgaacgaaggggcgatggtttccttcagcgttgatggccaggcgcttagcctgccgctggtaatctcggcggggctgacggcagggcaggttggcttaccgatgggcttgccagggattgcgccggtgctgaccggagcgcgtattgatactctgcaggaggcgaaagcatga

SEQ ID NO: 259301 - DNA, 1044 bp, Klebsiella pneumoniae
atgagcgagcaagccattcgtttaacgcaatacagccacggagccggttgcggatgtaaaatttcccctaaagtgctggaaaccatcctgcagagcgaccaggccaaatttattgacccgaatctgctggtggggaatgaaaccagcgatgatgccgcggtctacgatctcggcaacggtacctcgattgtcagtactaccgacttttttatgccgatcgtcgataatccgttcgactttgggcgcattgccgcgacaaacgccatcagcgatattttcgctatgggcggcaagccgataatggccatcgctatcctcggctggcccatcaatacgctggcgccggaaattgcccgtcaggtagttgatggcgggcgttttgcctgccagcaggcggggatcgcgctggccgggggccactcgattgatgcgcctgaacccatcttcggtcttgcggtgaccggcgtggttccgaccgagcgggtgaagaaaaacagtaccgctcaggccggatgcaaactctacctcacgaaaccgctgggtatcggcgtgctgaccactgccgagaaaaagtcgctgctgaagccggaacatcaggggctggcgacggaaaccatgtgccagatgaacctcgtcggctcggcgttcgccaacattgacggcgtgaaggcgatgaccgacgtcaccggcttcggactgctggggcatctgagcgaagtgtgccgcggcgcgggcgtacaggcgcaactcacctatgccagtatcccgaaactaccgggcgtggaagagtatattgcggccggtgcggtgccgggcggaaccgggcgaaactttgccagctacgggcatctgatgggcgaaatgccgcctgagtggcgcgatctgctgtgcgatccgcaaacctccggcggcctgctgctggcggtaacgccggaagcagaggacgaggtgctggcagcagccgctgaatatggcatcacgctgaccgctatcggcgagctggtgaccgcccgcggcggacgccctatgatcgagattcgttga

SEQ ID NO: 259302 - DNA, 1701 bp, Klebsiella pneumoniae
atgataataggaatagatttaggaacgacaaatagcctggccgccgtatggcaggagggtaaagccgttttaattcccaatgcgctggggaaatttcttacgccaagcgtggtgagcattgacgatgacggcatggtgctggtgggggaggcggcccgcgatcttcagctgacacgtcccgccagctgtgcggctaactttaaacgcattatgggcacttctcagaccatgatgctgggaaaacaggcgtggcgcgcggaagagctctcttcactggtgctgcgccagttaaaagaagacgccgagaatttccttggcgaaccggtgacggaggcggtgattagcgttcccgcctggtttagcgacgtgcagcgtaaagcgaccaaaatcgccgccggtatggccgggctgaccatcagccgtctgatcaacgaacccaccgctgcggcgttggcctatgggctgcacaaccaggaggatgaacatcagttcctggtttttgatcttggcggcggcacgtttgatgtctcaatcctcgaactgttcgacaacattatggaagtccgcgccagcgccggagataactttctcggcggcgaagatatcgtggatattctgatcgaggcgtttcgccttcagcagcagttcccgcagcagatcgaatggcgggaacccacgctgcagcggcagctacgggtggaagccgaaagggttaagcgggtgctgagtctgcgtgaaaccgcaattttcagcgcggaaatcgagggtgaatgctatcagtgggagattaccgaagcgtattttcagctgctgctgggatcttttttcgcccgcattcgcgcgcctctcgaaatggcgattcgcgatgcgcggcttgatattgcacagctggatcaggtggtcctggtcggcggaaccacgcgtatgccgctgatccgtaaactggtgacgcagctctttgggcgcctgccagcgatgcatttgaatccggatgaagtgattgcccagggcgcggcaattcaggcttcgctcaggatgcacaagcgtgaacttgaggatgtggtcgtcacggatgtttgtccgtataccctgggcgtagatgtctcaagatcgctgggccatactcgggagtcgggttattttgcgccgattattgaacgcaaccgcagcatcccctgcagccggatgcgggatttttataccatcagggatgatcagacccacgtcgatttcaaaatctaccagggcgagagccggatggtggaggacaatatcttccttgccgaaatgtctattgccgtgccgccaaaaccggcgggagaagtcaaaatagaagtgcgttttacctacgatatcaatggactgctcgaagttgatattcacgtgccctcaaccggcaaccgcagtagcctgctaatagaacagcatcctggcacgttgacggaagagcagatccagcaatcgcgggcaaaactccgtgcgctgaaaatccatcctcgcgatgagcaggcaaatctggcgctgatggcgcggctcgatcacctctatcagttgagcctcggcgagacacgcgaatggatcggcgactgttcgctgcggttccgctccctgctggaaagccaggagcgcgatcggattgcccgttttcgcgaacaggttgatccgctccttgacggcattgacgcggagcgactgctatga

SEQ ID NO: 259303 - DNA, 1974 bp, Klebsiella pneumoniae
atgaattgctgggatgttttagggttagcgccgggagcggaaacccgcgaaattaagcgtcgttttgcgcaactggtaaagattaaccgtccggaggatgacgccccggcgtatcagcggctgcgccacgcctatgaggaggcgctctcctgggagccgaccaatgatgttctgcctgcgcagcatgacgtgggggaccatcaaccggcgacatcagagcacggagcaccgacacctattggcgtcgcgccatcgcgtattccgttaccccgcgcctcgcgtccgcagccagaaccgttatctccaggctccacgctaagctggcgaagcgtgcttgacgagctgcttatggcgaacgaaagcaagcctcaggaggctgaaaagcagctggccgatgctgtcgccaggcttgcctggtcagatctgaaatcccgcttactgtttgaggaaaatctggcgttaacgttgagccgggtgtttcgtcctttgctgatgttggcagcggcagaaaagtttaagtggcatttgacttccggaggcaattttcagaccgcctgcagcgtcattaatgagaaatgcgcgctctggcggctgcttgccgcggaaatcggaccgctgttttttgccgatatgatggcgatcgaggaaatcgaaagcggcgatcggcttaaggcgctttatcagaactatgcgcaggatgcggagaacagaccgtggtttgatgcggtggtcttaacccacatcgctcaatacgacctctcttccgcgctgctgggcctggtgattgagcagattgaatggtcatttaaagcgcagaaaacgctccgcagctggtcgcttagcgaacgcttttatgcgttagagacgattcacccggtgggatataaaaaactttgcgctgctctcggctgcatcgacggtgtttaccatacctcgaaaaaggtggtgagctatatcaaagcggcagagctgaagcacgccgtgtcccgctacaatcttggtcttctctatgaactgggagaagatgtagagcaagacgctatccgcgcatttttctggtacgcctgcgcggcaaaacagggcgatgcggacgcgcagtatgcgttgggactgtgctatcgaaacggaagtggcaccgttcaggatgaccagcaggctctcgtctggctacaaaaaagtgctgaacaggggaaggctattgcccggtatgaactcgggcgcctctactatgatgctgcttctccgcatttgcgtgacggcgcgctggctcttcattggctgggcaaagcggcgcagcaggggctggcgttcgcgcaaaatagtctgggcactctctattacgaaggccgcatggtagataaaaactattcgctggctctggaatggtttagtcaggcagcccgccagggggatacgctggcgcaatataacctcgggcaattatacagcaacaatgaaaccggcttagccgattacccaaaagcattatactggttaactcaggcagcaaatcagaattatggcgatgcgcaattcaaactcggattcctctattttgccggagaggatatcccgcagaatatgccggaggctatacgctggctgacctgtgcatcccgacatcattatgttgatgcttttaatctattgggatccatctacctcggcggccatggcggggtaccggtggactatagtcagtctctgttctggtacgagaaagcggcgaagcgtggacataccagcgcccagaatttagtggcctttatgtatgccaatggcgttggaacggaagagaatgcgattatcgcctgggcctggatcctgatatccggcggcaatgatcccagaataaagcaggagcaaattcgccgcaaaatgtccggacgcgatctggcggaagcagaggagattgctcgtcaatataggcaaaaatatcggctgaatacgcctgaatttgaggatgacgattga

SEQ ID NO: 259304 - DNA, 1134 bp, Klebsiella pneumoniae
gtgagcgctaaactgctatcgtggcggcgcgtacgcgccctgtgcgtgaaagagacgcggcagatcgtccgcgaccccagcagctggctgattgcggtggtgatccccctgctgctgctgttcatttttggctacgggattaacctcgactccagcaagctgcgggtgggcgtgctgctggagcagcagagcgaagaggcgctggattttgtccataccatgaccggctccccctatattgacgccaccatcagcgataaccgccaggaactggtgcagatgatgcaggcgggacgcattcgcgccctggtcaccctaccggtggacttcgaccagaagatggcccgtcccggcgacgacgcgccgatccagctcatcaccgacggcagcgaacccaataccgctaacttcgcccagggctacgtcgaaggcatctggcaaatctggcagcagcagcgggcggaagatcgcggtgaaaccttcgagccgctgatcgacgtgcagatgcgctactggtttaacccggccgccatcagccagcattttattatccccggcgcgattaccatcattatgacggtggtcggcgcgatcctgacgtcgctggtggtggcccgcgagtgggaacgcggcacgatggaagcgctgctatcgaccgaaattacccgcgccgagctgctgctgtgcaagctgatcccctactatttcctcggcatgctggcgatgctgctgtgtatgctggtggcggtgtttattctcggcgtgccgttccgcggttcgctggtgattctgttttttattaccagcctgtttttgctgagtaccctgggcatggggctgctgatttccaccatcacccgtaaccagtttaacgccgcgcaggtcgctctgaatgccgcgttcctgccgtcaatcatgctctccgggtttatttttcagatagacagcatgccggcgataattcgcgccgtgacctacgtgatcccggcgcgctattttgtcagcactctgcaaagcctgtttctggcgggcaatatcccggtggtgctgttggtgaacgtgctgttcctgatcgcctcggcggtgatgtttatcggcctgacgtggctgaaaaccaaacgacgtctggattaa

SEQ ID NO: 259305 - DNA, 750 bp, Klebsiella pneumoniae
atgtttttaaaagataaagtcgccattattactggcgcggcctccgcacgcggtttgggttttgctaccgcgaagttatttgccgaaaacggcgctaaagtggtcattatcgacctcaatggcgaagccagcaaagccgcggcgacggcattaggcgaaggccatctcgggctggcggcaaacgtcgccgatgaagttcaggttcaggcggcaatggaacagattctggcgaaatatggtcgggtagacgtgctggtgaataacgccggtatcacccagccgctgaagctgatggacattaaacgtgccaactatgacgcggtattggatgtcagcttgcgcggtacgctgctgatgtcgcaggcggttatcccggcgatgcgggcgcaaaaatcgggcagcattgtctgtatctcgtcggtttccgcccagcgcggcggcggtatcttcggcggcccgcactacagtgcggcaaaggccggagtgcttggcctggcgcgagcgatggcccgcgagctgggtccggacaacgtccgcgtcaactgcattaccccggggctgatccagaccgatatcaccgccggtaagctgaccgacgaaatgacggccaacatcctcgccggaatcccgatgaaccgcctcggcgatgcggttgacatcgcgcgcgccgcgctattcctcggcagcgatctctcttcctactctaccggtatcactcttgacgtaaacggcggcatgttaatccactaa

SEQ ID NO: 259306 - DNA, 630 bp, Klebsiella pneumoniae
  misc_feature (492)..(501): n is a, c, g, or t
gtgcagatcggccacggtgataaacccccgccggtcgcagtggcggacgtcttcatccagctcttcgtcccaccacagaccgacgcgctgatggctgaccagcatctggttgacggttttcaccgccgcgcggaagtcgctcatccgggcattaagctggaatgccagcgtatccagggccgccaactcgttgacgtcggtggcggtggtgatcaccgggtcggcgccgagcatcccggccagatagcggctgagggcattcgcgccccccgcatggccggaaagcaggctaatgacgtgctggccgcgttcgtcgatcaccaccacggccggatcgctgaacttatcattgaccagcggggccagcacgcgtaccgcgatcccggtggcgccgatgaaaatcagcgccgaatagctgctgaaggcctcgcgcgcggcgctggcaaaaccgttttcaaaggggagaaaaccctcttccagcagcttctcgcnnnnnnnnnnaagcaggttaacggcagcatcgccgccagccgtttcgccagccgaacgccccctggcgtcaggcagaaaagtgcgattgattcaggctttacggtattcatggctaaagtccgccgcgtagagttttga

SEQ ID NO: 259307 - DNA, 168 bp, Klebsiella pneumoniae
atggtggtgggggaaggattattcgtcgcttcgctcctcacccttcgggccgttgcctgcggcaacgttgtctcgctgacgctcgactcgaaccttaatcgaagcttctcattcttccctgcatcggaagaatatatggcaatgtgctttgagcaggtagcggtgtaa

SEQ ID NO: 259308 - DNA, 900 bp, Klebsiella pneumoniae
atgttagacaacagccgtttacgcatagctattcagaaatcagggcgtttaagcgaagattcacgcgaattactcagccgctgcggcatcaaagtgaatctgcacacccagcgcctgatcgcgatggcggaaaatatgccgatcgatattctgcgcgtgcgtgatgacgatattcctggccttatcatggacggcgtggtcgatttggggattatcggtgaaaacgtgctggaagaagagctgctgagccgccgcgcccagggcgaagatccgcgctactttaccctgcgccgcctcgacttcggcggctgccgcctgtcgctggcgaccccggcggatgaaccctgggacggccctgcggcactggacggcaaacgcatcgcgacctcttacccgcacctgctgaagcgctaccttgaccagaaaggcatctcctttaaatcctgcctgctgaacggctcggttgaagtggccccgcgcgctggcctggccgacgcgatttgcgacctggtctctaccggcgcgactctcgaagcgaacggcctgcgcgaagtggaagtcatgttccgctccaaagcctgcctgatccagcgcgacggtgagatggcggatagcaaacagcagcttatcgaccgcctgctgacccgtattcagggcgtgattcaggctcgcgaatcgaaatacatcatgatgcacgcgcccaccgagcgcctggaagaggttgtcgccctgctgcccggcgccgagcgtccgaccatcctgccgctggcgggggacaagcagcgcgtcgccatgcacatggtcagcagtgaaaccctgttctgggaaaccatggaaaaactgaaagcgctgggcgccagctccattctggttctgccgattgagaagatgatggagtaa

SEQ ID NO: 259309 - DNA, 1305 bp, Klebsiella pneumoniae
atgagcttcaacacaattatcgactggaacggctgtcgcgcagaacaacagcaacaacttttaatgcgtccggccatttccgcctccgagagcatcagcaaaacggtggcggagatcctgaataatgttaaagacaacggcgatgcggccctgcgtgaatacggcgcaaagttcgacaaaaccgaggtcacagcgctgaaagttagcgaagaagagattgccgccgccggtgcgcgcctgagcgacgagctcaagcaggcgatggccgtagcggttagaaatatcgaaacctttcacaacgcgcagcggctgcaggccgtagatgtggaaaccctgccgggcgtgcgctgccagcaggtgacccgccctatcgcctccgtcggcttatatattcccggcggctcggcgccgctgttctcaacggtcctgatgctcgccacgccggcgcgcatcgcgggctgccagcaggtcgtgctgtgctcgccgccgccgattgccgatgaaattctctatgccgcccagctatgcggcgtgcgcaatatctttaacgtcggcggcgcgcaggcaattgccgccctcgccttcggcacggagtcggtgacgaaagtcgataaaatctttggcccgggcaacgccttcgtcaccgaggccaagcgtcaggtgagccagcgtcttgacggcgcggctatcgatatgcccgccgggccatcggaagtgctggtgatcgccgacagcggcgcaacccctgatttcgtcgcctctgatctgctttcccaggcggagcacggcccggattcgcaggtgatcctgctgacgccggatagcgcgatggccacccgcgtcgccgaagccgttgagcgccagctgtccgcgctgccgcgtgcggaaaccgcccgtgaggcgctctccgccagccggatcatcgtggcccgcgatatcgcccagtgcgtggaaatatccaaccagtacggccctgaacacctgattattcagacccgcaacgcccgcgaactggtcgatggcatcaccagcgccggctcggtgttcctcggcgactggtcgccggaatccgccggggattatgcctccggaaccaaccacgtgctgccgacctacggctacaccgcgacctgctccagcctcggcctggcggactttcagaaacgcatgaccgtgcaggagctgtcccgcgacgggttcgccgccctcgcttccaccattgagatactggccgccgccgagcgcctggacgcccacaaaaacgccgttacgctgcgcgttgcagcccttaaggagcaagcatga

SEQ ID NO: 259310 - DNA, 1062 bp, Klebsiella pneumoniae
atgagcatcgaagatttagcccgcgccaacgtccgcgcgctgacgccgtatcagtctgctcgccgtctgggcggtaagggcgacgtctggctgaacgccaatgaattccccaccgcggttgcgttccagctgaccgaacagacgctgaaccgctatccggaaccgcagccgaaagccgtcattgaacgctatgcgcagtatgctggcgttaagccggagcaggtgctggtcagccgcggcgccgacgaaggcattgaactactgatccgcgccttctgcgagccgggccaggacgcggtgctctactgcccgccgacctacggcatgtacagcgtcagcgccgaaaccatcggcgtgacctgtcgtacggtgccgacgctcgccgactggcagctggatctgccgggcatcgcagccaatcttgacggcgtgaaagtgattttcgtctgcagcccgaataacccgaccggacagattatcaacccgaaagatttccgcaccctgctggagatggcgcgcggtaaagccatcgtggtcgcggatgaagcctatattgagttctgcccgcaggcgacgctggcaacctggctgaacgagtatccgcatctggtggttctgcgcacgctgtccaaggcgtttgccctggctggactgcgctgcggctttaccctcgccaacgtcgaggttattaacgtgctgctgaaagttatcgcgccctatccgctctcgacgccggtcgccgatattgccgctcaggccctgagtgcggaagggattgccgccatgcgcgagcgcgtggcgcagatcctcaacgaacgcgattatctggtcagccagctgcgcagcattgcctgcgtggaagaggtgttcgcttccgagaccaactacgtactggcgcggatcaccgcgtccagcgcggtgtttaaatctttgtgggatcagggcattatcttacgtgaccagaataaacaaccttcattaagcggctgtttgcgtatcactatcggtacccgtgcagagagccagcgcgtcattgacgctttgactgcggagaatgtatga

SEQ ID NO: 259311 - DNA, 1068 bp, Klebsiella pneumoniae
atgacccagaagtttctctttattgaccgtgacggtacgctgatttccgaaccaccggttgattttcaggtagaccgcttcgataagctggcgtttgagccgcaggtgatcccggccctgctcaagctgcagcaggaagggtataagctggtgatgatcaccaatcaggacggactgggaaccgccagcctgccgcaggacgagttcgacggcccgcacaacctgatgatgcagatcttctcctcacagggcgtcaactttgacgaggtgctgatttgcccgcatctcccggcggataattgcgactgccgcaagccgaaaaccagactggtgctgccgtggctggagcaaggggtgatggacaccgccaatagctacgtgattggcgaccgggccaccgacattcagctggcggataacatgggcattaccggactgcgctacgatcgcgaaacgcttgactggccgaccatttgcgaacagctgacccgtcgcgatcgctacgcccacgttgagcgcatcactaaagagacccaggtggatgtcaaagtgtggctcgatcgcgaaggcggcagcaaaatctccaccggcgtcggcttcttcgatcatatgcttgaccaaattgccacccacggcggcttccgtctggaggtcaaggtcggcggcgacctctatattgacgatcaccacaccgtggaagacaccggccttgcgctgggcgaagcgctgaagctggcgctcggcgacaagcgcggcatcgcccgtttcggctttgtgctgccgatggacgaatgcctggcccgctgcgcgctggatatttctggccgcccgcaccttgaatacaaagctgattttacctatcagcgcgttggcgatctgagcaccgagatggtcgagcacttcttccgctcgctctcctataccatggcggtcactctgcacctgaaaaccaagggcaaaaacgatcaccaccgcgttgagagcctgtttaaggccttcggtcgcacgctacgccaggccatccgcgtccagggcgacacgctgccatcttcgaaaggggtactctga

SEQ ID NO: 259312 - DNA, 591 bp, Klebsiella pneumoniae
atgaacgtggtgatcctcgataccggctgcgccaacctcaattcggtgaaatctgcggtgagccgccacggctacgagccgcaggtcagccgtgacccggacgtggtgctgcgcgccgataagctgtttctgccgggtgtagggacggctcaggcggcaatggaccagctgcgcgaacgggatttaatcgatctgattaaagcctgcacccaaccggtgctgggcatttgtctcggtatgcagctgctgggaaaacgcagcgaagagaataacggcgtcgacctgctgggtattatcgaccaggacgtgcccaaaatgaccgaccacggcctgccgctgccgcatatgggctggaaccgggtatatgcgaaagcgggcgatcgtctgtttcgcggcattgaagacggggcgtatttttacttcgtccacagctacgcgatgccggtcaacgttaacactatcgctcagtgcagctacggcgaggccttcaccgcggcggtgcagaaagataacttttttggcgtccagttccaccctgaacgctccggcagcgccggggcgcagctgctgaaaaacttcctggagatgtga

SEQ ID NO: 259313 - DNA, 480 bp, Klebsiella pneumoniae
gtgctgcaggccgacggactgatagctctccaccagctcctccagggttacgccggaattctcctgccagccgctaacggccacctgcttgctgccttgcgcatcgatccgtacgtccagcgccagcaccagatgctgcgggccaaaacgcttaaaccagcctttcaccgcttccggcgactttaccgccgtcgagcccaccaccacgcgcgccacgcccgcgtcaagcagggcggccacgtcttcttccgtgcgcacgccgccgccgacctgcaccggcacgttcacgccggcaaccagcgttttcagcagcgggatctggcgcttcgccggatctttcgccccggtcaaatcgacgagatgcagtacttcggccccttgcgcggcataggattgcaggcgcggcagcggatcgttgccgtagtcgcgctgctggccataatcgccctgatggagacggacgaccgtaccgtcaattaa

SEQ ID NO: 259314 - DNA, 576 bp, Klebsiella pneumoniae
  misc_feature (529)..(538): n is a, c, g, or t
atgcataagacaggatgcgacgactggtggcgccatatctccggtccgcaaattgaggtcgtggacgacgcgtatcgggtgaccttttggtggcgcgatccggcgggcaacgaagcctcttcgccaacccggcgggtatggatttatattaccggcgtgactgaccatcataaaaacgccgtaccgcaaacgctgcagcgcattcccggtaccgatgcctggtgctggcaaaccactctctctgccgcctggcgcggcagctactgctttattccttccgcgcgggacgacgacttttcccctcagctttttaacggcgacagcccggaccgcgcgctgctgcgcgaaggctggcgcaagctgctgccgcgggcgattgccgacccgcttaatccgcaaagctggaagggcgggcgcggccacgcggtctctgcgctggagctgccggacgcccccgaacagcccggctgggcgctgcgtgatgaaccttatcagccgccggtctgcattgaatggcagagccagcgannnnnnnnnngttctgggcagaaagcatgccggtatgggcgccgctag

SEQ ID NO: 259315 - DNA, 435 bp, Klebsiella pneumoniae
gtgacaaaacataaaaagtggatctcaaaaaccgatcagacctctatcctgctggtcgtttattcggcattcagcgaggcagtcgtgaacggtatctggcacaaagtgggtatcggatcgctgctgttcatcgttattgtcagcatcgtgctgctggcaattgtgatagctattaacgtgtttgtagcgcgcaggtgtggatttaataaagcggatgaaattacgattgtcttctgcgggtcgaaaaagagcctggcgaacggcattccaatggccaatattctcttcccgacttcaatcctggggatcatggtgctgccgctgatgatcttccatcagattcagctcatggtgtgcgcagtgctggcgaggcgctataagcgccaggccgaagcattgcaggcgcaggaaaaaaaccgcgcctccgaagcttaa

SEQ ID NO: 259316 - DNA, 216 bp, Klebsiella pneumoniae
atggttaagtcagccaatgtgatgttagtgggctatgaaaagattggctccgggctggtaaccgtcatcgtgcgcggcgatgttggcgcggtaaaagcggccaccgatgcgggtgccgccgccgcacgtaacgtgggtgaagtgaaagccgtacacgtcatcccacgccctcacaccgatgtagaaaaaatcttaccgaagggaattagccaatga

SEQ ID NO: 259317 - DNA, 1665 bp, Klebsiella pneumoniae
atgagatcgaaaagatttgaagcactggcgaaacgccctgtgaatcaggacggcttcgttaaggagtggatcgaagaaggctttatcgcgatggaaagcccgaacgatccgaaaccgtcgataaaaatcgttaacggcgcggtgaccgagctggacgggaaaccggtgagcgattttgacctgatcgaccactttatcgcccgctacggcattaacctgaatcgcgccgaagaagtgatggcgatggattcggttaagctggccaacatgctgtgcgatccgaacgttaaacgcagcgaaatcgtcccgctgaccaccgcgatgacgccggcaaaaattgtcgaagtggtttcgcatatgaacgtcgttgagatgatgatgtcgatgcagaaaatgcgcgcccgccgcaccccatcccagcaggcgcacgtcaccaacgtcaaagataacccggtacagattgccgccgacgccgccgaaggcgcatggcgcggatttgacgaacaggaaaccaccgttgcggtagcgcgctacgcgccgttcaacgccatcgcgctgctggtcggctcgcaggtaggccgtccgggcgtactgactcagtgctcgctggaagaagccaccgagctgaagctcggcatgctgggccacacctgctacgccgaaaccatctccgtctacggtaccgaaccggtctttaccgacggcgacgacacgccgtggtcgaagggtttcttagcctcctcctacgcctctcgcggtctgaaaatgcgcttcacctccggctccggctccgaagtgcagatgggctacgccgaaggcaaatccatgctttacctggaagcgcgctgcatctacatcaccaaagccgcgggcgtacagggcctgcaaaacggttccgttagctgcatcggcgtgccgtctgcggtgccttccggcattcgcgcggtgctggcggaaaacctgatctgttcgtcgctggatctggagtgcgcctccagtaacgaccagaccttcacccactccgatatgcgtcgtaccgcgcgcctgctgatgcagtttctgccggggaccgactttatctcttccggttattccgcggtgccgaactacgacaacatgttcgccggttccaacgaagatgccgaagactttgacgactacaacgtcatccagcgcgacctgaaggtggacggcggtctgcgtccggttcgcgaagaagatgttatcgccatccgtaataaggctgcccgcgcgctgcaggccgtttttgccggaatggggctgccgccgattaccgatgaagaagtggaagccgcgacctacgcccacggttcgaaagatatgccggagcgcaacatcgtcgaagacatcaagttcgcccaggaaatcatcaataaaaaccgcaacggcctggaagtagtgaaagcgctggcgcagggcgggttcaccgacgtggcccaggacatgctcaacatccagaaagccaagctgaccggagactatctgcatacctccgcaattatcgtcggcgatgggcaggtgctgtcagccgtcaacgatgttaacgactatgccggtccggcaacgggctatcgcctgcagggcgaacgctgggaagagattaaaaacatccctggcgctcttgatcccaacgagattgattaa

SEQ ID NO: 259318 - DNA, 1458 bp, Klebsiella pneumoniae
atgcgatatatagctggcattgatatcggcaactcatcgacggaagtcgccctggcgactctgaatgaggctggcacgctgacaatcacccacagcgcgctggcggaaaccaccgggatcaaaggcacgttgcgtaacgtgttcggtattcaggaggcgctcgccctcgtcgccagaggcgccgggatcgctgtcagcgatatttcgctcatccgcattaatgaagctacgccggtgattggcgatgtggcgatggaaaccattaccgagaccatcatcaccgaatcgaccatgatcggccataacccgaaaacgcccggcggcgcggggcttggcgtgggcatcaccattacgccgcaggagctgttaacccgcccggcggacgcgccctatatcctggtggtgtcgtcggtgttcgattttgccgatatcgccagcgtgattaacgcttccctgcgcgccggatatcagattaccggcgtcattttgcaacgcgacgatggcgtgctggtcagcaaccggctggaaaaaccgctgccgattgttgacgaagtgctgtacatcgaccgcattccgctgggaatgctggcggcaattgaggtcgccgtcccggggaaggtcatcgaaacgctctctaacccctacggcatcgccaccgtattcaacctcaacgccgaggagacgaaaaacatcgtcccgatggctcgcgcgctgattggcaaccgttccgccgtggtggtcaaaacgccatccggtgacgtcaaagcgcgcgcgatacccgccggtaaccttgagctgctggcccagggccggagcgtacgcgtagacgttgccgctggcgccgaagccatcatgaaagcggtcgacggctgcggcaagctcgataacgtcaccggcgagtcggggaccaatatcggcggcatgctggaacacgtgcgccagaccatggccgagctgaccaacaagcccagcagcgaaatattcattcaggacctgctggccgtcgatacctcggtgccggtgagcgtcaccggcggtcttgccggggagttctcgctggagcaggccgtgggcatcgcctcaatggtgaaatcggatcgtttgcagatggcgatgattgcccgcgaaatcgagcagaagctcaacatagacgtgcagatcggcggcgattcgcgcaaaattctcggctttgagccgctgcatgaaaaatgggccgccttcggctggtacgtgcagcgcgtcgacggtaacgatctggcggcggtgatggccgcctttgataacgcgaaaaatcatgcgggcaaccagccgcgggtcatcttatgcgacacattgatgggtaaaggggtccagttcctcgaaacccgggataaaaaccattttattcgcgtcgatgccgatgagtggcaaaaagcgattgcggtgctggacgccaacaaaccggaaggagtgctgtaa

SEQ ID NO: 259319 - DNA, 747 bp, Klebsiella pneumoniae
atgttaagtataaaaaatttgcaggtcgccgttgaagacaaagagatcctgcgcggactgaatctggacgttcgccccggcgaagtgcatgccattatgggcccgaacggttccggtaaaagtacgctctccgccacgcttgccggacgtgaagactatgaggtgaccggcggcagcgtggagtttaaaggcaaagatctgctggaactctcccctgaagatcgcgccggcgagggcatcttcatggcctttcagtatccggttgaaattcccggcgtcagcaatcagtttttcctgcaaaccgcgctgaacgccgtgcgcagctaccgcggccaggagcagcttgaccgttttgacttccaggacctgatggaggacaaaattaagctgctgaagatgccggaggatctgctgacccgctcggttaacgtcggcttctccggcggcgagaaaaagcgcaacgatatcctgcagatggcggtgctggaaccggagctgtgcatcctggacgagtcggactccgggctggatatcgacgccctgaagattgtttccgacggcgtcaactcgctgcgcgacggcaagcgctcgtttattatcgtcacccactatcagcgcattctcgactatatcaagccggattacgtccacgtgctgtaccaggggcggattgttaaatccggcgattttactctggtcaaacaactggaggagcagggctatggctggcttaccgaacagcagtaa

SEQ ID NO: 259320 - DNA, 1488 bp, Klebsiella pneumoniae
atgtctcgtaatactgaagcaactgacgatgtcaaaacctggagcggcgggccactcaactataaagagggcttttttacccagctacagaccgatgagctggcgaaaggcataaatgaagaggtggttcgggcgatttctgcacgccgcaatgaaccagaatggatgctggagtttcgtctgaacgccttcaaggcctggcaggcaatggaagagccgcactggctgaaagcgcactacgacaagctgaattatcaggattacagctattactcagcgccctcctgcggcaactgcgatgacgcctgcgcttctgagcccggagctctacagcaaacggggtccagcgcgtttctgaccagcgaagtcgaagaggcgtttaaccttctcggcgtaccggttcgcgaagggcgggaggtggccgtcgacgccatttttgactcggtttccgtggcgaccacctaccgcgaaaagctggcggagcaggggattattttctgctccttcggcgaagcgattcacgatcaccccgaactggtcaggaaatacctcggcaccgtggtaccgggcaacgacaacttctttgccgccctcaacgcggcggtagcctccgacggcacctttatctatgtgcccaaaggcgtgcgctgcccgatggagctgtcgacctatttccgcatcaacgccgagaaaaccggccagttcgaacgcaccatactggtcgccgacgaaggcagctacgtgagctatatcgaaggctgttcggcgccggtacgcgatagctaccagctgcacgcggcggtggtggaggtgatcattcataaagatgccgaggtgaagtactccacggtgcaaaactggttccccggcgacaataataccggcgggatccttaatttcgtgaccaagcgcgccctgtgcgaaggcgagaacagcaaaatgtcgtggacccagtcggaaaccggctcggcgatcacctggaagtatccgagctgtattctgcgcggcgataactccattggcgagttcttctcggtagcgctgaccagcggccaccagcaggcggacaccggcaccaagatgatccatatcggcaaaaacacccgttcgacgattatctcgaaggggatttcagccggccacagccagaacagctatcgcggcctggtcaaaatcatgcccaccgcgaccaacgcgcgcaacttcacccagtgcgactccatgctgattggcccggacagcggggcgcataccttcccgtatgtagaatgccgtaataacagcgcgcagcttgagcacgaagcgaccacctcccgtatcggcgaagatcagctgttctactgtctgcagcgcggaatcagcgaagatgatgccatctcgatgatcgttaacggtttctgtaaggatgttttctcagagctgccgctggagtttgccgtagaagcgcaaaaattactggcgattagccttgaacacagcgtcggctga

SEQ ID NO: 259321 - DNA, 321 bp, Klebsiella pneumoniae
atgggaggcaaatgccatcgtcccgccggatacgcacgtgaagaaaatattaataccgtttattggccgccgcgcctcgttatgcgcagcgcggcatcaatcgatgccacggtggacgccgacgcggcgaacaggcggcaggacttcgctggagcagggctccgcttagtccacgcgtttgcctttggtcgcctctccgccgccgagtgcggcttgattaattttatcttcgtgggtattaatcaattgcgtgagcgctatttgttcctgaaatttagtcagcagaagctcagcgtcggatttaagaatatcttccgatga

SEQ ID NO: 259322 - DNA, 1035 bp, Klebsiella pneumoniae
atggccaaacccatcattacgcttaacggcttaaaaattgtcatcatgcttggcatgatggtgatcatcctgactggtattcgcttcgcggcggatattatcgttccttttattctggcgatctttctggcggtagtgattaacccgctggttcagctcatggtgcgctgtcgggtgccgcgggtactggctatttcgctgctggtcggcgtcattgtcctgctggccgtggtgctactggcctcgctgggcacctcgcttaacgaactggcgcgcacgctgccgcagtaccgcaattatctttatgaaccgatgcagactatcgcgccatggctgcagcgcttcggctttaccgtctcggtggtagagcttaataagtacattgaccccaacgcggtgatgacgctggtgaccagtctgcttacccagctttcaaacgccatgtcctctatcttcctgctgctgctgacggtggtatttatgctgctggaggtcccgcagcttccggcaaagctgcagcagttgatgtcgcggccggtggaaggcatgggcgcgattcaacgggcgctggatagcgtctcccactaccttgtattaaaaaccgccatcagcctggtgaccggactggtagtctggggaatgctggtgctgctggacgttcgctttgcctttatgtgggggctgctggcttttgctctcaactatattccgaatattggctcggtcctcgcggcgatcccgccgattttacaggtgctggtattcggcggtctgtacgaagcgctggtggtcctggcgggctatctggtgattaacctggtgttcggcaacatccttgaaccacgcattatgggccgcgggctggggttatcgacgctggtggtcttcctgtcgttgattttctggggctggctgctgggtccggtagggatgctgctttcggtaccgctgacgatcattgtcaaaatcgccctcgaacagacggtggccgggcagagtattgcctttctgctgagtgatttgagtaaaaactaa

SEQ ID NO: 259323 - DNA, 345 bp, Klebsiella pneumoniae
ttgggcagcagctttagcggtatggtgcctggtggttttgtggtgctttttcgcagcctgggctttctgagctaccggtttagcggcggcctttttgtgttttttggcggcctgagccttctgggtggcagccggtttagcttctgctttcttgtgctttttagccgcctgcgctttctgctctgcagccggtttaacagcggctttatggtgtttcttgtgatgggtcgctttagcggtggtgctgtgagttgcagcagccggagccggagtggcggtggtggcggcatcggcagcgaaagcgacagaagacagacccatagcagcggcaacgaccagagctaa

SEQ ID NO: 259324 - DNA, 375 bp, Klebsiella pneumoniae
gtgtccggggcggaaaaggacgcgcttgagcaggcgcagtcggcgctggcagaagtcggtattgaactgcagtccgatgcgcactacgtgacgatccgcgcagtgcctttacccttaagacaacaaaatttacaaatcttgattcctgaactgataggctacctggcgcagcaaaaaacatgcgacgccgacaatattgctcagtggatagcgcgtaatctggcgagcgaacatgcgcagtggaatatggcgcaggcgattgccgtcctggcggatatcgagcgtttatgtccgcagctggttaaagcgccgccgggtggcctgttacaacctgttgatttacattcggcgatgaatgccctgaaagatgagtga

SEQ ID NO: 259325 - DNA, 612 bp, Klebsiella pneumoniae
ttgcggaggctcaggctcaacgggggcagcatagggatcgggctgctgcactggagcctgctccggctggtacgcatgctgcggctgccatgccggttccggatgataagctggctgctgcaccggagcctgctccggctggtacgcgtgctgcggctgccatgccggttccggctgataagctggctgctgcatcggagacggctgcggctggtacgcatgctgcggcggtgtcactggttcgggctgatagactggctgagcgtcgtaccctggcagcggttcagaccatgcctgcggagcagcggtatcctgcgcggccactgctaccggatcggcaatgctatggccgttcaacagcggatcgtatgggtcaaaatcgccagggcgtgccgcgctgactccggagaacagaacgtcatcgacattggccggacgcgctgcgctggaaccagaaaagagcacatcatcagcggcaacaggcgcaccgctggcgctatactgaatctcatcttccgcatcatccatccgcttaccggagaacagagcggcatcagttttacgccccatcgggttagcgaatttttcggccaggcgctggcggcgggctaa

SEQ ID NO: 259326 - DNA, 234 bp, Klebsiella pneumoniae
atgctgacccaggaccagccggtaaacaacgtcaatccggccgcccagatgcagagcagcgcgattgtgccgccgctgctgtgcagcagaggttgcagggtggtgctcagcagactgccgatcaccccgccggaggcaaagtaccagatatcatcagcgttgatagccgccagcccacaggacgtgagaatcagcgccagcgcaccgatcaaacgcagcgagacggcgaaataa

SEQ ID NO: 259327 - DNA, 495 bp, Klebsiella pneumoniae; identical to SEQ ID NO: 173885

SEQ ID NO: 259328 - DNA, 690 bp, Klebsiella pneumoniae
atgaaagcgcaggggcagcagctggcgatggagcctgcaaccagcctgttgaggagggcgcaaaaccttattgtcggttgggagagtgtgacgcaaacgcaccgtaatttctcaccagatatggatacgttaaagcagtttgttgaaaaggcggaccagataaagaaaccggtattgttgatggaagcacccgaggggatagggagcgttacgccagaaagcattcttctgcacagtggcaacggtttgtatatgcagagtattggagaagtcagtattgccagcgagcagaggcttgcagtgaatgccagccaggcgatatcgttactttcccgccaggaaggtgttcgtctggtatctgcaaaaggcccgctgaatatcgaatctcatagcgatattctctcattaacgtctcttcaggatgttaccgtacagtccacacagggacatcttcagcttacggcgaagaatggtatcactattgggtgtggcggcgcttacattcgcttgaccccgcagggagaaattgaaattcatggacctggcctgttaagtctgaaaggacaacataatttgcaggggccagccagcgaagatttccagttgcccgatctgccttcatcagtatgtaaagaatgcctcaaacgggctcaggaactggctcagggttttgtgccgagggacgcgtaa

SEQ ID NO: 259329 - DNA, 807 bp, Klebsiella pneumoniae
atggacaacataaagatctggctggataaaatccagctgacgtgtcagcagattggtcacaattatgtcgatatgattatcgatcagtgcggcgtgaatttctccgtcattccggctctttccgggttttctccggcaataaaatggcagtccctttaccagggattgccggagaatatttacccggacgatgcgcctttgctggtacgtattgagctggaagatgctcagcaggtgcagtggttatatgcgctggctagtgaagctgcggcaacagcgcctttactggtgctggggtcatcctggcggttcgaagttttggctgaatggttgatccgttgcattgatgcgcagcatgaggggcgtgcagggatatttcgcttctgggatacgcgtatattttcgtatctttttacccatgttcttagtgatgaacagcaaagtcagctccacagaccgacattattctggagctggctggatcgcgacgaagcacctgttttgctggaaggaaacggggcagcattaggtgaagaggaattgagtgagcaaatcatatttactgataatcagtttgaaagtctgatgtgtctgtgtgatgcaaaacaattattggtttatctgccattaccgaagaacctttttatgaacagagaaagtgaattttctgcttgctttaaggctatgctggctgcgacaaaagaaggtgtgcttttcgaagataaacgtaatgagtgggtggctgagtatattcttaaaaataaaatttattctgatgaatgcagttctggtgttaataatctataa

SEQ ID NO: 259330 - DNA, 357 bp, Klebsiella pneumoniae
atgtatttggatagtgatacaaaagttattatctctggaacggtaatattactggttggaatcattgtctggaaaaaacaaagcttttttattgctctggtgttttgtgttttgtttatcaaagcgtctatgatgtttttagcgatagttatgctattatcctggggagagccggcaaattctttttattttatatttcctgttattagtgtttttatcgctttgttttttcctgataagcgttggccaaaacgtaccggacacatatacagatgttcatcatgcatgaattttgttaactataaaatcgataaatgtcctcattgtggctctgacatggatccaaaaaatatttga

SEQ ID NO: 259331 - DNA, 576 bp, Klebsiella pneumoniae
atgtctataataaagtctgatttaggctggtatccaccgcagggacgatggctgacacgctttgtttttatcgctgcggcgatattgctggctggttgtgacaggcctgccagagaaaagaatgttagcggcggcagcgggaccatagaagcggttaaccatacccactgggcgataaaccatttcagcgtagacgggcagtcagggctggatattatcggcccctggcagggcggcggcggtggctgctgttacggtgtgccaacgaaatggaaaccgggaatgacggtgaaagtggaatgggaaacgggtgtcggttattcaatggattttccaggatatggagatgacgctaaatatttagaatgggaaaaaaaaataaaagctcagaaccaggaacatagccggatagtcccagttcccgattataccgggcaaaaaacctgcggaataaaggttcactttttaccctgcgatcaaataaaagtcaccaccagctgctatgactacggcaacccaaattatccgattaaagatccgatcaaaatggaggaacccaaagtatgtccacaataa

SEQ ID NO: 259332 - DNA, 636 bp, Klebsiella pneumoniae; identical to SEQ ID NO: 198761

SEQ ID NO: 259333 - DNA, 2418 bp, Klebsiella pneumoniae
atgtccacaatgaaacctgatgtagtctggtatcctccgcaatttccgaaacagggacgtttacccacacaagcggcgttagtcggtcaaaactgtaagcagcaggacagccatgaactggcttaccgcaatgaacattgccaggcggcgggtcgactggtggaaccgccgtgctgtaagacgctgcatatcagcctgtttttcgacggcaccggtaataatctgaacaacgatctttatatcgacgttcctaaacatcccaccaatattgcccgtctttttcgcgcaaccattggccaggggcacgccggtggcgtccagggacacgccgaggaactggtggatatggaagggacgtcgggtaataaatattacaagtactacatccctggcgtcggcaccccctttccggaagtgtcggatctgaattacagcacgcccggcatggcctttgccacctatggcgaagaacgaattaactgggcgcttattcgcattatcgataccttaagacgcacgctgggcaaacctgctttatccgataatgaaagctggaaagcggtgaaagacatgacctctcgtacagaagatttcggggcttcaggtcaataccgacgtccaatagtattccggcagcttttaaaagatctggaacccgagctgaagctggcgttaaagcaacctgaacccggtaaaccgaaactgctggggattaagctgtatgtgtacggtttttcacgcggagcggcggcggcaagggcctttgtcaactggctggttgaactgctgcccaatgctttcagaaaaggaacgaagccggatctctgtctgacgctggaaggcgctaactggaaggtgccgctgagcgtcgaatttctgggattgctggatacggtggcctctgttggcgtggcgcatatcgcccctcttgcggaaggacatatgggctgggccgataatgcaatggagctgcccgataacggcctgattaaaaattgcgtgcatctggtttccgctcatgagcagcgactttgttttccactggattcgatttgccgccatgacggaacctatccgtcctatgccagagagatggtgtatcccggtatgcattcagatattgggggcggttatccacctggtgatcagggaaaagcggtggggggcgatgacggttatttactatctcaaattgcattgcatgatatatatgcagcggcgtttaacgctggtgcgccattgaaggtgttcccaacagcgttaccaaaagatctcttaccgcaaacttggcggataatgcctgcagagttacaacgagaattttttgtcaaagaaggacttgttgcgcgtttcaacgcctggcgtgaattaacattaaaccttccctcatctctggaaaaaataagtgatgagaatgctgccagatacgaacctgtacgtgcatcagtcaacgttattaccgcgctggaagatcaaatcacctggataaccgcctggcgtatcggtcgctatgcgagtggcaactatacaaaacagcggttttatattgatgcagccgcaaacggcatggataaagacagcgaccccaaaattagagaggcttccgaacaggcgcgagatataaaacagcggaaagtagagaaaacacggcgtaaaatgcaggagtctgctgaaaaagatacctatatcccctatccgccggggccgaaagattttgatcccgcgttggggcagacgcagctgcgccaggctgcggaagaatttcgcgaggactatcagctaaaacagcgtgccgtaaccggaaactggatatataagggaatggataaactgagtaacctggtttataccttcagcgatgatgatgtaagtggcgaatatataaagataaaaaaagaggccaatgaaaaatattcaatgctctttcctcctcagggggaaagcagcaacgagcaacaacccggagggctggtcagagcattatttgacgatcaggttcatgattccagggcctggtttatgcaggcgacgcttgatgccagggaaccgtggggaagttactttttataccggatgatctatttcggtgagctgatgagtaaaaatattacacctcttgtgaaatacgggcgctttattgaggggagatttaaagatacggttcctggcgttgattttattatcgagcgagctgagaaaggaggggctattatgggtgaaaactccccgcctgaaataaaacaaaaaatatccgtggtaaacagctctgcggatattccccttaccatgttgtccgatcttccccttcaacctgcgctgacaaacgagccagcggaattaatcgcctggcagcaacaatcgcgggaagcggaaaaactggccagtacgaaagcggcgatagcctcactgtggccataa

SEQ ID NO: 259334 - DNA, 258 bp, Klebsiella pneumoniae; identical to SEQ ID NO: 177198

SEQ ID NO: 259335 - DNA, 981 bp, Klebsiella pneumoniae
atgcttttcacgttaaccgtcatggggcttttctggcttctttctctgctgtattaccggttttcaattcaccactcatccacctggaaagcggaggtggcacaggtacaaagtcactggtggtatcagcatcgtcggcagttttccctggaggatgtggtgctgattggccctgccggggcggagatgatggactggttgcgtttgcttaagcgtaagcaaaaagcgccagcagaacgtcaggaggcaaacggtaaagcgctgcgtgtggcgcgttctttttcttccgatgcgacggaacgtgaaaatcaactggctcgtatgctggtactacagtggaaacggcagcgcgaaggcaaaaaattgctctcgccgcagcgcttttactggcaggggagcgagagcgtatggcaggcgtttgttgcacagataaaggactcttttccaggcattgtgctgcctgaattaccgattatgtggaagggagaacgttcactgtcagatattgcagcctttctggattcagagggcgatggcacgcaaattctggtggctgggtgccagtctgaagtcccctcggcagaggatttgctgcctgccggagaagccgctgccctgtggcttgtgagtgctgagggggctgtattgctctcacagggggaatatttttccccatcggcaacggaatatttgaaggatgtctgtgaacgagcacagaagcaaagtgaacttgactcagcacctgacgcctgcattcttttttctcacccgcaacaatctgaactggcaggcagcggctggaacgttactcatcatttgcaggacaatttttggggtaatacgggaaaacttgaggcgcttgttgtgatatcacttgctgccattttcgcacaaagccagtcgcaaccctgcggctggatagccactgatcctttacaccccctggcgcttggaattgttaaacctcatgaaaacagataa

SEQ ID NO: 259336 - DNA, 1542 bp, Klebsiella pneumoniae
atgcagagaggccaggccggcgcgataaatacgctcagcttctttcgggccagtcagcaccatgccttcgcctttggcgttaacactgtcacgggtcatgtagtacagacccagtacaacgtcctgagacggaacgatgattggttcgccgttcgccggggacaggatgttgttggtagacatcatcagcgcacgcgcttccagctgggcttccagcgtcagcggtacgtgaacagccatctggtcaccatcgaagtcggcgttgtatgccgcacaaaccagcgggtgcagctggatggctttaccttcgatcagaaccggttcgaatgcctgaatacccagacggtgcagggttggcgcacggttcagcaggaccgggtgttcgcggataacttcgtccaggatatcccaaacgacagcttcttcgcgctcaaccatcttcttagcggctttgatggtggtggccaggccacgcagttccagcttgccgtagatgaacggtttgaacagctccagcgccattttcttcggcagaccgcactgatgcagacgcaggtatggacctacggtgataacagaacgaccggagtagtcaacgcgtttaccgagcaggttctggcggaaacgaccctgtttacctttgatcatatcggccaaagatttcagaggacgtttgttagaaccggtgatcgcacgaccgcgacgaccgttatccagcagggcgtcaaccgcttcctgcagcatacgtttttcgttgcgtacgatgatatccggcgcagccagatccagcagacgtttcagacggttgttacggttgatcacgcgacgatacagatcgttgaggtcagacgtcgcgaaacgaccaccgtccagcggaaccagcggacgcagatctggcggcagtaccggcagaacggtcaggatcatccactccggcttgttgccagactgaacgaaagcttccagcagcttaatgcgcttggtcagctttttacgcttggtttcggagttggtttcgttcagctcttcccgcagctgctcgcattcctgctccagatccatattgcgcagcagcgcctggatcgcttccgcgcccattttcgcgtcgaattcgtcaccgaactcttccagcgcgtccaggtactgttcttccgtcagaatctggttgcgttcgaggttggtcatgccaccttcgataaccacataggattcaaagtacagtacacgttcgatatcgcgcagcggcatatccagcagcagaccgatacgggacggcagggatttcaggaaccagatgtgcgcagtcggacatgccagctcgatgtggcccatgcgctcacgacgcactttagtctgggtcacttcaacgccgcacttctcacagatcacaccgcggtgtttcaggcgcttgtacttaccgcacaggcactcataatcttttaccggcccaaagatacgggcgcagaaaaggccgtcacgctcaggcttgaacgtacggtagttaatggtttccggctttttaacttcaccgaaagaccatga

SEQ ID NO: 259337 - DNA, 1167 bp, Klebsiella pneumoniae
gtgcggatcccagtttgcgacggtttcaccgccggcaacctgctcaccgtcgcctttcgccataaccgcaccgtaaggtactttatagctctctttggtacgaccgaattcgtcgatcagcttcagctcggtattacgggaagtgataaccagcttaccactggagttcacaaccgacttcgcgttgctgagcttgatgctacctttgtttttcacctggatgctggattcagcagccgcacgagatgccgcaccaccgatgtggaacgtacgcatcgtcagctgtgtacccggctcaccgatggactgtgccgcgataacgccgatagcctcacctttgttgatgaggtggccacgcgccaggtcacgaccatagcagtgcgcgcagacgccaaagtcggtgtcacaggatacaacggaacgcactttgacggagtcaacggagttcgcttccagcaggtcacaccagtgctcgtgcagcagcgtgttgcgtggaaccagaatatccgcggtacccggcttcagaacatcttccgcagtcacacgacccagtacgcgatcgcgcagcggctctttaacgtcgccaccttcgataaccggcgtcatggtgatgccttccagggtgccgcagtcgtcttcagtgacgaccaggtcctgcgcaacgtcaaccagacgacgagtcaggtaaccggagttcgctgttttcagtgcggtatccgccagacctttacgagcaccgtgggtggagatgaagtactggagtacgttcagaccttcacggaagttcgcggtgatcggcgtttcgatgatggagccatccggcttcgccatcagaccacgcataccagccagctgacgaatctgtgccgcagaaccacgcgcaccggagtcggccatcatgtagatgctgttgaaggaaacctgctgctcttcctgaccgtcacggttaatcacggtttcggtttgcaggttatccatcatcgctttggatacacgatcgttcgccgcagcccagatatcgataactttgttgtagcgttcgcccgcggtcaccagaccggactggaactgttcctgaatctcagcaacttccgcttccgcttcgctgatgatttcgtattttttctccgggatgaccatgtcatcgataccaacggatgcacctga

SEQ ID NO: 259338 - DNA, 318 bp, Klebsiella pneumoniae
gtgctccagttcgcgcggttgccagttttccgtcagataatcatcgttggtgtagtactcgaaggcgccgccggtggggctgttgacgtaccagaagtaggccgaggagaccgggtggcgaccgggaccgatgaaagtgctccaggcatttttgttcatcgcgatgccgccgccgatcacctcgtgaatatcgcggacggtgaaagcaacatgattcagcccgcgcttacggttcggcagctgcagcaggaagaggttgtgatggccaccgcgcgcgccgcagcgcaggaagaccgcgcggttaatgtagcggtctga

SEQ ID NO: 259339 - DNA, 837 bp, Klebsiella pneumoniae
gtgcaccagcatcgtcgtaaactgcatattgccatcaataccttcgcgcatcctgatggctatgcccgctggcagcgcgcggtagatatggcggcccagctgggcgccgacgcgctgatcctcgccgatatcgcaatgctggagtatgccgccgagcgctacccgcacatcgagcgtcacgtttccgttcaggcctcggccactaacgaagaagcggtaaaattttatcatcgcaactttgacgtcgcccgcgtggtgctgccgcgcgtactgtcgattcaccaggtcaaacagctggcccgcgccacgccggtgccgctggaggtcttcgccttcggcagcctgtgcattatggcggaaggccgctgctatctttcctcttacctgaccggcgaatcaccgaataccgtcggcgcctgttcgccggcacgcttcgtgcgctggcagcaaacgccgcagggactggaatcacgccttaacgaagtgctgatcgaccgctatcgagatggtgaaaatgccggctatcccaccctctgtaaagggcggtatctggtcgacggcgagcgctaccacgcactggaagagcccaccagcctgaacaccctggagctgctgccggagctgatggcggcaaatattgcctcggtcaaaatcgagggccgccagcgcagtccggcgtacgtcacccaggtggcgaaagtctggcgtcaggcgatcgatcgctgcaaagccgatccgcaaaacttcgtgccgcagtccgcgtggatggagaccctcggttcgatgtccgaagggacgcaaaccacccttggcgcctatcaccgtaaatggcagtga

SEQ ID NO: 259340 - DNA, 273 bp, Klebsiella pneumoniae; identical to SEQ ID NO: 172163

SEQ ID NO: 259341 - DNA, 834 bp, Klebsiella pneumoniae
ttgagtacgaacgcgatccatcatgatgcgcatgctgttaaccaggtaatcgaactgcttcggcaccaggcggaactgtttgaacacttcagacagcttgagaatctcttcctgcgctgcggcgtggctacgacctttcgctttgatggtatcgcgggtcagttcgtactgcgtgcgcagctcggcgaatttctcgcgcgccagctcaggatcgatgctgttgtcatcatcgctgctgtcgtcgtcttcttcttcatcttcgtcttcgtcgtcatccatctcttcctgagagagttcagaaccgacgtgcgtcgccgttggcgccatgtcttcttcggcgttcgggtcaacaaaaccggtgatcagatcggacagacgcgcctcttccgcctcaacgcgatcgtactgctccagcagataggtgatggcttccgggtattcagcaaccgagcactgcacctggttaataccgtcttcgatacgtttagcgatgtcgatttcgccttcgcgcgtcagcagctcgacggtacccatttcacgcatgtacatgcgcaccgggtcggttgtgcgtccgatttcagactcaacgctggagagaacctgcgccgcagcttcttccgcatcttcgtcagtattgttgttagtttcagcaagcaaaagatcatcggcatccggtgcttcttccatcacctgaatgcccatgtcgttgatcatttggatgatgtcttcgatctgatcggagtcgacgatatcttccggcagatggtcattgacctcggcataggtcagatagccttgctccttaccacgttggacaagaagcttcagctgtga

SEQ ID NO: 259342 - DNA, 522 bp, Klebsiella pneumoniae
atgcaaaaggtaaaattacccctgactctcgatccggttcgcacggctcaaaagcgcttagattaccaaggtatctatacccgtgatcaagctgtgcgcgtcgctgattctgttgtcagcgtggacagcgatgtggaatgcagcatgtcgttcgctattgataaccagcgtcttgccgttttaagcggcgatgcgacggtgtcggtaaccctcgaatgtcagcgttgcgggaaaccgttcccccatcatgttcacacaacgtattgtttcagccccgtcagaaatgacgaacaggccgaggcactgccggaagcgtatgagccgattgaggttaacgaattcggtgaaatcgatctgctggcgctggttgaagatgaaattatcctctccttgcctgtagttccggtgcatgattctgaacactgtgaagtgtccgacgcggacatggtctttggtgaactgcctgaagaggcacaaaaaccaaatccatttgccgtattagccagcttaaagcataagtaa

SEQ ID NO: 259343 - DNA, 930 bp, Klebsiella pneumoniae
atgacgcaatttgcttttgttttcccgggacagggctctcagagtgtcgggatgctgtcagatatggcggccgcttacccggtaatcgaagagacgttccgtgaagcctctgcggcgttgggttacgatctgtgggcgcttgcacagcagggcccggcggaagaactaaataaaacctggcagacccaaccggcgctgctgaccgcttccgttgcgctctatcgcgtctggcagcagcagggcggaaaagcgccgatgatgctggctggccatagccttggcgaatattcagcgctggtatgcgcgggcgttatcaattttaccgacgccgttcgccttgttgaactgcgcggtaagttcatgcaggaagcggttccggaaggtaccggggcgatgtctgcgatcatcggtcttgacgatgctgcgattgcgaaagcctgcgaagagtctgccgaagggcaggtggtttctccggtgaactttaactcgccgggtcaggtcgttattgccggtaataaagaggccgtagaacgcgcaggggcggcctgtaaggctgcaggcgctaaacgtgctctaccgctgccggtcagcgtcccatcccactgcgcgctgatgaagcccgcagcggagaaactggccgttgagctgcaaaaaataaccttcaacgcgccagctattccggtcgtgaataacgttgacgtgaaaagtgaaacggcgcctgaagctattcgcgatgcccttgtccgtcagctgtatagcccggttcagtggaccaaaagcgttgaatttatggcatcacagggcgtagagcatctgtatgaagttggcccgggtaaagtcctcaccggtctgactaaacgtattgttgacaccctgaccgcttccgcgcttaacgagccggcagctatgtctgcggcgcttgagcaataa

SEQ ID NO: 259344 - DNA, 135 bp, Klebsiella pneumoniae
atgactgagttaatagactcagagggcattggcttggatgaaataaaattagccaagtatatttctttcatccccgcagaagaaataagtatagatattgaaaatatgtttaaatttttagagagcaaactatga

SEQ ID NO: 259345 - DNA, 1158 bp, Klebsiella pneumoniae
atgcaactaaatttaccaagtaatagattatacgaaaatcaacaactcattgaatttgagaagatcacagctcttattggagaaaatggcgcaggtaaatcctcaatcctccaatccatttttgttaaccgcctggcaaaatcaatactttctgataaaaaagttgtttgcttctcttctggccaaaatgaaaaattttccgagcatttctctaactacttaaatcaagaaagaaatgctaatagagggctaagtttagactgttgttattatgataaaacatggtcaaaattattgatttttctctcaactattagtaacgataggggattagttcgttcatttcttgtgagaaagaattacgttgaattatcagaaaacaatctcaccgatatttcaagcactctcactttttctgttcaagttagtcgagcctatgtcaatagagtacaaaaggcgttacaagatgaagaagatggagaaatggacacactacgttcgacgagttatcatcgtacacttgaaagttttataaatacaatagttgaccatgactatgattttagttctccaatggaatctaaatcaatacagttagatttccaaaagtttaataatccatcatatattaacactgctgaagattattttgaccctataatttccttttatacacaagctgcagacaacgattattttatatcaaaaccatctatgaagttgacctttaaagatgatttggaattaagcgatttaagcgatggtgagtatcagatcttatttctatattcattacttgatctatttgatcatccagataccatttttctccttgatgaaatagattcacatcttcattataaaaatatagagatcttctggaaggaattacatgcaataaaaggccatgcgattacctccacacatcttattgattcaataacagcacgagaaaatacgttctcaacattaaaaatagtaaacagggggaaaatttgcgaacaagataaaatgaaagcattaattcaaagactttcaatgctaactagaattaattcagtacagtttgaattatgtaataaacttgataatattgttgtccttgatcattacaatgactggaaaatattcacttcacttgcacataaaaaaatttag

SEQ ID NO: 259346 - DNA, 1380 bp, Klebsiella pneumoniae
atggggagtaagtggattcacgcgaaattaggagattatattgattcctgcttaggtaaaatgcttgatcaaaataaaaacacaggaatttatcatccttatcttgctaataataatgtccgttggggatatttcgatcttagcagtcttcctcaaatgaaattcgaggaaaatgaattaaaaaaatatgaaattaatgtaggtgatctcataatttgtgaaggaggaagtgagcctggtcgatgtgctctatgggatggcgaaatttcaaatatgaaaattcagaaggcattacatcgagtaagagcaaaaaatggtttaaaaacagaatatttatactattggtttaattatgcttggacaaagggtagtctagacgcttatttcacggggacagcaataaaacatttaacaggaaaagctattgctcaactaccaatagaaatcccaccactacattaccaagaaaattgtattactttactaagaagctttgatgaaaaaataaaattaaataatgccatgaatagaattttagagaatatatctaaaagcctatttaaatcctggtttgtggatttcgatccggtgattgataacgcgctggatgcgggaaacccaatcccggaagcgctgcaatctcgcgccgaactgcgtcaaaaagtgcgtaatagtgcagatttcaaaccacttccggcggatattcgtgcactgttcccggctgaatttgaagaaacagagttgggctgggtgccgaaaggttggataacaacatcttttaacgatttgatagaactaattggtggtggcacacctaaaacctctgtagaagagtactggaatggagatattccgtggttctctgtcgtcgatgcacctaatgaatccgacgtatatgtattaactacagagaaaaacattaccactgaagggctcaacaattcctccgcaaagttattaagaaaaggaacaacaataatcagcgccagaggaactgtaggtaaatgtgctatggttgctgtaccgatggcaatgaatcagtcatgctatggcgttatcggtaaaactaatatttctgatgaatatgtttacttccaattaaaaaatgcagtccagactcttcaacaaatgggacacggctcagttttcaacacaataacaagagatactttcaaaaatattaaagttcctttttgcaatgaagaattaacaaatagttattctttacttgttaaaaattatttttcaaaaatactgaataataattatcaaaatattgctttaacaaacctccgcgacaccctgctccccaaactcatctccggcgagctctccctggaggatctgccaaacttagtcaaccaaaccgaacccgcataa

SEQ ID NO: 259347 - DNA, 2034 bp, Klebsiella pneumoniae
atgaggctcgattttatcctgcgcccggcggtagagctttacagcgccagcgcagccctgctggcggcagtatggtgcgttatcgcaccgcagacgttcctgcttactcccctttctggatggctgctggcgctggccttgctggcactgtctgccctgcggctaaagcagggagtgcgcatcctgcgctttcgccgccgcgtgcgccatctgccgctctggacgctctccgccaaccgcatcccattgctacccgacgccctgtttctcgggcgcggctttcgctggctgcccacgcatacccagcggctgtatctgtgtcgtctgccacagtgtgagcactggctgcgcacggacagtccttccgccagcggcggcgatccgctgctgcacggcgtggaactgcacgaaggccgcgtcacgttgccactgcgcgaccgaccggggcatacgctggtcctcggcaccacccgcgtcggcaaaacccggctggcggagctgctgattgcccaggatattcgccgtggtgacacggtgattgttttcgatcccaagggtgacgccgacctgctgcgtcgcgtctgggcggaggcgcaccgcgccgggcgggaaagcgtcttctggctgttccatctcggctggccggagatctccgcccgctacaacgctgtcggacgttttggccgcatctcggaagttgccagccgcatcgccgggcagctttccaccgaaggcaactccgccgccttccgcgagttcgcgtggcgcttcgtcaatatcatcacccgcgccctggtggcgctgggcccgcgaccggattacgcccgcatcgcccgtcacgttatcaacatcgacgagctgtttatcgactacgcccgcgtcttcctgcccggatatgatcgccaagcatgggataacgtggtacggattgccggtggcatcaccgagaaaaacacgcctcgtaaccttcagggacgggacagctacgtcgtcgcactggagcagtacctttccaccacccgactgcacgacccaatcctcgacggcctgcgttctgccgtccgctatgacaaaacctatttcgataagatcgtcgcctcgctgctgccgctgctggaaaaactgaccaccgggaaaatcgccctactgctggctccggactacggcgaccttaacgacccgcgcccggtgttcgactggcagcaggccattcgccagcaggcgattgtctatgtcgggctggatgcactgtccgatgccgagattgctgccgccgtgggaaattcgatgtttgccgatctggtcagcgtcgccgggcatatctacaagcacggcgtgatggacggcctgccgcaggcggaagagaaagcggccatcaacctacattgcgatgagttcagcgagctgatgggcgatgaatttattccgctgataaacaaaggcggcggcgcggacgtgcaggtcacggcctacacccagacgctctccgatatcgaagcccgcatcggcgatcgcgccaaagcgggccaggtagtcggcaacttcaacagcctgatcatgatgcgggtgcgggagaccgccaccgccgaactgctgaccagacaactgccgcaggtggacgtgctcagcaacagcgtcagttccggcgtcaccgacagcgccgatgctcagggcaatattgggttttccagcaatacccaggatcgggtgagcagcatacaggtgccgctactggaacccgcctcactggagcagctccccaaggggcaggcgttcgccctgctggaaggcggccagctctggaaattacgcatcccgttaccggataccgcgcacgatccgctgatgccggaaaacatcgcgcaaatcgcccgctatatggaaaaacagtacgacagtgcgcccgtatggtggaaccgcccggagaccgttgtaacggcgaaaaacgaccctattttatggctgaacgacagcgaaaccacggagaaacagaccaatgataccccggacacaccgccagctcgcgagcgttga

SEQ ID NO: 259348 - DNA, 1017 bp, Klebsiella pneumoniae
atgaacgcgcttaacgctgcaatgactgtaatcggtgccggctcttacggcaccgctcttgccatcaccctggcaagaaatggccaccacgttgtgctgtggggccatgacccgaaacatattgcgacgctgcagcacgatcgctgcaacgccgcatttcttcctgacgttcctttccccgacacgctgcatctggaaagcgatctggcgaccgcgctggctgccagccgcgatattctggtagtcgtgccgagccacgttttcggcgaagtgctgcggcagattaaaccgctgatgcgctctgacgctcgtctggtctgggcgacaaaaggtctggaagcggaaaccggacgcctgctgcaggacgtggcccgtgaagccctgggcgacgatattccgctggcggtaatttccggtccgacctttgcgaaagagctggcggcaggcctgccgacggcgatatcgctggcgtcgacggatccgcagtttgctgatgatttgcaacgcttgctgcactgcggcaagagcttccgcgtctatatcaacccggattttatcggcgtgcagctcggcggagcggtgaaaaacgttatcgctatcggcgccggcatgtctgacggcatcggttttggcgccaatgcgcgcaccgcgctgattacccgcgggctggtcgaaatgtctcgcctcggggaggcccttggcgccgatccggaaacctttatgggtatggcgggcttaggcgatctggtgctcacctgcaccgataaccagtcgcgtaaccgccgcttcggcatgatgctcggccagggtatggatgtgcaaagcgctcaggagaagattggccaggtggttgaaggctatcgcaataccaaagaggttcgcgttctggcgcagcgtttaggcgtcgaaatgccaataaccgaggaaatttatcaggtattgtattgcggaaaaattgcgcgcgaggcagcattgaccttattaggccgtgcacgcaaggacgagcgcagcaattaa

SEQ ID NO: 259349 - DNA, 474 bp, Klebsiella pneumoniae; identical to SEQ ID NO: 253564

SEQ ID NO: 259350 - DNA, 1224 bp, Klebsiella pneumoniae
atgattatttccgccgccagcgactaccgcgccgccgcacagcgtatcctgccaccgttcctgttccactacatcgacggcggcgcttacgccgagcacaccctgcgccgcaacgttgaggatctctccgacgtggccctgcgccagcgcattctgcgcaatatgtcggacctgagcctggaaaccaccttattcaatgagaagctggcgatgccaacggcgctggcgccggttgggctgtgcgggatgtacgcgcgccgtggtgaagtgcaggccgccggcgcagcggatgagaaaggcatccccttcaccctctctaccgtttccgtctgcccgatagaagaagttgccccgaccattaaacgtccgatgtggttccagctgtacgtactgcgcgaccgcggatttatgcgcaacgcgctggagcgcgcgaaggcggcgggttgttcaacgctggtctttaccgtcgatatgccgacccccggcgcacgctatcgcgatgctcactccgggatgagtggcccgaacgcggcgatgcgccgctactggcaggcagtgacccatccgcagtgggcatgggacgtcggattaaacggccgcccacatgatttaggcaacatctccgcctacctcggcaagccgaccggcctggaggattacatcggctggctggcgaataacttcgatccctcgatttcctggaaagaccttgagtggatccgtgaattttgggatggcccgatggtgatcaaggggatcctcgatccggaggacgcccgcgacgcggtgcgcttcggcgcagatggcatcgtggtgtctaaccacggcggccgccagcttgatggagtgctctcttccgcccgcgccttgcccgcgattgccgatgcggttaaaggcgacattacgattctcgccgatagcggcatccgcaacggcctcgatgtcgtgcgcatgattgccctcggcgccgatagcgtgctgctgggccgcgcttatctgtatgcgctggccacgcacggcaagcagggtgtcgccaatctgctgaacctgatcgaaaaagagatgaaggtggcgatgacgctgaccgggacgaaaaccatcggcgaaatcagtcgtgaatccctggtgcaaaacgccgatgcgctgctgacctttgatgtgatcaaagcagggaacgcggcggttagccctaatcctgaaggaaccgtccggcaggcgggttaa

SEQ ID NO: 259351 - DNA, 774 bp, Klebsiella pneumoniae
gtgatagtgatgccaaaacgccttgccgacgacgtcgcccgtcgcgtgcgggcgctgattgaagaacaaaagctggaggcgggcatgcgattgcccgccgagcgccagctggcaacgcagctcggcgtatcgcgcaattctctgcgcgaagcgctggcgatgttagtcaacgaaggggtgctgctcagccgtcgcggcggcggcaccttcgtgcgctggcagcacgaagcgtggtcggagcaaaacatcgttcaaccgctgaagacgctgctctccgacgaccccgattacagctttgatatcctcgaagcccgtcatgctattgaagccagcaccgcctggcatgcggcaatgcgggcaaccgatgccgaaaaagagaaaatccgcctctgctttgaagccacccaaagtgaagacccggaccttgcctcgcaggccgatgtccgcttccacctggcgatcgccgaagcctcgcacaacgtggtgctcctgcaaaccatgcgcggtttttttgacctcttacaatcctcagtcaaggagagccgccagcggatgtatctcgtcccgccggtattcgctcgcctcaccgaacagcacctggcggtcatgaaggcgattgtcgccggtgacccggaaggtgccagacaggcgatgatggcccatttgggcttcgttcacgccaccatcaaacgttttgatgaagaccaggcccgccaggcgcgaattacccgcctgcccggtgaccataacgacaattccagggagaacttgtga

SEQ ID NO: 259352 - DNA, 1656 bp, Klebsiella pneumoniae
atgaacctctggcaacaaaattacgatccggccggcaacatctggctatcgagtcttatcgcatcgctaccgattctttttttcttttttgccctgattaagctcaagctgaaagggtacgtcgccgcgacctggaccgtggtcattgcgctctccgtcgccctgctgttctacaagatgccggttgaccacgcgctggcctccgtcatctacggcttcttctacggcctgtggccaatcgcgtggattattatcgccgcggtcttcgtctataaaatttcggtgaaaaccgggcagttcgacattatccgctcatcaatcttatcgattactccggaccagcgtctgcaaatgctgatcgtcggtttctccttcggcgccttccttgaaggggccgccggttttggcgcgccggtcgctatcaccgcagcgctgctggtaggactcggctttaacccgctgtatgcggcgggcctgtgcctgatcgttaataccgcgccggtggcgtttggcgcgatgggcattccgattctggtcgccgggcaggttacgggactcgacagctttgaaattggccagatggtcggccgccagctgccgttcctgaccatcatcgtgctgttctggatcatggcaattatggacggctggcgcggcattaaagagacctggcctgcggtcatggtcgccggcggctcctttgctatcgctcagtacctcagctcaaacttcctcggcccggagctgccggacattatctcttcgctggtatcgctggtctgtctgacgctgttcctcaaacgctggcagccggtacgcatctttcgcttcggcgatatgggcgcatcgcaggtcgatatgaacctggcgcgcacgcactacacgccgggacaggtgattcgcgcctggacaccgttcctgtttctgaccgccaccgtgaccctgtggagcgtgccgccgttcaaagcgctcttcgctcccggcggcgcaatgtacgattttgtgattaatatttccgtgccgttcctcgacaagatggtagcgcgcatgccgccggtggttagtgaagccacgccatatgccgcggtctataaatttgactggctctccgccaccggcaccgcgatcctgttcgccgcgctgctttccatcgtctggctgcgcatgaagccaaaagatgcgatttccacctttggcagcacgctgagagagctggcgttgccgatttactccatcggcatggtgctggcgttcgcctttatttccaactattccggtctatcctccacgctggcgctggcgctggcgcacaccggccatgcatttaccttcttctcgccgttcctcggttggctgggggtattcctgaccggttcagatacctcgtctaacgcgctttttgccgcgctgcaggccacggcggcccagcagattggcgtctccgatatcctgctggtcgcagcaaataccaccggcggcgtgaccgggaaaatgatctccccgcagtcgatcgccatcgcctgtgcggcggtcggcctggtgggtaaggagtccgatctgttccgctttaccgtcaaacacagcctgattttcacctgtatggtcggcgtcatcaccacgctgcaggcgtatgtcttaacctggatgatcccgtga

SEQ ID NO: 259353 - DNA, 135 bp, Klebsiella pneumoniae
atgcgattctttagggctacgggtaacccgctagcctattggttatatcctttcgcccgctcgctgacaacttccgccaaacccagcgccaacgcgcccctgcgcggcatcggcctgcactacgtttttttgtag

SEQ ID NO: 259354 - DNA, 357 bp, Klebsiella pneumoniae
atgctgcgatccgcgcaggcgccccagctcgcggatcacctcgacgccgttcatttcgctgtgcgccatgttctgccacaggcgctgctgggttcgttgcatctgctcttgcagcgtcgccggcgcggtgaagttaaaatcgaccagcgtgacggaggtaaaatcaccaatcaactggttgatttgcggatgaaccggctggcgattaaagaaagtcaggttcagggtaaattcagcggtgcggctccagcgctcgagggtggcggcaaacagcgtgagcagcgcggcagaaggggtgagcccttgctgctgccagcgctgcttaacggcctgccacgcaggcttgccgatcgttga

SEQ ID NO: 259355 - DNA, 816 bp, Klebsiella pneumoniae
  misc_feature (664)..(673): n is a, c, g, or t
atgattgtcgaggagagcgaacagacgctggcgttagcgaaacaagtgaaggaggccctgaccaccggcgccggaggattgattgcgatcactcgccgcgcgtggcaggttgaggagaatgaggcgctcgccgcgtctcatcacgctctgtgggctttgcttcgcgtcgcggccaatgaacagccggaacgcttgattgccgccatcgatctggccgaaaacacgccatgggaaacgctgcgtcagggattgagcgccgtctccctttctcagcgctggctcgccgcaaggggcaacgccctctggctcccctccctggcgccgaatccagggcgcgccgccgatcttccggcaaatgtcttcgctggcgatacccgctggcatctggtgaccggcgcgtttggcggattgggccgccttgccgttaactggctcaaggaaaaaggggcgcaacgtattgccctgctggcgccgcgcgtggatgcctcctggccgggcgacatcaagggcgtgcaaatccgcgtctgccgttgtgatgttggcaacgcccgacagctgaccagggttctcgataagctggcgggcgatggcggcattgccggggcgatccacgccgcaggcgtattggctgatgggccgctgcaggatctggacgatcgccagnnnnnnnnnnccacaacgcacgctatcttattctttactcctccgcagccgccgccctcggcgcgccgggtcagagcgcccatgcgctggcctgcggctatctggacgggctggcgcggcaacatacttctgatgatactccgaaaacgataa

SEQ ID NO: 259356 - DNA, 1482 bp, Klebsiella pneumoniae
gtgctgggctttgcgcgcgatgcgattgtggcgcgtatttttggcgcagggatggccaccgacgccttcttcgttgctttcaaacttccgaatcttttacggcgtatttttgctgaaggcgcgttctcacaggcttttgtgccgattctggcggaatataaaagcaagcagggtgaagatgcgacccgggttttcgtcgcctatgtttcggggctgctgacgctggtgctggcgctggtgaccatcgctggtatgctggcggcaccgtgggtgatcaccatcaccgcgccgggatttgccaatacgcccgaaaagttcgccctgaccactcagctcttgcgcatcacttttccctatattctgttgatctccctggcttcactcgtgggcgccatcctgaatacctggaaccgcttttcggtgcctgcttttgctccgactttcctgaacgtcagcatgattggttttgcgctgtttgccgcgccctactttaatccgccgatgctggccatggcgtgggcggtgacggttggcggtattttgcagcttgcctggcagctgccgcatttgaagaaaatcggcatgctggtgttgccgcgaatcaacctcaaagatgccggcgcggtgcgggtggtgaaacagatggggccggcgatcctcggcgtctcggttagccagatttccctgattatcaataccatttttgcctcgttcctcgtctccggctcggtgtcatggatgtactatgccgatcgcctgatggagtttccgtccggcgtgctgggcgtggcgctggggaccattctgctgccttctctgtccaaaagctttgccagcggcaatcacgacgaatactgccgtttgatggactggggattgcgcctgtgctttctgcttgcgctaccgagcgccgtggcgttagggatactggccaagccgctgacggtcgcgttattccagtacggaaaatttaccgcctttgatgccgcgatgacccagcgcgcgctggtcgcttattccgttggcctgatgggactcattgtggttaaggtactggctcccgggttctattcgcgtcaggacattaaaacgccggtgaaaattgccatcgtcacgctgatcatgacgcaggttatgaacctcgcctttattggtccgctaaagcatgccggtctgtcgttgtcgattggcctggcggcctgccttaacgccgggctgctctactggcagctgaggaaacagaaaatattcacccctcagcccggctggttcctgttcctgctgcgcctggtgattgccgtcatcgtgatgtctgcggcgctgttgggtgtgatgtacctgatgccggagtggtcgcaggggacgatgctgttccgcctgctgcgtttgatggtagtcgtggtagcgggtgtcgtcgcctatttcgcgacgctgttgctgctgggcttccgcgtcaaagagtttgctcgccgcacggtctaa

SEQ ID NO: 259357 - DNA, 1215 bp, Klebsiella pneumoniae
atgacaccgacaccactcacctcccgcgcagccggctgggtaatatttatccttgcgctcggcgcaggcttcagcgttgccgctatctattacgcgcagccgctgctgtcgctaatgggagcaaacctgcatttgagcgttgagggtatgggtctggttccgaccctgactcaggcgggctatgcgctgggtatacttttccttctaccgcttggcgaccgtcacgatcgcagaaagctgatcctgatgaaaagcgccgcgctggcggtcctgttgctgctctgcagccttaccggtcagctcaccactctgttgatggttagtttgctgatcgggatggctgcgacaatggcgcaggatatcgtaccagctgccgcgattctggctcctgcgggtaaacaagggaaaatggtgggtacggtcatgactggcctgctgctggggatcctgctgtcacggacggtgagcgggctggtgggtgcgctattcggctggcgggtgatgtatcaggccgctgcggtcagtattgcactgattggtctgctgatgtggcgcgtgctgccgcgctttgaaattcactcaaacctgacttatccgcagctgatgaaatcgatggcccacctgtggaaacgctatccggcactgcgtcgcgccgcattcgcccaggggttcctctctatcgccttcagcgcattctggtccaccctggcggtcatgttactggcgcactatcagatgggcagcgcggtagccggcggctttggtattgcaggcgctgccggggcgctcgccgccccgctggctggcggcctggccgataaattcggagccgaaaaagtcacgcaaatgggcgcggcgctggttaccgtttcttttgccctgatgtttctgctgcctgcgctaccgccgcatggccagctgctcctgattgccatctcggccgtcggttttgaccttggactgcaatccagcctcgtggcgcaccagaacctggtgtatggtctggagcctcaggcgcgcggtcgtctcaatgcgctgttgtttaccggcgtgtttatcggaatgtcgctcggctcagtgctgggaagcaaactgtatgtgatagcaggctggagcggtgtagtgactctcgccgtcattaccggcgctatcgccctcggcatccgcctgatagaaagcgcgagggtcgtttcggcgcaacgaaccgtcagataa

SEQ ID NO: 259358 - DNA, 936 bp, Klebsiella pneumoniae
atgaagaagcaggagcgtatagatcgtatcgaattgatgcgtacgttcattcggattgtcgaagccgggtctctctccgctgcggcggtccagatgaacacgacccaggcgacggtaagtcgacgactccagtcgctggaagggctgctcggcgcaaagctgatcctgcgtaccacccatgcgatgaagctgaccgatgacggcgagcgctgttaccagcatgcccgacagatcgtcgatgcgtggctggcgctggaagacgacctgcgcatcaccgatgaccgtccggtggggatattaagggtacgggcgccgcatgcgtttggtcagcagcagctgctggggccgctggtggactttctgcagcgctatccccagctctcggtcgaatggatgctgaatgataaaaccgtggatttcctgagcgatggcatcgactgcgcgattcgcgtgggggctgaggtggatccggctacggtgtcggtcctgctggccgaggtgccgcgcagcgtagtggcatcgccgtcgctgctggcgaactatccgccgttaaccgcgccgcaggagatgtcgctgctgccctggatagccatcagcacgttctatcagcatgaggtgatgctgcaatcagtggtggatgagcagcttacaacctttagcattgctccgtgcctgagtaccgacagcgtacatgtcgcccgcaataccgcgctggcggggctgggcgcggcgattgtttcgagctgggcggtagcggaggatattgccgccgggcggctggtggagctattccctcagtggcgtgcctcaccgctgccggtacatcttgtctatccctgggcacgctattatccgacgcggttgcgtaagtttctcgatttgatgcgcgaggttatgccgcagattgcggggatgcagcgaccggaaggggaataa

SEQ ID NO: 259359 - DNA, 2943 bp, Klebsiella pneumoniae
gtgcagattgataaagaagagcgcggcaataaaggcgccgcgctgaccacctttatcagcctggcgggcagctacctggtactgatgccgaataacccacgcgctggcggtatttcacgccgtatcgagggtgacgatcgtaccgagctgaaagaagcgctggccagccttgagctgccggatggcatgggacttatcgttcgcaccgctggcgtcggcaaatccgccgaagcgctgcagtgggacttaagcttccgcctgaagcactgggaagccatccagaaagccgctgaaagccgccctgctccgttcctgatccatcaggaaagtaacgtgattgtgcgcgctttccgcgactatctgcgtcaggatatcggcgaaattcttatcgacaacccgaaagtgcttgagctggcgcgccagcatatcgcggcgctggggcgtccggatttcagcagcaaaatcaagctgtacaccggtgaaattccgctgttcagccactaccaaatcgagtcgcagattgaatccgctttccagcgtgaagtgcgcctgccttccggcggttctatcgtaatcgacagcaccgaagcgctcaccgctatcgatatcaactccgcccgtgctacccgcggcggcgacatcgaagagacggcgtttaacaccaacctcgaagcggccgatgaaattgctcgccagctgcgcctgcgcgacctcggcggtctgatcgttatcgacttcatcgatatgaccccggtacgtcaccagcgtgcggtagaaaaccgcctgcgcgaagccgtacgccaggacagagcgcgcatccagatcagccacatttcacgctttggcctgctggagatgtcgcgtcagcgtctgagcccgtcgcttggcgagtccagccatcacgtctgcccgcgctgtagcggaacgggtaccgtacgcgataacgaatcgctgtcgctttccattctgcgcttgatcgaagaagaagcgctgaaagagaacactaaagaagttcacgctatcgttccggtgccgattgcttcgtacctcctgaacgaaaaacgtgcggcggtaagcgccattgaaacccgccaggccgatgtacgcgtcatcatcgtgccaaacgatcagatggaaacgccgcactactccgttctgcgcgtacgtaagggtgaagagacctccacgctgagctatctgctgccgaaactgcacgaagaagagatggctatgccttctgatgaagagccggccgagcgtaaacttccggagcaaccggcgctggccgcttttgtcatgcctgatgccccaccagcgccggctcagcaagagccttctaaagctacggttgccgtcggaacaccagccgcttccgcacctgagtcggcagcgccagcgcagccgggtctggttgcacgcttcttcagcgccctgaaaaatatcttctccggcgcagaagaaactaagccgacagaagtccaggttgagaaaaaagcggaggagaaatccgagcgccagcaggaacgtcgcaaaccgcgcgccaacaaccgccgcgatcgcaacgaccgccgggataaccgcgataatcgtgacaaccgcgacaatcgtgccgagaatagcgaagttcgtgaatctcgcgaagaaaaccgccgtaaccgccgcgagaagcagcagaacgtcgaacctcgcgaaatccgccagacaacggcagaagatagcgacaagggcaaagctcgcgacgatcaaccgccgcgccgtgaacgcaatcgccgtcgtaacgacgataagcgtcaggttcagcaggaagctaaagcgcaaactcgtgaagaaccggtcgtacaggatagcgagcaggaagaacgcgtgcagaccatgccgcgccgcaagccgcgccagctgtcgcagaaggtacgtattgaatctgctgccgctgagcaggttgtcgagccggtagccgcgcctcaggtcatcgaagcgccagccgtccaacccgaagccgcagctccgcgcacggaactggcgaaagtcgacctgccggcggttgttgaaaccgctgcggaacatgacgataccggcgaagcacgcgaagctaacggtatgccgcgtcgttcgcgccgttcccctcgtcacctgcgcgtaagcggccagcgccgtcgtcgctaccgtgatgagcgttacccgacgcaatccccgatgccgctgaccgtagcctgcgcatcgccggaaatggcatctggtaaagtgtggatccgttaccctgtcgttcgcccgcaggaccagcagcaagaagaagcgcaggtacaggagttcgctaccaccgcggttgaccccgttatctcccctgcggccgccgttgaaccggctgtctctgaagtggttgccccggaggtagttgaagagcgcgttgttgagccggtcgtcatctctgagcctgtggcggtgatgaacgaacctgaagctccggttgtagaaaccacgcacccggaagctatcgccgcaccggttgatgaacagccgcagctgattgccgaggctgatgaaactgtcgccgaagagattgtcgcagaagccgtcgacgtcgtggcaaatgaagctgtcgagccggaagcagcggtcgctgaacctgctgcggttgaagaagccttggccgctgttgaagacgcgcctgtcgtttgcgaaccggtggttgaaccggcaccggcggcagagccggtagtgaagactcaacctgttgtcacgactgtgccggtcgttaaggtcgccaatcgtcacgccaccgcgccgatgacccgcgcgcctgcgccagactacgtccctgaagcgcctcgtcaaagcgactgggttcgcccgagctttgattttgacggtaagggcgctgctggtggccatagcgcgacccataaagccgctgccgggcctactcgtccgcagcccgtagagtaa

SEQ ID NO: 259360 - DNA, 2196 bp, Klebsiella pneumoniae
atgcccgtcgctcatgttgccctgcccgttccgctgccccgcacttttgactatttgctgcctaaaggtatgccggtcaaagcgggctgtcgcgtgcgcgttccgttcggcaagcaggagcggataggtatcgtgacggcagtcagcgaacgtagcgagctgccgcttgacgaactcaagccggtggccgaagttcttgatgccgagccggtcttctcctcttcggtctggcggctgctgctgtgggcggcggactattaccaccatcccatcggcgatgttctgtttcacgcgctaccgatcatgctgcgccaggggaaacccgccagcgcggcgccaatgtggtactggtttgccaccgaacaggggcaagcggttgatatcaacagccttaagcgctcgcgcaaacagcagcaggcgctggcggcgctgcgtcagggaaaaatctggcgccatcaggttgccgaactggaatttaacgatgccgcgctgcaggcgctgcggggtaaaggccttgccgaactcgccagcgaagcgcccgctatcaccgactggcgaacaggcttctcggtgcccggagagcgcctgcggcttaataccgaacaggccaccgccgttggcgcgattcatagcgcctcggaccgtttttccgcctggctgctggccgggatcaccggctccggcaaaacggaagtttatctgagcgtccttgaaaacgtgctgtcgcaggggcgccaggcgctggtaatggtgccggaaatcggcctgacgccgcaaacaatcgcccgtttccgccaccgttttaacgccccggtagaagtcctgcactccgggctgaacgacagcgagcgcctctccgcgtggctaaaagccaaaaacggcgaagcggcgattgtgatcggaacccgctcgtcgctatttaccccttttaaagacctcggggtaatcgtgatcgatgaagagcacgacagctcttacaaacagcaggagggctggcgctaccatgcgcgcgatctggcggtctggcgcgcccacagcgagcaaatcccgatcatcctgggcacggcaaccccggcgctggaaacgcttcataacgtccgccagggcaagtatcgccagctcaagctgacccggcgcgcgggaaatgcgcggccggctcaacagcatgtcctggatttaaaaggccagcagctgcaggccgggctgtccccggcgctgattagccgcatgcgccagcatctgcaggccgataaccaggtcattctgtttttgaaccgccgcggattcgcgccggcgctgttgtgccacgactgcggctggatagcagagtgcccgcgctgcgacagctactacacgctgcatcaggctcagcatcatctgcgctgccaccactgcgacagccagcgcccgatcccgcgccagtgcccctcctgcggctctacgcatctggtgccggtaggtttgggcactgagcagcttgaacaggcgctgggaccgctgttccccgatatcccgatttcccgtatcgacagagataccaccagccgcaaaggcgcgcttgagcaatatcttgccgatgttaatcgcggcggcgcgcgcattcttatcggcacacagatgctggcgaagggtcaccacttcccggatgtcaccctggtttccctgctggacgttgacggtgcgctgttctccgccgatttccgctcggcggaacgcttcgctcagctttatacccaggtatcgggccgcgcaggccgtgccggcaaacagggcgaggtgatcctgcagacccatcatcctgaacatccgctgctgcaaacgctcctctataaaggatacgacgcgtttgctgagcaggcgctggcggagcggcaaagcatgcagctgccgccgtggaccagccacgtgctgattcgcgccgaagaccataacaatcagcaggcaccgctctttttacagcagttgcggaatttactgcaggccagcccgctggcggatagcaagctctgggtgctcggtccggttccggcgctggcgccaaagcgcggaggccgctggcgctggcaaatactcctgcagcatccgtcgcgtagtcagctacagcatatcgtcagcgggacgctggcgttgatcaacacgctgccggaagcgcgaaaagtgaaatgggttctggatgtcgatcctattgaaggttaa

SEQ ID NO: 259361 - DNA, 519 bp, Klebsiella pneumoniae
atgaatgccgtttaccgcctgcaccgcgtgcgacgcggcatccagcgcgttaacgcccagatgaggccgggcggcatgcgcggctttgccgtgaaagtcggccatcaccgtcgccgaggcggagtagtacatcgccggcgccgccttgcccttcggacactcctccagcggcctgaggtggaagccgaacagcatctccacgtcgtccagcacacccgcttccgtcagcgcgatcgcccctgtacccagctcttcggcaggctgaaagagtattttcagcttcccgcgttttaccagcccctcggcgaggatctcttccgcggcggtcaacaccaccgaagagtgtccgtcatggccacaggtatggcgagcctccagatggccatcaatcatatggcccagcgcatccatatccgcccgcagcgccacgaccggccccggcttaccgctatccagcagcgcaacaataccggtggtaccgccgacgttgcgttgcacctgaaaccccgcggcttctaa

SEQ ID NO: 259362 - DNA, 201 bp, Klebsiella pneumoniae
atgacgcagggcgttacagctctgctcgctgccgtcggcaaggatccggataatctcaagccgcagcgggttaccgagggcgaaaagcacattttcgaggcgaatttgttcacgttcggggtgattggcgatcataatattcctgtgtcggcggcggcgcagatccgcgagcagcagccgttatcggcggctggccggtaa

SEQ ID NO: 259363 - DNA, 2103 bp, Klebsiella pneumoniae
atgccccgacccatccccctcgaacgttatcgcaacatcggtatctccgcgcatatcgatgccggcaaaaccaccaccaccgagcgcatcctgttttacaccgggatgagccacaagctgggggaagtacacgatggcgcggcaactaccgactggatggcgcaggagcaggagcgtgggatcaccattacgtccgcggcggtgagctgcttctggcccggcatggaccgcagctttgagccacaccggattaatatcatcgatacccccgggcacgtggatttcaccattgaagtcgagcgctctatgcgcgtactggacggtgcggtcatggtttacgactccgtgggcggcgtgcagccgcagtcggaaaccgtctggcgccaggcgaacaaataccacgtaccgcgcctggccttcgtcaacaagatggaccgccccggcgcggattttttccgcgtggtgcagatgatgaccgatcgcctgaaggcgaacccggtaccgattgtgatcccggtgggcgccgaagagcacttcaccggcgtggtggacctcatcaaaatgcgcgctattttgtgggatgacgccacccagggaatgaccttcagctatgcgccggtgcccgacgaactgctggaaaccgcccggttgtggcgggaaaaaatggtttcggcggcggcggaagccagcgacgaactgatggataactatctcgaaaccggcgagttgagcgaggcggaaatcgtcgccggactgcgtcagcgcacggtgaagggggaaatccaggcagtgctgtgcggcagcgcgtttaaaaacaaaggcgtgcagcggatgcttgatgcggtggttgagctgatgccatcgccgctggatattccggcgattcagggcgtggatgagaaagggcagcccgctgaacgtcacccgagcgacgacgaaccgttctcggcgctggcatttaaactgatgaccgacccctacgtcggccagttgacctttatccgcgtctattccgggacgctgaaaaaaggcgatgcggtgtggaatccggtgaaaggcaagaaagagcgcatcggccgcatcgtgctgatgcaggccaacgatcgccatgaagtggacgaactgcacgccggagatattgccgcctgcgtcggcctgaaggatgtcaccaccggcgacacgctgtgcgaccctgatgcggtgattacccttgaacggatggagttcccggagccggtgatttcgctggcgatagaaccgaaaaccaaagccgatcaggagaaaatgggcatcgccctgcagcggctggcggcggaagatccgtcgtttcgtctgcatactgacgaggagtccggccagacgattatttccgggatgggcgaactgcatctggagattatcgttgaccgcatgaagcgcgagtttggcgtcgaggcgaatatcgggcgtccgcaagtgacctatcgcgagacgatccgcaaaacggtcaaagaggtggaaggcaagtttgttcgccagtccggcggtaaagggcagtacggtcacgtggtgctgagccttgaaccgctggcgccgggaagcggtttcgtgtttgaggacgcgaccaaaggcggcgtggtgccgcgcgagtacatcccttcagtcgaaaaagggctgcgcgaagcgatgggcaccggcgtgctggctggatatccggtggtggatattaaggcgaccctgacgtttggttcgtatcacgacgtcgactcctcggagatggctttccggatggcggcgatattcggcttcaaggaaggggcgcgcagggccgacccggttattcttgaaccggtgatgcacgtggaagtggagaccccggaagagtacgccggcaatattatgggcgatctctcttcccggcgcgggatggtgcagggaatggaggagcggttcggcagccagattattcgcgccgacgtgccgctggccgagatgtttggctattccactacgctgcgttcaatgtcccagggccgggcgacctacagcatggagttccaccactacgcggaagccccgcgcaacgtggctgaggcgattatcgccagccgcgccaaaggctaa

SEQ ID NO: 259364 - DNA, 1425 bp, Klebsiella pneumoniae
atgatagaccccgaagaacagcagtccttcctttttcacgattacgagaccttcggcaccagcccttcgctcgaccggccgtcgcagtttgccgccatccgtaccgatgaagacctgaatatcgtcggtgaacctgaagtgttctactgcaggctcgccgacgactatctgccgcagccgcaggcggtaatggtcaccgggataacgccgcaggaggccaatgccaaaggcgacaacgaagccgcgtttgcccgccgcgttcacgatctgttcacggtgccgaaaacctgcatcgtcggctacaacaacgtgcgcttcgatgatgaagtcacgcgcaatatcttctatcgcaatttttacgatccttacgcctggagctggcagcatgacaactcccgctgggatctgctggacgtgatgcgcgcctgctatgcgctgcgccccgaggggatcaactggccggaaaatgatgagggcttaccgagcttccggctggagcatctgaccgtcgctaacggcatcgaacacagcaacgcccacgacgcgatggccgacgtttacgccactatcgcgatggcaaagctggtgaagactcagcagccgcgcctgttcgactatctttacgcccaccgcaacaagcgcaagctggcgacgctgattgacgtgccgcaaatcaagccgctggtgcatgtttccggtatgttcggcgcggcgcgcggcaacaccagcctggtcgccccgctggcgtggcacccggataaccgtaacgcggtgattatggtcgacctggccggtgacatcgcccctctgctggatctggatgccgatgccctgcgcgaacggctgtatacgccgaaaagcgagttgggcgatctggctgcggtgccgatcaagctggtccacctcaataagtgcccggtgctggcgcagcaaaataccctgcgcccgcaggatgctgaacgattgggcatcaatatccagcgctgtctggagaacgcccagcggctacgggctaatccacaggtgcgcgagaaagtggtggcgatttatgccgaagcggagccgtttgtgccgtccgataacgtcgatgcacagctgtataacggctttttcagcgatgccgaccgcgcggcgatgaaaatcgtactcgagacggagccgcgcaatctgccggcgctggacattacctttgccgacaagcgtattgagcgtctactgttcaactatcgcgcgcgcaattacccgggcacgctggatgaaaccgagcagcagcgctggttggagcaccgtcgccaggtgtttacgccagagtttttgcaggcctacgccgatgagctacagatactgtatcagcaatatgcggatgataaagagaagctggcgcagctgaaggcgctgtggcagtacgcgcaggatattgtttga

SEQ ID NO: 259365 - DNA, 1110 bp, Klebsiella pneumoniae
atgaatacattattaattactggcgcgaccggatttctcggtggagcagtgttagaaagcattctgaataaaaagaatgcgcctaatctattactgttagttcgtgcagataatagtgtagctgccgtagagcgggtaaaggaaaatctgcgaaaattcaatattagcgaagagagactaacggccctgacgccaggcaacattctgctgggggatctggccaatccgcagccctttctcgacgacccgcgcctgaatcaggttacccacgtgctcaactgcgctgccgtcgcctcatttggtaacaacccgcttatctggaaggtcaacgtcgaaggtacgctgcagtttgcccggcggatggctcaggtcagccgccttgagcgctttctgcacgtcggcaccgcgatgtcctgctcgccagaccccgattctctggtagcggaaagcacagcgtttcgtgaacgcgctgcgcatctggtcgagtacacgcactctaaatcaatgattgagcgtctcatgcggcaggaatgctcaaccctaccgctggcgatcgcccgtccctctattgttgttggccacactcatcacggctgtcagccctccagcagtattttctgggtattcagcatggggctgatgctgcaaaaatttatgtgttcgatggaagaccgcattgatgtgatccccgtcgattactgtgccgatgcgctgctgatgctgcttgtcagtccgctggcgcgcggagaagtggtgcatatttctgcgggggaagaaaacagcgtaaggtttgcggatatcgataacgcaatggcctccgccctcgaacaggcgccggtcggcgataaatacgcgcaggtcagctatgaaacgctggtcaaaatgcgtcgtgagctgaaggctatttttggcccctgcaacgaacggctgatgctaaaagccatgcgcctttacggcgccttcgccacgctcaacgtacgattcagcaacgacaagctgctcagcatgggtatgccaaaaccgccacgctttaccgattacattgaccgctgcgtacagaccacgcgcgggctttctatcccgcagcaaatggcggtagattttaagtag

SEQ ID NO: 259366 - DNA, 624 bp, Klebsiella pneumoniae
atgggcaccgtcgttaatccagcgccacagttcggctccctgctcgcgcagtttgtcctgaacgtagactttttgttgttgatcgcgggaccaggccaggtcgatgcggctcagcacgccttctttgacgtagctctgccactccacctgatagaggaaatcttcagtaaagtgcgggttgccgaagaacagccagttcttaccctctgcgccttccgccgcgcgctgctgcataaacgcgcggaaaggcgcgatgccggtaccgggaccaatcatgatcaccggcgtttccgggttcgcaggcaatcggaagttatcgttatgctcgataaaaacgcgaacttcgccgtcttcttcgacgcggtcagccaggaaactggaagcgccgccggcacgagcgcgaccttcaatatcataacgcactacgccaacggtgacgtggacttcgctttccacttccgcctgcgaagaggcgatcgagtacagccgcggcgtcaacgggcgcagcaggtcaaccagcgcctgggcatccagctgcgccggcgagaaacgcaccatgtcgacgatcggcgtggttgcggcgtagtgctggagctgtgccttatcgcccaccagcggcagtaa

SEQ ID NO: 259367 - DNA, 777 bp, Klebsiella pneumoniae
atgctggcaaaacggataatcccctgtcttgacgttcgcgacggccaggtagtgaaaggcgtgcagttccgtaatcacgaaatcatcggcgatattgtcccgctggcaaaacgctatgccgacgaaggcgcggatgagctggtgttctacgatatcaccgcctcgagcgacggtcgcgtggtggataaaagctgggtatcgcgcgttgcggaagtgatcgacattcccttctgcgtcgccggcggcattaagtcgctggaagaggcggcgcaaatcctctcctttggcgcggataaaatctccatcaattcccctgccctggcggacccgacgctgattactcgcctggccgatcggttcggggtgcagtgtattgtcgtgggtatcgatacctggtttgacgccgaaagcgggaagtatcacgtcaatcaatataccggcgatgagagccgtacgcgggtgacgcagtgggaaacgctggactgggtgcaggaagtacaaaagcgcggggccggcgagatcgtcctcaatatgatgaatcaggacggcgtgcgtaacggctacgatctgcagcagttaagcaaggtacgcgccgtgtgccacgtgccgctgattgcatccggcggtgccgggactatggagcacttcctggaagccttccgcgacgccaacgtcgacggcgcgctggccgcctcggtgttccacaagcaaattatcaatattggtgaactgaaaacgtacctggcagcacagggcgtggagattagggtatgttaa

SEQ ID NO: 259368 - DNA, 1047 bp, Klebsiella pneumoniae
atgaataaaacagacgaattgcgtaccgcgcgcattgaaagcctggtaacgcccgcggaactggcgcaacggcaccccgtgtcccccgatgttgccgcccacgtttctgcttcgcgccgccgaatcgaaaaaattctcaacggtgaagatcgccgcctgctggtagtgatcggtccctgttccattcacgatactgatgcggcgatggagtatgcgcgcagactgcagggtatgcgcgaacgctatcagccgcagctggaaatcgtgatgcgcacctattttgagaagccgcgtacggtggttggctggaaggggctgatctccgaccccgacctgaacggcagctaccgggtgaatcacggccttgaactggcgcgtagcctgctgctgcaggtgaacgagctcggcgtccccaccgctaccgagtttctcgatatggtgaccggacagtttattgccgatttgattagctggggcgcgatcggcgcacgtacaaccgagagccaaatccatcgcgaaatggcctctgcgctctcatgcccggtgggctttaaaaacggtaccgatggtaatacccgtatcgccgttgacgccatccgcgcttcccgcgccagccatatgttcctgtcgccggataagcagggccagatgaccatctatcagaccagcgggaatccgtacggccatattattatgcgcggtggtaaaaaaccgaattaccacgctgccgacatcgccgccgccggagaagcgctggcagagttcgacctgccggaacaactggtggtggattttagccacggtaattgccagaaacagcatcgccgtcagctggaagtttgcgccgatatatgtcagcagatccgcgcgggctcgaccgcaatcgccgggatcatggccgaaagcttccttaaggaaggtacgcaaaaggtcgttgccggccaaccgctgacctggggacaatcgattaccgatccctgcttgagttgggaagacagcgagcggctgctggatgaattagccgccgcaaccgccacccgcctctag

SEQ ID NO: 259369 - DNA, 510 bp, Klebsiella pneumoniae
atgctctttgaccagctggtaacaggcgcgcacgtgagcggcagtcatctctttctgcggcgcgaagcggtccttgatgaccttaaatacccggtcaaagcccggcaaggtaaacaccagcatgaccatcccgcggatccccggcgcttcaacaaattgttcattgctgcgggaaagatagtgcaagtattcccgatagctttccgttttcgcatgcttctggcagccaatcgccatgtacagttcggcggtggttttacccggcagaatctcgcgcagccactcgaccagcgcgccgggcagcggcgcgtaaaccataaaataggagcgggcgaagccaaaaacgatactggcttcggcatgcgtcgtcaggcaagcatcgacaaacagttcaccttcatcggtacgatggattggcagaagaaaaggcagcgtggccatcggcgtaaccaatttgcctaccagccaggctgccttattgcggtaaaaaagttcattcgccacctgtag

SEQ ID NO: 259370 - DNA, 321 bp, Klebsiella pneumoniae
gtggtcaaacaaccgacaatagacggaattgaaaaagctctccgcaatttcgaagcgagggtaatccggcagcaggcgggtatagtgttcttttactcgcagcaaaaagtcgctatcggtatttttgccatcggtaatgcagcgcagctgctcgacgaccaggccaacatggtgatcgtagagatggatgcgctgcttcatcgcctgctggacggcatgccagtcggcctgttcaaagcgctgctgggcgccggaagtgacttcaagaaaacgaccgtactgggcgtcgaaaccctgcaaaatagtttgcgcaatcaataa

SEQ ID NO: 259371 - DNA, 1176 bp, Klebsiella pneumoniae
atgcgcgacagctttgcgctggcgatgccgtttgtgatcgtcggaagcttgctggtgccgattttgtttccgcccgtttccatcgacggcgcatcggcttttggccagttctatttccagctgcggcctattctgctgccgacttttgaactgactatcgggctggtggcgctgattgtggccttcggcgccagcgccagtcttgccaagcagtaccggctaccggagcggctctgcgggctgaccggctgcctggcgtttttgctgtttatcggctttcgcgacaacggcgcgaccaatatttttcttggcggaatggggatttttaccgcgctgatatcgagtacttactccattgaaattgtacgctttttctataagaaaggctggtgcatccgcctgcctgaagaggtaccggtgatgacccgcaacggctttcagctactgattccgctgctggtggtgatgctctctattagcgtcattaacgcgctgctgttgcaaagcaccgggcgcattttaccggagctgattagcgaagcggtgcggccgctggtggtggcctccgataccctaaccgcggttttaatatcgttatttatctgcaacctgctttggtttgtcggtattcacggcgcgctaattatcaccgggattatgaacccgttctggatgacctatctgtttgaaaaccaacaggcgctggccgccggttccgccacgttaccgcatatttacctgcagggattctgggatttctacctgctaatcggcggtatcggctcgaccctgccgctggtttttatggcgatgcgtagccgttcccggcagttgaaaagcgtcgggaaaattggcctgcttccctcgctgtttaacattaatgagccgatattgttcggctttccgattatcatgaacccggtttttctgctgccgtttatttttgtgccgctgataaatgcctgtatcgcctggtatttaacccatctggggattctcgaccgggcggtggcgatgctgccgtggtcgatgccggcgccgctcggcgcggcgtggtcagccaacggtagctggaaaaacttatgcatgtgcctgttcgctatttttaacgcctggatgctctatcgcccgttctttaaggtctacgaacgccagcttgccgacgctgaacgctaa

SEQ ID NO: 259372 - DNA, 1338 bp, Klebsiella pneumoniae
atgatcaggctaaatcattcaatacctctgtctttacttgcccttgcggtgatgagcgactgcgccagcgccgatccgaagtacgattttatgctgcatggctatatccgttcagggatccttgccaacgccgacggcaatcgcgctgactccgttggcctgatgccggacggcaagtggcgtctgggcaacgaagaagataccaagatcgaactgatcccaacggtgacgttaacctcggacagcggcgtggtggcaaaagtccaggccaacatcacccatcagtccaaatgtacctctgactggaactatcaggacgacgacgggcatgatgtgcagttccgcgaaggttttgccgaactgtccaacctcgacttcgccccggaaatgaccttctgggccggtaagcgctacagcagctccaacacctccagccatcagtttgactgggagtatattcagtacaacggcaccggcggcggcttcgacaatatggatcttggcttcgcgcgcttcgatgccggggtttacgccttctcgccgacggacgaaaccaaagcctacccggtcgacaaaggcgatcagggctatccggatgactactcgctcaacctgtggctgaaaaagatcggcggcaccggcttcgatcttgagctgattggccaccacatgaaccgcaacgagaagcacccgacctcggcggaaaaaggctacggcgtgaccggcgtttacaactttgacggcttttacggcctgaccggcggctactctcgcgcggtcttccagtacgggcgcggcctggcggcgggagactcgctgggtaaaaacggctggggctgggcaaacctcgacgatacccagtcctggcgcgtggtgctggataacatggcctcgctcggcgactgggaaatctccacgtttgcctactatcagaaagacaaaaactaccgctggtggacggaagacgccgaaggctgggggcgcaccagctgggtggcggggatccgcccgtatcagcagatcaccaaaaacttcgccatgcagtacgagctgggctacgaatatctcgacgataaaaactataaaggcgtggacggcaagggcaaaggcggcctgactaaagtgaccatcgcgccgaccctgacctttgattccggcttctggacgcgcccgcagctgcgcttcttcgtcacttacgcgaagtgggataagggggtgtccgacgcgctggacggcaactacgactggagcaccaataccctttccgccggtagctactcgcgcagcggcgataccgacacgctgaacttcggcgtgcaggccgaagtctggttctga

SEQ ID NO: 259373 - DNA, 1401 bp, Klebsiella pneumoniae
atgacccggtatcagtttccggaaggttttttttggggcgcggcggcatccggtccgcagacggaagggataagcaacaagccgcatcgttctatttgggatagctggtttgccgaacagccggaacgtttttatcagcagattgggccgcaaacggtttgcgacacttaccatcagtatccccaggacgtggcgttgatgaagcggaccgggttcaactcttttcgcacctcgattcagtggtcgcgtctgattgacgacttcgaaaccggcgcgcccaatgcggacgcggtgcgtttttatcatgcctacctggatgagatgattgaaaacggcatcgagccgttgatcaacctctatcactttgacatgccggaagcgctgcaaaagcagtacggcggctttgagtcggcgcacgtgaccgatcttttcgcgcgttttgcccgtaccgcttttgagctgtttgggcacaaagtgaaatactggatcaccttcaacgagccgattgtgccggttgagggcggctatctgtatgacttccactatccctgcaagaaagacggcagtctggcggcgcaggtggcgtttaacattatgctggcccacgccaaagcggtgcgcgagtttcgcgcgctggcgctggaaagcgagattggcgtggtgctgaatctgacgccgtcctatacccgcaacgacagcgcggaagaccaaaaagcggcgtggtatgcggatctgttcttcaaccgcagctttctcgatccgctggtgaagcatcagttcccgaaagcgctgtgcgaaattctggccgcgcacgactgtctgccggaggtgacaaaagccgacgttgagctgattaccggatcgcgcgtcgattttctcggcgttaactattacgttccgcggcgggtgaaagcgcgcgaaagcgactatacgctggactatttcaccccggagttctatttcgaaaactatgtgaatccgcaagggcgctttaatccttatcgcgataataatgagattctgccgcaggcgatttatgacattgccgccaatattcgcgataactacggcaatataaagtggttcctcgcggaaattggtatcgcgatggatatcgagtcggaaggcgagccgggcgaggacggggtgattgacgattcgttccgcatcggcctgatggaagagcatctggtgcagctgcatcgcgccattgccgacggcgcgaactgctttggcgtgcatcagtggacctttatcgataactggtcgtggattaactcgttcaagcgccgctacggcttctggcggctcgacttgcaaaccggcgagcggctgataaagcgcaacgcgctgtggtttgccgaactggcgaccagcaacggcttcagttctgataaatag

SEQ ID NO: 259374 - DNA, 771 bp, Klebsiella pneumoniae
atgcaaaaatcggttttagttacaggatgttccagcggaattggtcttgaaagcgccctggatttaaagcgccagggctttaacgtgctggccgcctgccgcaaagcggaagatgtcgcacggatgcaggcgctggggctgaccggtgtgttgctggatcttgacgatccgcagagcgttgaacgtgccgccgccgaggtgattgccctgaccgacaaccgcctgtacggcctgtttaacaacgcgggctacggcgtctacggcccgctgccgaccgtcagccgccggcagatggagcagcagttttccgccaacttttttggcgctcatcagctaacgatgctactgcttccggccatggagccgcacggcgaagggcgtatcgtgatgacctcatcggttatggggattatctccagcccgggccgcggcgcctatgccgccagcaaatatgcgctggaagcctggtccgatgcgctgcgtatggagctgcgccacagcggcattaaggtcagcctgattgagccgggccccatccgcacccgcttcaccaacaatgtcaaccagactcaggccgataagccggtggaaaatcccggtatcgccgcccgcttcacgctcggaccggaagcggtggtggaaaaagtgcgtcacgcttttgtcagcgataaaccgaaactacgctatccggtaaccctggtgacgcacgcggtcgccttgcttaagcggctgctgccgacccgcgcgatggacaaaattatccagggctga

SEQ ID NO: 259375 - DNA, 789 bp, Klebsiella pneumoniae
atgaatatccgcccactgctgatcctgctggttgtcctgcccctgcatgccgtcgaactggtgaagtgggaacgcatcccactgccgatagcactgaacatcgggcaggagcggatcgtctttgtggaccgtaatgtccgggtgggctatcccgccgcactcgaaggcaagctgcgcatccagagcagtaacggtacgttgtacctgcttgccagccagccattcgccgccacccggctacagcttcaggacacagaaaacggcgagctgatgttgctggacgtctccgccagcaagggcgagcgcatccgggagccgatgcgcattgttcgcgaagagaagaaaacgcctgatgcgaagcccgatacaactcctgaccccttaccctccacgccacttccggtcgcgctcacccgctatgccgcgcagatgctgtatgccccgttacgcactctggagcctttgccgggcgttcagcccgaaggcgtgcggctggcaaaaaccatcaccaccctgctgccagccttacccgtcaacgccataccgatcggcggctggcggctggatccttatcacctggcggcgatccggcttcagaataaaagttccacccggctggaactcgatccacgccagcttcaggggcagttttacgccgcatcctttcagcatcgctggctggggtccgcgggcagcgccgaagacactaccgtgctctatctcatcacccgcaatcagcgtcctgaacaggcgatcctgccggagcctgcgccggagaagaagaaatga

SEQ ID NO: 259376 - DNA, 627 bp, Klebsiella pneumoniae
atgagcgcctttaaacacgcgttggccgcgcgggatgcacatatccgcactctgcatattgcgctagtcgcgttattcctgcttgcatcaggcatgggattcggctggtacagcgccccacgccagctcacggtgtacctgccgccggatctccgcgccgccagtcagcacccatggtgggaagtgccgcccgccacggtgtacgcctttgcattttcggtgtttcagcaaatcaaccgctggccgaccaacggcgaggccgattatccccgcaacctcagtgcgctgcgggcttacctcactcccggctgctacagccagattgaccgggaatttcaccagcgcctgcaaaacggcgaactgcgcgaccgggtacgcggcgtatatgaaatccccggtcggggattcagcgataagcgggtgcagatcctcgaccgcgacaactggattgtaacgctggatctcaccgtcgatgagtatttccactctgaacccgtcaagcgggcgatggtccgttaccccatcaaggtgctgcgctacaacatcgaccagcagaaaaatccgtggggactggcgctggactgcttctcatcgccgccgcagaaactggaggcggctaaatcatga

SEQ ID NO: 259377 - DNA, 321 bp, Klebsiella pneumoniae
atgaaaccacgttatccatttttcatacttgccatagtattgtgccctatgacaggtgtttttgccgcccacctcaccgagcgcgaagagctaaccctgtccctcaaccagcttacccaaatagaagcttcgctccaccgcgcccaacaaagcgccagagccggtatcaacgagcgctactacttcgactatccacgcatccacagcgatatcaccaccctgcgtagcgggattgagcattacctcacccccacccgcgcccagccgcgagatacggcgacgctcgtcgggcgataccgtgaggagaaagccaggccatga

SEQ ID NO: 259378 - DNA, 738 bp, Klebsiella pneumoniae
ttggcgcaattaggtttgttttttatgcatcctttttgggatgcgtcaatgtgtattaatgagatgaagacattaggagagcatacagaagagagtattactctcttacttgaagaaattaagcaagagggagtgattctacatgaacaacaatttattgaatatgatgaaggaaatggttctctctttgaatgttattattacaaaggtgtatctggtgattcagaacaggaggttaagctggaatatgaatggctcatttctcaaatgtacagaagatctgcatttttgacgatttttggaagatttgaatataatcttgataaatgcctcctaaaaatgttagaaatatctaactcgactgagactcgttcagagcgcaagaacggtattcctgcgcgagtacataaaatactcacaaccgtcatcgcgataggaacatctctagttattgaggatgttgattatcttcgtgtgatccgaaatcatattgcccataacaatgcttttattgacacatcaattgaaagcaagagattagctattgaaaagtcagaacgagcaaatcttttgaaaatgaacgcatataatgaaattatcttaaatgagacgtttctctcccatgctgtagatgagtttgaacgctatattaaacaaatgacagatgctgttaaggtttataatgaaatgcatagcactgcatcatcaacaagtaaccctacaacgacattttcatag

SEQ ID NO: 259379 - DNA, 795 bp, Klebsiella pneumoniae
atgctgaaaatgtctaaagcaaagcatgcatttgtacagaggttctatcgatttgatgaggatattcaactcgtagactatttatcatggcagtccaattcccgttctggagttttaaactcttctagcgcactcctacccggagatatctctaaatatgaacgcctacacaagcgcaatctaaaagggcggtcttttagagagaatcgctctgctatatttactcaccttaagcaaacaaccttttcatcatatataaaagaatcctatgaggaagtgactgagtacctaaaggtcattttgaaaagtgcggcactcagcaaaaaagtatctatatcgcaatttgtaggtgggcaggcaaagttaactattacggcgtttgatatttacgaggcgggtgatttcaagtccatatctgattctctaatagataaaatattccaagaactagaaaaggaacgaagcacgttaaagctagttaaaaacgtgtgtggtaaattatctctagccggcgatgaaaacatcataaacaaatccgttcgttacttaaacataaggcactatctggttcatagtgacgggaaattacctagtgattttataaaagagcttaaaggcaacgggattgcgatttcttgtgatagaaatggatatataaaactcaattatgaattaatcaaggagtttaggacttcagtatcttctctcgttgatcacatcgacaagcttctcatcgacagtaactttctatcctcagcctttatccaccgagggaaaaatagaatagcaccataa

SEQ ID NO: 259380 - DNA, 684 bp, Klebsiella pneumoniae
atgcccgaacatgcgtcaccgccgcctgcacgccgccccggactaattggctggctcgcattgttacccggcgtgctgattggcttttgcctcggcgcatggatgctggcaatagcgctggagtggctgggcgacgcgtttttctggcggaacgcctgcgccagccacagtggacaggtattgcaggcgacatggcagtggtggcgaagttccgctggcgcaccagcgtggttagtagaagatctggcgattgtcagcgatacattgcagcaagggattgcggcactggttcattcgctcaacgggcaaagcgggttgttctggacggaaaacgtcactacggtgatccgctgcgcgttactgtctacaggtaatgttaccctcacctttctgctgcgcctggcgattctgttgcaggcattaccactatttgcgctggctatcatcatcgggctcattgacgggctggtaagacgtgacttacggaaatttggcgcaggccatgagtccgggtttgtttatcaccatgccaggcgtatgattggctccagcctagcagcaacgggactggcgtggttagcgttaccatatgatcttgatccaaagaatgtactgatggctggggcgatgggggttgggctggcagtaacggtggcgattgggacctttaaaaaatatttatga

SEQ ID NO: 259381 - DNA, 801 bp, Klebsiella pneumoniae
atgaaatatccgcggctttatcctgattaccggggagttgttcccccctgtaaaaaacgctggggagtggcatggctggtgggtaatttactgtttacattttttatcctctggttatggcctttagacaaggccacccatactgcagaattctggttctggactgccgtttttcctaccctttttatcggatttctgtttgctgcacgagtcttgatttatcaggtggcttcggggaaccaacgggcttatcgccatatactgcagcaggaggaagtgcgatggtggcggcaacgagcggccggacttccgatagaaccatggtgtttgctggggccgggcggtgataaaccagagcatcatctggctgctctggcgcgagatagctctccgccagaatatttaataacccagcatggtttcagggttttgcgttgcccacaaatactggaaaacgacatttggcgccgggaggcggcattaactcgacatttagtgcgcacgttgattgagacatacgcattaaaaagctcatgtcctccagtatttcaggcgttgtactggtgtggttcgtcacaagcggggcaacagtttatgcagacgttatgtgattcaggatggcagtttcagcagccgcttttaccgctgaacgatatcgatcagttagatgatgctatcgaccattaccatcgtctctcccggcataaaaatagattactgtgtgctggcatttattcggcgagccacatcgactctacgcagattaccggagaagcagggtttgtctggtgcgtcgggtag

SEQ ID NO: 259382 - DNA, 267 bp, Klebsiella pneumoniae; identical to SEQ ID NO: 177214

SEQ ID NO: 259383 - DNA, 2466 bp, Klebsiella pneumoniae
atgccccaaatgaatgtcaggtcggttttagcacctccgtatttccccgctgaaggccggttgcctaaaaatattgacttggtacaagccaatgtagatttacagacacgtgaggagaaggagtttaaactaacgctgaatgcgcaaaatggtcttaataatacccctccttgttgtaaaagcctgcatgtcagcctattttttgacggcactaataataatgaaaaagcaagcgctgaggcaaaaagaccgaaccccagcaatatcgcccgactttatcatacggcgcttgaagatatcgatagcggatattatagctactatatacccggtgtggggactgcttttccggaaattggcgagttggattttagcgatgcggggttaagatatgccacggggggagaggcgcgaattaattgggcactgctgcgcattgtcgatgccgtcaggcatacattaaccggagaacgtctgggtgatagcgaagcgaaggggttggcacaatctctttcaagggacatggcaggcaaggcgaaagtaaacaaaccaataagaacgatgaggcggcaggtcgtattccgtcacctgtttgccccactgcgcgctagagcgaaaacccatcagccgaaaatcctcaaaatcaagctgtttatctatggtttctcccgcggcgccgccgaggcgcgcgcctttgtgaactggttaacggacatcctggatgcggcattgctacaggagaaaactccgcaacccactctgctgggctggccgatagccgttgagtttcttggtctctgcgacaccgtggcctcggtagggattgcacgcatagcccctggatttcaggggcatatggcgtgggcggatgataatctggcgctgccggatgaaagtcaattccccggatttattcagcgctgctgccattttgtctccgctcacgagcagcgtttgtgctttccgctcgattctgtcagacgcacggagggaaattaccccgccagtacctttgaggtggtttaccctggtgttcactctgacgtgggcggcggctatgcccggggggagcaggggaagagcgttgaggatgcgctgattctctcgcagattgtgctgcacgatctttatgccgcagcctttgctatgggcgcccccctgatggtaccggaacagatgatcccgcccgatttagtatcgcgtaagccttcacggaatatgagtgaggacgttctgcaggaatttaaaatcaaacaaccgcttatcgagcgcttcaatgcctggcgcaccactttgcggccagacctgccgcagaacgccacctctggttatcaacctgttgacctgaagcatgcgctggaaaatgtgattgaacagcagatggcgtggataactgcctggcgtataggacgttttgcgaatggcagttaccagcgtcagtccttttatcaggaagcggcatggaatagtggggatacggaccagcagcaccgtgacgcaagtgagagggcgcgtgatgaaaaacagaatgagcgtgaaaaggctcgcaagataataccggatacgccgggagtaccaatattcgaacctgctctcgatcagcagcagttgcagcaggcagcggacgaatttcgtgcagattatcacgctctctctccttacacggtaggcatgacgcggaataacactggcggtggatggcagatgctggttgatggcatcggtgggaggattacgtacatcttcgatcctgacgatcaggcggctgaatatacgcagatgaaaaccgcggctaactcgttaaaaggaatactctttaaagacgatcgtggcgcgattaccgatgatagtgactatgcccaagtttgtaagttgtatgacgatcatattcatgattcacgtgcgtggtttatgcaatctagtctggggtatcgcgaactgtgggcgggttattttcgataccgtaccatttatagcggggatgatgctaataaagagacttctttgttaaaaatgagccaaaaaggtggcgaggtgcttattggcataaatatttatttagttgctgaggaaaataaagcatttgccgcagtggatcggggtgtggataagttaggaaacgtcatgaaagacggcatggaattatcggcacaggcgcagcagctggagaatgaggctatcgctgccagaaataaaaagatccgtgaaatgggcgggaaagttatccgtggcatggtcgagaaagtaaggcatatgtcttctatgcaaacatgtcctgtttccgatatcaatggcgaaatgatatgccaggttccgctatatgtgaatatagttttccccacgcgtaatgttacccagttacgcaaaatttataatcagcaagaagcagcgagtgataaaaaacagttggatgaactggtggaaaatttaaataactttgtcgagccagccagtaacaggagatag

SEQ ID NO: 259384 - DNA, 531 bp, Klebsiella pneumoniae
atgatcaagatgcttactaaatgcaggggctatacgctgtttttgtttgcggcattattattgaccagttgtgaacaaccggaaacctggagcagcggtgatttgcgtggggttaaccatacacgccaggagattcccggcttcagcgtcaacggcagtatcgggccgaatattggttccttcggggaaaagggaggagcttgttgcatttccctgcctgataaatggcgaccaggtttaaaggctgatgttgtgtgggtggtcagtacgacttcagacataatcaactttcctggatatgaggattgggagaaatataaggcatgggaaaaaaaagttatagaggggagggttaaacactacaccacagtcgatattcccgactacggtgacaggaaatgcggattaaccgtccattttttgccctgtaatcaaatcaaggttactgcctcttgcaaaacatatggtgccgctgaatatccgattaaagagccccgtgaaatggaggagcctgagcaatgccccaaatga

SEQ ID NO: 259385 - DNA, 834 bp, Klebsiella pneumoniae
atggacgcagatactgataattcaatattaaattggttaaaacagatcgaacaagtgtgtgcttgtctggataccgtgtcagtaaatattattgtggatcaggctggggatgccccctctttagttcatgatttgatgcggtttccaccgcagattgcctgggtttcgctattagagaatgaaccggaaaatgagtttattgaagatgcgcctctttttttgcaattatgtattgatgtatggcagcacaaagagtggttgtcagccttacttcggcaatataatgatccggcgcgaatattgctctttttttctgtgtgtgattttagttcgttggcaaaacatttgcagaacctgattattgcggaatgggagggccgtaagggcttaatgcgattttatgatacccgagtattcccggcgttggtaacgtcagtattgactgagcaacaaaaaaattattttctacatattgcgcaactatggagttggcgtaatcgcgatgggcaatccgtctggtttcggggtgaaaactgtgaatataactttagcgagacgacattattaacgcttaccgatgctcaatacagccaattaggtatgattagtgatatcgaaggatttatcagaaaatatcacttcaggcatcctgagtttacaaagcaaacattatttaatcatttgtggcagcgattgcagatgatggatgaagaaacaccgcttgataatgagcgcttttttagtgagtatttatcgggagggggggtaaacagcaaaccatcgataaaaagaagagacctgattaataatggctctgtaatttttcgcgcataa

SEQ ID NO: 259386 - DNA, 657 bp, Klebsiella pneumoniae; identical to SEQ ID NO: 177218

SEQ ID NO: 259387 - DNA, 222 bp, Klebsiella pneumoniae
atggggctgggcgcgtcgttttcggtgctgattgtcgccgaaatggtcggcgtgaaatccgggatcggcttttatctgcagtgggcgcagggctgggcggcctatcccaatatgtacgcggcgctgctggtgatggcgctgctttgctccggcctgattagcgggctgtttatggtgcgcgaccggctgctgagctggcagcggggagggatgcaatggtaa

SEQ ID NO: 259388 - DNA, 747 bp, Klebsiella pneumoniae
atgcagacgctgtttgatatctttcgccagcaggcggttattggggtactcccaggagtacgcttccagcagcagcgttttcagcacggccttatagggcgagtcgatgcttttatacagctgccagaggctggcgccgaagtactcttcggccgacagagaactcaggccgccgagatccagccattcattcggcgtcagtacgccctgcgcgtagaggctcatgacgtaatcgtcgtaatgctcttcttcatcgcacggcaccatattccacagaatacgtttgccggcaaggcgcaccgcggtgcggtaaaactcatccagcagcaggatatgctgggtggagccgcagtcttcgccgcccaggctgccgctttcgttatgacggaagcggttttcgtcgatcaggaagaagctgacctcgacgcccagcgatgccgcccagctctccagcaggctacatttacgctgcagcagctgacgctcttcagtgtcaagccaggactggtggcaaacccagatatccaggtcagacgaacagctttggccgacggaagatgtgctgcccatagagtaaaggccggtgatcggcagctcgcctttcggcggctccttggccagcatgccacggttgagctcgagctcatcaagatagtgacgttgggtttcatcaggcgtgtagaggcaaatgccacggggaacgttaccgtcaaggtaacccggcatcagcggatgatgataatgtag

SEQ ID NO: 259389 - DNA, 1455 bp, Klebsiella pneumoniae
atggaagttccggcgccgttcgcgggtaccgtgaaagagatcaagattaacaccggcgataaagtctcaaccggctccctgatcatgatcttcgaagtagcgggcgcagcgcctgccgcagctccggcaaaagcggaagccgctccggctgctgctgcaccggcagcttcgggttctaaagaagttcacgttccggatatcggcggtgatgaagttgaagtcactgaagtgatggttaaagtgggcgataagattgccgctgaacagtcgctgatcaccgtagaaggcgataaagcctctatggaagttccggcgccgtttgcgggcaccgtgaaagagatcaaaatcagcaccggcgacaaagtctcaaccggctccctgattatggtcttcgaagtggaaggcgcagcgcctgcagcggctccggctaagcaagaagccgctgcacctgcggcagctccggttcaggcggagaaacctgctgcagctcctgctgctaaagcggaaggcaaatctgagttcgctgaaaacgacgcgtacgttcatgcaacgccgctgattcgtcgcctggcgcgcgagttcggcgtcaacctggcgaaagtgaaaggtacgggtcgcaaaggccgtatcctgcgcgaagacgttcaggcttacgtgaaagaagcggttaaacgcgctgaagctgcgcctgcggcaaccggtggcggtatcccgggcatgctgccgtggccgaaagtggacttcagcaagtttggtgaagtggaagaagttgaactgggccgcattcagaaaatctctggtgctaacctgagccgtaactgggtgatgatcccgcacgttactcacttcgacaaaaccgatatcaccgatctggaagcgttccgtaaacagcaaaacgccgaagctgagaagcgtaaactggacgtgaaattcactccggttgtcttcatcatgaaagccgttgccgctgcgcttgagcaaatgccgcgcttcaacagctcgctctctgaagatggccagcgtctgacgctgaagaaatacatcaacatcggtgtggcggttgataccccgaatggcctggtggttccggtctttaaagatgtgaacaagaagagcgtaaccgagctgtctcgtgaactgaccgtgatttctaagaaagcgcgtgatggtaagctgaccgctggcgaaatgcagggcggttgcttcactatctccagcatcggcggcctgggtaccacccacttcgcgccgatcgttaacgcgccggaagtggctatcctcggcgtgtccaagtccgcgatggagccggtgtggaatggtaaagagtttgttccgcgtctgatgatgccgatctctctgtccttcgaccaccgcgtgatcgacggtgctgatggtgcgcgctttatcaccatcatcaacaatatgctgagcgacattcgccgcctggtgatgtaa

SEQ ID NO: 259390 - DNA, 825 bp, Klebsiella pneumoniae
atgctgttagcgcaaatttccgatacccatttccgcagccgcggccagaagctgtacggctttattgacgtcaacgccgccaatgccgacgtcgtctcccagttgaacgccctgcaggagcgtccggacgcggtggtggtgagcggcgatatcgtcaactgcggccgcccggaagagtatgaggtcgcccgtcagatcctcggcagcctgaactatccgctgtatctcattcccggcaaccacgacgataaagcgctgtttctggagtacctgcatccgctgtgcccgcagctcggccgcgacgcgcaaaacatgcactacgcggtagacgattttgccactcgcctgctgtttatcgactccagccgggcgggtacgtcgaaaggctggctgaccgaggaaaccatcaaatggctggaagcccagctgtttgatggcggcgataaaccggcgacggtatttatgcatcatccgccgctgccgctgggcaatgcgcagatggatcctatcgcctgcgaaaatggccatcgtctgctggcgctggttgagcgtttcccgtcgctgacgcgcattttctgcggccataaccacagcctgaccatgacccagtatcgccaggccatcatctccaccatcccgggaaccgtccaccaggtaccctacttttatgaagatacccgaccgtactacgacctctctccggcgtcgtgtctgatgcatcgccaggtcgacgagcagtgggtgagctatcagcatcctctgacccactacgccggcccctggatgtacgacgaaaatatcagctgcccaacggaagattgctaa

SEQ ID NO: 259391 - DNA, 1071 bp, Klebsiella pneumoniae
atgcttagtctgcaaaacatcagtaaacagtttgacggtaaaccggccctcagcgccctgtcgctggatattcgcgaaggggaattcgtggtgctggtgggcccatccggctgcggtaaaagcaccctgctgcgcctgctcgccgggctggagccggtcagcgagggggagatctggctgcacgatgagaacatcaccgaaatgtcgcccagagagcgcaacttcgcgatgatcttccagaactatgcgctgtttccgcacctgtcggtgcgcgacaacatcaccttcggcatgaaggtgcgcaaagaggagaagaccagctggcagccgcgggtggataaagtcgcgcagatgctgcagctggataccctgctcgatcgcaaaccggcgaagctctccggcggccagcggcagcgggtggcgatggcgcgggcgattgtgcgcaatccgcgcctgttcctgatggatgagccgctctccaacctcgacgcccgcctgcgtagcgaagtgcgcgacagcattatggatctccaccagcagctcagaaccagcaccgtctacgtcacccatgaccagacggaagcgatgtcgatggccgaccgcatcgtggtgatgaacggcggccacgtacagcaggtcgggcgaccggagtatctgtacgccaacccggccaacctgcttgtcgccgggtttatcggatctccggcgatgaatctgctctcactgccctgcgctgatggtgaggtattactgggtgagctgcgctatccgctgccgccgcgctaccgtgaagaatcccgagtgtggttaggcattcgcccggaacatatcagcgaccgcgtggaggagagccatctacgcctgcccgccaccgtgctgcaacgagaactgatgggagccgattatttgctccacgtcagcacccccgccggcaccttacgctttagccgtcgccatcgcggcgcggtgccggagaaaggcgattcgctgatcctcggcttttcacctgccgatgtgcatctttttcatgctgagaaacagcataatttagcgccggtacatcaggcgtaa

SEQ ID NO: 259392 - DNA, 1227 bp, Klebsiella pneumoniae
atgtttccggcgccggtggacggcaagctgaccatggagatgacccgcgtcattaagcaattcaacgagtcgcagcaggatgtcgaagtgcgcgggatctttaccggcaactacgacactaccaagatcaaagccgaatcagcgcagaaagccgggcagccgcccgcgctggtgattatgtccgccaacttcaccaccgatctggcgctgaaagatgagatcctgccgatggacgaactgttccagtatggcgatcaaaaagcgggggattttctggtgaaggcgttctggcccgccatgcataaaaacgcccaggtgatgggcaccacctatgcgatcccgttccataactcgacgccgatcctctactacaacaaaacgatgttcgatcgggccgggatcaaacagccaccgcaaacctgggccgagctgctggcggacgccagaaagctgaccgacgaaagcaaaggccagtgggggatcatgctgccgtcgaccaacgatgattacggcggctggatcttctcggcgctggtgcgcgccaacggcgggaaatactttaacgaggactatccgggcgaagtctattacaacacgccaaccaccatcggcgccctgcgcttctggcagaacctggtctataaagacaaagtgatgccttccggggtgttgaattcgaaacagatcggcgccagcttcttctccggcaaagtcggaatggcgatgctgagcaccggcgcgctgggctttatgcgcgagaacagcaaagattttgagctgggcgtggcgatgctgccggctaaagagcagcgggcggtaccgatcggcggcgccagcctggttagcttcaaaggcatcaacgacgcgcagaaaaaagcggcgtatcagttcctgacgtatctggtgagcccgcaggtcaacggcgcctggagtcgctttaccggctacttctccccgcgtaaggccgcctacgatacgccggaaatgaaggcgtatctgcagcaggatccgcgcgcggctatcgccctcgaacagctgaagtatgcccatccgtggtactccacctgggagaccgttgccgtgcgtaaggcgatggaaaaccagctggccgcggtggtcaatgatgccaatgttaccccggaagccgcggtgcaggcggcgcagaaggaagccgatgcgttgatgaagccctacgtcgataagaccgcgctggcggaagtgaagtag

SEQ ID NO: 259393 - DNA, 723 bp, Klebsiella pneumoniae
atgctggatatccgcggcattcagatttgcaacgcctggttcagcaccttttttgctaacggccagcgggaaaaaaccattgatgaattcgttaaccacatgaatttcctgcatgctatgggcgcgaaagtgatcggctgctcggagcagagcggcagtattcaggggctggaaaagcctatcctggagaatgagaaaccgtgctttagcgaagaagagtggcagcgggtggcggaaggctataacaccctcggtcgcctggcggcggaaaagggcatgcaggtctgtctgcaccaccatatgggtaccggtattcagacgacggcagagatcgacaagtttatgtcgctggtggatgacaaggtcttcctgctctacgacaccggacacgcctggtattccgaaggcggcgaagagccgatgctggcgattctgaaaaaatatctgccgcgcattaaccatgtccacctgaaagacgtacgtccgccggtgatcgagcaggtgcgccgcgaagggctctccttcctggatggcgtgaagaaggggaccttcaccgtgccgggcgacggcgtcattgatttccgtccggtgtttaaactgctggacgagcatggctataaaggctggatggtggttgaggccgagcaggatccggcgctggctaacccattcgaatacgccgtaaaagcgcgcaaatacatccgcgagacggcaggaatctaa

SEQ ID NO: 259394 - DNA, 3684 bp, Klebsiella pneumoniae
gtgagcagcaaagttgagcaactgcatcagcagttaaaagaacgtattctggttctggatgggggcatgggcaccatgatccagagctatcgtctgagtgagcaggacttccgcggcgagcgttttgccgactggccgtgcgacctgaagggcaacaacgacctgctggttctcagcaagccggaagtgatcaccgccatccacgatgcctattttgcggccggggcggatatcattgaaaccaacacctttaactcgacgaccatcgcgatggcggattaccagatggaatccctgtcggcggaaatcaactttacggcggcgaaactggcccgcgccagcgctgatgcctggaccgcgcgcacgccggaaaaaccacgctacgtggcaggcgttctcggcccgactaaccgcactgcgtccatttctcctgacgtcaatgacccggcctttcgcaacatcacctttgacgggctggtggaagcctatcgtgaatccaccaaagcgctggtggaaggcggggcggatctgattctgattgagacggtgttcgataccctcaacgccaaagcggcgatctttgcggtcaaagaggagtttgaagcgctgggggtcgatctgccgattatgatctccggcaccatcaccgacgcctccgggcgcacgctgtccggccagaccaccgaagccttttataactcgctgcgccacgccgatgcgctcactttcggcctcaactgcgctctggggccggacgaactgcgccagtacgtgcaggagctgtcgcgtatcgccgaatgctacgtcaccgcccacccgaacgccggtctaccgaacgcctttggtgaatacgatctggacgccgacacgatggcgacgcaaattcgcgaatgggcggaggccggcttcctgaatattgtcggcggctgctgcggcaccacgccggaacatatcgccgccatgagccgcgcggtggccggcctgccgccgcgccagctgccggagatccctgtcgcctgtcgtctttccggccttgagccgctgaatatcggcgatgacagcctgtttgtgaacgtcggcgaacgcaccaacgttaccggctcggcgaaattcaaacgcctgattaaagaagaaaaatataacgaagcgctggatgtggcgcgccagcaggtggaaagcggcgcacagattatcgatatcaatatggatgaggggatgctcgacgccgaagcggcgatgacgcgtttcctcaacctgatcgccggtgagccggatatcgcccgcgtgccgattatgatcgactcctccaaatgggaggttatcgaaaagggcctgaagtgtattcagggcaaaggcatcgttaactccatctcgatgaaagagggcgttgagccgtttatccagcatgcgaaaaaggtgcgccgctacggggccgccgtcgtggtgatggcctttgatgaagtgggccaggccgatacccgtgaacgtaaaattgaaatttgccgccgggcgtacaccattcttaccgaagaggtgggcttcccgccggaagacatcatcttcgacccgaatattttcgccgtggcgaccggaattgaagagcacaacaactatgcccaggactttatcggcgcctgtgaagatatcaaacgcgaactgccgcacgcgctgatctccggcggcgtctctaacgtgtcgttctccttccgcggtaacgacccggtgcgcgaggcgattcacgcagtattcctctactacgccatccgtaacggcatggatatgggtatcgtcaacgctggacagctggcaatttacgacgaccttcccgccgagctgcgcgacgcggttgaagatgtgattctgaaccgccgcgatgacggcaccgaacgcctgctggatctggcggagaaatatcgcggcagcaaaactgacgataccgccaacgcccagcaggcggaatggcgcagctgggacgtcaaaaaacgcctcgagtactcgctggttaaaggcattaccgaatttattgagctcgataccgaagaagcccgacagcaggccgcgcgcccgatcgaggttatcgaagggccgctgatggacggtatgaacgtggtcggcgatctgttcggtgaagggaaaatgttcctgccgcaggtggtgaaatccgcccgcgtaatgaagcaggcggtggcctacctcgaaccctatattgaggccagcaaagagaaaggttccagcaacggcaagatggtcatcgccaccgtgaagggtgacgttcacgatatcggcaagaatattgtcggcgtcgtgctgcagtgtaataactatgaaatcgtcgatctgggcgtgatggtgcctgcggataaaatcctgaaaaccgcccgcgaggttaacgccgacctgattggcctctccgggctgattacgccgtcgctggatgagatggtcaacgtggcgaaggagatggagcgtcagggctttactattccgctgctgatcggcggcgcaaccacctcgaaagcgcatacggcagtgaaaatcgagcagaactacagcggcccgacggtctacgtgcagaacgcctcgcgcaccgtcggcgtggtcgccgccctgctgtccgatagtcagcgcgatgattttgtcgcccgtacccgcaaagagtacgaaacggtgcgtattcagcacggacgtaaaaagccgcgcactccccccgtcacgctggaagccgcgcgcgataacgacctggcctttgactgggcaagctacaccccgccggtggctcatcgtctgggcgtgcatgaggtggaagccagtattgaaaccctgcgtaattatatcgactggacgccgttctttatgacctggtcgctggccggtaagtatccgcgcattctggaagatgaagtcgtgggcgaagaggcacagcgcctgtttaaagacgccaacgaactgctggataagctcagtgccgggaaggccctcaatccacgcggcgtcgtggggctgttcccggctaaccgcgtcggcgacgatattgaaatctatcgcgatgaaacccggactcatgtgctgacggtggggcatcatctgcgccagcagaccgagaaagtcggctttgccaactactgcctggcggattttgtcgcgccgaagctgtcggggaaggcggactatatcggcgcctttgcggtgaccggcggccttgaggaagacgcgctggccgacgcctgggaggcacagcacgatgactataacaagattatggtgaaggcgattgccgaccgtctggcggaagccttcgccgagtatctgcatgagcgggtgcgtaaggtctactggggctatgcggcgaacgaaaacctcagcaacgaggagctgatccgcgagaattaccagggaatacgcccggcgccgggctatcccgcctgtccggagcacaccgaaaaggcgaccatctgggagctgctggaggtggaaaaacgtaccggcatgaagctgacggaatcctttgccatgtggcccggcgcgtcggtttccggctggtacttcagccatccggacagtaagtacttcgcggtagcgcaaattcagcgcgatcaggtggaggactatgcgttacgtaaggggatgagcgtggcggaagtggagcgctggctggcgccgaacctcggttacgatgccgactga

SEQ ID NO: 259395 - DNA, 342 bp, Klebsiella pneumoniae
atggaactgcgggtcaatctgctggctcaggcgacgggtcatacccatgaaacccagcacgtacagcggcataaacgccacgaagaaaccgatgatccagaaccagaaagcgcgtttgccccaggtttcgttcagcgtgaagccaaaggctttcggccaccagtaggtcagacctgcgaaacaaccgaacaccacgccaccgatgatgacgttatggaagtgcgcgatcaggaacaggctgttgtgcagcacgaagtctgcgcccggtaccgccagcagaacgccggtcataccgcctacggagaaggtaacgataaagccaatcgtccacagcattgctga

SEQ ID NO: 259396 - DNA, 945 bp, Klebsiella pneumoniae
atgagacttaggaaatacaataaaagtttgggatggatgtcattaatcgcaggcactgtattactcagtggttgtgattctgcactcctcgacccaaaaggacagattggactggagcaacgctctctgattctgacggcctttggcctgatgatgatcgtcgttattccagccgtcttgatggcagtaggatttgcctggaagtatcgtgcgagcaataaagatgcgaagtatagcccgaactggtcacactccaacaaagttgaagctgtggtctggacggttcctattctgatcatcctgttcctggccgttctgacctggaaaacaactcacgcattagagccgagcaaaccgcttgctcacgatgaaaaacctatcaccatcgaagtcgtttcgatggactggaaatggttcttcatctatccggaacaaggcattgctaccgtcaacgaaatcgccttcccggcgaacgtaccggtacacttcaaagtgacctccaactccgtgatgaactcgttctttatcccacgtttaggtagccagatttacgcaatggccgggatgcaaactcagctgcacctcatcgcgaacgaacctggtacttacgacggtatctccgccagctatagcggcccgggcttctcaggaatgaagttcaaagctatcgccacgccggatcgtgcaaccttcgatcagtgggtagcgaaagccaaacagtctgcgaacgctatggactccatggaaacgttcgacaaactggctgcgcctagcgaatacaacaaagtggaatacttctctaacgtgaaacctgatttgtttaaagatgtggtgaacaaatttatgtctcacgagagcatgaacatgtctaaacccgagggcgagcatgcagcgcacgaaggaatggaaggcatggacatgagccacgcggaaaccgctcactaa

SEQ ID NO: 259397 - DNA, 231 bp, Klebsiella pneumoniae
atgccgcgcacgctttttcctcaggcctacgggctggcattagttattctggcgattggctgcctgatactggcgatatggctactgctgctggtcctcaacgcgctggattacaccaccttttccttcctcgcgggcctgcttgaggttgccgttcttaccgccgttgcgggtattttgctcggcgcgttccttgactacctcgcattgcgcaaaaccgagttgatttaa

SEQ ID NO: 259398 - DNA, 1251 bp, Klebsiella pneumoniae
  misc_feature (1108)..(1117): n is a, c, g, or t
atgtccaatcattatttacgcattttcacgcagccaaaatcagctatcctgctgattctcggtttcgcctctggattaccgctagccctgacctccggcacgctacaggcgtggatgaccgttgaaaacatcgatctcaaaactatcggttttttctcgctcgtcgggcaggcctacgtctttaaattcctctggtcgccggtaatggaccgctatacgccgccgtttcttggtcgtcgacgcggctggctgctggcgacccagatcctgctacttattgccattgcggcgatgggattccttgaaccttccacgcaactacgctggatggcggcgctggcggtcgttatcgccttttgctccgcctcgcaggatatcgtatttgacgcgtggaagaccgacgtgctggccgctgaagagcgaggcaccggggcggcaatcagcgtgctgggctatcgtctggggatgctggtttccggcgggctggcgctatggctggccgatcgctggctgggatggcagggaatgtactggctgatggccgcactgctaatcccctgcattattgctactctgctggccccggaacccagcgacgtcattccggtgccgaagacgctggagcaggccgtcgccgcaccgctgcgcgacttcttcggccgcaataatgcctggcttattctcttgcttatcgtcctttataagcttggcgacgcgtttgccatgagtctgaccaccaccttcctgattcgcggcgtcggttttgatgcgggcgaagtgggcatggtcaataaaacgctcggcctgttcgccacgattgtcggtgcgctttatggcggcgtgcttatgcagcgcctgacgcttttccgcgcgctgctgattttcggcctgctgcagggggtatccaacgccgggtattggctgctctcaattaccgataaacaccttttctccatggcgacggcggtgtttttcgaaaacctgtgcggcggaatgggcacggcggcattcgttgcgctgctgatgacgctgtgcaataagtcattttcagccacccagttcgctttgctctcagcgctctccgccgttgggcgcgtatatgtggggnnnnnnnnnnggtgggcgcgtatatgtggggcctatcgccggctggtttgtcgaagctcacggatggcctgctttctatctcttttccgttgttgctgcggttccggggattttgctgctgttaatttgtcgccgtacgcttga

SEQ ID NO: 259399 - DNA, 315 bp, Klebsiella pneumoniae
atgatacgtgaacagatcgaagcaaaacttagggcagcgttcgacccggtgtatcttgaagtcgtggatgaaagctatcgccacaacgttcctgcgggctctgaaagtcattttaaagtggtgttggtaagcgatcgcttccttggcgagcgttttcttaatcgtcaccgtatgatttacggaacgttgactgaggaactatcaagcaccgtgcacgctctggagttgcatacctacacaatcaaagagtgggaagggctacaggataccgtctttgcttctcctccttgtcgcggagctggaagtatcgcgtag

SEQ ID NO: 259400 - DNA, 165 bp, Klebsiella pneumoniae
atgctgcggcacgatggcgataccgccggtgccggtaaactggccgccgagcggcgccaggacgccggtcagggtatcaagcagggagcttttgccgcggccgttggcgccaagtaccgcccagatatcaccggagcggcactgcaggttcagcggggcgaatag

SEQ ID NO: 259401 - DNA, 1005 bp, Klebsiella pneumoniae
atgcttagtcatcgtcatccggctctgctgcactgtaccctcgcgctggtgacgctcatgattgcactcgcctctatctgcctcgggcagtatccgttaagccaggcggaggtttttcgccagctggcgcatctttcccccctcgacggcgtcgccggtcaggtggtgtggtcggtcagactgccgaggatcgtgatggcgctgctggccggcggcgcgctggggctgtgcggggccaccttacaaggggtgttccagaacccgctggtcgacccgcatatcatcggcgtcacctccggctccgctttcggcgggacgctggcgattctgctgggactcaatgccgcgctgatgatgacctcgacctttctcttcggccttgccgcgctgatgctggtctatctaatcgccgcgctgcaggggcgcgaaagtaccctggtactgatcctctcaggaattatcctcagcggcttttttgccgccctggtgagcctgatgcagtatctggccgataccgaagaaacgctgccgaatatcgtcttctggctgctcggcagctttgccaccgccagttggcataaagtcctgctgatggcgctaccggtagcctgcgccgcgatggtgctgttcaggctccgctggcggattaacctgctggcgctggaggaaaaagatgcccgcgggctgggcgtttcggtgaccgcgctgcgtcgcggggtgctggtatgctgcgcggtgctggtcgccgctcaggtggcggtcagcggcagcatcgcatgggtcgggctggtgatcccgcatctggcgcggctgctgaccggcgccgatcaccggcgtcttctccctatcgccttctggctcggcggcggttttatgatcgtcgtcgatgaccttgcccgcacgctaacccaggccgaaattcccattggtattatcaccgcgctgcttggcgcgccgctgttcacctggctgctggtgcagtcgcgacgcacgggcgcgcgctga

SEQ ID NO: 259402 - DNA, 1665 bp, Klebsiella pneumoniae
atgacaacatccaatcctgatatccagcccgccgtacagcaccgcgcgcaggtcgcgattgccggcgccggcccggttggcctgacgatcgccaactacctcgggcagatgggcgtcagcgtggtgctgatcgagaagctcgagtcgctgatcgattatcctcgcgccatcggtatcgacgatgaggcgctgcgggcgatgcaggccgtggggctggtagataacgtgctgccgcataccacgccgtggcacgcgatgcgctttctcacccccaaagggcgctgctttgccgatattcagccgatgaccgacgagtttggctggtcgcgccgtaacgcgtttattcaaccgcaggtcgatgccgtgctgtacgacggactcagccgctttccccacgtgcgctgcctgttttcccgcgaagttgaagcctttagccagaatagtgacggtgtcacgttaaatgttaaaggcagcggcggcgagcgggaaaccgttcgcgccgactggctggtggcctgcgacggcggagccagctttattcgccgcacgctgaatattccttttgaagggaaaaccgcgccgaatcaatggattgtcatcgatattgccaacgatccgctggcgacgccgcatgtctatctgtgctgcgacccggtgcgcccgtacgtctccgccgcgctaccgcacggcgtcaggcgtttcgaatttatggtcatgcccggcgaaaccgaagcccagctcagcgagccgcacaagatgcgccagctattgagcaaagtgctgccggaccccgataacgtcgaactgattcgccagcgcgtctatacccataacgcacgcatcgccgaacgctttcgcgtcgatcgcgtgctgctggcgggcgacgcggcgcacatcatgccggtctggcagggacagggttacaacagcggtatgcgcgatgcttttaacctggcctggaaactggcgctggtggtgaacggcaaagccggagaggcgctgctggacagctaccagcaggagcggcgcgatcacgccaaagcgatgatcgacctgtcggtcaccgccggcaacgtcctggcgccgccgaaacgctggcacggcgcggtgcgcgacggaatttcgtggctgctgaattatctgccgccggtcaaacgctacttccttgaaatgcgtttcaagccgatgccgcagtaccgcgacggcgcgctgctggcggaaggcgaaggcaaaacgtctccggttggcaaaatgtttatccagccgaaggtgacgctggaaacggggcaggtgacgctgctcgatgaggtgataggagccaggttcgccattatcgcctggggctgcaatccccggtgggggctcaccgacgagcagattgcgcgctggcgcgcggtcggggtgcagttcatccaggtcgtgccggaagtacagattcattgcgatcaggacaacgtgcccggcgttatccgcgtgggcgatacgcaaaaccgcctgaaaaactggttcgcgcagcacgataccgccatcgccgtggtgcgtccggatcgcttcgtcgcgaccgtggctatcccgcaaaccctcggcaaaaagctcaacgcgctggcgagcaagatgcagctggcctccgcgcaagcgccaaccgtgattgaacaggtggcctga

SEQ ID NO: 259403 - DNA, 135 bp, Klebsiella pneumoniae
atgccctccttcatcaccgcgtgggcgcaggcctccgccagcgccgtcggcaccggcagaacgccgctggcgctgctgaaatcgccgatagaagttgcgccgatgcctaaacagaacggcggcatcacatcgtag

SEQ ID NO: 259404 - DNA, 459 bp, Klebsiella pneumoniae
atgaaccgacaatcctggctgctgaatctcagcttgctgaaaacccacccggcctttcgcgccgtctttatcgcccgctttatctcaattctgtcgcttggcctgctgggcgtggcgatcccggtacagatccagatgatgacccattcgacctggcaagtggggctgtcggtcaccttaaccggcggttcgatgtttgtcggtctgatgatcggcggcgtgcttgccgaccgctatgagcgtaagcgtctgatcctgctggcgcgcggcacctgcggcatcggcttcgtcggcctgtgcctcaacgccatgctgccggaaccgtcgctcatcgctatctatctgctgggcatctgggacggcctgtttgcctcaatcggcgtgaccgcgctgctggcggcgaccccagcgctggttggccgggaaaatctgatgcaggccggggcgatcactatgtag

SEQ ID NO: 259405 - DNA, 369 bp, Klebsiella pneumoniae
gtgaaactcttccatgagctctttcgcgcgatcttcacgctgttcggtgctcaggtcgtcgcgaatctgcaataccgccatcaggttatcgtatacgctcaggcggcgaaaaatagaggcttcctgagggagatagccgattccgcgacgcgcgcgcgcgtgcagcggcagcaggctaatatcttcgtcatcgatgataatgttccctgcgtcgcgcggtacgatgccaacgaccatatagaaggtggtcgttttaccggcgccgtttgggccgagcaggcctacaatctcgcccgagttcacggtcagactgacatcttccacgacgcggcggcctttataggctttagcaaggttctttgcagttaa

SEQ ID NO: 259406 - DNA, 924 bp, Klebsiella pneumoniae
atgagcgtattaattgcattgttgcaggcgctggtgctgttcgccgtcgcgccactgttgtccggggtgacccgcgtcgcccgcgcgcgtctgcataatcgccgcggtccgggcgtactgcaggagtaccgggatatcctgaaactgctggggcgccagagcgttggcccggatgcctccggctgggtcttccgcctgacgccgtacgtgatggtcggcgtgatgctgaccatcgctaccgcgctgccggtggtgaccgttgattcgccgatggcggggctgggcgacctgattaccctgatctacctgttcgccatcgcccgtttcttcttcgctatctccggcctcgataccggcagcccgtttaccgctatcggggcgagccgtgaagcgatgctcggcgtgctggtggagcctatcctgctgctcggcctgtgggtcgcggctcaggtcgccgggtccacccatatcagcagtatcaccgacaccatttatcactggcctgtcgcccgcactcttccgctgattctggcgctgtgcgcctgcgccttcgccacctttatcgaaatgggcaagctgccgttcgacctggcggaagcggagcaggagcttcaggaaggcccgctctcggaatacagcggtagcggcttcggcgtgctgaagtggggcatcagcctcaagcagctggtggtcctgcagatgttcgtcggcgtatttatcccgtggggacagatgaccagctttagcgtcggcggtctgctgctggcgctggtggttgccgtcgtcaagctggtgcttggcgtgctggtgattgcgctgttcgaaaacagcatggcgcgtctgcgcttttgcgccacctcccgcgtcacctgggccgggtttggttttgcctttttagccttcgtctccttgctggtggcgtga

SEQ ID NO: 259407 - DNA, 609 bp, Klebsiella pneumoniae
gtgaaccgttttgtaattgctgactccaccgtctgtatcggctgtcgcacctgcgaagccgcctgcgctgagactcaccgccagcagggcctgcaagccatgccccggctacggctgatgcgcaatgaaaaagaatccgcgccgcagatgtgccaccactgtgaagatgcgccctgcgccgccgtctgcccggttaatgccattaatcgcgtcgatggcgcggtgcagctcaatgagagcctgtgcgtaagctgcaagctgtgcggcatcgcctgtccgttcggcgccattgagttttccggcagccgcccgctggatattccggctaacgccaatacgccgctggctcccgccgcgccgccggccccggcgcgcgtcagctcgctgctcgactgggtgccgggcgtacgcgctatcgccgtcaaatgcgacctgtgccacttcgatgaggaaggcccggcgtgcgtgcgcacctgcccgaccaaagcgctgctgctggtggatatccgcgatatcgcccaggccagcaagcgtaagcggcagctgacttttaataccgacctcggcgatctgtcgctgttccaggcgcaacaaggggacgtgaaatga

SEQ ID NO: 259408 - DNA, 732 bp, Klebsiella pneumoniae
atgacgttcgccgaggtcgaaacttgccggacacaccaggttgccgacgttttcgataaacagaatgccgtggtccgccagcggcaggcgcggcgcggcgtcggcgatcatctgcgcgtcgagatggcagcctttgccggtgttgacctgaatcgccggagtgccggtggcgcggatgcgcgcggcgtcgttcaccgtttgctgatcgccttcaatgaccgcgcaggcggttttctctttcagccgcagcagggtttccgtcagcagggtggttttgccggagccggggctggagaccaggttcagcaccagctggctcctggcggcgaagcgcgcgcggttgcgggcggccagacggttgtttttatccaggacgtcgatttccacttccagcatccgccgctggctctggcccggcgcatgggtacccgcttcgccatgaccgtagtgcaggtcgccagtctccgagcgggtgggggaaaagttatcggttttcacgccggtaatggtcatcatctggcgcggggcgggcgcgaagggggcgctgcgaaacgccgaatgcgggttatgctcgtcgccttctatataaaggttgccttcaccgcagccgcaggttgtacacataatcttattactccacttctagtcgctgaatctgtaagccgtcatccgccacaatttgcagccggtcgctctgacactgcgggcagcggcgcacgtgctgtgagatga

SEQ ID NO: 259409 - DNA, 258 bp, Klebsiella pneumoniae
atgatgcaacatcaggtcgctttacaggcacgtttcaacccggaaaccttagagcgcgtgctgcgcgttgtccgccaccggggtttccacatctgcgcaatgaacatggaaaccgcgccggacgcacagaacataaatatcgaattgaccgttgccagcccgcggcccgtcgaattactgtttagtcaattaagcaaactggtcgacgtcgcctgcgtcgagatccagcaacccacatcacaacaaatccgcgcctga

SEQ ID NO: 259410 - DNA, 504 bp, Klebsiella pneumoniae
atgctgattcgagtagaaattgggattgatgcaccgggaatcgacgcgctattgcgtcgtaccttcggcagcgatgcggaagcgcagctggtgcacagcctacgtgaagatggcctgatcacgctgggcgtggtggcgacggatgacgaaggtcaggtcgtgggctatgcggcttttagcccggttgccgttgaaggcgaagagctgcagtgggttggactggctccgctggcggtcgatgaaagctaccgcggtcaggggatcggtcgtcagctggtctatgaagggctcgattcactgaacgagtttggctatgccgctgttgtcacccttggcgatccggcgctttatggtcgtctgggctttgaacccgcagcgcgttttaatctgcactgccgttggccggatagcgcggaagctttccaggttcaccgcctggccgataacgcccttgatggcgtcagcgggctggtcgaatacagcgaccactttaaccgcttctga

SEQ ID NO: 259411 - DNA, 498 bp, Klebsiella pneumoniae
atgacgctcgtacaatcgctgctgaacggcaacaaaattctctgttgtggtaatggcacttccgccgccaacgcacagcattttgctgccagcatgattaatcgtttcgaaactgaacgccctggtttacccgccattgcactaaataccgataatgtggtcttaaccgcaattgccaacgatcgcctgcatgatgaaatctatgccaagcaggtgcgtgcgttgggacacgccggcgacgtactgctggcgatttctacgcgcggcaatagccgggatatcgtgaaagccgtggaagcggcggtcacccgcgatatgactatcgtggcgttaaccggttatgacggcggtgaactggctggcctcttagggcagcaggacgtcgaaatccgcattccctcgcatcgcagcgcgcgaattcaggaaatgcacatgctcaccgtcaattgtctgtgcgatttgatcgataacacgctttttccacaccaggacgattaa

SEQ ID NO: 259412 - DNA, 552 bp, Klebsiella pneumoniae
  misc_feature (254)..(263): n is a, c, g, or t
atgtctgtaattaagatgaccgatctggatctggctggtaaacgcgtttttatccgtgcggatctgaacgtaccggttaaagaagggaaagtaaccagcgatgcgcgtatccgtgcttctctgccgaccatcgaactggccctgaaacagggtgcgaaagtgatggtcacttcccacctgggtcgtcctaccgaaggcgagtacaacgaagaattctctctgctgccggttgttaactatctgaaagacaaacnnnnnnnnnngacaaactgtctaacccggtacgtctggttaaagattacctggacggcgttgaagtcgctgccggcgagctggtggttctggaaaacgttcgctttaacaaaggcgagaaaaaagatgacgaagcgctgtcgaaaaaatacgctgcgctgtgcgatgtcttcgttatggatgcgttcggtactgctcaccgcgcgcaggcttctactcacggtatcggcaaattcgctgacgtcgcttgtgcaggtccgctgctggccgctgagctggacgccctgggtaaagcgctga

SEQ ID NO: 259413 - DNA, 5283 bp, Klebsiella pneumoniae
gtggagatcggcgaaacgtttgattttcagctgacgctgttgcccgataatcgccactgcctccatgtcaatattgacctgctgattatggatgcctccagctttacactcttcttcgatgagcttaatgctctgctggcgggcgaatcgctgccggctatcgacccccgctatgatttccgctcctatttgctgcaccagcagaaggtgcatcaaccgctgcgagacgaagcccgcgcgtactggctggcgaaagcgcctgcgcttcctcctgcgccgctcttgccgctggcctgcgaccccgccgcgctacgtgaagtccgtaatacccgacgccgcatgattgtcccggccaaacagtggcatgcgttcagccaacgggccggtgagtacggcgtcaccccgacaatggcgctggcaacctgtttttccgccgtcctggctcgctggagcggcctgacgcggctgctgctcaacgtaacgttattcgaccgccaaccgctgcacccggcggttagcgctatgcttgccgacttcaccaatattctgctgctggataccgcctgcgacggcgataccgtcagcggcctcgcgcagaagaatcagctgacctttaccgaagactgggagcatcgtcactggtccggcgtcgaactcctccgggagctcaaacgccagcagcgctatccccacggggccccggtggtatttaccagcaatctgggacgctctctctacagcagccgcgcggaaccgcctttgggcgagccggactggggcatctcgcagacgccgcaggtgtggatagatcatctggccttcgaacatcaaggcgaggtctggctgcaatgggacagcaatgacgccctgttccctccagcattagtagcgacgttgttcgcggcctactgccagctgattaaccagctctgcgaagatgacagcgcatggcaaaaaccgttcccggataccctgcccgccaggcagcgcgcgattcgccagcgggtcaacgcgaccgacgcgcccattcccgcaggactgctgcatgaaggcattttccgcatcgccctccagcagccggaggcgctggcggtcacagatgctcattatcagtggaactaccgtgaactgacggactttgcccgccgttgcgccggcaggttaatcgcgtgcggggtgcagccgggcgacaatgtggcgatcggcatgtcaaaaggcgcgggacagctggttgcggtgctggccgtgctgctggccggggcggtctacgttccggtttcgctggaccagcccgccgcgcggcgcaagaaaatctatgctgacgccagcgttcggctggtgctcatttgccagcacgacgccagcgcgtggtcagacgatattcccctgcttgcctggcagcaggccattgaggatgaaccgatcggcaacccggtggttcgcgcaccgacacaaccggcctacattctctacacctccggttctaccggcacaccgaaaggcgtggtcatttctcaccggggagcgctcaacacctgttgcgatatcaataaccgctatcaggtaggtccaggcgacagggtgctggcgctgtccggcctgcattttgatttatcggtatatgacatttttggcgtcctgagcgccggcggcgcgctggttatggtgatggaagagcaacggcgcgatccccgcgcgtggtgtgaactgatccaacgccatcaggtcacgctctggaacagcgtcccggcgctattcgatatgctgctgacctggtgcgagggttttgccgacgctgcgccggcaaatctgcgcgcggtaatgctttccggcgactggatcggtctcgatcttcccgcccgctttcgggcctatcggccgcaagggcagtttatcgccatgggcggcgccaccgaggcgtctatctggtctaacgtctgcgaggtcagagaggttcctgagcactggcgcgccatcccctacggttttccgctggctaaccagcgctaccgggtagtcgatgagcggggccgggactgccccgactgggtgcccggcgaattgtggattggcggcctcggggtcgctgaaggctatttcaacgatcccctacgcagcgagcagcagtttttgatgcaatcgggcgagcgctggtatcgcaccggcgatctcggttgctactggccagacggtaccttagagttcctcggccgccgcgataagcaggtcaaggtcgggggatatcgcatcgagctgggcgaaattgagagcgcgctcggccaggtggcgggcgtgaaacaagccaccgttcaggcgatcggggagaaagagaagaccctggcggcctgggttgttcctcagggggaggctttttgcgttccccatcatcgcgatccgttgctgccgcaggaatggcataccctggcaggaacgctgccctgctgcgcctgcccgccagaaatctccgccgctcaggtcgctgattttctgcagtatcgtctgttaaaactgcatccggcccacgcctctgacgtcgatccgctctccctgatcgattcgctcgctatccagccgcgctggcaggccgtggtggaacgctggttagcctttcttgcggctcaacagcggctgcagcccgccgctgagggttatcaggtctgcgcggcagaagcgccggaaaagcgccatccttcgttcagcgggcatgacctcaccttaatgcagattcttcgcggcgcgcgccacgaactgtcattactgaacgatgcgcggtggtcgccggaaagtctggctttcgaccatccggccagcgccttgtatattgaggagctggcgacaatgtgccaacagctttcccgacgtttacagcgcccggtacgcctgctggaggtgggtgtccgcaccgcccgcgccgcagagtgcctgttgtcccgcctcaacgctggcgaggttgagtatgtcgggcttgaacatagccaggagctgctgctgagcgccagacagcggcttgccccatggcctgatgcccgtctggccctctggaatgcggagacgctggcggcgcacgcgcattcggcggacattgtctggctgaataatgccctgcatcgtttgctgccagaagatcccggactccttacgaccttacaacggctcgccgtccccggagcgctgctctacgtcatggagtttcgccagttgacgccgtctgccctgctcagcacgcttctgttaaccgctggacaaccggaggctttactgcataacagcgcagcgtgggcaacaatattcagcgccgccgacttcagctgtcagcatggcgatgaaatcggcggattacaacgcttcctcgtccagtgcccggccagccagatgcgccgggacccgcgtaaactacaggccgcccttgccgaacgcttgcccgggtggatggtgccgcaacggatccacttccttgacgctttcccgctgaccgcgaacgggaaaattgactatcaggcgctgacccgtcgccttacccctgaggcggaaacactggccgaagcggatttacctcagggcgatacggaaacatgcgtggccgccatctggcagcagctgttgtcgatcggcgccgtcacccgggagaccgactttttccagcaagggggcgacagcctgctggccacccgtctgaccggacagctccatcaggcgggttataccgcgcaattaagagatctgtttaatcacccccgactggcggattttgccgctaccctgcgtaaaaccgacctcccggtcgaacagccattcacccactatcctgaagatcgctaccagcctttcgcgcttaccgacgtgcagcaggcctacctggtcggacggcagccggggtttgccctgggcggcgtaggctcccacttcttcgttgaatttgaggttgccgatctggatatccgccggctggagagggtctggaatcgtttaatcgtccgccacgatatgctgcgcgccgttgttcgcaatggacagctgcaggttctcgaacagactcccccctggatcatacccgcgcacgtttgcccaacgccagacgaggcgctgcggctacgtgaaaaactggcgcatcaggtactcaaccccgaaatctggccggtattcgatctccaggtcggatacgtcgacgggatgcccgcccgactctggctgtgcctggataacctgttgcttgacgggctaagcatgcagatcctgctggcggagctggaacacggctatcgctatccgcaacagctgccgccgccgctccccgtcactttcagggattatctgcaacaacccgcgctgcgggcgccagacccagacgccctggcctggtggcagactcagctggacgatatccctccggcgccggcgctgccgcttcgctgcttgcctcaggacgttgcgacgccgcgctttgcgcgcctgaacggggccatggacagcgcgcgctggcgccgattgaaacagcgggcggctgaagcccaccttaccccgtcggccttactcttatcggtatggtcaacggtgctctcggcatggagcgcgcggcctgacttcacgcttaacctgacgcttttcgaccgccgtccggtgcatccgcaaatcaaccagattctgggcgacttcacctcgctgatgctgctgagctggcggcctggcgacaactggctgcacagcgcgcagcgactgcagcagcgcctgagccagagcctcaattatcgcgatgtatccgccatccgcgtgatgcgtcagctggcgcaacggcaaaatctgcccgccgtgaccatgccggttgtcttcaccagcgcgctcggcttcgcgcaggataagtatggcgaattgctcaatcggatggccgaggaagagagctgctggcagctgccgctcgccgcgctggttccccccgttaaactcgcggaaccaagccccgcttccgctccgcgcggttgccctgagcgcccggtgtccggcgtggcggcggacgagagcactgtccgtctgatttgcgacgcctttcgcgaggtggtgggcgaatcgattatgcccgcggataacttttttgaggcgggcgccacgtcgctaaatctggtgcagctgcacattttgttacaacgtcacgaattttccacgctgacgctgcttgatctctttacccactcctctccagccgctctggccgaataccttaccggcgtcgcgatggaggagaaagccccacgctctcgcccggttcgccgacgccagcggcggatttag

SEQ ID NO: 259414 - DNA, 1179 bp, Klebsiella pneumoniae
atggtgcatcgcggtcaggccgccttcaccgtcgtcttcaaacatcgggaagtcgatcacccacagcggcgcccatttatcttcatcggtcaggttcagatctttacccagcttcagacgcagcgcgcccagcgcatcggcaaccacttttttgttatccgcgccgaagaagatcatatcgccatcctgcgcgccggtgcgctcaaggatcgcttcaacgatgtcggcgttgaggaatttagccaccgggctgttgataccttcaaggcctttcgcccgttcgttgactttaatgtatgccagacctttggcgccgtagatttggacaaacttaccgtattcgtcgatctgcttacggctcagcgaagcgccgccaggcacgcgcagcgcggcaacgcggcctttggcgtcgttagccgggcccgcaaagacggcgaattccaccgctttcaccagatcggcgacgtccaccagctccatcgggttacgcaggtccggtttgtcagaaccatagcggcgctcggcttcggcaaaggtcatgatcggaaaatcacccagatccacgcccttcacttcctgccacagattacgcaccagcgcttccatcacttcgcgcacctgcggggcggtcataaaggaagtctcgacgtcgatctgggtgaattccggctggcggtcagcgcgcagatcttcgtcgcggaagcatttaacaatctgatagtagcggtcaaaaccggacatcatcagcagctgtttaaacagctgcggagattgcggaagcgcgtagaatttgcctttatgcacacgagaaggcacgagatagtcgcgcgcgccttccggggtcgctttggtcagcatcggggtttcgatatcgaggaaaccgtggtcgtccataaaacggcgaacgaggctggtaatcttcgcgcgggttttcaggcgctgcgccatttccggacgacgcaggtccaggtaacggtatttcagacgcgcttcttcggtgttgacgtggttggaatccagcggcagcgcttcagcacggttgatgatcgtcaggtcggttgccagcacttcaatggcgccggtggccatatcattattgacgttcttttcgtcacgcgcgcgcacggtaccggtgacctgaatgcagaactcattacgcagttcggaggccagctttaa

SEQ ID NO: 259415 - DNA, 303 bp, Klebsiella pneumoniae
gtgcgcaacgccctgcgctactcgcatacgaaaatttccgtcagcttctcggtggataaagacgggattacggttaacgtcgatgacgacggcccgggagtcagcccggaagatcgcgaacagattttccggccattctaccggaccgacgaggcgcgcgaccgcgagtccggcggcaccggcctggggctggcgattgtcgaaaccgctattcagcagcaccgcggctgggtgaaggccgacgacagcccgctgggtggtctgcgtttaacaatctggctgccgctgtataaacgaacctga

SEQ ID NO: 259416 - DNA, 813 bp, Klebsiella pneumoniae
gtgcggatcccagtttgctacggtttcaccgccggcaacctgctcaccatcacctttcgccataacggagccgtaaggcactttatagctctctttggtacgaccgaattcgtcgatcagtttcagctcggtattacgggacgtaataaccagcttaccgctggagttcacaaccgacttcgcattgctcagacggatgctacctttgtttttcacctggatgctggactcagcagccgcacgagatgccgcaccaccgatgtggaacgtacgcatcgtcagctgtgtacccggctcaccgatggactgtgccgcgataacgccgatagcctcacctttgttgatgatgtggccacgcgccaggtcacgaccgtagcagtgcgcacatacaccaaagtcggtgtcacaggatacaacggaacgcactttgacggagtcaacggagttctcttccagcagatcgcaccagtgctcatgaagcagcgtgttgcgtggaaccagaatgtccgccgtacccggcttcagaacgtcttcagcggtcacacgacccagtacgcgatcgcgcagcggctctttaacatcgccaccctcgataaccggggtcatggtgatgccttccagggtgccacagtcgtcttcagtaacgaccaggtcctgtgcaacgtcaaccagacgacgggtcaggtaaccggagttcgctgttttcagtgcggtatccgccagacctttacgcgcaccgtgcgtggagatgaagtactggagtacgttcagaccttcacggaagttcgcggtgattggcgtttcgatgattga

SEQ ID NO: 259417 - DNA, 1101 bp, Klebsiella pneumoniae
atgaatattaactttaaacatatccttcctttattgtcgtcattttttatttcaggatgcgactctgatggaataagcaaggtaaagtctttcgtatattacgacattgacgactcaatgactgttggtaaagccttcgatacaaggagtgattgcatcaatggcacatggagtgaaaaagaggataatcgaggcagaaccatcgtcacatatacctgtgatattagtgaaagtggcctaaaaataataaattcagccattatgcaagaacctgaagataaggctgaatattctataacacaaaataacaacagcataaaatcaaccaatgaatcactagaggaatacaaacagaaaacgcctctggtggaaaaaacaaaagaggtcataatagatcatataagaaagctaaacagtgcttttaatgaagatccaatgatatatagcaaactcacaattagcccttatttagacagaatgctatatctaaaggaccataatgacaatgcgctaaatgaaatttgtggtgggtacgaatacattcaatctgccgatagttacagttggcgtgatgtaagtgaagagtatgcaaaagaatcatgcgaaaagcatatatataaagtatatcaatcatttaagaaaaatgcatcaccattaataactaaaaacttccccggtttctacgaacgtgtccccccctgtgagaacgcagatgaatgcataaaaaaaacaaatatatactttgatgataactttctaaacatctacaaaagaagccaagatagagcacctcaaataatttctgatttaaaaaaacacaatatagaaataggtgaaaagttaaatgattgcagaaaaaaactaaatatctcagatgccaaattaacctattactggtttgtaacagacaccggaggagttgattatttagatggggtgttgacatataattttcagggaaagaatagggctgaaaactttcataaacaactattgcaatatgcatacattaactacagcaaaaatcaaatacctcgggactttgtaacatcaataaaaaatagtatttattataaaatagaagattgcactaagttttag

SEQ ID NO: 259418 - DNA, 1551 bp, Klebsiella pneumoniae
atggcaagctaccattgcactgtcaaagctggagcaaaaggcagtgccttaaaacatgctgattacatttccagatccggcgaatataagagttacaaatcgcgggaggatctggaattttcgtcatccggtaacatgccatcatgggcgaagaaaaatcccgaagagctatggaaagccgcagatgaatttgaacgaaaaaacgggactgcataccgtgaaattgagatcgcgttaccgcgtgaactgacacgcgaacaacggatagaacttgttgaagatttcgtgcaaaaggaacttggcgatcgccatgcctaccagtacgcgatccacaatccgccaggtgcaatcgacggaaaggaacagccacacgcgcatatcatgttttgcgagcggattaatgatggtattgaacgcgatccacagcaattttttaaacgtgccaacagcaaatcaccagagcggggaggcgcaaaaaaagcgagtattccccagacagccggagagcgaaaagccgcccttgttgcgctgcgttcccgctgggcagatgtgcagaatgagcaccttgcgcgacacggtcacgagtcgcgcgtagatcatcgttctctgaaagaacagggtatcaatcgcacgccggaagttcatcttggccccgttcaggccgccagtctgaatggggagcagattgttgcaatccaggaacggaggaatgccgagcgggaactcaagaccgccagagatgccgcaaatgccattcagcaggaacaggagcaaaagcaaaaaatcaaggcagttgagcctgttcgttcagcccgttcaccggagttattgcttcagtaccgcaaggttatgaaaatggtcattcagggagaggcaaggcttgctcgtttaggggatgccaatcccaatgcgctcaaagaacataagctgcttcagaatgcgaaagctaaaaaagactctctttccgaatggagtagacgaatatatgaaggggcacggtatttagacaaactggggcgtaatgttgtttccgcacaaagggagctgcgggagctacaggaacaacgcaatgctttgaatgggattcgtggcctgtttcggggggctgacaaaagggagattgatgcgcgtattctggagcaaaaaagtgtgctggaaaccgctgaacatgaaaggaatgaattcaggaacaagctacagcaagccgaatccgagtgggacaaagaaaacgctgcttttaagcgtaccgagggatataagtacgttggggagctggacaggtacagagaacgcgagattctggcggcggcatctttagagaacaccaggcaaaaggttgctgaagaggtatccgttgcccgtagccagatgttatctctggagcctgaactcagtatatctggagatgaaaaagctcaaatgcgacatgagttactggcagaaatggcgcaggaacggcagcaacaggaggaaaaagcactgcgtatacagcgatcctggtccaggggggcatcacgtagtaacgaacgtgatcaagatatggagcgttga

SEQ ID NO: 259419 - DNA, 447 bp, Klebsiella pneumoniae
atgacaaatcgtgaagagtggttaagtgtaaaaattgcctacatcaacggactgaaatcaccatcagagcagcagagattacttgtgttactggcagagaaaaaaaaccgaacaacgacggatgaaaaaacgttgtccgcactgatacgggcagaaaaaaccgcagagaaagcagccgcagcaaaagccagagtaacggcaatcatagcggcagaacggaaggcagccgcaagggcggaacgaaaggcgcgggatcatgaactctacaaggccgcaggcctcatgattgtggcaggactggtggacagcaaaaccggaaagccaaagtttagtgctgccgaactggtaggcgcactcgcaggaatcgcagagctaccgcacaaccatccaaaatggcaggaatgggaaaaacgcgggaaagagctactcaccaaagacagtgcgtaa

SEQ ID NO: 259420 - DNA, 237 bp, Klebsiella pneumoniae
gtgggcggattcgatgatcacatcgaggcactcgtccagcgtctggttgcgtttcagggtaatcatctgcgagcgggggatcatgatgtcgcggacgcgctggtcggcgatatccattaccccttcgagcatatcgcgcgtatcttcgtcgataaggtcgttttgcccggaatcacggatcagcgccagcagttcatcacggtttttcggttccccgtgaaaaagctggctgagtaa

SEQ ID NO: 259421 - DNA, 699 bp, Klebsiella pneumoniae
atgctcggtcagatactggccggtttccgcgccgatccctggcaggacgttaaacaccccgtccggcaggcccgcttcgctgtaaatttccgccagcttgagggcggtcagcggggtgacttcgctcggtttgaaaatcatcgcattgccagcggccagcgctggcgccgatttccacagggcgatctggatcgggtagttccacgcgccgatcccggctaccacccccagcggttcgcgacgggtgtagacgaaggaactgtcgcgcagcgggatctggctgccttccagcgccgggatcaatccggcgtaatactccagcacgtcggcgccggtgacgatatcgacggcggcggtttcactgaggggtttcccagtatccagggtctccagtcgcgccagctcgtcgttgcgctggcgcagaaggtcgacggcgcgacgcaggatgcgcgagcgttccatggcggtcatcgccgcccagattttttgcccacgctgcgcgctctcgacggcgcggtcgacatcctcgcgtccggcagcctgaacggtcgccagcacctcgccagtggcagggttgatggtctcgaaggtgcgaccgctggtggccgatgtataaccaccattaatataaagctgctgttctgccattcgggacataacgcctcctcggttatgggttcggtaaatgctgacgaataa

SEQ ID NO: 259422 - DNA, 141 bp, Klebsiella pneumoniae
atgcatcatctggcggcccagccctgcatggttttccccgtgaataaaataagcgacgggttgcgccagcgcgatcagcgcgtcgatatccagctcccgctgggagggcatcgccagaacggggatcgcgccgagtcttaa

SEQ ID NO: 259423 - DNA, 600 bp, Klebsiella pneumoniae
atgaccgggtttgaccgactcagctatcagagccgctggtttcacgtcgcaccggagcgcaagttcctgttctggctgctgctgatggtgctggcttttaccctgcctccgctggggcagggtatcgaaatggcgctgattgccgccttaacctgctggctgctgcgggtctcgccgtggcgctggtgccgttggatggcgctgccgtttggcttcctgctgatcggtgtgctgaccattctgttcagcgttagccgcaatccgcaggatctgctggtgagcctgccgctgggcagcgtctggctgggcatgacgaatctgccgttcccgcagcttattttgctgctcaagcgcggacgggtaccgcggctgctgaccgagcaaatcctgctgacctggcgttttatttttattcttttagacgaagcgctggcgattcaccgtgcgcaaacattacgttttggctaccgtagcgtgccgaagggctatcgttcgctggcgatgctggtaggactgctgtttacccgggtgatgattcgctaccagcagatgagcaccacgctggatatcaaactgtatcagggtgattttcacctttaa

SEQ ID NO: 259424 - DNA, 174 bp, Klebsiella pneumoniae
atgctcatgctcgcgcagggcatcagcgggaaaggtttcgaacggtacgcgacagcaggaagccagctgaatcagcccctgctcgtgcttcttcagcgtgacgctgccgatagctttcagcgccagcggatccaggcgctgcgcctcaagctggcgcgccagcagcgccgctaa

SEQ ID NO: 259425 - DNA, 684 bp, Klebsiella pneumoniae
  misc_feature (580)..(586): n is a, c, g, or t
atgttaagtatatttaaacccgcagcgcataaagcgcgattgccaaccgcggaaatcgatcctttatatcgtcgattacgctggcagatctttatcggtattttcttcggatatgctgcttactatttggttcgtaagaactttgctttagcaatgccctaccttatcgagcaggggttctcccgtggcgacctcggttttgccctttccggtatctccattgcctacggattttcgaaattcatcatggggtcggtttccgaccgctcgaatccgcgcatttttttaccggcaggcttgattcttgccgcgctggtgatgctggtgatgggcttcgtcccttgggcgacctccagcattatggtgatgttcgttctgctgttcctgtgcggctggttccaggggatgggctggccgccgtgcggacgtacgatggtgcattggtggtcgcagaaagagcgcggcggtatcgtgtcggtatggaactgcgcgcataacgtcggcggcgggatcccgccgctgctgttcctgctgggaatggcgtggtttaacgactggcatgcggcgctgtatatgccgnnnnnnngttcctgctgggaatggcgtggtttaacgactggcatgcggcgctgtatatgccggctttcggcgcgattctgctggcgattttcgccttcgcgatga

SEQ ID NO: 259426 - DNA, 255 bp, Klebsiella pneumoniae
  misc_feature (238)..(247): n is a, c, g, or t
atgaccagttatccacgaattttgcgtccttttactttaccgaacggtaccgagcttaaaaaccgcctgttaatggcgccgatgacaacctgtaccggttattttgacggaaccgtaaccagcgaactggtggagtactatcgcgctcgcgccggcagtatcggcaccatcattgttgaatgctgctttatcgatgattacggcctggcgttcccgggcgctatcggcatcgataacnnnnnnnnnnatcgataa

SEQ ID NO: 259427 - DNA, 918 bp, Klebsiella pneumoniae
gtgacggtgaaagtgccggtagggacccgcgtgattgaccagggcaccggcgagacgatgggtgatatgaccaaacatggtcagcgcctgatggtcgctaaaggcggctggcacggtctcggcaacacccgtttcaaatcgtccgttaaccgtactccgcgtcaaaagacgatggggacgccgggcgataagcgcgatctgcagctggagctgatgctgctggcggatgtcggaatgctggggatgcctaatgcgggtaaatcgaccttcattcgcgccgtttccgcggcgaagcctaaagttgctgactacccgttcactacgctggtaccgagcctcggcgtggtgcgtatggacaacgagaagagcttcgtggtggccgacatcccagggctgattgaaggcgcagctgaaggcgcaggcctcggcattcgcttcctgaagcacctggagcgctgccgcgtactgctgcatctcatcgatatcgagccgattgacggttccgatccggttgagaacgcgcggatcatcatcggcgagctggaaaaatacagtgagaaactggcttctaagccgcgctggctggtctttaacaagattgacctgatggataaagctgaggcggaagagaaagcgaaagccatcgcgcaagcgctgggctgggaagataagttctatctgatttccgccgccagccagcagggcgtaaaagacctgtgctgggatgtcatgacctttatcatcgaaaacccgatagtgcatgcggaagaagcgaagcccgcagaaaaagtcgagtttatgtgggatgactaccaccgtcagcagcttgaagaagctgaagtggaagatgatgaagactgggatgacgattgggacgaagacgacgaagaaggtgtcgaattcatctataaacgttaa

SEQ ID NO: 259428 - DNA, 1434 bp, Klebsiella pneumoniae
atgcgatttcccagatttatcatcggattgactgccggtatagcgattagcgctcatgcggcgaatattgacgagtacatcaatcagcttcctgcgggcgcaaaccttgcctttatggcgcagaaggtaggctccccgacgccggagatagactaccatagccagcagatggcgctacccgccagcacccaaaaagtgatcaccgcgctggccgcgctgctgcagctgggtccggatttccgcttcaccacgacgctggaaacgaaaggcagcctcagcggtggcatcctgaaaggagacctgattgcgcgctttggcggcgaccctaccctcaagcgccaggatattcgtaatatggttgccacgctgaagaaagcaggcgtccagcgaattgaaggcaatgttctgatcgatacctccattttcgccagtcatgataaagcgccaggctggccatggaacgatatgacgcagtgctttagcgcacctccggcggcggcgattgtcgatcgaaactgtttctccatctcgctttatagcgcgcaaaagccgggcgatttggcgtttatccgcgtggcgtcttactacccggtgaccatgttcagccaggtgcgcaccctcgctcgcggctcttctgaagcacagtactgtgagctggacgtggttcccggcgatctcaaccgttacaccctgaccggctgtctaccgcagcgcagcgagccgctgccgctggcttttgccattcaggatggcgccagctatgccggcgcgattctgaaagcggagctgaccgacgccgatatcacctggagcggtacgctgctgcgtcagaccctggcaaacgagccgggtaccgtactggcgagtacgcaatctgcgccgctgcacgatttgctgcgtataatgctgaaaaaatcggacaacatgatcgccgatacggtgtttcgcaccattggccatgctcgcttcggcgtgccgggaacctggcgagccggatccgatgccgtacggcagatcctgcgtcagcaggccggtgtcgatctcgggaatacaatcattgccgatggctcaggcctgtcgcgccataacctgatcgcgccagcgacgatgatgcaggtgctacagtacatcgcccagcatgataacgcgctcaactttatctcgatgctgcccctggctggccacgatggctctctgcaataccgcgcgggtctgcatcaggcaggcgttgacggcaaagtttcggcgaaaacgggctcactgcagggggtgtataacctggctggattcattaccacggccagcgggcagaagatggcgttcgtgcagtatttatcaggctacgccgtgcctccggccgaccagcgtaaccgacgtattccgctggtgcgcttcgaaagccgcttgtataaagacctgtatcagaataattaa

SEQ ID NO: 259429 - DNA, 477 bp, Klebsiella pneumoniae; identical to SEQ ID NO: 172701

SEQ ID NO: 259430 - DNA, 333 bp, Klebsiella pneumoniae; identical to SEQ ID NO: 172702

SEQ ID NO: 259431 - DNA, 630 bp, Klebsiella pneumoniae; identical to SEQ ID NO: 172703

SEQ ID NO: 259432 - DNA, 507 bp, Klebsiella pneumoniae
gtgattatcattagcggcgagcaggcgaccagctacgaatatggcttgctgcaggtgccaatctttggcgcgttgatcgccggtaacctggtgctggcgcgccagacttcccgcaaaacggtgcgttcgttgattatcctcggcggctggccaattatgcttggcctgctgatctccgccgtcgctacggtcgcctcgacgcacgcttatttgtggatgaccgccgggctgagcgtttacgccttcggcattgggcttgctaacgccgggctggtgcgcctgacgctgtttgccagcgaaatgagcaaggggacggtatcggcggcgatggggatgctgcaaatgctgatctttaccgtgggtattgaagtgagcaagcacgcctatgagtctggcggcagcggactcttcagtttgctgaatttgcttagcggggtgctctggctggcgatgacggtctacttcctgaaggacaaacgcgtaggcagctccctcgaaccgcagtaa

SEQ ID NO: 259433 - DNA, 942 bp, Klebsiella pneumoniae
atgcaggctttcgccaacccctggctggcggagcaggaagatcaggcgcgtctcgatctcgctcagcttagcgcgcagggcgacaggctcgccttctccaccgacagctacgttatcgatccactgtttttccccggcggtaatatcggcaagctggcggtctgcggcacggcgaacgatgtggcggtgagcggcgcgctgccgcgctatctctcctgcgggtttattctcgaagaggggctggagatggccaccctcgaagcggtggtgagcagcatggcgcagaccgcgcgggaagccggtatcgccattgtgaccggcgataccaaagtggtgccgcgcggggcggcggataagctgtttatcaataccgccgggatcggcgtcatccctaccgatattcgctggggggcgcagcagattagcgcgggagacgtgctgctggtcagcggcacgcttggcgatcacggggcaacgatcctcaatctgcgcgaacagatggggctggacggcgcgctgtccagcgactgcgcggtgctgacgcccttgattcagacgctgcgcgacgtagctggcgtgaaagccctgcgcgatgccacccgcggcggcgttaacgcggtggcccatgaattcgccgccgccagcggctgcggaatagagctgcatgaacaaaagctgccggttagcgataccgtacgcggcgtgtgcgagctgctggggctggacgcgcttaatttcgccaacgagggtaagctgttgatcgccgttgcccgcgaggcggcggaaagcgtacttgcgcatttacggtctcatccattaggccgcgatgcggcgataatcggcgacgttgtgccgcgcgcgggcgtgcgctctgtcggtctgtacggcgtcaaacgcacgctggatcttcctcacgccgagccgctgccgagaatttgttaa

SEQ ID NO: 259434 - DNA, 960 bp, Klebsiella pneumoniae
atgagaaatttcatcctgagacggctgctgcaaacgctgccgatgctgctgctggcttcattcattatctttatgctgtttgccaaaacgccgggcgattttatcgacggcaatatcaccctcaccgccgcccgcgccgccgaactgaaggcgatttacggtctggaccagccgttattcacccactatatccattggcttggccagctgctgcacggcgatcttgggttctcgctgcagtaccagattccggtcagccagctgcttaaccagtacatctggaactccttcctgctggccagcgtggcgctggtgttctactgggggattggtctgacggtcggcgcaatctcggcgttgaagcccaactcgctgttcgatcatctggtgagcgtcgcggtcttcgccgccatgtcgttcccgacctttttcctctgtctgctgctgatcaagtggttcgccgtcgacctgcactggctgccggttggcggcatgacccgtaccggcagtgacgacagcggctggggctatgtgctacaggttgccgcccatctggtgctgccggtgctggcgctggtgatgctccaggcaggtagcctgacccgctattttcgcgccagcatgctcgaggtggtgaaaatggattttatccgcaccgcccgcgctaaagggctacgcgaacgcacggttatcctgaagcacgccttgcggaacgccctgctgccgatcattaccctgctcggcttcgagctgccggggctgttttccggggcgatcatcaccgaaaaagtatttaactggcccggggctggacatattcatattgattcgctggccgcccgcgactacccggtgttaatgggattcaccctgtttctggcggtgctcaccattcttggcaatctgcttgccgatgtgctttacgcgtgggtcgacccgcgcattcgcgtgaggtcctga

SEQ ID NO: 259435 - DNA, 501 bp, Klebsiella pneumoniae
gtgatcgttggcgatagcgccgacgatgtggaacagcaataccagaccaccgccgcgctggtatcgattgaggacgcgctgaattatcttggccgctattttgagcatcacgatttcgcccaatatccgctggatgaggcgttcccggatatcggcgacctcgggcagaacagctttcgcagcaccaccgatgagattaaacgcaacgcccgcgaacgcggcctgaccctgcgccaggtcgcgctggaggcagccagcccgcgaccgcgttttgccggaaccgccgcagaggtggcagatgggctacagcagtggtttgaacagcgcgcggcggacggttttattatccagggcggtacgccggataccttcccgcgctttgtggaccaggtggtaccgatcctgcagcagcgtggattattccgtgaagaatatcccggcaccacgctgcgcgaaagtttagggctggcagagcccgtcaatcaattccaaaaacaataa

SEQ ID NO: 259436 - DNA, 1122 bp, Klebsiella pneumoniae
atgagccttgccgaacagttaattcgctggcggcgcgagctgcatcagtatccggaactttcgctgcaggaggtcgacaccaccgcgcgtattcgcgactggctacaaagcggcggcatcagcctgttgccatatgatctgaaaaccggcgcggttgccgaggttgggagcggcaataaggtgattgccctgcgtgccgatattgatgcgttgcctatcgaagaggcggccagcgtgccgtttcgctcgctgaatgccggcgtgatgcacgcctgcgggcatgatattcataccagcgtgatccttggcgcggccttactgctgaaacaacgcgaagcgcagctggcgggacgcgtccgcattctgttccagccggcggaggagagcttcggcggcgcgaaaaccctgattcgcgccggcgtgctggagggcgtttccgccattttcggtatgcataatgaaccggggctgccggtgggggaattcgccacccgaggcggcgcgttttatgccaacgtcgatcgctttgtgtttaaggtgaccggcaaaggcgctcacgccgcccggcctcatgaagggaaggatgccattctgctggccagccagctggtgaccctgctgcaaagcgtcgccagccgcgaagtgaacaccctcgattccgtggtgctgagcgtcacgcggattcagggcggcaatacgtggaatgtcctgccggaaagcgtcgagctggaaggtacgctgcgcacccacagcagcgaagtccagcagcgggtgaaggcgcgggtgagcgagattgccgccggcttcgccagcgccttcggcgcgcagatcgatgtcttctggtacgccgggccgaccgcgctggtcaatgatgagcgctgggcggctttcgccagccacgtggccgatcgatccggctaccgcacgcaccatgcggatctccatctcggcggagaggatttcgccgtttatcttcagcatattcccggcgcgttcgtcagcatcggcagcgccagcgagtttggtcttcaccatccggcgtttaacccggatgagcgcttaatcgcgccggcggcgcactactttgccgatctggcagagcaggcgttgaaagaactttaa

SEQ ID NO: 259437 - DNA, 1149 bp, Klebsiella pneumoniae
atgaaagcattacattttggcgcaggtaatatcggtcgtggttttatcggcaaactgctggcggacgcggggatacagctgacgttcgcggatgtaaatcaggtcgtgcttgatgccctgaatgcccgtcatagctatcaggttcacgtggtcggcgagaatgagcaggtcgataccgtttccggcgttgacgccgtcagcagcatcggcgacgaagttgtcgagctgattgccagcgtggatctggtgaccaccgccgtcggcccggtcgtgctggaacgcatcgccccggcgattgccaaaggcctggtcaaacgtaaggcgcagggggttactgccccgctcaacatcatcgcctgcgagaacatggtccgcggtaccacccagctgaagggacatgtctttaacgccctgggcgaagaagataaagcctgggttgaagccaacgtcggcttcgttgattccgctgttgaccgcatcgttccgccatcggcttccgctactcacgatccgctggaagtcaccgtggaaaccttcagcgagtggattgtcgacaagacccagttcaaaggcgaactgccgaacatccccggtatggaattaaccgataacctgatggcatttgtcgaacgtaagctattcaccttaaacaccggacatgctataaccgcctacctcggaaaactggcgggtcatcagaccatccgtgacgcgattcttgatgagaagattcgcgctgtggttaaaggggccatggaagagagcggcgcggtgctgatcaaacgctatgcctttgacgcgcagaagcacgctgcttacatccagaaaattctcggtcgctttgagaacccgtatttgaaagatgacgttgagcgcgttggccgccagccgctgcgtaaactgagcgcgggcgaccgtttaattaagccgctgcttggtacgctggaatacggcctgccgcaccggaatctgctgaaagggatcgccgcggcgatgcacttccgcagcgaagacgatccgcaggcgcaggaactggcggcgctgattgccgagaaaggcccacaggccgcgctggcgcagatttctggtctggacgcggcaagcgaagtggtggcggaagccgttaacgactacaacgcgaccaaatga

SEQ ID NO: 259438 - DNA, 225 bp, Klebsiella pneumoniae; identical to SEQ ID NO: 173501

SEQ ID NO: 259439 - DNA, 363 bp, Klebsiella pneumoniae; identical to SEQ ID NO: 173502

SEQ ID NO: 259440 - DNA, 732 bp, Klebsiella pneumoniae
gtggatcggcgttttgtttttgttcagatattccacaaaggctttgataccgccttcgtagtggaaatgatcttctttgccgtcgcgcttgtcgcgcaggcgaatcgacaccccggagttcaggaacgacagctcacgcaggcgttttgccagaatctcgtattcgaattcgacaacgttggtaaaggtttcgtagctcggccagaagcgcaccatggtaccggttttttcggtttcgccggtaaccgccagcggagcctgcggcacgccgtgggcataaacctgacggtgaattttgttatcgcgctgaataaccagctccagcttctgcgacagggcgttaacaacggaaacgcctacgccgtgcagaccgccggaaactttataggagttatcatcgaatttaccgcctgcgtgcagaacggtcatgatcacttccgccgccgagacgccctcttccgggtgaataccggttggaataccgcggccgtcatcctgtacggagacggagttatcgctgtggatcgtaacaacgatgtctttacagtaacctgcgagcgcttcgtcgatagcgttatccacaacctcgaataccatgtggtgcagaccggtgccgtcatccgtgtcgccgatatacatacccgggcgcttacgcaccgcatccagccctttcaggactttgatactggaggagtcataagaattcgacatcaacgtttctcgctcatttaa

SEQ ID NO: 259441 - DNA, 1332 bp, Klebsiella pneumoniae
atgtggatacgccctttgcaggcggagttgagcgataacacgctggcactgtatgcgccaaaccgttttgtgctcgattgggtaagggataaatacctcaataatatcaatggactcctcaatgatttttgcggtgcggatgccccacagctgcgctttgaagtcggcgcgaagcctgccgttcagatgcagagaggcgcggtaagcgtcgccgcggtcgcccctgcgcagcaggttcagacggtgcgcgttgccccgactatcgtgcgtccaggttgggataacgtgccggcgccggcagaaccgacctatcgctccaacgtcaatgtgaaacatacgtttgataacttcgtcgagggtaaatctaaccagctggctcgcgcggcggcgcgtcaggtagcggataaccccggcggcgcgtataacccgctgtttctttatggcggcaccggcctgggtaaaactcaccttttacacgcggttggtaacgggattgtggcgcgtaaacccaacgcaaaagtggtttacatgcactccgagcgctttgtgcaggacatggtaaaagctctgcaaaacaacgccattgaagaatttaagcgctactaccgctccgttgacgccctgctgatcgatgatatccagttttttgctaataaagagcgctcgcaggaagagtttttccatacctttaacgccctgctggaaggcaatcagcagatcatcctgacctcggatcgctatccgaaggagatcaacggagttgaagatcgtctgaaatcacgcttcggctggggtctgacggttgcgatcgaaccgccagagctggaaactcgcgtggcgatcctgatgaaaaaagcggatgaaaacgacattcgcctgccgggcgaagtggcgttctttatcgccaagcgtctgcgctctaacgtacgtgagctcgaaggggcgctgaaccgcgttatcgccaatgccaactttaccggccgggccatcactatcgacttcgtccgcgaagcgctgcgcgatctgttggctttacaggaaaaactggtcaccatcgacaatattcaaaagacggtggcggagtattacaaaattaaggtagcggacctgctgtctaaacgccgctcccgttcggtggcgcgcccacgccagatggcgatggcgctggcaaaagagctgaccaaccacagtctgccggaaatcggcgatgcgtttggcggtcgcgaccataccaccgtcctgcacgcttgccgcaagattgagcagttgcgtgaagaaagccacgatatcaaagaagatttttccaatttaatcagaacattatcctcgtga

SEQ ID NO: 259442 - DNA, 261 bp, Klebsiella pneumoniae; identical to SEQ ID NO: 253047

SEQ ID NO: 259443 - DNA, 615 bp, Klebsiella pneumoniae
atgtacttctaccaaccttcgcaaggacacgggctgccgcacgacccgcttaacgcgattatcggaccacggcctatcggctggatagcttccgtggataatagcggccagcataatcttgcgccgtatagttttttcaactgctttaactatcggccgccgattattggcttcgccagcagcggctggaaagatagcgtgcagaatatcgttgagaccaaagagttcgtctggaacctcgccacccgccccctggcggtcgcgatgaacgaaacctctgccagtatcccgcgtcacgaagatgaatttgtccgcgccgggctcactcccgccgccagccgtctcgtcagcgccccccgggtagccgaaagtccggtcaattttgagtgtcgcctgtcgcaatgcatccagttaaccaccgccgaagggctggcggttgacacctggctggtgctgggcgaagttgtggcagtgcatattgatgagtcgctgctggaggacgggatttaccagaccgccagggctcagccgattctgcgcgcgggcggtcccagcgcctattacgccattgatgaaagcctgcgctttgaccttgtgcgtccggacgcccgctag

SEQ ID NO: 259444 - DNA, 792 bp, Klebsiella pneumoniae
  misc_feature (763)..(772): n is a, c, g, or t
atgcttgccacgaccgatctctggtttcgctatcaggacgagccggtgctgaaggggctgacgctggatttttcccatcacgccgtgaccggactggtaggggcgaacggctgcggaaaatccacgctgtttatgaacctgagcggtctgctgcgcccgcagagcggggcggtgctatggcaaggaaaaccgctggactacagcaagcgtggcctgctggcgctgcgtcagcaggtggcgaccgttttccaggacccggaccagcagattttctataccgatatcgacagcgatatcgcctttagcctgcggaacctgggcgtagcggaagaggaaattgcccgccgggtggacgatgccctgactctcgtcgatgcccaggggtttcgtcaccagccgattcagtgcctgagccacgggcagaaaaagcgcgtggcgatagccggcgcgctggtgctgcaggcgcgctatttactgctcgacgagccgacggcgggtctcgatccttcgggacgcgctcagatgatcgacatcattaagcgtattgccgatcggggcaaccacgtggcgatctccagccacgatatcgatctgatctatgaaatcagcgatgcggtttacgtgttacgccgcggcgaagtgctggcgcacggcgaacccggggaggtgtttgcccgcagcgaactgatggcccaggccgggctcacccagccgtggctggtgaaactgcacgcgcagctcgggctgccgctgtgtaaaagcnnnnnnnnnnctcgggctgccgctgtgtaa

SEQ ID NO: 259445 - DNA, 1524 bp, Klebsiella pneumoniae
atgacgctggcaattatgttacagggcaccgcttctgacgtcggcaaaagcgtgctggtcgcggggctgtgccgcatcttttatcaggacgggcagcgcaccgcgccgtttaaatcgcagaatatggcgctcaattccggtatcacgccggatggcaaagagatgggccgcgcgcagattttccaggccgaagcggcgggtattatcccggatgtgcgcatgaacccggtgctgcttaagccaaccagcgaccgcaaagcgcaggtggtgctgatgggcaaggtggcgaccgatatggacgcggtgagctatcacgaatataaaccgcgcctgcgggaacagatcctcgcggtttataacagcctggccgccgaacatgatgtgctggtgctggaaggggcaggaagtccggcggagatcaatctgcgcgatcgcgacatcgtcaatatgggcatggccgagatggcccagtgcccggtgatcctcgtggcggatatcgatcgcggcggcgtattcgcctctatctacggcacgctcgcgctgctgcacgatcgcgagcgcgcgcgggtcaagggcgtgattattaataaatttcgcggcgacgtggcgctgctgtattccgggatcgagcagatagaagcgctcaccggcgtcccggtgctcggcgtcatgccgtggctggatgtcgatcttgaagatgaggacggcgtcgcgctgcaaaaagggaaatatctgcgcaccgacaggcgcgatattgagattgccgtgattcaggtgccgcacatctccaattttaccgatttcaacgcgctggcggcgcagccggacgtccgcgtccgctatgttcgccagccgcaggagctggcgggcgtggatatggtgatcctgccgggcagtaaaaatacgctcggcgacctgggctggctgcgcgagagcggcatggcgcatgcggtactgcaggcccggcgtcagggcgtaccggtgctggggatctgcggcggctatcagatgctcggcgaaaccattatcgatgaggtagagtcggggcttggcacgcagccggggctggggttgctaaataccgtcacccactttgcgcaaagcaagacgacgacccaggtaacggcaaccctggcaacagcgctgccggcgtggctggcggcaacggcggggctggccgtaagcggctacgaaattcatatgggcgaaaccgagctgcgcgacggctgccgttcgctgatgcaattacataaaggcggcctgagcgtggcggacggcgcggtcagcgatgacggcctggcgtttggcacctatctgcacggcctgttcgatagcgatgcatttacccgcgcgctggttaacggcctgcgccagcgtaaagggctggcggcgctggatagcgatttcgagtatgcacagtataaatcgcgccagttcgatctgctggcggacgcgatgcgtcagcatattgatatcgaaaaaatctacgccatcatgcgccaacatcaggagcccgtatgctga

SEQ ID NO: 259446 - DNA, 546 bp, Klebsiella pneumoniae; identical to SEQ ID NO: 175905

SEQ ID NO: 259447 - DNA, 1674 bp, Klebsiella pneumoniae
gtggttggcgaaccgccggaagagccaagcctgctggcttctatcttcatttcctggttcccgatgctgcttcttatcggcgtctggatcttcttcatgcgtcagatgcagggcggcggtggtaaaggcgccatgtcgttcggtaagagcaaggcgcgcatgctgacggaagaccagatcaaaaccacttttgccgacgtcgccggttgtgacgaagcgaaagaagaagtcggtgaactggttgaatacctgcgtgaaccgagccgtttccagaagctgggcggtaagatcccgaaaggcgtcctgatggtcggccctccgggtaccggtaaaaccctgctggccaaggccattgcaggcgaagcgaaggttccattctttacaatttcaggttctgacttcgttgaaatgttcgtgggcgttggcgcatctcgcgtgcgcgacatgttcgaacaggccaagaaagcggcaccgtgcatcatctttatcgatgaaatcgacgccgtaggccgccagcgtggcgcgggcttaggcggcggtcacgatgaacgtgagcagacgctgaaccagatgctggttgagatggatggttttgagggtaacgaaggtatcatcgttatcgcggcaaccaaccgtccggacgttcttgaccctgcgctgctgcgtccgggccgcttcgaccgtcaggttgttgttggtctgccggatgttcgcggtcgtgaacagatcctgaaagtgcatatgcgtcgcgtaccgctggcgccggatatcgatgcggcaattattgcccgcggtacgccaggcttctccggtgctgacctcgcaaacctggtaaacgaagctgcgctgtttgccgctcgtggcaacaagcgtgtggtctcgatggttgaattcgagaaagcgaaagacaaaatcatgatgggtgcggaacgtcgctccatggtgatgacggaagcgcagaaagagtccaccgcgtaccacgaagcgggtcatgcgattatcggtcgtctggtgccggaacacgatccggtgcacaaagtgacgattattccgcgcggtcgtgcgctcggtgttaccttcttcctgcctgaaggcgacgctatcagcgccagccgtcagaagctggaaagtcagatttcgaccctgtacggcggtcgtctggctgaagaaattatctacggcgtagagcatgtttctaccggtgcgtctaacgacattaaagtcgcgactaacctggcgcgtaacatggtgacccagtggggcttctctgacaaactcggcccgctgctgtatgccgaagaagaaggcgaagttttccttggccgcagcgtcgcgaaagcgaaacatatgtccgatgaaacggctcgtatcatcgaccaggaagtgaagtcactgattgagcgtaactacaatcgtgcacgccagcttctgaacgataacatggacatcctgcacgcgatgaaagatgcactcatgaaatatgagaccatcgatgctccgcagattgatgacctgatggctcgccgcgatgttcgcccgccagctggctgggaagaaccgggttcgtccaacaattctgacaataacggcacgcctcgtgcgccgcgtcctgttgatgaaccgcgtacgccaaacccgggtaataccatgtcagaacagctgggcgacaaataa

SEQ ID NO: 259448 - DNA, 681 bp, Klebsiella pneumoniae
atgcccgaacatgcgccaccagggccagtgcgtcgtcccggactaattggctggctcgcattgctgcccggggtgctggttggcttttgcctcggcgcatggatgctggcgatagcgctggagtggctgggtgaggcgtttttctggcggaacgcctgcgccagccatagtgaacaggtattgcaggcgacatggcactggtggcggggttccgctggcgcaccagagtggttagttgaagatctggcgcttgccagtaatacattgctgcaagggattgcgatgctggttcactcgctcaacgggcaaagtggattgttctggacggaaaccgtcactacggtgatccgctgtgcattactgtctgcaggcaatgttaccctcacctttctgctgcggctggcaattttgttgcaggcgctgccgctgtttgcgctgaccattaccattggccttatcgacgggttggtacgccgcgacttacggcgattcggcgcaggccacgagtccgggtttgtttatcaccacgccaggcgtatgatttcatccatcgtgatagcttcgggattgatgtggctggtattcccgtttcaaattgcgacgaaatatgtattaataccagcagtgctagttggtgtagctatagcagtaactgttggtatctttaagaagtatttataa

SEQ ID NO: 259449 - DNA, 234 bp, Klebsiella pneumoniae; identical to SEQ ID NO: 249243

SEQ ID NO: 259450 - DNA, 327 bp, Klebsiella pneumoniae; identical to SEQ ID NO: 249242

SEQ ID NO: 259451 - DNA, 1512 bp, Klebsiella pneumoniae
atggagttcagtgtaaaaagcggtagcccggagaagcagcggagcgcctgtatcgtggtcggcgtctttgaaccacgtcgtctctcccccatcgccgaacagcttgataaaattagcgacggttatatcagcgccctgctgcgtcgcggcgagctggaaggcaaacctggccagactttattgctgcaccatgtgccgaacattctgtcggagcgcattctgcttattggctgcggtaaagaacgcgagctggacgagcgtcagtataagcaggttattcagaaaaccatcaatacgctgaatgatactggttcaatggaggccgtctgcttcctgaccgaactgcacgtcaaaggccgcaataactactggaaagtgcgtcaggccgtcgagaccgccaaagagacgctatacagcttcgaccagttaaaaaccaacaaaagcgagccgcgtcgcccgctgcgtaaaatggtcttcaacgttcccacccgtcgcgagctgaccagcggcgaacgcgctatccagcacggtctggcgatcgccgccggcatcaaagcggcgaaagatctgggcaacatgccgcccaacatctgtaacgccgcgtatctggcctcccaggcgcgccagctggccgatacctatagtaagaacgtcattacccgagttatcggcgagcagcagatgaaagagctgggaatgaactcttatctggcggtcggcaacggctcgcagaacgaatcgctgatgtcggttatcgaatacaaaggtaacccggcagaagacgcgcggcctatcgtgctggtgggtaaaggcctgacctttgactccggcggtatctccatcaagccttcagaaggcatggacgagatgaaatacgatatgtgcggcgcggcggcggtgtacggcgtgatgcgcatggtggcggaacttcagttgccgttgaacgttgtcggcgtgctggccggatgtgaaaacatgcctggcggccgcgcctatcgtcctggcgacgtgttgaccacgatgtccgggcaaacggtggaagtgctgaacaccgatgccgaaggtcgcctggtgctgtgcgatgtgctgacttacgttgagcgtttcgagccggaaacggttatcgacgtggccaccctgaccggcgcctgcgtgatcgcgctcggccaccacatcaccggcctgatgtcgaatcacaatccgctggcccacgagctgatcggcgcgtccgaactggcgggcgatcgcgcatggcgtctgccgcttgccgacgagttccaggaacagctggagtcaaattttgcggatatggccaatatcggcggccgtcctggcggagcgattaccgcaggctgcttcctggcgcgctttacccgtaaatacaactgggcgcatctggatattgccggcaccgcctggcgttccgggaaagccaaaggcgcgaccggtcgtccggtggcgatgctgtcgcagttcctgctcaatcgcgccggatttaccggcgaagagtaa

SEQ ID NO: 259452 - DNA, 1098 bp, Klebsiella pneumoniae
gtgataatcataagatatctggttcgtgagacgctgaaaagccagttggcgatcctattcatcctgctactcattttcttctgtcagaaactggtcaggatcctcggcgccgctgttgatggcgatatcccgacaaatctggtgctctcgctgttagggctgggcgtacctgaaatggcgcagcttattctgcccctgagtttattcctcgggctgctgatgacgctgggcaaactgtataccgaaagcgaaatcacggtgatgcacgcctgcggcctgagtaaggccgtgctggtgaaagccgccatgatccttgcgctctttacgggcattatcgcggcggtcaacgtgatgtgggcggggccctggtcgtcccgtcatcaggatgaagtgctggcggaagcgaaagcaaaccccggcatggccgcgctggcccagggccagttccagcaggccagcgacggcagcgcagtgctgtttattgagaacgtcaacggcaaccgtttcagcgacgtcttccttgcccaactgcggccacgaggcaacgcgcgcccttcggtggtggtcgcggataccggcgagctctcgctgcgtaaagacggttcgcaggtggtgaccatgaatcagggcacccgctttgaaggcaccgcgatgctgcgcgacttccgcattaccgactttaaaaactatcaggcgattgttggccatcaggcggtggcctccgatccgaacgataccgagcagatggatatgcgcaccctgtggcgtaccgataccgatcgcgcccgggcggagctgcactggcgattcacgctggtggcaacggtattcatcatggcgctaatggtggtgccgctcagcgtggtgaacccgcgccagggtcgcgtgctgtcgatgctgccggcgatgctgctctatctggtgttcttcctgctgcaaacgtcgattaaatcgagcggcggtaaaggcaaaatggatccgatgatctggatgtgggcggtaaacctgctctatttcgcgttggccgtgctgttgaacctgtgggatacggtgccgatgcgccgcttccgtgcccgttttaacaaaggagcggcgtga

SEQ ID NO: 259453 - DNA, 957 bp, Klebsiella pneumoniae
atgcgcttcagtcaggaagtcggtacccgcgccgcccggctgccaggccttgaacttcaggccatcgcgcatgccgccggcgtaatcttcgaggatctcgcgcgcggtggtgccgaacggcagctcccagacgcccggatttttcacccgcccggagaagcccatcagcttggtgccagcatctttactggtggaaatgttctgataccactcaacgccgttagccagaatcgccggcacgttgcacagggtttcaacgttgttaacgcaggtcggtttgccccatacgccggagctggccgggaacggcggcttcgagcgcgggttcgcgcggcggccttcgagagagttaatcaacgcggtttcttcgccgcaaatatagcgccctgccccggtatggacgaacagctcgaagtcaaaaccggtgccgagtatgtttttaccgagcaggcccgcttcggtcgcttcggcaatcgcccggcgcagatgctgagccgcttcaacatattctccgcgcaggaagatgtagccgcggtaagctttcagcgcaaaagcggagatcagcataccctccaccagcaggtgcggcagctgctccatcagcaggcggtctttataggtacccggctccatttcatcggcgttacacagcagataacggatgttcatggattcgtctttcggcatcaggctccacttcaaaccggtggaaaagcccgcgccgccgcgccctttcaggccagcgtcttttaccgccgtgacgatttcatccggcgccatcccggagagcgctttacgcgccccggcatagccatttttgctctggtattcatccagccagaccggctgcttgtcgtcgcgcagccgccaggtcagcggatgggtttcggcagtacgaataatggttttcatttataccgctccaggaggtcaggaatcgcttccggcgtcagataa

SEQ ID NO: 259454 - DNA, 501 bp, Klebsiella pneumoniae
atgcacgagaatcaacaaccacaaaccgaggcttttgagctgagtgcggcagagcgtgaggcgattgagcacgagaagcaccactacgaagacccgcgtgcggcgtccattgaagcgctgaagatcgttcagaagcagcgcggctgggtgccggacggcgcaatctacgctatcgccgatgtgctggggatcccggccagcgacgtagaaggtgtggcgacgttctatagccagattttccgccagccggtagggcgtcacgtgattcgctactgcgatagcgtggtgtgccatattaccgggttccagggcattcagtcggcgatcgagaagaagctggatatcaaaccgggtcaaacgacctttgatggccgcttcactctgctgccgacctgctgtctgggcaactgcgacaaggggccgacgatgatgattgatgaggacactcacagttatctgacgccggaagcgattcctgacctcctggagcggtataaatga

SEQ ID NO: 259455 - DNA, 675 bp, Klebsiella pneumoniae
atggattatacgctcacccgcatcgatcctaacggtgagaacgaccgttaccccctgcaaaaacaggagatcgtaaccgaccccctggagcaagaagtcaataaaagcgtgtatatggggaaactcgaacacgccttgcatgacatggtgaactggggccgtaagaactcaatctggccttataacttcggcctttcttgctgctacgtggaaatggtgacgtcattcaccgcggtgcatgacgttgcgcgctttggtgcagaagtattacgtgcctccccgcgtcaggctgatctaatggtggttgcgggtacctgcttcaccaaaatggcgccggtcattcagcgtctttatgaccagatgctggagccgaagtgggttatctcgatgggcgcatgcgccaactccggcggaatgtacgatatttactccgtcgtccagggcgtggataagtttattccggtcgatgtttacatcccgggctgtccaccgcgtccggaagcttacatgcaggcgctgatgctgctgcaggaatccattggtaaagaacgccgtccgctctcgtgggtggtaggcgatcagggcgtgtaccgcgccaatatgcagtcggaacgcgagcgtaaacgcggcgagcgtattgcagtgaccaatctgcggactccggacgagatttaa

SEQ ID NO: 259456 - DNA, 1851 bp, Klebsiella pneumoniae
atggccttattacaaattagtgagcccggcctgagcgccgcgccgcaccagcgtcgtctggcggccggtatcgacctgggcaccaccaattctctggtggctaccgtgcgtagcggccaggccgagactctgcccgatcatcaaggccgctatctgctgccgtcggtggtgaactaccacgcttcggggctgaccgtcggctatgacgcccggcttaacgccgctcaggatcctgccaataccatcagctccgtgaagcggatgatggggcgctctctcgccgatattcaaaaccgttacccgcatctgccgtatcagctgcaggccagtgaaaacggcctgccgatgatccagaccgccggcggcctgctgaacccgattcgcgtctccgccgatatcctcaaagcgctggccgcccgggcgaccgaagcgctggccggcgaactcgacggcgtggtcattaccgttcccgcttacttcgatgacgctcagcgccagggaaccaaagacgcggcgcgtctggcgggcctgcacgtgctgcgcctgctcaatgagccgaccgcggcggctattgcctacggcctcgactccggccaggaaggggtgattgcggtctacgatctcggcggcggcacctttgatatctccattctgcgtttaagccgcggggtgtttgaagtgctggccaccggcggcgactcggctctcggcggcgatgatttcgatcacctgctggctgactacctgcgcgagcaggcgggcttcagcgaccgcagcgataaccgtctgcagcgtgagctgctggatgccgccatcgcggcgaaaatcgccttgagcgatgccgaggcagcgcacgtcgaggtcggcggctggcagggcgatatcacccgcagccagtttaacgatctgattgccccgctggtaaaacgtaccctgatggcctgccgtcgggcgctaaaagacgctggcgttgaagcgcaagaagtgctggaagtggtgatggtcggcggttcgacccgcgtgccgctggtgcgtgagcgcgttggcgagttcttcggtcgcactccgctgacctccattgacccggacaaagttgtcgccatcggcgcggcgatccaggccgatatcctggtgggcaacaagccagacagcgaactgctgctgctcgacgttatcccgctgtcgttaggcctggaaaccatgggcggcctggtggagaaagtgatcccgcgtaataccaccattccggtggcccgggcgcaggagtttaccaccttcaaagatggccagacggcgatgtccattcacgtgatgcagggcgagcgtgagctggtccaggattgccgttcgctggcgcgctttgcgctgcgcggtatcccggcgctgccggcgggcggggcgcatattcgcgttaccttccaggtcgatgccgatggcctgctgagcgttacggcgatggaaaaatcgaccggcgtggaagcctccatccaggtgaaaccgtcttacggtctgaccgatggcgaaatcgccaccatgattaaagattcgatgagctacgccgaacaggatattcaggcgcgcatgctggctgaacagaaagtggaagccgcgcgcgtactggagagcctgacaagcgcgctggccgccgacgccgcgctgttaagcgccgcggagcgtcaggccatcgatgccgctgcggagcaggtacgcgccgccgcggcaggcgacgacgctgacgcgattaaagaagcgattaaaaatatcgacacacaaacccaggaattcgccgctcgccgtatggatcagtcggtccgtatcgcgctgaaaggccaatccgtggacgaggtttaa

SEQ ID NO: 259457 - DNA, 516 bp, Klebsiella pneumoniae
atggactatttcaccctcttcgggttaccagccagctataccctctcgcttgaacaactggctgtccggtatcaggatctgcagcgccagtaccatccggataaatttgccagcgcgcctgcggcggaacagcttgcggcggttcagcattccgccactataaaccaggcctggcagacgctgcgccatccgctgactcgcgcagaatatctcctttcgctgcatggcttcgatctggccagcgagcagcataccgttcgcgataccgcgttcctgatggaacagctggaattgcgcgaagagctggatgagatcggccaggcgaaagacgacgcgcggctggaaggttttatcaaacgggtgaaagcgctgtttgatacccgtcagcagctgatggttgaccaattgcataatgagagctgggaggcggcggcggacacggttcgtaagctccgtttcctcgataaactgcgcagcagtgctgaagaactcgaagaaaaactgctcgatttttaa

SEQ ID NO: 259458 - DNA, 324 bp, Klebsiella pneumoniae; identical to SEQ ID NO: 137490

SEQ ID NO: 259459 - DNA, 387 bp, Klebsiella pneumoniae
atggcttacagcgaaaaagttatcgatcattacgagaatccgcgcaacgtcggctcttttgacaacagcgacgagaacgtcggtagcggcatggtcggcgcgccggcctgcggcgacgtgatgaagctgcagattaaagtcaacaatgaaggtatcattgaagacgcgcgcttcaagacctacggctgcggttccgctatcgcttccagctccctggttaccgagtgggtgaagggcaaatcgctggacgaagcgcaggcgatcaagaacaccgatatcgccgatgaactggaactgccgccggtgaaaatccactgctcgatcctggcggaagacgcgattaaagccgcgattgcggattacaaaagcaaacgtgaagcaaaataa

SEQ ID NO: 259460 - DNA, 759 bp, Klebsiella pneumoniae
gtgaataacgaaatcggcgtggtgcaggatatcgctaccatcggcgagatgtgtcgcgcccgcggtatcatttaccacgtagacgccacccagagcgtgggcaagctgcctatcgatctgagccagctgaaagttgacctgatgtccttctccggtcacaaaatctacggtccgaaaggcatcggcgcgctgtacgtacgtcgtaagccgcgtattcgtatcgaagcgcaaatccacggcggcggccacgagcgcggtatgcgttccggtactctgcctgttcaccagatcgtcggcatgggtgaagcttaccgtatcgccaaagaagagatggaaagcgagatggcgcgtctgcgcacgctgcgcaaccgtctgtggaacggcgtgaaggatatggaagaagtgtacctcaacggcgacctcgagcagggcgcgccgaacattcttaacgtcagcttcaactatgttgaaggcgagtcgctgattatggcgctgaaagacctggcggtttcctccggttcagcctgtacttccgcgagccttgagccatcctacgtgctgcgcgcgttaggcatgactgatgaactggcgcacagttctattcgtttctctttaggtcgtttcactaccgaagaagagattgactatgccatcgatctgattcgcaaatccattggccgtctgcgcgagctttctccgctgtgggaaatgttcaaacagggcgtggatctgaacagcattgaatggtcacatcactaa

SEQ ID NO: 259461 - DNA, 1488 bp, Klebsiella pneumoniae
gtggcagatcgtaatttgcgcgaccttctcgctccgtgggtgccaaatgcgccggagcgaattctgcgagaaatgacgctggacagccgggtggctgcttctggcgatctttttgtcgcggttttaggtcatcaggcggacgggcgtcgttatatcccgcaggcgatagcgcaaggtgttgctgccattattgctgaggccaaagatgaggcccgtgacggcgagatccgtgaaatgcacggggtgccggttatctatctcagccaactcaacgagcgcttatccgcgctggccgggcgtttttaccatcagccttcagaacaactgcgcctggtgggcgtcaccggaactaacggtaagaccaccacgacgcaactgctggcgcaatgggcgcagctgcttggcgaaaccagtgcggtaatgggaaccgtaggcgatggcctgctggggaaagttatcccaacggaaaacaccaccggttcggctgttgacgttcagcacgtcctttctggcctggcagggcagggggcaacgttcgccgcgatggaagtttcctctcacggcctggtgcagcaccgcgtcgccgcgctgcagtttgccgcgtcggtcttcaccaacctgagccgcgatcaccttgattaccacggtgatatggagcattacgaagcggcaaaatggctgctctactcaactcaccattgcggtcaggcgattgttaatgcggacgatgaagtcggtcgccgctggctggcgaaactgccggatgcggttgccgtatcgatggaagatcacattaacccgaactgccgtggccgctggctcaaagccactgcagtgaactatcacgacagcggtgcaaccgttcagtttgcttccagctggggtaacggcgagatagaaagccgcttgatgggcgcctttaatgtcagcaatctgctgctggcgttagccaccctgctggcgctgggttatccgcttgccgatctgctgaaaaccgccgcgcgcctgcagccggtatgcgggcgtatggaagtgttcgccgcgccgggtaaaccgaccgtggtcgttgattatgcccacacgcccgatgcgctggaaaaggcgctgcaggcggcgcgtctgcactgcagcggtaagctgtggtgcgtattcgggtgcggcggggatcgcgacaaaggcaagcgtccgctaatgggcgctatcgccgaagaatttgccgatattgtggttgtcaccgatgacaacccgcgcactgaagagccgcgggcgattattaacgatattctggccggcatgctggacgcgggccatgccagagcggtggaggggcgtgcggaagcggtgacgaatgcagtgatgcaggcgaaagaaaacgacgtcgttctggtggcgggcaaaggccacgaggactatcaaatcgtcggcaatcgccggctcgattattctgaccgcgtcaccgtggcgcgtttgctggggacggtagcatga

SEQ ID NO: 259462 - DNA, 1176 bp, Klebsiella pneumoniae
atgaagttaaatgcgcggcaggtagatgctgctaaacccagagagaaagcctacaagctggcagatggtgctggtttgtatcttgaggttgtgccctctggttctcgatactggcgaatgaaatatcgcttcaatggaaaagagaagcgtctggcttttggagtctatccggcagtatctcttgcacaagcgagggcactacgtgatgaagccaagaaaaaactggccgaaggtatcgatccatcgtttgccaagaaagaagaaaagctagttcgcgatgtgcagctcaataatacgtttcaggctgtggcgcttgaatggcacggaacaaaggtgaaccgatggtcagaaggttatgcctccgacattatcgaagctttcaataaagatatttttccctatatcggccagcagccggtgaatgaaatcaaaccgctggttctgcttaatgtgctgcgtcgaatggaaagccgtggcgcgacagagaaggctaagaaggttcgccagcgctgcagtgaagtttttcgttacgccatcgttactggacgcgcggaatacaatcctgctgcagatctaaccagtgcgatgtcagggcatgaatcaaagcattatccctgccttaccgttgaggagttaccagacttctttaaagccctcgcaggctacacaggaagcccgttagttgttcttgcagcacgtctgctgatctttacgggagttcgcactggcgagctccgaggtgctttctggagtgagtttgatcttgaaaaagcggtgtgggaaatacctgccgagcgtatgaagatgaaacggcctcaccttgtacccctctctacccaagcgctggaaatcgtacagcagctcaaagtgatgactgggcaatatcctcaggtgtttcctgggaggaatgatccccgcaaaacgatgagcgaagcgagtataaatcaagtgttcaagcggattggatatacggggaaggtaacgggacatggtttccgtcacacgatgagtacgattttgcatgaggaaggtttcaatacggcgtggattgaaacccaacttgcgcatgtcgataagaacgcgatacgtggaacgtataaccatgcgttgtatctggaaggaaggagggagatgatgcagtggtatggagggtttattgaaaattctagttactaa

SEQ ID NO: 259463 - DNA, 972 bp, Klebsiella pneumoniae
atgccaaacagtttgacctggtgcgacctgcctgaagatgtttcccagtggcctggattgccgctttccctgagcggtgatgaggttatgccgttggattatcatgccggacgtagcggctggctgctgtatggtcgcggtctcaacaagcgtcgtctgaccgaatggcaacgggagctgggggcggccctggtaattgttgcctcctgggcggttgacgactatcaggtgattcgtctggctggttcgttaacgctacgagcgacccgtctggcccatgaggccgggtttgacgtcgcgccgctggggaaaatcccgcatttacgcacgccgggcctgctggttatggatatggactcgacggcgattcagatcgagtgcattgatgaaatcgccaaactggccggtaccggcgagctggtctctgaagtgaccgagcgcgcgatgcgcggcgaacttgatttcaccgccagcctgcgtcagcgggtagcgacgctgaaagatgccgatgccaatattcttctgcaggtgcgtgaaacgctgccgctgatgccggggctgacccagctggtgctgaagctggaaacgctcggctggaaggtggcgatcgcctccggcggcttcaccttctttgccgagtatttgcgcgacaagctgcatctcgacgcggtgttcgccaacgaactggagatcatggacggtaagctgaccggcaacgtcatcggcgatatcgtcgatgcgaaatataaagccagtacgctgcgtaaactggcggaaaagtatgaaatcccgccggcgcaaaccgtcgctattggcgatggcgcaaacgatctgccgatgattaaagcggcaggactcggcatcgcctatcatgctaagcccaaagtgaatgaactggcggaagtgacaatccgccacgctgacctgatgggggtattctgtattctctccggcagcatgaatcaaaagtaa

SEQ ID NO: 259464 - DNA, 1383 bp, Klebsiella pneumoniae
gtggcgaaagctccaaaacgcgcatttgtctgtaatgaatgcggtgcggattatccgcgctggcaggggcagtgcagcgcctgtcatgcctggaataccataaccgagatgcgcattgccgcttcgccgcaggtggcaagaaacgaacgcctgtcaggttacgccggtaatgccggcgtatcgaaggtgcaaaagctctccgatatcagcctcgaagcgctgccgcgcttttcgaccggatttaaagaatttgaccgcgtgctcggcggcggcgtggtgccgggaagcgcgattctgatcggcggtaaccctggcgcgggcaagtcgacgctgctgctgcaaaccctgtgtaagctctccgaaggcatgaaaacgctctacgtcaccggggaagagtcgcttcagcaggtggcgatgcgcgctcaccgcttaggtctgcccaccgccaacctgaatatgctgtcagaaaccagcattgagcagatttgccagattgccgacgaagaaaagccgcagctgatggttatcgactccatccaggtgatgcatatggccgacgtgcagtcatcgccgggcagcgtggctcaggtgcgcgaaacggcggcctatttaacgcgctttgccaagacgcgcggcgtggcgatcgtcatggtcggccacgtgaccaaagacggctcgctggccgggccgaaagtgctggagcactgtattgactgctccgtgctgctcgacggcgacgccgattctcgttttcgcaccttgcgcagccataaaaaccgcttcggcgcggtcaacgagctgggcgtattcgctatgaccgagcaggggctacgtgaagtgagcaacccctcggctatcttcctgagccgcggtgacgaagtgacttcgggcagttcggtaatggtggtctgggaaggtacccgaccgctgctggtggagatccaggcgctggtcgatcactcgatgatgtccaacccgcgccgcgtggcggtggggctggagcagaaccgtctggcgatcctgctggcggtactgcatcgtcacggtggtctgcagatggctgaccaggacgtgttcgtcaacgtggttggcggtgtgaaggtcaccgaaaccagcgccgacctggcgctgctgctggcgatggtttccagcctgcgcgaccgtcctctgccgcaggacctggtggttttcggcgaagtgggtctggcgggcgaaattcgcccggtgccgagcggccaggagcgtatttccgaagcggctaagcatggttttcgtcgggcgattgttccggccgcgaatgtgccgaaaaaagtgccggaagggatgcaaatctttggcgtgaaaaagcttgcggacgcgctaagcgtctttgacgacttataa

SEQ ID NO: 259465 - DNA, 237 bp, Klebsiella pneumoniae
atgcacgtgcgcataaggcttcagcgcttcctgtaccgcctgatgcgggaacggatagagctgctctatgcgaacgatagcgacatctttttgctcgtttttacgacgctgttccagcaggtcgtagtaaaccttaccagagcacagcacaacccgcttcactgctttcggatcgagctggtcgatttcaccgatcgccggctggaaagtgccgttagccagttcgtccatgcttga

SEQ ID NO: 259466 - DNA, 1746 bp, Klebsiella pneumoniae
atggcggtggaagaaggttccgcgcccggagtcttcgccggacagacgcaccgaaatgccttcatcgaccagcgtggcgtaggcgaggttttccgcgccgccccagtcaaacatcttctcgccggcggccataagctgacgatcgccgtagattttcgccacgcgcgactgcatttcaacggcttccggtaccgtactgatgcgttttgccagctcctgcagacgcttaggttcaactttgtccggatagctctcatcccactcgtggttgaggtacggagaccaggtaaaggagtgcatattcatcggacgccactccttcaccacgcattcgccggcatccagcgcgtcacggtagaggttaacctgctcagtggcgtcttccagcgtcgcgacgttatccgcttccagcttgtcagcgtagattttgcgcggggtcggatgctttttgattttctgatacatcagcggctgggttgcgctcggctcgtcggcttcgttgtggccgtgacggcggtagcacaccaggtcgatgaagacatcgcgtttaaaggtgttacggaagtccagcgccaggcgagtcacgaaagcgaccgcttccggatcgtcggcattcacgtggaaaataggcgcctggaccattttaccaatatcggtacagtacggggtagaacgcgcatccagcgggttggaagtggtgaaacccacctggttgttgataacgatgcgtacggtaccgccgacttcgtaaccgcgcgctttggacatgttcagggtttcctgaaccacgccctggccggttaccgcggcgtcgccgtgaatggtgatcggcagaactttgttgctgctcggttcgtcgagacgatcgagacgagcgcggacggagccgataaccaccgggctgacgatttccagatgcgacgggttaaacgccagcgccaggtgcaccaggccgccttcggtttccatatcggaagagaagcccatgtggtacttcacgtcaccggtgccgaggtgttctttatgtttaccggcgaactcgtcgaacaggtcctgcggttttttacccagcacgttgaccagcacgttcagacgtccgcggtgcgccatacccagcaccacttcgcgggtgccgctcttacccgcgtggcggataatctctttcagcatcgggatcagcgcgtcgccgccttccagcgagaagcgtttagcgcccgggaatttcgcgccgaggtagcgctccaggccttccgccgcggtcaattcgctgaggaagcgttttttctcttcggcgctaaagttcgctttgcctgctaccgactcaatgcgctgctggatccagcgtttttcttcggtggaggtaatatgcatatattccgcgccgatggagccgcagtaggtctgcttaagggcggagatcagatcgcccagcttcatcgtatctttgccgatggcgaaagaacctacgttatagatctcctggaaatcggcctcggtcagatcgtggtaagccggatcgagatccgccactctctcttgctgccacagtcccagcggatcgagattcgcatgctggtgaccacggaagcggtatgcgttgatgagctgcaggactttaacctgcttcacattggtgtcagggtcggaaatcgaagaagtgtaacgcgaggcatccttcgccaggcggcggaaataatcacgcgttttggaatgaaattgatccggtttgactccggtgccaggtaa

SEQ ID NO: 259467 - DNA, 273 bp, Klebsiella pneumoniae
atggataagttcatcgactggcatccggcggatattattgccggattacgcaaaaaagggacgtcgctggcagctgaatcgcggcgtaatggtttaagttcttcaacgcttgccaacgcgttgactcgtccctggcccaaaggcgagctgattattgcgaatgcgctggaaaccgatccgtgggtgatatggccatcgcgctatcacgacccccatacccatcagtttatcgacagaacgcagatgatgcgtcagaggaagaataacaagtaa

SEQ ID NO: 259468 - DNA, 477 bp, Klebsiella pneumoniae
atgtatcgtcctgctcttcatacaccagaacatccgcactggccggtgtgcccaggcgatggcgccagacctgatacggcagcagcgtggtgggatgcttacgcacgtaccacagggtctgcgaatcattactccaggcaaaatcaggcgagacgttctcaagaacttccgcaaattcatcgccgtcgtttaaagggtagaagcgcaggctatattgccggcgggagagatagtcttccgccaccgccatcatgttgttgtcaggagaaacccctaaccccccgagggtgtaaaattcgctgccggccgcgcgctggttaccgtcaagcaggacctcccattcatcccactcttcttttacgaccggctggcgttgataaatcgcatactcgcagccaggctcatagacctgacggtaacgatagccatttttgctatagggggccgacacttcgcgctgcggaatacggtcgataa

SEQ ID NO: 259469 - DNA, 222 bp, Klebsiella pneumoniae
atgacgctggagtattttgcgcccgccagactcgacgacatgctcgaaatccagacggagataacctcaatgcgaggggcgaccctggttttcacgcagcgaatcgtcaacgccgagaacgtggttttgaatgaagctgaagttctgatcgtgtgcgttgatccactcttaatgaagcctcgtgcgcttcccaagtctattgtcgcggagtttaagcagtga

SEQ ID NO: 259470 - DNA, 945 bp, Klebsiella pneumoniae
atgagtcgtcctcgtcgtcgcggtcgcgacgtgcacggcgtactgttgctggataaaccgcaaggcgcatccagcaacgacgtgctgcagaaagttaaacgactttataatgctaaccgggcagggcatacgggagcgctggatccgctggcgaccggcatgttgccgatttgcctcggggaagcgacaaagttttcccagtatctgctcgattctgacaagcgctaccgcgtgattgctaaacttggccagcgcaccgatacctctgatgccgacggccaggtggtggaagaacgtccgctgacttttagtcctgagcagctggcagccgcgctcgatggctttcgtggtgaaacccagcaggtgccgtcgatgtattcggcgctgaaataccaggggaaaaaactgtacgaatatgcccgtcaggggattgaagtaccgcgtgaatcccggccgattacggtttacgagctgctgtttatccgccatgaggggacggagcttgagctggaaattcactgctccaaaggcacctacattcgcacgattattgatgatttaggcgagaaacttggatgcggcgcgcacgtcactttcctacgtcgcctggcggtcagtaaatatcccgtcgaacggatggtgacactggaacagctgcaggcgctggttgaacaagccaatgcgcaggatattccggcagcccagctgctggacccgctattgatgccgatggacagcccggcttcggattacccgctggtgaatattccggaaacctccgccgtctactttaaaaacggcaatccggtgcggacatcgggtgcgccgctgcaggggctggttcgcgtcaccgaaggtgatgacgagaagtttcttggcatgggggaaatcgatgatgaaggccgcgtggcgcctcgtcgtctggtggttgaataccctgcctga

SEQ ID NO: 259471 - DNA, 402 bp, Klebsiella pneumoniae
atggcgaaagaatttggtcgcccgcagcgcgtggcccaggagatgcaaaaagagatcgcaatcatcctgcagcgcgaaattaaagacccgcgtctgggcatgatgaccacggtttcaggcgtcgagatgtcccgcgacctggcctatgccaaagtgtttgtgaccttcctgaacgacaaagacgaagccgccgtgaaagcgggcatcaaggctttgcaggaagcgtctggtttcattcgctcgctgctgggcaaagcaatgcgcctgcgtatcgtgccggaactgaccttcttctacgacaattcattagtcgaaggaatgcgcatgtcgaacctggtgaccagcgtggtgaaacatgacgatgagcgtcgtgtgaacccggacgacagtaaggaggactaa

SEQ ID NO: 259472 - DNA, 2061 bp, Klebsiella pneumoniae
atggctcaagaaaacgaaaagaactggactgaagcgccagaaacgcctgaagagaccactgactatcacgtaacaacttctcagcatgcgcgtcaggctgaagacgataacgatcgtgaagttgaaggcggtcgcggccgtggacgtaatgcgaaagcagcgcgtccggctaagaaaggcaacaaacacgctgaatcgaaagccgatcgtgaagaagcccgtgcggccgttcgcggcggtaaaggtggtaaacatcgtaagggttcggctctgcagcaaggcttccagaagccggctcaggcggttaaccgtgatgttatcatcggtgaaaccatcaccgttggcgatctggccaacaagatggccgttaaaggttctcaggtcatcaaagcgatgatgaagctgggcgctatggcgacgattaaccaggtcatcgaccaggaaaccgcacagctggttgccgaagagatgggccacaaagttatcctgcgtcgtgaaaacgagctggaagaagcggtaatgagcgaccgtgacaccggcgctgcggcggaaccgcgcgcaccggttgtgactatcatgggtcacgttgaccacggtaaaacctctctgctggactacattcgttcaacgaaagtggcctctggcgaagcgggcggcattactcagcatatcggtgcgtaccacgtcgaaaccgacaacggtatgatcaccttcctggataccccgggccacgccgcgttcacctctatgcgtgctcgtggtgctcaggcgacggatatcgtggttctggttgtggccgcagacgacggcgtgatgccgcagaccatcgaagcaatccagcacgcgaaagcggcgggtgtgccggtcgtggttgcggtgaacaaaatcgataagccggaagcggatccggatcgcgttaaaaacgaactgtcccagtacggcattctgccggaagagtggggcggtgaaagccagttcgtccacgtgtctgctaaagcgggtaccggcatcgacgaactgctggacgcaatcctgctgcaggctgaagttctggagctgaaagcggttcgtaaaggtatggcgagcggcgcggttatcgaatccttcctggataaaggtcgtggtccggttgctaccgttctggtacgcgaaggtacgctgcacaagggtgacatcgtcctgtgcggtttcgaatatggtcgcgttcgtgcgatgcgtaacgaactgggtcaggaagtgctggaagcgggtccatccattccggtggaaatcctcggcctgtcaggcgtaccggctgccggtgacgaagtgaccgtcgttcgtgacgagaagaaagcacgtgaagttgcgctgtatcgtcagggtaaattccgtgaagttaagctggctcgtcagcagaaatctaaacttgagaacatgttcgccaacatgaccgaaggcgaagttcacgaagtaaacatcgtcctcaaagcggacgtgcagggttctgtggaagcgatctccgactccttgctgaaactgtctactgacgaagtgaaagtgaagattatcggttccggcgtaggtggtatcaccgaaaccgacgcaaccctggccgctgcctccaacgcgattctggttggctttaacgttcgtgctgatgcatccgcacgtaaagttatcgacgcggaaagcctggatctgcgctactactccgtcatctatcatctgatcgacgaagtgaaagcagcgatgagcggcatgctgtctccggaactgaaacagcagatcattggtctggccgaagtccgtgatgtgttcaaatcgccgaaattcggcgccatcgcaggctgtatggttactgaaggtacgattaagcgtcataatccaatccgcgtactgcgcgacaacgtggttatctatgaaggcgagctggaatccctgcgccgcttcaaagatgacgttaacgaagttcgtaacggcatggagtgtggtatcggcgttaagaactacaacgacgttcgcgttggcgatatgatcgaagtgttcgaaatcatcgagattcaacgtaccatcgattaa

SEQ ID NO: 259473 - DNA, 528 bp, Klebsiella pneumoniae
gtgccaggcgagctgcgtcggcgtatgtcgcacgaaatagttggcgcggcagcggttccagatctgatgcagcgcctcttcattaatattgtccatccgcagcagggccagcgcctgcagctgatggtgacgcactcgttcgcgcatgtccggggtgctttgcatgccgcgacgcagctgcttctcggtggcgaaatagagttcacgcagcaggctctgcttccagctgttccacaaggtttcgttggtggcgcagatatcggcgacggtcagacacaccagatagcgcagacgattttccgtttgcacctcctcggcgaactgcttaatcacctccggatcctgaatatcgcgccgctgggcggtgaccgacatcagcaggtggtgacgcaccagccaggcgaccagctgcgtttcgcgcgagttcagcccgtgcagctcggcaaacttcagcacatcctgcgcgccgaggatcgagtggtcgccgccgcgccctttggcgatgtcgtggaacagggcggcaattaa

SEQ ID NO: 259474 - DNA, 741 bp, Klebsiella pneumoniae
atgattaaagacggcctgtttgagcgctttccctgcgagcgcatcttcggcctgcacaatatgccgggcctgccggtagggaaagttggcttttacgccggtaattttatggcctcggcggatacggtaaaaattaccattaccggctacggcggccacggcgcgcaccccgagcgcaccgtcgatccgattgtcaccggcgcggcgctggtgatgaatctgcaaagcatcgttgcgcgtaacgtaccgccgggcgaaaccgcggtagtgagcgtcggcactttccaggcgggcattgcatcgaacgtcattccggagaacgtggtgatggagctgagcgtgcgggcgatgaagccggaaatccgtgacctgctgattaaacgcatcaaggagcttgctgattttaccgccaaaagctacggcgccagcagcgaggtagaggtctttgactcttatccggtactgaccaacagcgttgaagagaccgaattcgccaaagcgctggcgctggaagtctttggcgaggagggcgtgctggaatccatctcgccgatgaacgccagcgaagattttgcctttatgctccagcagcgccccggctgctacttcctgctgggcaatggcgagaaaggcgggaagggcagctgtatggtgcataaccctggctatgactttaatgacgatattatttccaccggcgcgacgctgtttgcccggttagttgaaacacactgccgttga

SEQ ID NO: 259475 - DNA, 777 bp, Klebsiella pneumoniae
atgaaaaaatctcttctgctgtgggtcgcgctgatggcctcaacctcagccctggccgcagaaaataaggaaattcgctttggcgtcgacccgaccttcgcgccgtttgaatggaaagatccgcagggtaagctgcagggttttgatattgacctcggcaacgcgatttgcgcacagctgcaggcgaagtgcgtgtgggtggaaagcaatttcgacggtattatcccggcgctgaaggcgcgtaagttcgatgcgatcctctccggcatgtatatgaccgagaaacgcaaagagcagattggctttagcgacaagctgtacaacggcccggtattccttgtcgcgcgtaaaaacaccctggccggaaacaccgtcgagcagttgaaaggcaaaaccatcggcgtcgagcagggatcggcgcaggagacttacgttaatcagcactggcgtccggcaggaatcaatatcgtcgcctatcagggggcggatcgcgtggttcaggatctggagtccgggcgtattgacggcgccgtgctttccggcatgatggccgactacagcttcctgcagcagccgcaggggaaagattttgccttcgttggcggacacctgaaggacgacaagctgttcggcgccggcgcggcgattggcctgcgcaaagaggacgatgctctgcgccaggagattaacggcgcgattgccactattcttgccgacggcacttataaaaagctcgccgggaaatattttagctttgacgtctattccgggacataa

SEQ ID NO: 259476 - DNA, 954 bp, Klebsiella pneumoniae
atgatcacacgtcccctgggcaaaaccggattttccatcgccccgctggtgtttggcggtaacgtttttggctggaccatcgatgaaaaaaccagttttgccattcttgatgcgtttatagaccacggcttcgatgctatcgacacggcggatgtttactcccgctgggcggatggcaaccggggcggcgagtctgaaaccattatcggccgctggctacaggcgcggccaggcatgcgcgagaaggtgaagatcttcaccaaagtgggttccgatttaggccttcctggccataaggggttgaaaaaagcctggatccagcaggcggtagacgattcgctccgtcgcctgaacactgattatattgacctctattttgcccactggccggacccggaaacgccggtcgccgaaacgctcgaagccttccacgccctgcagcaggcgggtaaaatccgcgcgatgggcgcctcgaaccttgacgcgcagcagctgtcgagcgcgctggaggtgtcgcgtaaaagcggcctgccggcctggcaggtactgcagccggaatacaatctttatcatcgctcggcttttgaaggcgcgctctgcgacttgtgcgtcagccgcgagatcggcgtggtgacctactacagcctggcgtccggcttcctgaccggtaaataccgccagcagtccgatctggcgcaaagccagcgcggcagcggcattggtaaataccttaatcctcgcgggctgcgtattattgataccctggctgaggtcgcggagcaaaacggcgctaaacctgccgaagtcgctctggcctggctgatgacccgcgaaggcgtgacggcgcccatcgccagcgccaccagcattgctcaggtggagagctttgcccgcgccgccgcgctgagcatcagtgctgaacagctggcgcgcctggacaccgccagcgcgtag

SEQ ID NO: 259477 - DNA, 1287 bp, Klebsiella pneumoniae
atgaccgaagctatgaaaattacgcttaccgctcagccagccgatgcgcgctggggagaaaaagcgtcttacagcatgaataacgacggcatcgccctgcacctgaacggcaaagacgacctgggtttgattcagcgcgcggcgcgtaaaattgacggcatgggtattaaacatgtcgcgcttgacggcgagggctgggataccgaccgcgcatgggcgttctgggcgggttataaaggcccgaaaggcagtcgcaaagttgagtggccagctcttgacgatgtgcagaaaagcgaactggataaccgcctgaccattattgactgggtgcgcgacaccatcaacgccccggcggaagagctggggccggaacagctggcgcagcgtgcggtagacctgctgtgcagcgtggcctgcgataacgtctcttatcgcatcactaagggcgaagatctgcgcgagcagaactacctgggcctccacaccgtcggccgcggatccgagcgtccgccggtcctgctggcgctggactataacccgactggcgacaaagaagctccggtatacgcctgtctggtcggcaaaggcattacctttgactcaggcggatacagcatcaagcagagcgcatttatggactcaatgaagtccgatatgggcggcgcggcgacggtaaccggcgcgctggcgttcgccattactcgcggcctgaacaagcgcgtgaagctgtatctgtgctgtgccgataacctgattagcggtaacgccttcaaactgggcgatattattcactatcgcaacggcaaaaccgtggaaatcatgaacaccgatgcggaaggtcgtctggtgctggcggacggcttgatcgatgcttcggcgcaaaagccggagctgatcatcgatgccgccacgctgaccggcgcggcgaaaaccgcgctgggcaatgactatcacgccctgttcagctttgacgacaggctggcgaatcgactgctggcgagcgcgcaggctgaaaacgaagctttctggcgtctgccgctggctgagttccaccgcggccagctgccgtccaactttgctgaactgaacaataccggcagcgcggcctatccggccggcgccagcaccgcggcgggcttcctgtcccacttcgtggagaattaccatgaaggctggctgcacatcgactgctcggcgacctaccgcaaatctgcggttgagcagtggtcggcgggcgcgaccggcctcggcgtgcgcactattgcgaatctgttgaccgcggaataa

SEQ ID NO: 259478 - DNA, 765 bp, Klebsiella pneumoniae
atggcgccgccgggacaggaagagcgcgatcttaacgctgagtatcaggccggtcatattcccggcgccgtcttttttgatatcgaagccctctccgatcacaccagcccgctaccgcacatgatgccgcgcgcggaggcgtttgccgtcgccatgcgcgaactaggcgtcagcagcgataagcacctggtggtatacgatgaaggtaatctcttctctgcgccgcgcgcctggtggatgctgcgcacgttcggcgttgaaaaggtgtcgattgttgcgggtgggctggaaggctggcgccgcgatgggctaccgctggagcaaggccttcccgaactgccggaaggggattttgacggacgcgtcgatccgctggcgatcaagcggctgaccgatgtgctgctggtcagccatgaaggatcggcgcagatcgtcgatgcgcgtccggcaggacgctttaatggccaggtggcagagccgcgaccgggcctgcgctgcgggcatattcccggcgcgctaaacgtgccgtggactgaactggtgattaacggcgaacttaaaaccactgatgaactcaacgagatttttgcgcgtcagggcgtcgattttgaacggccgattattgccagctgcggctccggcgtaacggcggcggtcgtcgtgctggcgctcactactctcggcgttaacggcgttagcctgtacgacggctcatggagcgaatggggcgcgcggacggatttaccgattgagccggcccagtag

SEQ ID NO: 259479 - DNA, 765 bp, Klebsiella pneumoniae
atggaaaatataatgtacaagccagttattggcgtcgtgatgtgtagaaacaggcttaagggtcaccagacccagaccttgcaagaaaagtacctgaatgcaattgttaacgccggcggactgccgattgccctgcctcatgcgctggcggagccggagctactgaacgcggtcgttgataaactggacgggatctacctgccaggcagccccagcaatgtgcagccgcacctttatggtgaaaacggcgatgagcctgacgccgaccccgggcgtgatcttctgagcatggcgctgattaacgccgcgctcgaaaggcgcatccccattttcgccatctgtcgtggactgcaggaactggttgtcgccaccggcgggactctgtatcgtcgtctgttcgagcagcctgagctccttgaacatcgcgaagatcctgaactgcccgtcgagcagcagtatgcgccgtcccatcaggttgaggttcaggaaggaggattgctgtcgcaattgataccgggctgcaacacgttttgggtaaactcgctacatgggcaaggggcaaaaaccctcagtccgcagctgcgcgtggaggcgcgagcgccagatggactggtggaagcggtcagcgtgaacgatcatcctttcgcgctgggcgtacagtggcatccagaatggaacagtagcgaatacgccctgtcgcgtatgttgtttgatggttttatcaccgcctgtcagggccatcatgctgaaaagcggcggcgctga

SEQ ID NO: 259480 - DNA, 558 bp, Klebsiella pneumoniae
atgagcgatgacggactggcgccagggaaacgtctgtcagagatccgccaacagctgggtctctcacagcgtcgtgccgccgaactgtctgggttaacacatagtgccatcagcaccatagagcaggataaagtcagtcctgccatcagtacgctgcaaaagctgctgaaagtctatgggctgtcgctctcggaattcttttctgaacccgaaaagccggatgaaccccaggtggtcattaatcaggatgacctgattgagatgggaagtcagggcgtttccatgaagctggttcataacggaaatccgaaccgtacgctggcgatgatttttgaaacttaccagcctggaaccacgaccggggagaggattaagcatcagggtgaggagataggcaccatactggaaggtgagatcgtgctgaccattaacggtcagtcgtaccacctggtggctggacagagctatgccattaataccggcattccgcacagcttcagcaacacctcggcaggcatctgccgcatcatcagtgcccacacccccaccacattctga

SEQ ID NO: 259481 - DNA, 1488 bp, Klebsiella pneumoniae
atgaattttcagcacctggcttactggcaggaaaaagcgaaaaacctggccattgaaacgcgcttatttattaacggcgaatattgcgccgcggccgataataccacctttgagactatcgaccctgccgcgcagcagacattagcccaggtcgcccgcggtaaaaaagccgacgtcgaacgggcggtgaaagccgcgcgccaggcttttgataacggcgactggtcgcaggcctcccccgcacagcgtaaagcgatcctcactcggtttgctgatctgatggaggcccatcgtgaagagctggcgctgctggaaacgctggataccggcaaaccgattcgccacagcctgcgcgacgatattcccggcgccgcccgcgccattcgctggtatgccgaagcgctggataaagtctatggcgaagtggcccccaccggcagcaacgagctggcgatgatcgttcgcgaaccaattggcgtgatcgccgcggtggtgccgtggaacttcccgctgctgctggcctgctggaaactcggcccggcgctggcggcgggcaatagcgtaatcctcaaaccctcggaaaaatcgccgctcaccgccctgcgtctggccgggctggcgaaagaggccggcctgccggacggcgtgttgaacgtggtcagcggctttggccacgaggccgggcaggcgctggccctgcatcctgatgttgaagtcatcaccttcaccggctccacccgcaccggcaagcagctgctgaaagacgccggcgacagcaatatgaagcgcgtgtggctggaagcgggcggcaagagcgccaacattgtcttcgccgactgcccggatctgcaacaagcggttagcgccaccgccggcggcatcttctacaaccagggacaggtgtgcatcgccgggacccgtctgctgctcgaggagagcatcgctgacgagttcctggcgcggctgaaagctgaggcgcaacactggcagccgggcaacccgctcgatccggacaccaccatgggcatgctgattgacaatacccatgccgacaacgtgcatagctttattcgcggcggcgaaagccaaagcaccctgttcctcgacggacggaaaaacccgtggcctgccgccgttggcccgaccattttcgttgacgtcgacccggcatcaaccctcagccgggaagagatcttcggcccggtgctggtggtgacccgcttcaaaagcgaagaagaggcgctaaagctcgccaatgacagcgactacggcttgggcgccgcggtgtggacccgcgatctctcccgcgcccaccgcatgagccgccgcctgaaggccggctcggtcttcgtcaacaactataacgatggtgatatgaccgttccgttcggcggctacaagcagagcggcaacgggcgcgataaatcgctgcacgcactggaaaaattcaccgaactgaaaaccatctggattgccctggagtcttga

SEQ ID NO: 259482 - DNA, 489 bp, Klebsiella pneumoniae
atggttcatcgccacgaacaggccgcccgggcggtaatcgcactggatctgataccgctggatgcgttcgcggatgatatcgccaccttcgaacatcatgctgccgagcatttttgccgcatccgggccgtagttcttttcaatgacgtcgatatcgcggctataggagttgaccagctgcccgccgttgcggccgctggcgccgaagccgatgcgcgccccttccagcaccaccacgtcgtagcccatttcggccagatgcagggcagacgagaggccggtgtagccgccgccgacgacgcagacgtcacagttgatggatccctccagcgtcgggaacggttcatacttgttggcgctggcggcatagtagctagtggtatgttcagtcatgatcaagactccagggcaatccagatggttttcagttcggtgaatttttccagtgcgtgcagcgatttatcgcgcccgttgccgctctgcttgtag

SEQ ID NO: 259483 - DNA, 306 bp, Klebsiella pneumoniae
atgatcggctggcgtcgcgtggcgaccaccatcggcgagaaaatcggtaagaaagggatgacctacgcacagggtatgtcagctcagatgaccgcagccgtatcgattggtctggcgagctataccggtatgccggtttccaccacccacgtgctctcctcctcggttgcggggacaatgctcgtcgatggcggaggtctgcagaagaagaccgtcaccagtattctgatggcatgggtactcaccctgcccgcggcgattctgctctccggcgcgctatactggctctcgctgcagattatctaa

SEQ ID NO: 259484 - DNA, 336 bp, Klebsiella pneumoniae
atgatcagcactgttgcgctgttttgggccctgtgtatcgtatgtgtagtgaatatggcacgctacttctcgtcgctgcgtgcattgcttgttgtgctacgtggttgtgaccctttgctctatcaatatgtcgacggcggcggtttttttacgtcgcatggacagcccagcaaacagatgcgcctggtgtggtatatctacgctcagcgctaccgcgatcatcacgacgatgagttcatccgccgctgcgagcgggttcgtcggcagtttatccttaccagcgccctctgcggtctggtgatggtgagcatgattgccctggctatctggcactag

SEQ ID NO: 259485 - DNA, 1467 bp, Klebsiella pneumoniae
atgaactccaccgcacccacaggcttgctgcagcaacctcgcccattcttcatgatcttctttgtggaactatgggaacgatttggctattacggcgttcagggcattccggccgttttctttgttaaacagctcggcttctcgcaggaacaggcgtttataacctttggcgcgtttgcggcgctggtatatggcctgatctccatcggcggctatgtcggcgatcatctgctcggcaccaaacgtacgctggtactgggcgcgattgtcctcgccgcgggctactttatgaccggcctgtcgctgctcaaacccaatctcatttttatcgcgctgggaaccattgcggtgggaaacgggctatttaaagccaacccggcgagcctgctctccaagtgctatccgccaaaagatgcccgcctcgacggcgccttcacgctgttctatatgtcgattaacatcggttcgctgctgtcgctgtcgctggcgccggtgattgccgataaattcggctacgcggtgacctacaacctgtgcggcgccggcctgattgtcgccctgctggtttacttcgcctgtcggggtatggtgaaagatatcggctctgagccggaccacaagccgttgagtctgcgcaatttactgtacgtgctggcaggaacggtggtgatgatttttgtctgcgcctggctgatgcataatgtaaaaatcgccaatctggtgctaattatcctctcagtggtggtgacgattttcttcttccgcgaagccttcaggctggataaaaccgggcgcaataaaatgttcgtcgcctttatcctgatgctggaagcggtgctgttttatattctgtacgcgcagatgccgacctcactcaacttctttgccatcaacaacgtccaccatgaaatactcggtttcgcgattaacccagtgagctttcaggcgctaaatccgttctgggtggtggtggccagcccgatcctcgccgcgatctacacacgtttgggcaataaaggcaaagacctgagcatgccgatgaagttcaccctcggcatgttcctgtgcgcgctgggctttttaactgccgcagcggcgggaatgtggtttgccgatgcccagggattgacctcgccgtggtttatcgtgctggtctatctgtttcagagtctgggagaactgctgattagcgccctggggctggcgatggttgccgcgctggtaccgcagcatctgatgggctttattctggggatgtggttcctgacgcaggccgccgcgtttctgctgggcggctacgtcgcaaccttcaccgccgtaccggacaacattaccgacccgctacaaacgctgccgatatacaccaacgtattcagtaaaattggcctggtgaccctgagcgtcacggtggtcatggcgatcatggtgccgtggttgaacaggatgattaatacaaagagcgcgtaa

SEQ ID NO: 259486 - DNA, 1065 bp, Klebsiella pneumoniae
atgcgcgttgccgatttttcctttgaattacctgaatccctgattgcccactatccgatgcctgagcgcagcagctgccgcttgctgtcattagacgggccgacaggcgcgctgacgcacggtactttcactgatttactcgataagctcaaccctggcgatctgctggtatttaataatacccgcgtgatcccggcccgtctgtttggccgtaaagccagcggcggcaagattgaagtgctggttgagcgcatgctcgatgataagcgtattctggcacatattcgcgcttcgaaagcgccgaaaccgggcgcagaactgctgctcggcgacgatgaaagtattaaagcgaccatggttgcacgtcacgacgcgctgtttgaagttgagttcgatgacgcgcgcagcgtgctggatattctcaacgctatcggccatatgccgctgccgccgtatatcgatcgtcctgacgaagacgccgaccgcgagctgtatcagaccgtctatagcgaaaaaccgggggccgttgccgcgccaaccgccggcctgcactttgatgagccgctgctggcgaagcttcgtgaaaaaggcgtggagatggccttcgtcacgctgcacgttggggccggaaccttccagccggtgcgcgtagacagcattgaagatcacatcatgcactctgaatatgccgaagtgccgcaggaggtggtcgatgcggtgctggcggcaaaagcgcgcggcaaccgggtgattgccgtcgggacgacgtcggtgcgttcgctggaaagcgcggcgcaggcggcaaaaaacgacctgattgagcctttcttcaacgatacgcagattttcatctacccgggctatcagtacaaagtcatcgatgcgctggtgaccaacttccatctgcctgaatcgacgctgattatgctggtctctgcttttgccggctatcagcatacgatgaacgcctataaggctgcggtagaacaaaaatatcgcttttttagctacggggacgcgatgtttatcacgtacaatccgcaggctatttttgagcgtccttaa

SEQ ID NO: 259487 - DNA, 1137 bp, Klebsiella pneumoniae
atgctcgacgcccgccacgataaatcgattatccccttcggcggcggctcgccggacgtcacccagccgagcctgaagcctatctggcgcgagctgagccgggcaattcagcacaaccttagcgaagtgctgaactacgacgagctggccgggcgtcgcgagctgcgcgaacagatcgcccgcctgatgctcgacggcggatcggtggtcaccgccaacgatctggtacttaccagcggctgccacagcgcgctgtcgctggcgctgctgtcggtgtgtcagcccggcgatatcgtcgccgtcgaatccccttgctactacggcaccatgcagatgctgcgcggattagggctaaaaaccatcgagatccccaccgatccggaaaccgggatcagcatcgaggcgttagagctggcgctggagcagtggccgatcaaaggggtgatcctggtccccaactgcaataatccgctgggatttatcatgccggatgcccgcaagcgggcggcgctatgcctcgcccagcgccacgatatcgttatctttgaggatgatatctacggcgaactggcgaccgaatacccgcgcccacgcacgatccattcctgggatatcgacggccgggtgatgctctgcagttcgtttaccaaaaccatcgctcccggcctgcgcatcggctggattgcccccggccgttattacgatcgtctgctgcagatgaagtatgccgccagcggcaccaacgttccctccacccaactggcggcttgtaattttattcgcgaaggccactatcaccgccacgtgcgaagaatgcggcagatctaccagcgcaatatggagatctacacctgctggctgcgggagtttttcccctgcgggatctgcgttacccgcccgaaaggcggctttatgctgtgggtcgagctgccggagcaggtggatatggtctgcgtcgcgaagcagctgtgccggctgaagatccaggtcgcgccgggatcgctgttctccgcatccgggaaataccgcaactgcttaaggatcaactgcgccctgccgccgacagataaacataaagaggtgatggtgcagctgggaatggcggtgaaggtggcgatggagtgggaggcggagtga

SEQ ID NO: 259488 - DNA, 777 bp, Klebsiella pneumoniae
gtgttggtcgctgaagaaggtatccgccgggcgctcgccgaggttagcggaaaggccacgaatcgcaaggttcatcttcgccagcttgtaggtggtggccgtcagctcctgaccgtacagggcgatatcacggcttttcccctgatggctttcgacaaacttcaccgactggacaaacattcctgccgagccgcagcacgggtcatagattttgccctcgaacggttcgagcatttcggtcagcagcgtcaccacgcattttggcgtatagaactcgccgccgcctttaccctcagtggcggcaaacttgccgaggaagtattcatacacgcgaccgaccaggtcttctttcgacagcgcttccacgtcggtttcgtgggccagcgtttcgatgttatcgatggtatcgataagcgatgccagcttcttggtttccagattctggcggctgaagtagttgtccggcagcgcgcctttcagcgtcgggttgcgcttctcaatggtggagagcgcggtatcaatgcgcacggcaatatcatcctgtttggcgtgctgcttgatgaacgaccagcgcgcctcttccggcagatagaagatattgtcctgctgatagaagacttccatttcgaggaaatcgccctggccttcgtctttcattttctgacggcgggcttcaaacttatcgctgataaatttgaggaacacgaggctcagcaccacgtgcttgtactcggaggattctacgctgccgcgaagctggttcgcggtatcccataa

SEQ ID NO: 259489 - DNA, 1899 bp, Klebsiella pneumoniae
  misc_feature (1349)..(1358): n is a, c, g, or t
atgagcaaaggttcgacaagcagtgacgccccgtttggtacactattaggctacgcaccgggcggcgtggcgatttattcatctaattacagtagcttaaatccgcaagattatccggatgacgccacgttccgcagctatatcggtaatgagtatatggggcataaatggcagtgcgtggagttcgcgcgccgctttctgttcctcacctacggttttgttttcaccgatgtcggcatggcctacgagattttctccctgcgttttttacgcgaggtggtcaacgacaatattctgccgctgcaggcgttcgccaacggctctcgtcgtccgccgatcgccggctcgctgctgatctggcagaaaggcggcgagttcaagcacacgggccacgtggcggtcattactcagctggtagggaacaaggtgaggatcgccgaacagaacgtgattcactcgccgctaccgcaggggcagcagtggacccgcgagctgacgctggaagtgaaaaatggcctctacacgattaaagacacctttgccgataccgaaatcctcggctggatgatccaaaccgccgataccgaacacagcctgccgcagccagtgctgccgggtgaggcgatggcgattaaaggcgcgcggttgccgaacaaaggccagtttcgcggcaactggctcaacgagaaagattccctgcaaaaagcctatgtcgaagccaacggccacgtcatcaataaagacccttaccagtatttcactattaccgaaagcgccgagcaggagctcatcaaagccaccaacgagctgcatctgatgtacctgcacgctaccgacaaggtgatgaaggacgatagcctgctggcgctgttcgatattccgaaaattctctggccgcgcctgcgcctctcgtggcagcgccgacgccatcatatgattaccggtcgtatggatttctgtatggatgagcgcgggctcaaggtgtatgagtacaacgccgactccgcgtcctgtcataccgaaggcgggctgatcctcgaacagtggctgaagcagggctactgcggcaccggccacaacccggcggaaaacctgctcgatgagcttgccggagcgtggaagcacagccgggcgcgcccattcgtgcacatcatgcaggataaggatctggaggagaactaccacgcgcagtttatccagcgttcgctgacgcaggccggtttcgagagcaaaattctttacggccttgatgagctgcgctgggatgccgccgggcagttaattgatgccgatggacgcctggttaactgcgtctggaaaacctgggcatgggagaccgccattgagcnnnnnnnnnnggagaccgccattgagcaggtgcgcgaagtcagcgccgacgagtacgcggcggtgccgatccgtaccgggcaccctgataatgaagtgcgtctgattgacgtcctgctgcgcccggaagtgttagtcttcgagccgctgtggacggttatccccggcaacaaggcgattttgccggtgctttggtcgctgttccctaatcatcgctatctcctggataccgattttgtggtcaacgagcagctggcggaaagcggctatgcggttaagccaatctcaggccgctgcggcagcaatatcgatctgattggcccgcaggatgaagtgctggataaaaccagcggccagtttttcgatcgcaaaaatatttaccagcagctgtggtgcctgccgaaggtggatggcaaatacatccaggtttgcacctttacggttggcggtaactatggcggtacctgcctgcgcggagacgattctctggtggtcaaaaaagagagcgatattgagccgctaatcgtgctaaaagacaacgatagccgttaa

SEQ ID NO: 259490 - DNA, 561 bp, Klebsiella pneumoniae
atgagcacaccttcgcatctgacctcccaaccgctggtctggggtcatgggccacgcacctttgaggtgttccttgaacccacctgcccctattccgttcgcgcctttaataagcttgatgacctgctggatgaagttggcgcagataacgtgacgatcaaaatacgtttgcagtctcaaccgtggcatctgttttccggcgtcatcgtccgctgtattctcgccgcgtcaaccctcccgcacggccgcgagcaggcgcataaggtgcttaaagccgtcgccgaccaccgcgaagagtttgagtttaccgaccactgtagcgggccgaatatggacgccacgccgcagcagattattgaacgtctcgaacgctacagccgcgtctcgctggccgcagcgtttgcccgccccgagctgcaaaacgagatcaaatggcatagcaaatacgcccgccagaacggcatccacgtgtcgccgacctttatggttaatggcctggtgcaggcggatctcggcagcggcgacgacgtcagcgtatgggccgcgcggattctggcttag

SEQ ID NO: 259491 - DNA, 1113 bp, Klebsiella pneumoniae
atggtcgccgccgcgccctttggcgatatcgtggaagagggcggcgataaagatcagctccggatgcgtcaggcgcggccacagctcaacgcacagcgggtgacggctacggatctcttctttggcgaagctctccagcttgagcagtacgcggatcgtgtgttcatcgacggtataggcgtgaaacaggtcaaactgcatctgaccaacaatatgcgaccattgcggcatataggcccacagcacgctatggcggtgcatcggcagcagtccccggctaaccgcgccctgatggcgcagcatactgaggaacagggtccgcgcttcgggaatatagcaaagcggttgcgtcagatggcgccgggcgtggcgcagatggcgaagcgtggtggagtagataccggtgatgctgctgttgcgcaccatcataaagaacatgcgcagaatcgcctgcggttcgcggataaacagcgtgtcgtcgcgcagatcgataagcgtgccgcgcagctgaaaatcatcatcaatcggccgcggtttctcatcttcggtgagcgccagaatcgcttcttcaaacagctggataagcatttggttcagctcgctgacccgacgagtgacgcggaagaaatccttcatcatatgttcgatcggctggttgccttcgccttcatagcgcaggcgacgggcgacgctgaattgcctgtcgaacagcaggcgattatcgtagcggttgagctcaagatgaagcgcaaaacgaatccgccacagctgatgcaggcattcattaagctcgttgcgctcggcttcggtcaggaagccgaaaccgaccatttcatcaagcgaggtggcgccgaaatggcggcgcgcgatccactgcagagtatgaatatcgcgcaggccgccggggctgcttttcacatccggctccaggttatagctggttccgtgatagcgctgatggcggacattctgttcttcaacttttgccgcaaagaatttttccgatggccagaagccgtcgctgaagatgtgcttttgcagttcaaggaacagcgcgacgtcgcctataagcagacgcgattcgatcaagttggtggcgacgctgaggtctga

SEQ ID NO: 259492 - DNA, 351 bp, Klebsiella pneumoniae
atgacgcacccgctcgcgcatatccggcgtattttgcattccccggcgcagctgcttttcagtggcgaaatagagctcgcgcagcaggctttgcttccagctattccacaggttttcgttggtggcgcagatatcggcaacggtcaggcagaccagatagtgcagacgattctccgtctgtacctcttcggcaaactgcttgatcacttccggatcctggatatcacggcgctgggcggtgaccgacatcagcagatgatggcgcaccagccaggcgaccagctgggtttcgcgagagttaagaccgtggagctcggcgaatttcaacacatcctgcgcgccgagaattga

SEQ ID NO: 259493 - DNA, 462 bp, Klebsiella pneumoniae
atgcctcagttttgccgcctgacggcggggtgccggcggctgccagctgcgctgggtgatggtctgttccaggcccacgcggatcatttcgtgcctgtcggcggaaagcggacttccgtccggctcaagaacaataaaggtatccatcgccataccgtcgcgggtagtaaagatctgcgcatcgtgaacgctaagattacgtcgatccagttcgccgcaaacggcggcaaagagataagggcggtccggactccagataaaaatctcggtgccgccgcgcgaggcgtgggaactgagcaggatcatcggcttactgagatcgtgctgcagcagattgcgcgcatgccaggcgagctggtttggcgtatggcgcacgaagtagttcgcgcggcagcggttccatatttgatgcagcgcctgttcattaatattttccattcgcagcagcgccagcgcctgtag

SEQ ID NO: 259494 - DNA, 882 bp, Klebsiella pneumoniae
atgaattacgcccgccaggctcaggcgctgtttgccgactgcgggattgccatgcagggcgatgccagccagccgcatctgcgcgtgacgccgctgggaatcttacgcgcggcctggctttctccgcaggaaatcgccactgcgccgctacccgtcagcggcgtctgcgtcattggcatcagcgggttcggtgacttccagccgcatcttgccgcggcctctctgcaccagcacggcgtgaccgccgaagcccacgagatagaattaccccttcttgatgttctgcgcgatagcccatccgaatttcgcgccgccaatatcgcccgccggctggacgatgaagcgcactggcctgccctgctggcggcgctgcgcccgctggcgcagcagcataatttactgattatgcccgcctgcttcggcctcgccgacgatcgcttgtaccagtggctgcggcagcgtctgccctgcccgctgcgcctgctgcctaccctgccgccatcggtgccggggatgcgcctgcacgcccagctgcagcggcaatttatccgcagcggcgggacctggctgaccggggatgaagtcattgatatcagccaccaggacggtagggttaacgcgatctggacgcgcaatcacggcgatattccgctgcgtccgcgcttcgctgtgctggccagcggcagctttttcagcaacgggctggtcgccgaacgtagcggcgtgcgcgagccgatcctcggtctggatcatctgttcgccgtcggttcgatcctcggcggttttgatgccatcgcgctgggatgcggcggcggcgtgtgcgcagtgaccgcgcttcacgccgcagggctaattagcgagcttgccggaggtgagtcatga

SEQ ID NO: 259495 - DNA, 1179 bp, Klebsiella pneumoniae
atgaacgacacgcgctttgaacactgtattaaatgcaccgtttgcaccaccgcctgcccggtcagccgggttaatccgcgctacccggggccaaaacaggccgggccggacggcgagcgcctgcgcctgaaagacggcgcgctctacgacgaggcgttaaaatactgcattaactgtaaacgctgtgaagtcgcctgcccttcagacgtcaaaatcggcgatattatccagcgggcacgcatggaatacggccggcaaaagcccacgctgcgcgataccatcctcagccacaccgacctgatgggcaccctctccacgccgtttgctccgctggtaaacgccgccaccgggctgatgccggtacgtcgggtactggatgccgcgctcaaaatcgatcaccgccgctcgctgcccaaatatggcttcggcacctttcgccgcgcgtatcgacagctggctggccaacaggcgcagtacgccgagcaagtggccttctttcacggctgctatgtgaactacaacaatccgcagttgggtaaagatcttatccgggtgctcaacgccatgggcatcggcgtgcagctattgcataaagaaaaatgctgcggcgtgccgctcattgccaacggtttttttgcgaaagcgcgtaaacaggcacagagcaacgttaccgcgatgcgggaacataacctgccagtggtggcgacgtcctcgacctgcacttttacgctgcgcgatgaatatccgcacatccttgatatcgataatcacgatgtgcgcgaccgggttgaactggcgacccgctggatctggcgtcagctggacgccggacggaagctgacgctgaaatcgctgccgctgaaggtgatctatcacacgccctgccatatggagaagatgggctggtcgctgtatacccttgagctattgcggctgatccccggcttgcagctggaggtgctcgactcgcaatgctgcggtattgccggcaccttcggcttcaaatcggagaattacgactcatcgcaggcgattggcgcgccgctgttccgacaaattgaggagagcggcgcggacctggtagtgaccgactgtgaaacctgtaaatggcagatagagatgtccaccagtaaacgctgcgagcatcccatcactctgctggcgcaggcgctggcctga

SEQ ID NO: 259496 - DNA, 804 bp, Klebsiella pneumoniae
atgaacgcaattttatcgaacccatttaaagcggggttattgcaaggggaagcacaaattggcctgtggctgagctcgacctcctcttatatggctgagattgccgccacctcgggttacgactggctgctgattgacggtgaacatgcgccgaatactattcaggatctttatcatcagctacaggccattgcgccctacgccagccagccggtgattcgtccggtagagggcaatcgtagcctgattaaacaggtgctggatattggcgccagaacgctgctgatccccatggtcgataccgcagaacaggcgcgggacattgtctcggcgacgcgctatccgccgctggggacccgcggcgtcggcgccggggtagctcgcgccgcgcgctggggaagggtagagaactatatggcgcaggccaacgatgagctgtgcctgctgattcaggttgagagcaaaaccgccctcgataatctggatgcgatccttgaagtcgaggggattgacggcgtctttatcggcccggcggacctgtcggcctcgctgggctacccggataacgccggtcatcctgaagtgcagcgggttattgaacagagcatccgccgcattcgcgcggcgggaaaggcggccggattcctggccgtcgatccagagatggcgcacaaagcgctggcgtggggggcgaatttcgttgccgttggcgtcgataccaacctctataccagcgcgctggataaacgactggcgatgttcaggccggtagccgaacaggcggagggcaaggggagctactag

SEQ ID NO: 259497 - DNA, 360 bp, Klebsiella pneumoniae
ttgaccctgctggcggcggcaattggcattgcggtctccgggctggtgtcgccggtactggccatcatcgcgctgtgcgttgccgccgtcggcgtcattgccgtacagccggtcttctggactatgccgacgcagctgttatccggcacggcgctggccgcaggcattggtttcgtcaacctgtttggcgcgatcggcggatttttagcgccgattatacgcgtccaggctgaaacgatgttcggcaataattctgccggattattgaccctcgcctgcgtggcggttatcggggttgttattatcttttcactgcgcgtgagccgcacggtaccgcaggccggcagcgtacagcattaa

SEQ ID NO: 259498 - DNA, 1836 bp, Klebsiella pneumoniae
atgaaaacgttagttgacgatgcgccgagcgagcctgtcttcacgccattgccggaagtgcagcagcctgctccgcagtatcagcagccggtccagcattcgcagcccgtgccgcagccgatgccgcatcagcacgcccctcagcaaccgcaaaatgtgcagcatcaggcttatcaatctgcgcagcatcagccggctcaacatccgcaaatgccgcagcaggctgctggcagctatccgcagcagcatgcttctcaggggcacgccccgcagcagccggctccacagccgcaggagagtctcattcatccgttgttgatgcgcaatggcgatagtcgcccgttgcagaagccgacgacgctgctgccgtctcttgacctgcttacgccgcccccggctgaagttgagccgattgatacctttgcgcttgagcagatggcgcgtctggttgaagctcgtctggccgatttccgcattaaagccgacgtggtgaactactcaccgggcccggtaatcactcgctttgagcttaacctggcgccgggtgtgaaagcagcgcgtatttccaacctgtcgcgagatttggcccgttccctgtccacagcggcggtgcgcgtagttgaagttattccgggtaagccttacgttggcctggagctgcctaataaaaaacggcaaaccgtttacctgcgcgaagtgctcgataacgcgaaattccgcgacaatccttcaccgctcaccgtggtcctcggcaaagacatcgcgggcgaacccgtaaccgccgacctggcgaagatgccgcacctgctggtggctggtactaccggttccggtaagtctgttggggtcaacgccatgatcctgagcatgctttacaaagcgcagccggaagatgtgaaattcatcatgattgacccgaaaatgcttgagctgtcggtttatgaaggcataccacatctgttgaccgaggtggtgacggatatgaaagacgccgccaacgctttgcgctggagcgttaacgagatggagcgtcggtataagctgatgtctgcgctgggcgtgcgtaatctggcgggttacaacgagaaaattgccgaagccgcgcgtatgggacggccaattccggatccgtactggaagcctggcgacagtatggatgcaacccatccggtactgaaaaaagagccttatatcgtggtgctggtcgatgaatttgccgacctgatgatgaccgttggtaagaaagtggaagagctgatcgcccgtctggcgcagaaagcgcgcgccgcgggtatccacctggtactggcaactcagcgcccttcggttgacgtgattaccggcctcatcaaagccaacatcccgacgcgtatcgcctttaccgtctcgagtaaaattgactcgcgtaccatcctcgatcagggcggtgcggaatctctgctggggatgggcgatatgctctactccgcgcctaactcgacgattccggtgcgcgtgcacggcgcttttgtgcgcgacgaggaagttcacgctgtcgttcaggactggaaagcgcgcggtcgtccgcagtatgtcgatggcatcacctccgacagcgaaagcgaaggcggcggcggtggctacgatggcggggaagagctcgatccgctattcgatcaggccgtgaattttgtgacggaaaaacgcaaagcctccatttctggggtacagcgtcagttccgcattggctataaccgcgccgcgcgtattattgagcaaatggaagcccagggtattgtgagcgagcagggtcataacggtaaccgtgaagtgctggctccgccgcccttcgagtaa

SEQ ID NO: 259499 - DNA, 255 bp, Klebsiella pneumoniae
atgcgatcccggcggctgctcgcttgcgtagcgctgctgttgagacgcggcaaactgacgagccagctcggcttcagcagcggaatcgtcatctgcagtttcatcttcggcagcgtagctatcaccatagcgctgattttgcgcagcggcgaactgacgcgccagctctccctgctcgagctctgcaacttcctcgtcagacagcgaatcatcatagtgctgatgctcagcctgacgcgcgcgctcttcggctaa

SEQ ID NO: 259500 - DNA, 2184 bp, Klebsiella pneumoniae
atgagctgcgccagctgcgtatcccgggtacaaaacgcgctcgccgcggtgccgggcgtctcgcaggcgcgggtcaacctggcggaacgcactgcgctggtattgggcagcgcgtccgccgcagaattagtccaggccgtagagaaagcgggctacggcgcggaggctatcgaagacgacctcgaacgccgcgagcgtcagcaggaaaccgccatcgccacgatgaagcgcttccgctggcaggctatcgtcgccctgctggtcgggatcccggtgatgggttgggggatgatcggcgacaacatgatggtcagcgatgataaccgtaccctgtggctggttatcggccttgtcacgctggcggtgatggtatttgccggcggccatttttaccgcagcgcgtggaaaagcctgaaaaacggcaccgcgacgatggatacgctggtggcgctgggtaccggcgtcgcctggctctattcgatgagcgtcaatctgtggccgcagtggtttccgctggaagcccgccacctttattatgaagccagcgcgatgattatcggtctgattaacctcggccatatgctggaagcccgtgcacgtcagcgctcttcgaaagcgctggaaaaactactcgatttaaccccaccgtcagctcgggtggtcaccgacgaaggcgaaaaagatctgccgctggcggaagttcaggcgggaatgaccctgcgtttgaccaccggcgatcgcgttccggtcgatggcatcattagccagggcgaggcctggttcgatgaagcgatgctcaccggtgagccggtgccgcagcaaaaaggcgacggtgacgccgtgcatgccgggaccgtagtgcaggacggcagcgtactgtttaccgccagcgccgtcggcagccagaccaccctggcgcgtattatccgcatggtgcgtcaggcgcagagcagtaaacctgaaatcggccagctggcggacaaaatctccgccgtgttcgtcccggcggtcgtggcgatagccctgttcagcgccgcgatctggtactttttcggtccggcgccgcaaattgtctataccctggtgatcgccaccacggtgctgattatcgcctgtccgtgcgccctggggctggcaacgccgatgtcgattatctccggcgtgggccgcgcggcggagtacggagttctggtgcgcgatgccgatgcgctgcagcgcgccagcaccctggatacgctggtctttgataaaacgggtaccctcaccgagggtaaaccgcaggtggtggcgataaaaacctttgccgccatcgatgaaaccaccgcactgcgtctggcggcgtcactggagcaaggctccagccacccgctggcgcgctgcagcgcatcggcatcgcgcaccagaactctgcctgcggtagataatttccgcaccctacgcggactgggggtcagcggtgaagccgaaggccaccgtctgctgctcggcaaccaggcgctgcttaatgagcaaaagatagcaacggctgaaatagaaggcgaaatgaacgcccaggcgtcacagggcgcgacgccggtgctactggcggtagatggtcaggcggcggcgctgttcgccatccgcgatccgctgcgtgaagatagcgtggcggcattagccaggctgcaccgccagggttatcgtctggtcatgctgaccggcgataacccaaccaccgccaacgctatcgctaaagaggcgggcattgatgaggtgattgccggggttctgccggacggtaaagccgatgcgattaagcgcctgcaaggccagggacatcaggtggcgatgatcggcgacggtatcaacgatgcgcccgcgctggcgcaggccgatgtggggatcgccatgggcggcggcagcgatgtcgctattgagacagcggcgattaccctgatgcgccatagcctgaacggcgtcgccgatgcgctggagatcgccaaagccacgctgcgcaacatgaagcagaacctgctgggggcatttgtttataactcgctgggcattccgattgccgccgggatcctgtggccgctaaccggaacgctgctcaatccggtggtggcgggcgccgccatggcgctctcttcgattaccgtcgtgagcaacgccaaccgcctgctgcgctttaagccaaaatcctaa

SEQ ID NO: 259501 - DNA, 795 bp, Klebsiella pneumoniae
atgggcctgttaaaccaaataaaaatgctgtggcaagccgccctcggctcgtcttattcctggcccgcgctggatatcacccttcccggggaacgctatctgcacctggtcggcagtattcatatgggcacccgcgatatgtcgccgccgcccgcccggctgttaaaaaagatccgtcaggccgatgcgctgattgtggaagcggatattagcggcagcgaaacgccattcagcaacctcccctcctgtccgccgctggcggaacgcctgaaggcatcccagcttgctgcactgcaagagcgggcggcagaaatgggtctgtctgtcgcgctgttcgacagtcaaccgctgtggcaggtggcgatggtactgcaggcaactcaggcgcaaaaactggggctcagggcggattacggcattgattatcaactgctgatggcggcgcgcgagagccatatccgcgtgatggagctggagggagccgacagccagattgcgctgctgcgggatctgcccgatggcggtctggcgctgctggaggataccctcacccactggcgcacaaatgcgcgtctgctgcaggtgatgatcggttggtggctcgatcagccgccgtcaagaggggctacctcgctgccgacaacctttagccagtcgctgtatgacgttctgatgcaccagcgcaacctcgcctggcgggaaacgctgctggcgctgccgccgggacgctacgtggttgccgtcggggcgctgcatttatacggcgaagggaatctgccggacatgctgacgtaa

SEQ ID NO: 259502 - DNA, 612 bp, Klebsiella pneumoniae
gtgctgcgtattatcgttgagaagaacctcaatctggacctgcagaccctcaccgaagaagcggtgcgtctgtacggcgataagctgaccaacggcaacgtcgttgatgatgttatcgacttcatgctggggcgcttccgcgcctggtatcaggatgaaggctataccgtcgacacgattcaggcggtactggcgcgtcgtccgacccgtccggcagacttcgatgcgcgtatgaaggcggtttcccacttccgtaccctcgaagagtcctctgcgctggcggcggccaacaagcgtgtttctaacattctggcgaaatcagacgttacgctgaacgatatcgtccatgcttcggtattgaaagaagcggccgagatcaagctggcgggtaatttagtcgtgctgcgcgataagctgcagccgtacttcgccgaagggcgttaccaggatgcgctgattgagctggcgtccctgcgcgagccggtggatgagttctttgagaacgtgatggtgaacgcagaagatcaggacgtgcgcgtaaaccgactgacgctgctgtccaagctgcgcgatctgttcctgcaggtagcggatatttccctgctgcagtaa

SEQ ID NO: 259503 - DNA, 390 bp, Klebsiella pneumoniae
ttgctgaatagaggattcaaggctggcgagggtttttttacgctcgttgcgcgcctgctccagcttgctctgctgggcgcgctgctcgtacaccagggtttgctgctggctctgtttctcttccagcatggatttttgcaccgccacgtcttcgcgagtttgcttgagctgggcgatggtttcctgacgcgcctgattcagatagccaaagtaggcctgcagacgctgattacgctgcccctcttcgccgctgaggatcatctggatgccggtgtgcggcccctgacgaaacgcggcatcgagctgggcggaaaggttgcgctcctgcgaggcgcgctgacgctccagcttcgcgagcgcggcgttcatttcgtcgatctgcttatttag

SEQ ID NO: 259504 - DNA, 1545 bp, Klebsiella pneumoniae
atgtcggtttctaaaaaacctatggtactggtgattctggatggctatggctaccgtgaagaccagcaggataacgctatttacagcgccaaaacccctgttatggacgcactgtgggcaaaacgtccgcatactctgattgatgcttcaggcctggaagtcggtctgccggatcgtcaaatgggtaactccgaagtgggccacgtcaacctcggcgcgggccgcatcgtgtatcaggacctgacccgcctggacgttgaaatcaaagaacgcaccttcttcgccaacccggtactaaccggcgcggtggataaagccgttgccgctggcaaagccgtgcatattatgggcctgatgtctccgggcggcgtccacagccacgaagaccacatcatggcgatggtggagctggcagccgaacgcggcgcggataaaatctatttgcacgctttcctcgacggccgcgataccccgccgcgcagcgctgaaaagacgctggcgaaattcgaagacaaatttgccgcactcggcaagggccgcgtcgcctcaatcattggccgctactacgccatggatcgcgacaaccgttgggatcgcgttgagcaggcttacgatctgatgactctggcgaaaggcgagttccaggccgataccgccgttgcgggcctgcaggccgcttatgcgcgcgatgaaaacgatgaattcgtaaaagcaaccgttattcgcgctgaaggccaggccgatgcggccatggaagacggcgatgcgctgattttcatgaacttccgtgccgatcgcgctcgcgaaatcacccgcgccttcgttaacgccgatttcgacggatttgcccgtaagaaagtggttaacctcgatttcgtcatgctgaccgagtacgccgcggacattaaagtcgcctgtgcttatccgccggcatctctggtgaacaccttcggcgaatggatggcgaaaaatgacaaaacccagctgcgcatctccgaaactgaaaaatacgctcacgtcaccttcttcttcaacggcggcgttgaagagccgttcaaaggcgaagagcgcattctgatcaattcaccgaaggtcgcaacctacgatctgcagccggaaatgagctccgctgagctgaccgaaaaactggttgccgccatcaagggcggtcagttcgacaccatcatctgcaactacccgaacggcgatatggttggccacaccggggtgatggaagccgccgttaaagcggtagaagcgctggatgactgcatcgaccaggtgagcaaagccgttgaatccgttggcggacagctgctgatcaccgcagaccacggcaacgccgagcagatgcgcgatccggccactggccaggcgcacaccgcgcacaccaacctgccggttccgctgatttacgttggcgataaaaacgtcaaagcggtcaacggcggcaaactttccgacatcgcgccgaccatgttgacgctgatgggaatggaaatcccgcaagagatgactggcaagccgctgttcatcgtggaataa

SEQ ID NO: 259505 - DNA, 345 bp, Klebsiella pneumoniae
atgcagatccggtccgtccgcgcggcaggggatcgccgccagttccagatgatacagcgccgccagaaccttaaagcccgagtaggtgagcgcatcgaccgccaccacgtcccccgggcgcagaagccccatcacggtcaccgccagcccgtgctgggcgccgttgacgatcagcacattttccgcgtcaggggcaaagcggctgctggtcagatagcgagcgataatttcacgttccgggagccgtccggcatgcggctggtagcgcagatgagcctcgatatcccctacccccgccagctgcctgagcgcctcgcgcagcgcatccccctgcgtcggcagtga

SEQ ID NO: 259506 - DNA, 900 bp, Klebsiella pneumoniae
atgatgatgctcaataacctggtcgcgcaaacgcgtttaagcattcagcgtatttatcaggttctcgcgatgccggagttatcgctgccgcagtctgaccagcagccgcaagaggcgagcattacctttgagcaggtgagctttcattatccgcaagcgcgtactggcgccgcgttgcaggaggtgagctttcatgtgcctgccgggcaaattgtggcgctggtcgggccaagcggcgccggaaaaagcaccgtggcgcgcttgctgctgcgttacgccgacccggacaaaggccatatccgtattggaggcgtggatctgcgtgatatgcagacggacaccctgatgaagcaactctcgtttgtgtttcaggacaacttcctttttgccgacacgatagccaataacattcgtctgggcgcgccggatacgccgctggaggcggtaatagcggcggccagagtggcgcaggcccatgattttattagcgctctgccagaaggttacaacacacgagtcggggaacgtggggtatttctctccggcggccagcggcagcgcattactatcgcccgggcgcttttgcaggatcgccccatcctggtgctcgatgaggcgacggcgtttgctgacccggaaaacgaagcggcgcttatcaaggcgctcgcggcggccatgcgtggccggacggtcatcatggtcgcgcatcgtctctcaatggtgactcaggccgatgtgatattgctgttttccgacggacagctcagggaaatggggaaccatacgcaactgttggcgcagggcggcctgtatcaacggctctggcaacactatcagcaggcgcagcattgggtgccgggtggaacacaggaagaggtggtggaaaatgaaagacaataa

SEQ ID NO: 259507 - DNA, 1803 bp, Klebsiella pneumoniae; identical to SEQ ID NO: 104449

SEQ ID NO: 259508 - DNA, 1254 bp, Klebsiella pneumoniae
atgaccacattagagactaacgccgcgcctgctgaggcgagcggcgagggcatccgcacgcctgaaaaagcggttcgctgggccattccgctgtcgctgctggcctgcgtactgctggcgttcttcgacaaaatcagtatcgccgcgctgttttccgatagccacttccagcaggcgatggggatcgatttcgacaccacccgtctgggcatactgatgagcgctttcctgctgagctatggattctcttcggtgctgctaagcggcctgggcgaccgtattgcgccgctgcgcctgcttaccggaatgatggcggtgtggtgcgttttgatgctggtgatgggctttacccataactatacgctgatggtgacgctgcgaattttgctgggtatcgccgaagggccgctgttcccgctggcgttttctatcgtccgccatacctttccccagcatttgcaggcgcgcgccaccatgctctggctgctcgggacgccggtcggcgcggcgattggcttcccgctgtcgatttggctgctcaacaccttcggctggcagagcaccttctttgtgatggcgatgctgacggtaccggtactgatttttgtgcgcatcgggctgcgcggcatcacgctgggggcaaaagccagcggcgggcaaacgtcgcaggcacgccgcagcgcgcgccgcgagctgtttgtcagcccgcacttctggatgatctgcatcttcaacatcgcctttctcgcctatctgtggggcatcaacggctggctgcccggctacctgattaagggtaaaggcattcatctcgaacacgccggctggctgtcgtcgatgccgtttatcgccatgctgctcggcgaaatcatcggcgcctggctgtctgaccgcgtcgataagcgcgccgccgcctgctttatttccctggcgggcgcaggcattggcctggcggcggtgatgcatttcaccaccccgctgccggtgattgcggcgatgagctttagcacctttatgtgggggaccggcgcaccgaatatttttgcgctgctggccaaggcaacccatccgcgagttagcgccacggcgggcgggcttttcaacgggctgggaaactttgccggggcgctatcgccggcggtgatgggcgcgctgatcgccttcacccacagcatggattccgggctgatttttctggcggtgatggcggcggtgggctgcgtcctgttactgccgctgctaagacgttactga

SEQ ID NO: 259509 - DNA, 303 bp, Klebsiella pneumoniae
gtgcgtaacgcgctgcgctactcgcataccaaaatttcggtaagcttctcggtggataaagatggcatcacggttaacgtcgatgatgacggcccgggcgtaagtccggaggatcgcgagcagattttccgtccgttctaccgtaccgatgaggcgcgcgatcgcgagtctggcggtaccgggctggggctggcgattgtcgaagcggcaatccagcagcatcgcggttgggtgaaagccgacgacagcccgctgggcggcttgcgcttaaccctgtggctgccgctgtacaagcgtacctga

SEQ ID NO: 259510 - DNA, 675 bp, Klebsiella pneumoniae
atgcactatccggtgaatgtctttgtgggcaaggtaagggattacgacggcagccgtccaagcgccatcggtaaaattcagatcgacggtgaactgaccctcggcgatttggggctggagggcgatgagcaggcggagaagaaaattcacggcgggccagaccgcgcgctgtgccactatccccgtgaacactatgcccactgggcccgtgaacttccgcagcaggcggatcttttctgcgccccggcgtttggcgaaaatctctcgaccgaagggctgacggaaaaaaatgtctatattggcgatatcttccgctggggagaggcgctgattcaggtgacgcagccgcgatcgccgtgcttcaagcttaactaccattttgccgtcagcgacatggcgcagcttatgcagaatagcggcaaaaccggctggctgtatcgggtagtggcgggcggacgagtgtccggcgatgcgccgctggcgctggtttcccgcctcagcgacgttagcgttcacgaggcgggagctattgcctggcaaatgccgttcgatgacgaacagtatcaccgcctgctatcggcggcggggctgtcggtaagctggagccgtaccatgcagaaacggcgcctgagcgggaagatcgaaaataattcgcggagattgtgggggaaatag

SEQ ID NO: 259511 - DNA, 3018 bp, Klebsiella pneumoniae
gtggccggtgaacccgcgcacattgccgccatcgcccccggtctggcggaaaagcagtggctcgaaggccaccgcacggtgctgatttacggcggcactctgtcattggcgccggatactgaacgcctggccgccctgcgcaagctgcgccgcagccgtccgctggacggcatcgtgctggcgcttgatgagacgcaggcgacctgcgctaccctggataaccatcttcgcaccctcgagcaggtcggagaggccctgcgctggcagccgccggtgtacctgtggcaggtgactgacagcgcctggccgcaggatacccgcatcagccagccggtgggggcgctgttcccgcccggcgccacgccggagggggtggcgcaacaactccgcgccattctgccgtccctgggggaaaggggaatgcagcagctgtgcgctgacccggcccatgattatctgctgcgcctggggcgcacgcttgaggggagcggcattgcccgctggcgtacgctgctgacgccctggctgacggagcgcctgcagcgcgttccgctgcgcggcctgatgttcagcccgccgctggcgccggacacgaccgccggggagacgccacatcctcaccgctggtccgctccggcggtctggcagggggtgagggcggactgcgctcaggcgcggggcgtgcgggtcgggctaccctggcagcgcgcatcgggggttatcgccctgtcgctgatggccctgtggggggcgggcagcctggtctccttcgccgttaaccgccagcatattgtcagcgcggcgcagctgctggtgagctctcccgcggtgaatgatgaacagctgatggcgctgcaggcgctgcgtaacgatatcggacggttacagcatcagcaggcgcatggcgcgccctggtatcagcgcttcgggctggaccataacgccccgctgctggcggccctgatgccgtggtacgggcaggcgaataaccggctgatacgcgatgcggcggcgcaggcgctcacaaagcagctgaacgcgctggcagacctgccgccgcgcagtccgctgcgcgagaaacgggcgaagccgggctacgaccagctgaaggcgtacctgatgatggcgcacccggagaaggcggacgccgcgttttttgcgcaggtgatgaaaaccgccgaaccgtcccgtccgggtctgtccccggcgctgtggcaggagatggcgccggatttgcacaccttttacatgcagagcctgcccgcgcagccgtcctggaaaatcacgccggatgcggcgctggtggcgcaggtgcgcagggtgctgctggagcagacaggccagcgcaacgccgaaagcacgctctatgagaacatgctgacggccgtccggcgcaactatgccgatatgacgcttgaggacatgacgccgcagaccgacgcccgccgtctgttcagcacggacgaggtggtgccgggaatgttcacccgccaggcgtgggaaggcgggattcaggacgccatcgacgccgccgtggcctcgcggcgcgatgaaatcgactgggtgctgagcgacaaccgtaacaccgtgtccacggatgtctccccggaggcgctgaaacagcggctgacgaaccgctactttaccgattttgccggagcgtggctgaacttccttaacagcatccggctgaatccggcgcacaatattaccgatgtcaccgaccagctcaccctgaccggcgatgtccgccagtcgccgctgattgcgctgatgaacaccctggcctggcaggggcagaccggagagcagggggaggctctctctgattccctgatgaggatggcgaaaaatctgccgggtaaggataaaaagccggtcattgaccagcaggcagccggtccgcgcggcccgctggacagcaccttcggcccgctgctgaccctgacgggcaaaaacagcgcgcagaaggtgatggctgccgacagctcgctcagcttacagacctggctcacccgcatcacccgcgtgcgcctgaaactccagcaggtggcgaacgccgccgacccgcaggcgatgatgcagcagctggcgcagacggtgttccggggccggagcgtggagctgaccgacacgcaggagtacggcaccctggtggcggccagcctcggtgaggcgtggcgcggtttcgggcagacgatgtttgttcagccgctgactcaggcccgggaggcggtactgcagccgtcggcggccagcctgaacgaggcgtggcagcgctccgtggtcgcgaactggaatgcggcgtttcaggggcgctatccctttgcggccgggaagagcgacgcttcgctgccgatgctggcggcgtttatccgccgcgataccggacgtattgaccgttttctcagtacggagctgggcggggtgctgcgccgggagggcagcgactgggtggcggacagcacccgcagccaggggctggccttcagcccggccttcctgaacgcggtgaaccagctcagccagctgtccgatatcctgttcaccgacggcagccagggcatcagctttgaaatgcagggggtggcgatgcgggaagtggtggaaacagcgctgacgcttgacgggcagacgctgcactattttaaccagctggccgactggcagcgcttccgctggccgggggcgatgaataaaccgggggcgatgctgacctggacgtcaacgacggcgggaagccgtctgtatgcaaaccacagcggcccgtggggcgtcatccggatgctggagtcgatggcgcggcagaaagcgggggacgggctgtaccggctgaccgtcaccgtgccggacaggcggcagctgcagtggctgctgcgcacggagctgggcgacggtccgctggcgctgctgaagctgcgcaacttcaggctgccgacgcagatattcagcgccggtgtcccggcagccggccgcacggatgaagaggggtatgacgcgggggaggtgagtgaataa

SEQ ID NO: 259512 - DNA, 687 bp, Klebsiella pneumoniae
gtggcgctggtcgggccgagcggcgccgggaaaagcaccgtggcgcgactcctgctgcgttatgccgatcccgatcaaggccatattcgcatcggcggcgtggatctgcgcgatatgcagacggacaccttgatgcagcaaatctcgtttgtattccaggacaacttcctttttgccgacaccatcgccaataacattcgtctgggcgcgccggatacgccgctggaagcggtgatatcggcggccagagtggcgcaggcccatgaatttatcagcgcgttgccggagggatacagcacccgcgtcggggagcgcggcgtctttctctccggcggtcagcggcagcgcatcaccatcgcccgggcgctgttgcaggatcgccccattcttgtgctcgatgaggcgacggcgtttgccgatccggaaaacgaagcggcgctgatcaaagccctcgcggcggccatgcgcggccggacggtcatcatggtcgcgcatcgactctccatggtgactcacgccgatatgatactgctgttttccgacgggcggctccgggaacgcgggagtcaccggcaactgttggcccagggcggcctgtatcagcagctgtggctgcgctatcagcaggcgcagcaatggatgccggggagaacacaaccagaggaggcggaaaatgaaagccattaa

SEQ ID NO: 259513 - DNA, 183 bp, Klebsiella pneumoniae
atggggaatcgtcttgtcagcttggctcaccgagtgaatagccttctggctgaatcggcaaacggtaggatgatttctgaatgggcgaaaaagcctgaatgctgggactatgtgcgcagtaaaatctatttctccgcacagggaaaaaaggatgatttctcgcatgatgaaatttctcgatga

SEQ ID NO: 259514 - DNA, 252 bp, Klebsiella pneumoniae
atgaaactcgccccttacctgataacactaacgctgccatttatctcgttatctgccagagcggattaccatccccagattaacgccgaaaataccgtctctggcgatatcgtggatggttcaaaaggtaatcaatatgtctacggcatactgaccgactcaacgattacgggcacacatgcctggagcgacgttggcgatggcaggcaatcgccatggaccgggaatgcgggtttcagctaccgcttctaa

SEQ ID NO: 259515 - DNA, 684 bp, Klebsiella pneumoniae
atgggaaatacctctaatgaaaaatataacgtagttttagaacaattggctcaaatatgccgcgatggaaagttacctgtacttggttttgaccttgatgtgaaacgttttcaaggaaaatattatgtttcggctgaacattatgggaaaccaacgagaccagaagaaatggggcgttataacgacctgtctggtaaaaccggggtttgttactttgcagagaatagcctgacagcactggctgaaagctatggcagaatgtaccaccgcgctaatggcgatttcgcaatatcagggcatatgctggatattgcgcagatgtacacgctacatccgaagttgccattggtactggttgatatggcaacacttgcgtcaatgttgcatttaacagcggatcaactgactggtgttgattactcgctgacgcaagccattactggttacctggcaaattatccagggcgcaattttcatggtatctactatgcgagccgacattatttcacgggaatgtgtcttgctgtgttcgaaccagaggaaggggagttgtttgaaaccctggcatccgaaccgctcagtaaatacaccgagcatcaatcactgcctgttggatggccctataaggacatcagggcagaggaaatgcttgtgaagatactgcacttcgacgtgacgctttaa

SEQ ID NO: 259516 - DNA, 642 bp, Klebsiella pneumoniae
atgaatacacagttagttgaaagagaaagaaaaaaaccagcgtcctcatttaatcctaacgaaatcattgcgaaccgagtcggacacattgtttcttcagtgtttgctgattttgatgataaatccctggcatctgaaatcctggtgctggaggatctggatctactggtatatgtcgtgggggcttatctgcaaaagaaaacgcggatgagcgagcgtgagatggacatgttcaaatccaggatccagtcaacgatcaggttttatcagaagctggataaactgggcggtacgattaaagctaaagatgtcagtgaattactgggagtaacccgccagaccgttaacaatcaggttaacaaaggcaagcttatcgcattgcgtcgcggcggtgactatctgttcccaagttttcagtttaaaggggccggaatgcttcctcacctggaagagatcctgcaatacctgccacaggaaactgatgcgattacaagggtttcgtttttgaccagccctgttcgcatagatgacaaaagtacagcaaaaacaccgcttgagatcctgcaaaaagatccatcggagcaagaattagcgttcttacgtcgtgaagcgaatctttttgctcgtcacatagcgtcataa

SEQ ID NO: 259517 - DNA, 171 bp, Klebsiella pneumoniae
gtgaccgaatgggtgaaagggaagtcgctggacgaagctcaggcgattaaaaacaccgatatcgccgacgagctcgaactgccgccggtgaaaattcactgctctattctggcggaagacgcgattaaagccgcgattgcggattacaaaagcaaacgtgaagcaaaataa

SEQ ID NO: 259518 - DNA, 1170 bp, Klebsiella pneumoniae
  misc_feature (485)..(494): n is a, c, g, or t
atgggagtggctgaatttcctgatgaatttttacggacgccaaaaacgctatttcagggtggcgttctgagaattaatgtgaataataaccattatcaattactcatctaccccattcggttctatttttacccgcattggtttaagccacagggagataacccggtcatgacggagtcaccacaaacgcaatctgcaatctcaattcatcagttggtggtcgggaaacccgctaacgacggtactatcccggcccagtgtgaactgctgcgctgttcgttgcaggaagggatggatattttgctctggagaggccattttgcgcagcctgagacgttacagcttcacgatgatctgggcaggattaacttctcgtgcatcctcgagggcacctcgcgttttgccatccaggggctcagacgccacaccgagtgggagctggcccgcaatcgccattacattacccacacgccagattgccgccnnnnnnnnnnccattacattacccacacgccagattgccgcggcagcgccgcctacggcggccgattcgagagcatcaccctctccttcagccctgaaaccctcgcgctgtgggtaccggatatcagtacagtcattaaaaataagatcgactcccactgctgttgccagcagcagcgctgcaatgcggaaacccatttaacggcccaggctttgcgtcatgcgctaatgcggatgcacggcggattcagccatgaacaaaagccttcgaccctctggctacagggacagagtctggtgatgctaagcctggtcctggatgagcaccgcgaagacgccagctgcttctcctgccacttcaacccggtggagcgccagaaactgctgcgggcaaaggatctgctgctggccgatttgacgcaggcgccgggcgttgctgagctggcgagagagtccggtttgagcgtgctgaaaattaagcgtggcttccgcgttctgtttaacaacagcgtctatggcctgtttcaggctgaacgcatgcaggaggcacgaagaaggctggccaatggcaatacctccgttatgacggtagccgccgatctgggctatgccaacgccagccacttctctgccgctttccagaaacagtttggcgtcaccccttccagctttaaacgcgtcatctga

SEQ ID NO: 259519 - DNA, 780 bp, Klebsiella pneumoniae
atgctcaactctcgtaacggtcatatctccattaccggcgtcagcaaatactttggccgccataaagcgctggacgatgtatcgctggaaatagcacccggtacggtgacggtgatcctcgggccgtccggttcgggaaaatcgacgctgctgcgggcgattaatcatctggagcgcgttgatgaaggctttattcagatcgatggcgactatatcggttatcgccgtaaaggcgacaagctctacgaactgaaagagaaggagatccttcgccagcggatcaacgttggctacgtatttcagaacttcaacttgttcccgcacctgacggtgctggaaaacctgattgaagcccccatcgcccataaacaggcgacccgtaaggaggctatcgcgcgggcgtacgaactgctggacgtagttggactacgcaataaagccgacgcctggtcgcggcacctgtccggcggtcagcagcagcgcatcgccattgcccgggcgctggcgcttaacccgcgagtgatgctgtttgatgaacccacctccgcgcttgacccggagctggtgggggaagtgctggatgtgattaaaaagctggcgcgctccggcaccacgctggtcgtggtcacccacgaaattggctttgcgaaagaggtggcggatcgggtggtgtttatggtcgacggcaagatagtcgagcagggcagcagcgacgatgtgctgaaccatccgcagcacccgcgtacgcagcagtttttatcgagggtattagcggcatga

SEQ ID NO: 259520 - DNA, 681 bp, Klebsiella pneumoniae
gtgggtggtggtggtcacgacgtgagcatgcggaaccgggttcgggtaaacgcctgcggcgatcagaccggcaacgtgagccatatcgacgaacaggtatgcgccgatgctatcagcgatttcacgcatttttgcccagtcaaccacgccggaataagccgagaaaccaccgataatcatcttcggtttatgttcctgagcctgcttagccatatcgtcatagtcaattttaccggactcatcgataccgtaagggatgatgttgtacagtttgccagagaagttgaccggagagccgtgagtcaggtggccaccttgcgccaggttcatacccagaacggtatcgcccggctgcagcagagcggtatagaccgcgaagttcgcctgggagccggagtgcggctgcacgttagcgtagtcagcgccgaacagttctttagcgcggtcaatcgccagctgctctacgatatcgacgtattcacagccgccgtagtagcgcttgcccgggtatccttcagcgtatttgttggtcagctgagagccctgcgcctgcattacgcgcgggctggtgtagttttcggaggcgatcagttcgatgtgctcttcctgacgtactttttcttgctccatagcctgccacagttcggcatcataatcggcaatgttcatttcacgctttaa

SEQ ID NO: 259521 - DNA, 288 bp, Klebsiella pneumoniae
atgctccacacattaagcacatccccctggcacgccgacattgcggctatgctccgtttgataaaagaaggtgacgagctgctgctgctgtcggacggcgttatcgccgctgtcgctcaaggccgtttccttgaaatcctgcaatctgcccccatatccctctacgctctgcaagacgatatcgaagcccgcgggctggctggtcaaattgcggacagtgtcgtcagggttagctatactgatttcgtcagactttcagtcaaacatgccggtcagttgtcctggtaa

SEQ ID NO: 259522 - DNA, 936 bp, Klebsiella pneumoniae
atggaagacatttccatagttgctataattccgactataggtagggacagtgtatttgcagctgttacatctatactaaagcaaaaatatccagttaatgaaattgttctttgttatgatggtaatgctttcaaagaatttgaaagaaaaatatatgatttctttgatgctgagaagcgtatcaaggtaattgattgtggggttttcaatggcggcaataatgcacggcaatgtggaattgaaaattccagttcaacttatattgcacttttagatgatgatgatgaatggttgcctacacatactcaagagtttattgaacttacaaaatctgcattcataaaaaccgaatttatcttctattcttctggtgtaattttggttgaaaatgggcgcaatattggtgaaaggcctactagaatgaaaagtgaaaaggagtctttctctgaatatatatttgtaaaaaaagggtttgcttgggaacatggatttatacaatcatctataatgatattttctagggcacttgctgaggctattccgtttgataaatcgttacgctttcaccaggatattgattggataatgaaagttcagaggtccaagcttaattatatatatttacagaatcctaacaaaacagttatatattactcatctactgatagcgtttctaaaaaaataacatatgctcaatcatccgcgtgggctttaaaatcttttgaaccgagtgataaacgaccgttaggtgattttttgcttacgcaaacatttagatttgccaaaaataatggtggttacgttaatatgtgggaagtgttttttacaggcataaggaaagggcgtccttcaatatacgcactctctttagccttatctgctttattgattccgaagagtataaaaaaaggcctcaaaagatttctaaaaaaatag

SEQ ID NO: 259523 - DNA, 1488 bp, Klebsiella pneumoniae
atgaacaaagaaattttggctgttgttgaagccgtttccaacgaaaaggcgctgccgcgtgagaaaattttcgaagcgttggaaagtgcgttagcaacggctactaagaaaaaatatgaacaagagatcgacgttcgcgtagaaatcgatcgtaaaagcggtgatttcgacacattccgtcgctggctggttgtggaagaagttacccagccgacgcgcgaaatcacgctggaagctgcgcgtttcgaagatgaaagcatgaatcctggcgattacgtcgaagaccagattgaatctgtcacctttgaccgtatcactacgcagactgcgaagcaggttatcgtacaaaaagtacgtgaagccgaacgcgcaatggtcgttgatcagttccgtgagcacgaaggtgaaattatcacgggcgtagtgaagaaagtgaatcgcgacaacattacgctggatctgggcaacaacgctgaagccgtgatcctgcgtgaagacatgctgccgcgtgaaaacttccgtccgggtgaccgtatccgcggcgtactgtacgcagtccgtccggaagcgcgtggcgcgcagctgttcgtgacgcgttccaagccggaaatgctgattgaactgttccgcattgaagttccggaaattggtgaagaagttctcgaaattaaagcggcggctcgcgatcctggctctcgtgccaaaatcgcggttaaaaccaacgataagcgcatcgatccggtgggggcctgcgtcggtatgcgcggcgcgcgcgttcaggctgtctcgactgaactgggcggcgagcgtattgatatcgtgctgtgggacgataacccggcgcaatttgtcattaacgccatggctccggctgacgtcgcctctatcgtggtagatgaagacaagcacaccatggatatcgcagtcgaagcgggcaacctggcgcaggccattggccgtaacggtcagaacgtccgtctggcgtctcagctgagcggctgggaactgaacgtcatgaccgttgatgacctccaggctaagcatcaggctgaagcccatgcagcgattgataccttcactaaatatcttgatattgatgaagatttcgccacgctgctggttgaagaaggtttcgccactctggaagaactggcctatgtgccaatgaaagaactgctggaaattgacggtctggatgaaccgaccgttgaagcacttcgtgagcgggcgaaaaacgcgctgaccacgctggcgctggccaaagaagagagcctgggagacagcaaacctgccgacgatctgttgaatctggaaggtatggatcgcgccctggcattcaccctggccgcccgtggtgtttgtacgctggaagatctcgccgagcagggcattgatgatctggctgatatcgaaggcttgaccgacgagaaagccggagaacttatcatggccgctcgtaatatttgttggttcggcgacgaagcgtaa

SEQ ID NO: 259524 - DNA, 423 bp, Klebsiella pneumoniae; identical to SEQ ID NO: 172709

SEQ ID NO: 259525 - DNA, 960 bp, Klebsiella pneumoniae
gtgaatttctccaccttttgccgccgtaccctcctcgccagcggtctggcgattttaggaattagctcagcgctggcggcagactggccgcggcagataaccgacagccggggaacgcacacgctggaaagccagcccctgcgaattgtttccaccagcgtgacgctgaccggctcactactggcgattgacgcgccggtagtcgccagcggcgccacgacgccgaacaaccgcgtcgccgacggtcagggatttttacgtcagtggagcgatgtggcgaaagcgcggaagctgtcgcgcctctacattggcgaaccgagcgctgaggccgtcgctgcgcaaatgccggatctgattctgattagcgccaccggcggcgattcggcgttgacgctctacgaccagctttccaccatcgccccaacgcttgtcattaactacgatgacaaaagctggcaggccctgctgacccaactggggacgatcaccggccatgaaaaacaggcggcagagcgaattgcggaatttgatactaagctggcggcgctgaaagagaagatgaagctgccgccgcagccggtcaccgcgctggtctacaccgccgcggcccatagcgccaatatctggacgaaagagtccgctcaggggcagatgcttcaacagctgggctttacccttgccgatctgcccgccggtctgcatgccagccagagtcaggggaaacgtcatgatatcgtgcagctgggcggtgaaaatttagccgccggacttaacggtcagagcctgttcctgttcgctggcgaccaaaaagacgccgatgcgatttacgccaacccgctgctgtcgcatctgcccgcagtcgaaggtaaacgcgtttatccgctgggaacggaaacctttcgcctggattattacagcgccgtactggtgctgcagcgcttagccgcgctctttgcttaa

SEQ ID NO: 259526 - DNA, 261 bp, Klebsiella pneumoniae
atgtacgtggttaccgatgaccacctgaaactggccgccgctttccaccaccatgatgacgccaggattcgccttcagtccttcggcatccgccttcttgctatctttaagcttaaaacgcagccgcgttgcgcagtgaaccagactcacaatattctctttgccgcctacccggctaagaatatcctgcgcgagtgctttatattccatgctgtttttccttacttccgctgcccgcaggcatcgttaactgagtattaa

SEQ ID NO: 259527 - DNA, 834 bp, Klebsiella pneumoniae
atgcaaatcgccaaagtacttaataataatgtagtggtggttgtcgatgagcagcagcgcgaacaggtggtcatgggccgaggacttgcctttcaaaaacgcgttggtgactctcttgatgaaagtaaaattgaaaaggtcttcgcgctgcagagcgatgaactgattggccgtttaggcgaattactcagtcagataccgttagaagtgatgaccacctgcgatcggattatcgatctggcgcgcggtcgtctcggtaagttacaggacagcttgtacattaccctgaccgatcactgccactttgcgatcgagcggcagaagaagggcctcgccattcgtaatgtgctgctgtgggaaataaaacggctgtatcctaaggagtttgagttagggcaggaagcgcgggcgattatcgccaaacggcttggcgttgaactggccgaagatgaggcgggttttattgccctgcatctggtgacggcgcagctcaacagcgaaatgccggaggtgatgcacgttacccgggtcatgcaggagattctgcagctggtgaaatatcagctgacccttaactacgacgaagagtcgctgagctaccagcgtttcgttacgcatcttaagtttttcgcccagcgtatgctgacgcgaacggtggtcgaagatgatgatgtgacgctgcacagcgcggtaaaggataactacccaaaagcgtggaagtgtgcggaaaccgtcgcccggcacctgcaaaagagctaccagcggccgctgacgacggaagaaattatgtttctcgccattcatattgaacgggtgagaaaagagggacgctaa

SEQ ID NO: 259528 - DNA, 351 bp, Klebsiella pneumoniae
gtggtggccaacggtgaaatctgggactggcaaagcgctcaggattgcctggccgcgactggctgcgactcggtaatgattggccgcggcgcgctgaacgtgccgaacttaagccgggtaataaaatataacgaaccgcgtatgccctggccccaggtcgtcgggctgctgcaaaaatatacccgtctggaaaagcagggcgataccggcctttatcacgtcgcgcgtatcaaacagtggttgagctatttgcgtaaagaatacctcgaagcttctgatctgttcagcgcggtgcgcactctacaggattcaatcagtattgcgcgcacgattaacgactggcgtagctaa

SEQ ID NO: 259529 - DNA, 2568 bp, Klebsiella pneumoniae
atgctggcggaagcgcagcggctgcgcgcccaggggctggatatcctgattggcgtggcggaaacccacgggcgaaaagagacggcggcgatgcttgaggggctgagtaccctgcccctgcgccgcctttcccaccgcgggcgctacgtgaaggagtttgaccttgacggcgcgctggcccgccgcccggcgctgatcctggtcgatgagctggcgcacagcaacgcgcccggatcgcgtcatcctaaacgctggcaggacgtcgaagagctgctggaagccggcatcgatgtgtttaccaccgttaacgttcagcacctcgagagcctgaacgatgtcgtcagcggcatccccggcgtgcaggttcgcgaaaccgtccccgatccgtttttcgacgccgccgacgatgtggtgctggttgacctgcctccggacgatctgcgtcagcggctcaatgaaggtaaagtctatatcggcggtcaggctgagcgggccattgaaaacttctttcgcaagggcaatctcatcgccctgcgcgagctggcgctacgccgtactgccgatcgagtcgatgagcagatgcgcgcctggcgcgatcgccagggccaggaaaaagtctggcacacccgcgacgccattttgctctgcatcggccataacaccggcagcgaaaagctggtgcgcgccgccgcccggctggccgccagattgggcagcgtctggcatgcggtgtatgttgaaaccccgtcgctgcaccgcctgtcggaggcgaagcggcgggcgattctcgccgcgctcaggctggcgcaggagctgggagcggaaaccgccaccctctccgatccctccgaagagaaggccgttctgcactacgcccgcgaacataatctcggcaagatagtgattggccgccagcagaaaaggcgctggtgggatcgcggcggcttcgccgatcggctggcccgtcacgctccggatctcgatctggtggtgatcgcgctggatgaaaaagccgcctccctgccggctcgcgccagcgatagccggacggcgatggataaatggcgtctacagctccagggctgcgtcgtcgccatcgcgctgtgcgcggtgattaccgttgtcgccatgcagtggctgatggcctttgaggccgccaacctggtgatgctgtatctgcttggcgtggtgattatcgctctcgtgtatggccgttggccgtcggtactggcgacggtgattaacgtggtcagcttcgatctgtttttcgttgcgccgcgcggtacgctggcggtttcagatgtacagtatttactcacctttggcgtgatgctgaccgtcgggctgcttatcggcaacctcaccgccggcgttcgctaccaggcgcgggtggcgcgctatcgcgagcggcgcacccggcatctgtacgaaatgtccaaagcgctggcggtgggccgcagccgtgaagatatcgccgccaccagcgaacggtttatcgcctcgacgtttcaggcgcgcagtcagctactgctgcccgatgagatgaaccggctctctccattgactcaacccaccgcggccatcacctgggacgacgcgatcgcccgctggagcttcgataaggggctgcccgccggggcgggtaccgatacgttacccggcgtcccctaccaaatcctgccgctgaaaagcgccgcccgtacctgggggctggtggtggtggagccggctaacctgcgccagctgatgatccccgaacaacagcgcctgctggaaacctttaccctgctggtcgccagcgcgctggagagactgacgctcaccgccagcgaagagcaggcgcggctgaacagcgagcgggaaagcctgcgcaactcgctgctggcggcgctgtcccatgatttacgcaccccgctgacggtgctgttcggccaggcggaaatcctgaccctcgatcttgccagcgaagggtcgaagcacgcgccgcaggccaatgagatacgccagcacgtactgaacaccacccggttggtgaataatctgctggatatggcgcggatccagtccggcggctttaatttgcataaagagtggttaaccctcgaagaggtggtcggcagcgcgctgcgcatgctggaaccggggctcggtgggcggcatattcagctcgatctgccggacccgctgctgctggtacacgtcgatggcccgctatttgaacgggtgctgattaatctgctggaaaacgcggtgaagtacaccgggccgcaggcgcaaatcggcatcgcggcgcatgtcgacccgcaccatttattgcttgaggtgtgggataacgggccgggtattcctccagggcaggaacaggctatctttgataaattcgcccgcggcaataaagagtcggcgatccccggcgtaggcctgggactggcgatttgtcaggccatcgttgaggtgcacggcggaacgattagcgccgagacgcgcccgcaaggcggcgcctgtttccgtgttacactgccgcgagaagcgccccctgaactggaagagttagccgaggaaatgtga

SEQ ID NO: 259530 - DNA, 1656 bp, Klebsiella pneumoniae
atgagtgccgaacaaacgacgggacgcgtctggaaccgtcgccgtacggaaaaacagcggcgactggccgaggccagagtctccggcaaagtgatccccaccgaccagctggttgcggtccttgagcagctgctggcccccggcgaccgcgtggtgctggaaggtaacaaccagaaacaggctgatttcctctcgcggatgctggcggaagttaacccgcaaaaaattcacgacctgcatatgattatgccgagtgtcgggcgcagcgagcacctggacctcttcgaaaaaggtatcgcccgcaagctcgatttctccttctccggtacccagagcctgcgtatttcgcagctgctggaagatggcctgctggaaatcggcgctatccacacctatatcgagctttattcccgtctttatgtagacctgtcgccgaacgtcgcgctgatcgccggttataaagccgaccgcaagggcaacctgtacaccgggccgagcaccgaagacactccggcgctggtagaagccgccgcgtttcatgacggcatcgttattgcccaggttaacgaactggtggatgacgaatgcgatctgccgcgcgtggatatccccggttcgtggattgactacgtagtcgtcgcggataaaccgttctttatcgagccgctgtttacccgcgatccgcgcctgattaaacaggaacatatcctgatggcgatgatggcgattaaaggcatctacgccgagcatcaggtgcaatccctgaaccacgggatcggctttaacaccgccgccatcgaactgctgctgccgacctacggcgaacagctcggtctgaaaggtaagatctgtaaacactggacgctgaacccgcacccgacgctgattccggcgattgaaagcggctgggtagagagcgtccactgcttcggcggcgagctggggatggaagagtacattcgcgcgcgtccggatatcttctttaccggcgccgacggctccatgcgctccaaccgcgccttctgccagctggcgggacagtatgcggtagatatgtttatcggttcgacccttcaggttgacggctacgctaactcctccacggtgacccgcggccgcctctccggcttcggcggcgcgccgaatatgggccatgatccgcacggtcgccgccacgccacaccggcatggctcaacatgattaccgaaccggacccgatgcagcgcggtaaaaagctggtggtacagatggtggaaacattccaggcgggcgtgaaaccgaccttcgtggaaaaacttgacgccgttgaagtcgccaaaacctccgggatgccgctggcgccggtaatgatttacggcgatgacgttacccatgtactgaccgaagaaggcatcgcctatctctatcgggcggaaagccttgaagagcgccgggctatggtagccgccgtggccgggatcaccgatatcggtctcggcgttgatgccaaacgcgtggccgcactgcgccaaagcggcaaagtcgtgtatccggaggatatcggtatccgccgcagcgatgccacccgctccctgcttgccgccggtagcgtggccgatctggttgagtggtccgacggtctgtacaacccaccggcaaaattccggagctggtaa

SEQ ID NO: 259531 - DNA, 513 bp, Klebsiella pneumoniae
gtggaagtgcagcagctgcaggctgtcgagatgccctgcagcgcgcagaatttcaaccagctgcagaacctgggtcgccgcgaggccgaatttggatttttcgccgccggaggactgccacttgccagagccctgcgaagccagacgcgcacgcacgccaagacgcggcaccacgttcagccgctcggcttcttccagcacgatggcgatttccgacattttctcaatgaccagatagaccttatggcccatcttttcacccaccagcgccaggcggatatattcacggtctttataaccgttacaaacaatcacgctgcgggtcatgccggcgtgcgccagtaccgccatcagctcggccttcgagccggcttccaggcccagcggttcgccggagtggatcagcgattcaatcacgcggcgatgctggttaaccttgatgggataaaccagaaagtagtcaccgttatagccataagactcacgcgcccgtttaaaggcggcgttaattga

SEQ ID NO: 259532 - DNA, 588 bp, Klebsiella pneumoniae
atggacgtcagccgcagaaagttttttaaaatctgcgcaggcggtatggccggaacaacagccgctgcattgggttttgcgcccaaaatggccctggctcaggcgcgtaattacaagttgctgcgcgccaaagagatccgcaacacctgcacatactgctccgtgggctgcgggctattaatgtatagcctgggcgacggcgcgaaaaacgcgaaagaagcgatttatcacattgaaggggatccggaccatccggtgagccgcggcgcgctgtgcccgaaaggcgcagggctgctggactatgtccatagcgacaaccgtctgcgctatccgcaataccgcgcgccgggttcggataaatggcagcgcatctcctgggatgaagcatttacccgtatcgctaaattgatgaaagccgaccgtgatgccaactttattgagaaaaacgagcagggcgtgacggttaaccgctggctgtccaccgggatgctgtgcgcgtcggcggccagcaatgagaccggcatgctaacgcaaaaatttgtgcgctcgctcggcatgctggcggtagataaccaggcgcgcgtctga

SEQ ID NO: 259533 - DNA, 543 bp, Klebsiella pneumoniae
atgctgcagcgtttcatcgcgcatcgcgaagccattttcgtcgaactgatagttccacgaagacttatcgtacagacgcttttcggcatcgtagccgctgaacaggccatcttcgaaggcaaaatcgtcgcgcaccagcaggttggcgttggtatagtgtttaacgtactcggcattgattttgttattttcgatcaggtacagcagcacgcccgacaggaaggtaatgtcggtaccggaacggatcggcgcataaatatcggccaccgacgccgtacgcgtaaagcgcgggtcaacgacaatcagcgtcgcatcattgttgttttttgcctccatcgcccagcggaatcccaccggatgggcttcggcggcgttaccgcccatcaccaccacgacattggcgtttttaatatcaacccagtggttggtcatcgcaccgcgaccaaatgttggagcaagacttgctaccgttggtccgtgtcagacgcgcgcctggttatctaccgccagcatgccgagcgagcgcacaaatttttgcgttag

SEQ ID NO: 259534 - DNA, 1062 bp, Klebsiella pneumoniae
gtgaaagacaacgttaccgataagaacgagctgcgtcaggcgctggaagagtcggtgaaaagccacctgatgtccgacgtgccttacggcgtgctgctctccggcggtcttgattcatcggtcatctcggctatcaccaagaaattcgccgcccgtcgcgtcgaagatcaggagcgtagcgaagcctggtggccgcagctgcactctttcgcggtcggtctggaaggctctcctgacctgaaagcggcgcaggaggtggccaaccacctcggcaccgtgcaccacgaaattcactttaccgtccaggaagggctggatgccatccgcgacgttatctatcacatcgaaacctacgatgtgaccactattcgcgcctcgacgccgatgtacctgatgtcgcggaaaattaaagccatgggcatcaaaatggtgctttccggcgaaggttcggacgaagtgttcggcggctacctctacttccataaggcgccgaacgccaaagaactgcacgaagagacggtgcgtaagctgcaggcgctgcatatgtttgactgcgcccgcgccaacaaagcgatgtccgcctggggcgtggaggcccgcgtgccgttcctcgacaagaagttcctcgacgtcgcgatgcgcattaacccgcaggataagatgtgcggcaacggcaaaatggaaaaacacattctgcgcgaatgctttgaatcctacctgccggccagcgtcgcctggcgccagaaggagcagttctctgacggcgtcggctacagctggatcgataccctgaaagaagtggccgccaaacagatcagcgaccagcaactggaaaccgcaagcttccgcttcccgtacaacacgccgacctccaaagaaggctatctgtaccgcgagatcttcgaagagctgttcccgttgccgagcgcggcggagtgcgtccctggcggtccgtcggtggcctgctcttcagcgaaagccattgagtgggatgaagcgttcaaaaccatgaacgatccatcaggccgcgcggtcggtgtccaccagtcggcctacaaataa

SEQ ID NO: 259535 - DNA, 1512 bp, Klebsiella pneumoniae
atgtcagcatccaccccactgctgtcgcttaagggcatcaccaaggttttccccggcgtgcgcgcacttgagaacgtacagctcgatctctggcccggcaaagtcaccgccttaatcggcgaaaacggcgcgggcaaatccacgctggtcaaagtgatgaccggtatttatcagcccgaagagggcgagattctctataaagcgatccctatccagctgccgaccccggagtcagcgcacaaggtcgggatcaccgccattcatcaggaaaccgtgctgttcgacgagctgtcggtcactgaaaatattttcgtcggccagtatctgcatcgcggtctgctgaagaggctcgactggcccgccatgtaccgcaaagccagcgagattctcacccgcctggaggtgcagattgacccgcgcgcgacgttgaaaaccctcagcatcgcccagcgccatatggtggccatcgcccgggcgctctcctttgaagcccaggtggtgatcctcgatgagccgaccgccgcgctctcacagcatgaaattctggagttttatcaaatcgttgagcgcctgaagcaggacggcaaagcgattctttttatctcgcataagttcgatgagattttcgagctggcagactactacaccattctgcgcgacggcgtttacgtcagctccggagcgataaacgacatcaccgaagagcggatggtggcgatgatggtgggccgcgcgattacccaaacctacccgaaagttgactgtaccccaggggaaacggtgctggaggtgcaagacctctgtcaccccaccgagtttgcccatatcaatttcagcctgcgcaaaggggagattcttggcttttacggcctggtgggcgccgggcgcaccgagctgatgcaggcgctctccggggtctcgaccccctcctccggcaacatcgtactgaagggcaaagcgatgcgctttcgccagccggccgacgccatcaacgccggtatcgtctgcgtgccggaagagcggcagaagcaaggagcgattatcgccctgccgatcgcccagaacatcagcctgccgcagctcagcaaactcaaccccaacggcgtactgaacgacgcccgcgaatggcggctggcggatgagtacgcttcgcgcttacaggtcaaagcttttagctggcggcaggcggtggaaaccctttccggcggcaatcagcaaaaagtggtgatcggcaaatggctggcgacccatcccgaggtgattatcctcgacgaaccgaccaaaggcatcgatatcggttccaaagcggcggtgcaccagtttatgtccgaactggtcagccaggggttggcggtcattatggtctcttcggagctgccggaagtgatgggtatggccgaccggattatcgtgatgcacgaggggctgatggtggccgagtatcgcgccggtgaagcgacggcggaaaccatcgtcagcgccgccagcggcgtgaatcaggaggcagcgtaa

SEQ ID NO: 259536 - DNA, 1320 bp, Klebsiella pneumoniae
  misc_feature (32)..(41): n is a, c, g, or t
atgaaaatcagtgaatttttacatctggcgcnnnnnnnnnncccagaggaacggcggctgccgacgatttgtggcgtcttacgccagttcgccgatgaagagtgctatgtctatgagcggcaaccgtgttggtatatcggcaaaggatgccaggcacggttgatcattaatgctgacggcacgcgggcgacctttatcaatgcggacggagagcagcaatgggcggtggattccattaccgactgcgcgcgtcgttttatggcccatcctcaggtgaaagggcgtcgggtatatggccaggtcgggtttaactttgcagcgcatacccgggggatagcctatcacgctggcgagtggccattgctgacgttaaccgttccccgtgaggaactgatttttgaacagggaaatgtcaccgtttctgccgacaccgccagcgaatgccgacgtctgtgcgagtgggtaaaagcagccggtacggcgacgccgtgtaacaccgtgactgtggataccgccaacaacggtgaagcctatcaggagcaggtggcgcgcgtggtttcggcgatccgccgcggtgaatatgtcaaagcgattgtctcgcgggctattgccttgccatcgcgtattgatatgccctccacgctattatgcgggcggcaggccaatacgcccacccgttcgtttatgtttcgccagcaggggcgagaagcgctggggtttagcccggaactggtgatgtcggtcagcggaagcaaagtcgtcactgaaccccttgcgggtacccgcgatcgcatgggggatccgcagcagaataaggagaaagagaccgagctgctgcatgacggtaaagaggtgctggagcacatcctttccgtgaaggaggcgatcgctgaactggcggtggtctgccagccgggcagcgtggtggttgaagatttgatgtcggttcgccagcgcggtagcgttcagcatctgggatcttgcgtcagcggtcagcttgcggaaagtaaggatgcctgggatgcatttaccgtgctgtttccgtcgattaccgcctcgggtatccccaagaatgcggccctgagcgcgattatgcaaattgagaagacgccgcgggagctctattccggggcggtgctgctgctggaggacacgcgctttgatgcggcgttagtcctgcgatccgtatttcaggacagccagcgctgctggatacaggcgggggcggggatcattgcgcaatcgacgccggaacgcgaactgacggaaacccgggaaaaattagcgagcattgcgccctatttaagggtgtctgcctaa

SEQ ID NO: 259537 - DNA, 699 bp, Klebsiella pneumoniae
gtggccctgagcggcaacgaaggtgttagcgataccgccgcccacgatcagctggtcagcgattttagacagggaatccagaacagtcagtttggtggacactttagaaccaccaacgatagcgaccatcggacgagctggctctttcagcgctttacccagcgcgtccagttcagcggccagcagcgggcctgcgcacgccacgtcagcaaatttgccgatgccgtgggtggaagcctgcgcgcggtgcgcagtaccgaaagcgtccatcacgaacacgtcgcacagcgcagcgtatttcttagacagttcttcgtcgtcttttttctcgcctttgttgaagcgaacgttttccagcaccaccagttcaccggcagccacttccacaccgtccaggtagtctttaaccaggcgtaccgggttggacagtttgtctttcaggtaattaacaaccggcagcagagagaattcttcgttgtactcgccttcggtcggacgacccaggtgagaagtaaccatgactttcgcgccctgcttcagcgccagttcaatggtcggcagagatgcacggatacgtgcgtcgctggttactttcccgtctttaactggtacgttcagatccgcacggataaaaacgcgtttaccagccagatccagatcggtcatcttaattacagacatggtgaatcctctcgttga

SEQ ID NO: 259538 - DNA, 1545 bp, Klebsiella pneumoniae
atgagtttctccgtcgaggccctggcgaaaatcgccattgatttacaaagcgatctcggccatgccgaccgtttctcgcgtttgattaccactctgcggcagatactcggctgcgatgcctcggcgctgctgcgctatgaggcgcaccagtttgtgccgctggcgattgatggcctggcccaggacgtgcttggccggcgctttgcccttgaaggccacccgcggctggaggcgattgcccgggcgggggacgtggtgcggttcccggcggacagcgatttgccggacccttacgatgggctgatccccggtcaggagagcctgaaggtgcacgcctgcgtcggcctgccgctgtttgccggacaaaccctgatcggcgcgctcaccctcgacgggatggatgcggaccgttttgacagctttagcgacgaggagctgcgcctgatagccgctctggtcgccggagcgctcaataacgcgctgctgatcgccaggctggagaatcaaaacgtgctgccggaacaggctatcgcgtatccggtatccgaacgtcaggagatcattggcctgtcggcgccgatgctgcagttgaagaaggagatcgacatcgtcgcggcctctgacttaaacgtgctgattagcggcgagaccggcaccggcaaagagctggtggcgaaagcggtgcatcaggggtcgccgagggcggccaatccgctggtctatctcaactgcgcggccctgccggagagcgtggcggagagcgaactgtttggccacgtcaaaggggcatttaccggggcgatcagcaaccgcagcggtaagtttgaaatggcagataacggaacgctatttctcgatgaaattggcgagctttcgctggcgctccaggccaagctgctacgggtactgcagtatggcgatattcagcgcgtcggcgacgaccgcagcctgcgggtcgatgtgcgggtgctggcggccactaaccgcgatctgcgtcaggaggtcgtggaggggcgttttcgcgccgatttgtatcatcggctgagcgtgtttccgctgtcggttccggcgctgcgcgagcgggacaatgacgtggtgctgctggccggttatttttgcgaacagtgccgtgtgcgcatggggctggcgcaggtgattttaagcgaggcgacgcgcggcaggctgcttgcgtggtcatggccgggcaacgtgcgcgagctggagcacgcgattcatcgggcggtggtgctggcgcgggcgacgcaggcgggtaatgaagtggtgctggagccgcagcatttccagtttgccgaggaaacgccggccttgccgaccgttaccccgcagccgtcggtgggagcagtaagcctgcgcgaggcgacagaggcgtttcagcgcgaagcgatcgccagagcgctggcggataaccgtcgaaactgggccgcagccgcccgcgcgctggagctcgacgtcgccaacctgcaccggctggcgaaacgtctggggcttaaaggatcccggcctgataaaagttctgcaggttaa

SEQ ID NO: 259539 - DNA, 1296 bp, Klebsiella pneumoniae
atgaaacgtgtttctcaattgaccgcactcgccctcctgatggggcttgctgcttccacctccgccgctgaatccatgccaacgctaacgctctccacgctgcaacagcagaacggcatcgctattgatacgcgtctcagcgctttctataacggctggccgcaaagcgctaacgggcctcagggtcatgaaccgcaggcgcttaacctgtcagccagctggcttggcgcgatgaacgacgaacagctgaacgcctgggctaagctgcacaatctgcagacctctacgccaattgcgctatacggcaacgccgacgacaacgcgaaagtcgcggcgcgccttcaggctgctggtttcactcatctcagctccctcggcgatgccctgagccaggcaggtcgcctgcaaaagctgccgcattttgaacagctggtatatccgcagtggctgcacgacctccagcgcggcgagccggttaccgccgcgcctgccggtgaatggaaagtttttgaagccgcctggggcgcgccgaagttttatctgctgagccatattccgggcgccggttatatcgacactaacgaggtggagagcgaaccgctatggaataaagtgtccgacgcgcagcttaaagcgatgctggcaaaacacggcattcgccatgacaccacggtaattttgtacggtcgcgacgtgtatgccgccgcccgcgtggcgcagattatgctctacgccggcgtgaaggatgtgcgactgctcgacggcggctggaagacctggtccgatgccggtctgccggttgagcgcggaacgccgccagaacagaaacctgaacctgattttggcgcccccatcccgggccagccgcagctgatgctcaataccgagcaggctcgcgccctgctgcatcgtcaggatgcttcgctggtcagcatccgttcctggccggagtttatcggtaccaccagcggctacagctatatcaagccgaagggcgaaattgccggggctcgctggggtcatgccggaagcgattccacccatatggaggatttccataatccggacggcaccatgcgtagcgctgatgatatcgccgcgatgtggaaatcatggaatattctgccgagccagcaggtctctttttactgcggcaccggatggcgcgcctcagaaacgtttatgtacgccagggcgatgggctggaacaacgtctcggtctacgacggcggctggtacgagtggagcagcgatccgaaaaatccgattgcgactggcgatcgcaagccggagtga

SEQ ID NO: 259540 - DNA, 126 bp, Klebsiella pneumoniae
gtgaccgagcacaacggcgttacctgcctgaagctgaccttgctgaacccgatcgttacgttagatgacgtgaaggtgctgctgagcctggtcgatcgcaccgcccaggagctgctggcgcagtaa

SEQ ID NO: 259541 - DNA, 1293 bp, Klebsiella pneumoniae
  misc_feature (1268)..(1277): n is a, c, g, or t
atgtccaagttgaatccgattcttgctggttccgcacagagtattgatgcctatcagcaagcgatcgcccagaccagccaggctgtcgcgcagtggttgcagcagcctgaaatgtatcaggggaaaagcgttgacgaactgcgtgagcgcatcacccttgatttcaacgaacagggtctgggcaaccaggcggcgattgaacgtgcgatcgagtacttcctgaaagacagcctgtcggtacatcacccgcagtgcgtggcgcatctacactgcccgagcctggtgattagccaggcggcggaagtgctgattaacgccaccaaccagagcatggactcctgggatcaaagcccgtcagccaccatcattgagatcaagcttattgaatggctgcgtgcgcaggtcggctacggcgctggcgatgcgggcgtgttcaccagcggcggtacccagagcaacatgatgggcctgatgctggcgcgcgatgccttctttgcccgccagggccactccatccagcaggatggtctgccgggcgatgttcgtcgctacaaagtactgtgttctgaaaatgcccacttctcggtgcagaagaacatggcgctgatgggcctcggctaccgttccgtgacgctggtgaaaaccgaccaattcgcgcggatggacgtggcggacctgaaagcgaaaatcgccgaggctcaggctaacggagagcagattatggcgattgtcgctaccgctggcactaccgacgcgggagccattgacccgctgcgagaaatcgcggctgtcgcggcagagcatcagatctggctgcacgttgacgcagcctggggcggcgcgctgctgatgtctgagaagtatcgcgatcgtctggacggcattgacttagtggattccatcactctggatttccataagcagttcttccagaccatcagctgcggcgcgtttctgttaaaagaagcccgtcactacgagctgatgcgctatcaggcggcctatctgaactctgagttcgatgaagagcatggcgtaccgaacctggtgtccaaatcgctgcagaccacccgccgcttcgacgcgctgaagctgtggatgggtcttgaggcgctgggccagaagcagtacgcggaaatcatcgatcacggcgtgacgatggcgctgaacgtagcggattatgtcgaaacgcagccgacgctggaactggtgatgcagccgcagctggcgagcgtgctgttccgttcccgtccgcagcagatggcggnnnnnnnnnngctaacgtcggggtga

SEQ ID NO: 259542 - DNA, 396 bp, Klebsiella pneumoniae
atggcgaccggcctgaccaccctgcgccacctgaaggacaataacattgcggataaaaccgccgctcagggcgaatggctgaagggcaagctggccgagatgcagaaacgctatccggtgattggccacgttcgcggtctgggcctgatgatcggtattgagatcgttaaaccgaacgaagcgccggatcacatgggctgctacccggcggacggcgaactctccgccctgctgcagaagaaatgcttcgaagcgggcgtgatcctcgagcgcggcggtcgccacggctgcgtgctgcgtctgctgccgtccctgctgatcagcaacgctgagctggaaattttcttcgacaaatttgaacaggccctgctggccgccggcgtaaaaccggtctga

SEQ ID NO: 259543 - DNA, 957 bp, Klebsiella pneumoniae
gtggtcagcgataacgcgcagggacttgttagagagatcggtcgcgccggtgacgtcagctacgctcttaatcagatcgcggaacagatcgatatcgtagttggagttaacatgctgcagtacggcggcaatacgttcgaggcccataccggtatccacggacggcttaggcagcggctccattgtcccgtcagcctgacggttgaactgcataaagacgatattccagatctcaatatagcgatcgccgtcttcttccggcgttcccggagggccgccccagatatggtcgccatggtcgaagaagatttcggtgcatggaccgcacggcccggtgtcgcccatctgccagaagttatcggaagcaaaaggcgcgcctttattgtcgccgatgcgaataatacgctcgcgcggtacgccaacttcatttgcccagatgtcgaacgcctcgtcatcggtttcgtagacggtcacccacagtttttctttcggcagggcgaaccagttctcaccggtcagcagttcccatgcgtatttgatagcgtcctgtttgaagtagtcgccgaagctgaagttacccagcatttcaaagaaggtgtggtgacgcgcggtgtaaccgacgttttccagatcgttgtgcttaccacccgcacgaacgcaacgctgcgcggtagttgcgcgcgaataattacgtttgtcgagaccaaggaaaacatccttgaactggttcatcccggcgttggtaaacagcagggtcgggtcgttatgcggcaccagggagctgctcgcaactacctgatgtcctttactatggaaaaagtcgagaaacgcctgacggatctcagcggtgctcttgctcataattatcctgaaatcaagctaacgaaatgtcgctggcagccactacccagtatcgaccggcaggctactcacgaaaataaagtgggaataagataa

SEQ ID NO: 259544 - DNA, 855 bp, Klebsiella pneumoniae
atggccggaataggtcagccccccggcaaagaaatggtcatcaaagtagcgggcgattggctcgctaatcagcacgccgccggccgggacgtagcccgcattgacccctttggcgaaagtcaccagatccggcaccacgccatcctgctcgaaggcaaaccaactcccggtacgaccaaaaccggccatcacttcatcaaggatcagcacaataccgaactcatcggccagcgcccgcaccccctgcatatagccctcgggcgggacaagaatcccggcggtgcccggaatcgactccagcagaatcgcggctatcgcgttcgggccttcgcattcaatcatccgccgcagatgggccagcgcgcgctggcactcctcctcttccgtcgcggcgttaaattcgctgcgatagaggtagggattgaaaaagtgtacgtggccgcgggaatactcgttcggcacccggcgccagtcgccggtggcggcaatggcgctgccggtgttgccgtgataggagcgataggcggagagcactttatcgcgcccggtatagagccgcgccatgcggatggcgttctcgttggcgtcggcgccggcgttggtgaagaacactttgctaaagccttccggcgccagctcgacgatgcgcttcgccgcttcgccgcgggcgaggttggcggtggcgggcgcgatggtcaccagctcttccagttgggctttcatcgccgccagcacgcgcggatgctgatagccaatgttgacgttgaccagctggctgctgaaatccaggtaagtattgccttcgtaatcccacagctcgcagcctttagccccggcgatcaccagcggatttaa

SEQ ID NO: 259545 - DNA, 765 bp, Klebsiella pneumoniae
atggcaacgagcaaagtggtgtttattaccggggcgacctcgggttttggggaagcagcggcgcaggtcttcgccgatgcgggctggtcgctggtgctgagcggacgccgttttgagcggctgaaggcgctacaggataagctcgcctcgcaggtgccggtgcacattatcgaactcgacgtccgcgatagcgatgcggtcgccggggccgtggcggcgctgcccgctgaattcgccgatatcacgacgctgattaacaacgccgggctggcgctgtcgccgcagcccgcgcagaaagtggatctggacgactggaaaacgatgatcgacaccaatgtcaccgggttggtcaacgtgacccatgccctgctaccgacgctgattcgtcacggcgcgggggcgagcatcatcaatattggctctatcgccgggcagtggccctatccaggcagccacgtttacggcgccagtaaggctttcgtgaagcagttcagctataacctgcgctgcgatctgctcgggaccggggtgcgggtgaccgatctcgcgccgggtattgccgaaacggaatttaccctggtgcgcaccaaaggcgaccaggcggcgtcggacaatctgtatcgaggcaccacgccgctgagcgcgcgggatattgccgaacaaatgttttatatcgccaccctgccggaccatatgaacatcaaccgggtcgaggtaatgccggtacgtcaagcctggcagccgttcgcgatcgatcgggattga

SEQ ID NO: 259546 - DNA, 873 bp, Klebsiella pneumoniae
atgagaaaaacctggcttccctggctgatactgtcgccttccctgctgtttttattactgtttacctggtttcccctcgggcgatcgatttatgacagcctgttcgatacccgcatggtcagcgacggcggccagtatgtcgggctggagaacttcagtcgtctgttcgccgacggcgtcttctggcagtcgctggtgaataacctgctttatatcctgctgacggtagtaccgggcgtgacgctcgccctgctgctggcggtcgccctgaccgagaatcaccgcgtcaaccgctggctgcgcaccgccttcttcttcccgatgattatcccgatggtcagcgccgccgcgctgtggctgtttatctttatgccgggccttggcctgctcgaccactatctggcgaagctgtttggcccgatgaacaacaactggctggggcgcagcaatagcgcgctgctggcgctggcgctgattggggtgtggaagttcgccggttattacatgctgtttttcctcgccgggctgcaaagcattcaggcctccacgcgcgaagcggcgatcatggaaggcgccacccgcacgcaggtgttctttaaggtcacgctgccgctgctgcgcccgaccctgagctttgtgataaccacggcgctgatttactccatcacccagatcgaccacgtggcggtgatgacccgcggcgggccggataacgccacgacagtgctgctctactacatccagaacctcgcctgggacacccatgatttaggtaaagcttccgccgccaccttcctgacgctggccgggctgtttgccttctcgctgattaacctcaaactgctggagaaaggagcgcactatgagcgctga

SEQ ID NO: 259547 - DNA, 486 bp, Klebsiella pneumoniae
atgacggtgattgaaaacctgctggtggcacagcatcagcagctgaaaaccggggttttctccggcctgctgaagacgccatccttccgccgcgcccagagcgaagcgctcgatcgcgccgcgacctggcttgagcgtattggcctgctcgaacacgccaaccgccaggccagtaacctggcctacggcgaccagcgccgtctggagatcgcccgctgcatggtgacccagccggaaatcctgatgctggatgagcccgccgcggggctaaacccgaaagagaccaaagagctggatgagctgatcgtcgagctgcgcagccatcacaacaccaccatcctgctgattgagcacgatatgaagctggtgatgggcatttccgaccgtatttacgtggtaaaccagggcacgccgctggccaacggtacgccggaagcgatccgcaacaacccggacgtgatccgcgcctatttaggtgaagcataa

SEQ ID NO: 259548 - DNA, 900 bp, Klebsiella pneumoniae
atgcatcatgctgcccagcacgcccatgccgagtgccatgacgataaagccgaggatcagcgtcggtttacggccccagcggtcaaccagtccgatggcgataaaggtcgccagaacgttggtcagaccgacgatgacggtcccccacatctgttcggtggtgttggcatagcccgccagttcaaaaatcttcggcgcgtagtacatgatgacgttcataccggtgaactgttgcatcacctgcagcaggacgccgaggaacaccgcgcggcggaagttgctgttttctttgaacagcgaccagccggactgttttaccttcaggctttcgcggatctcatccagctcgcgtttcgcttcagcgctggtgtcgcgcaggcgcagcagaacgcgttcggcatcgacaaagcggcgcttagcggcaaaccagcgcgggctgtccggcaggaaaaccacgccgatcagcagcagcaccgccgggataatgatcaccccgagcatccagcgccaggcgccgctgtagctgaaagcggtatccgaaagatacgccccgagaataccaatggtgatcatcagctggtacatcgaaatcatgctgccgcggattttttccggcgcaatttccgacaaatacagcggggccgtgtaggaagcgacgccaacggcgaggccgagcagcacgcgggaaatgagcaggacttccacattcggggcggcggcggagaacagggaaccggcaacgaacaggatggcgccaatcatcaggctttttttacgcccgagtttgaaggagagccagccgctgccgaccgcgccgaccgcggcgccgaacatcatggagcttactacccattcctgcgtatgagcgcttatctggaactcgttggcaataaagggtaa

SEQ ID NO: 259549 - DNA, 750 bp, Klebsiella pneumoniae
gtgctgggtaccgtggttgccggcgaggacggacgctggagctttacgccggataccctggacgagggcagccacagcctgagcaccaccgtgacggacaaggccgggaacgtcagcgagcgctctccggtgtttgagctgacggtggacacagtcgtgactccggtcagcgatctgcaggtgactgacgatgtggacgggcataccggcccgctgaccagcggcgatctgaccaacgacgccacgccggccctgagcggtaccgccgaggcgggcgccacggtcacgatctacggcggtgagaccgtactgggtacggtggttgccggggaggacggacgctggagttacacccctgatgcacttgacgaaggcagccacagcctgagcaccaccgtgaccgacaaggcagggaacatcagcgatcgttccccggcgtttgagctgacggtggacacagtcgtgactccggtcagcgatctgcaggtgaccgacgacgtggccgggcataccggcccgctgaccagcggcgttctgaccaacgatgccacgccgaccctgagcggtaccgccgaggcgggggccacggtcacgatctatgacggcgacacggtagtgggtacggtggttgccggtgaggacggacgctggagcttcacgcctgatgcgctgggcgaaggcagccacagcctgagcaccaccgtgacggacaaggccggaaacgtcagcgagcgctccccggcgttttag

SEQ ID NO: 259550 - DNA, 180 bp, Klebsiella pneumoniae
gtgtccactgactttcgccataaagtgacacgtctcggcatcatcgaatgtcataccgatatcggccatatgacgcataacaatatcggtaaaaatcagctccggaaaaggcgactcaacccctggctgagccatttgatcctgatattccttgcgaatctcattctgggtttgacgtaa

SEQ ID NO: 259551 - DNA, 516 bp, Klebsiella pneumoniae; identical to SEQ ID NO: 129617

SEQ ID NO: 259552 - DNA, 999 bp, Klebsiella pneumoniae
atgaagaactgggaagaagacgacggcgaggaatactgcaccgcagcggcggatcttgccgacgcgcaggccgtttgcgataagctcggaattgaacttcacaccgtcaactttgccgcagaatactgggacaacgtgtttgaattgttccttgcagagtataaagccggacgcacgcccaatccggatattctgtgcaataaagaaattaaatttaaagccttcctcgaatttgccgcagaagatctcggcgctgattacatcgccaccggccactacgtgcgccgggccgacgttaacggcaagagccagctgctgcgcggcctcgacggtaataaagaccagagctacttcctctataccttgagccacgaacagatcgcgcaaagcctgttcccggtgggggagctggaaaagccgcaggtgcgtaaaatcgccgaagagctggatctcatcaccgcgaagaaaaaagactcgaccggtatctgtttcatcggcgaacgcaaattccgcgaattcctcggccgctacctgcctgctcagccgggtaaaattatcagcgttgacggcgacgaagttggcgagcatcagggtctgatgtaccacacgctggggcagcgtaaaggtctgggcatcggcggtatcaaagacggcggcgaagacccgtggtatgtggtcgacaaagatgtcgaaaacaatattttgattgtcgctcagggccatgaccatccgcgcctgatgtccgtggggttgattgctcaacagctgcactgggttgaccgcgagccgctcacgggcacgctgcgctgcacggtaaaaacccgttaccgtcagaccgacatctcctgcaccgtgaaagcgctggatgatgaccgcattgaagtgatctttgatgagcctgtagccgccgtcacgccgggccagtctgcggtcttctacaacggcgaagtatgcctcggcggcgggattatcgaacagcgcttgccgctgcaggcctga

SEQ ID NO: 259553 - DNA, 642 bp, Klebsiella pneumoniae
gtggcgaagaattactatgacatcaccctggcgctagctggcgtttgccaggcggcgcgactggttcagcaactggcgcatcagggacattgcgacagcgatgccctgcatgtgtcgctgaacagcatcatcgacctcgatcctgagtcgacgctggcggtgttcggtggcagtgaagccaatcttcgcctcggccttgaaacgctgctcggggtgctcaataccagcagccgtcagggcctcaatgctgaactgacgcgctataccctgagcctgatggtgctggagcgcaagctcgccgccagtaaaggggcgatggacacgctcggcaaccgcatcgccggcctgcaccgtcagctggaacactttgacctgcagtccgaaacgctgctcagcgccatggcgggcatctatgtcgatgtgataagcccgctggggccgcgtattcaggtgaccggctcccctgccgtgctgcaaagcccgcaggtacaggcgaaagttcgctcagcgctgctggcgggtattcgcgccgcggtgctctggcatcaggtgggcggcggacgtctgcagcttatgttttcccgtaatcgtctggttaaccaggcaaagcaaattcttgctcatttaaccccggagttgtga

SEQ ID NO: 259554 - DNA, 390 bp, Klebsiella pneumoniae
atggatcttcgcgatcttcagcagacccgttttcagcgggcggcccggataatcaaggatacgtccgttttcaataaacagcgtcagatgccagttattgtcgatacctttcacccagccgatacgatcgccgcgaccggtgaactcgtatggacgaatcggttcaaacttgatgcccgcccgacgctccacttctgctttaaaggtctcaacgccaacgcgctccagggtgtatttggttttcgcatttttacggtcggtacggttgccccagtcgcgctgggtcgtcaccaccgcttccgctaccgccagggtatgctccagcggcagatagccaaactcgctcgccgtacgagcgtaggttttcttattgccgtgctcaatcgataa

SEQ ID NO: 259555 - DNA, 618 bp, Klebsiella pneumoniae
gtgggatccgggcgcaccgaatttgccgaaaccttatacggcctgcgtccaccgcgcgccgggcggatctggctggagaatcgcgagattagcaatgacagcacccgcgcccggctggccagcgggctggtctatctgccggaagaccgccaggtctcggggctgtttcttgatgcgccggtgcgctggaacacggtgatgttcaatcagccgtcgtggtggcagcaggggaaacgggaggcggcggtggttgagcgctatcaccgggcgctggggatcaagctggccgatggcgatcagccggtgcgcactctctctggcggtaaccagcagaaggtgctgctggcgcgctgtctggaggccaacccgctgctgctaattgtcgatgagccgacgcgcggcgtggatgtctccgcccgcgccgatatctatcagctgctgaaaagcgtcgccgcgcaaaatgtggcagtgctgatgatctcctccgatctggatgagttcatcggcctggccgaccgggtgctggtgatgcatcagggccgctacagcggcgagctggcgcggcaggcggtgaccgtcgatcgcatgatgaccctggcctttggagggcaggcatga

SEQ ID NO: 259556 - DNA, 1140 bp, Klebsiella pneumoniae
gtgaaccaggccgtcgatgccgccgtccaggccgatgaagataccgaagtcagtgatagacttgattttaccttcaacacggtcgcccttgttgtgggtttccgcgaactgctgccatgggttagatttgcactgcttcagacccagggagatacgacgacgctcttcgtcgatatccagaaccattacttccacaacgtcgccaacgttaacaactttggacgggtggatgtttttgttggtccaatccatttcggaaacgtgaaccaggccttcaacgccctcttcgatttcaacgaagcagccgtagtcggtcaggttggtcacgcgaccagtcagtttggtaccttccggataacgtttagcgatagctacccacggatcttcgcccagctgtttcaggcccagggatacacgggtacgctcgcggtcgaacttcagcactttaacagtgatttcgtcgccaacgtttacgatttcgctcggatgcttaacgcgtttccaggccatatcggtgatgtgcagcaggccgtcaacgccgcccagatcaacgaatgcaccgtagtcagtgaggttcttaacgatacctttgacttccatgccttcctgcaggttttccagcagctgatcgcgctctgcgctgttttcggattcgataacggcacgacgagaaacaacaacgttgttacgcttctggtccagcttgatgactttgaactcaagctctttgccttccaggtgcagcgtgtcgcgcaccggacgaacgtctaccagggaacccggcaggaacgcacgaataccgttcagctcaacagtgaagccacctttaactttgccgttgataacaccggtaacagtttcagcgtcttcgtaagctttttccagcgtgatccaagcttcgtgacgtttagctttctcacgggacagcagagtttcaccgaagccgtcttctactgcatccagagcaacgtcaacttcgtcaccaacctggatttccagctcgccctgggcgtttttgaactgctcagccgggatggcggactcagatttcagaccggcgtcaaccagtactacgtctttgtcgatagcaacaacaacaccacgaacgatggaacccgggcgggtttcgatttcttttaa

SEQ ID NO: 259557 - DNA, 765 bp, Klebsiella pneumoniae
gtgaaaatttgtttaattgatgaaacgggcgccggagacggcgccttatctgttcttgtcgaccgctgggggctggagcaggacgatgacaacccgatggcgctggtgatgacgccggagcatcttgagctgcgtaagcgcgatgaaccgaagctcggcggcattttcgtggattttgtcggcggggcgatggctcaccggcgcaggttcggcggcggccgcggcgaggcggtggcgaaagcggtgggaatcaaaggcgactatctgccggatgtcgtcgatgcgaccgccggtctggggcgggatgcctttgtgctggcgtcagttggctgtcgcgtacggatgctggagcgtaatccggtggttgccgcgctgctcgacgatggcctggcgcgtggctacgccgacgctgaaatcggctcgtggttgcaggagcgcctgcagctgattcacgcctccagcctgacggcgctgaccgatattaccccgcgtccgcaggtggtctatctcgacccgatgtttccgcataagcaaaaaagcgcgctggtgaagaaagagatgcgggtatttcagtcgctggtggggccggatttagacgccgacggtctgctggcgccggcgcgtcagctggcgaccagacgggtggtggttaagcgcccggactacgcgccgccgctggcgaatgttgcgacccctaacgcggtggtgaccaaaggccatcgctttgatatctatgccggaacggcggttgagccgcaggggtaa

SEQ ID NO: 259558 - DNA, 408 bp, Klebsiella pneumoniae
atgtttattctgcgtcagctggagttcggcctgttcgacttccgcctgcatgcggaatttagcccgcagcagggggcgaaaatcctcgaaacgctggcggaaatcaagcagcaggtcgcgttgattcccgggccgtcctggggccgcttcccgcatgcctttagccacatttttgccggtggatacgcggcgggctactacagctacctgtgggccgatgtgctggcggcggatgctttctcgcgcttcgaagaggaggggatcttcaatcgcgaaaccggccagtcgttcctcgacaacattcttagccgcggcggttcggaagagccaatggtcctgttcaaacgcttccgcggtcgcgagccgcagctggacgcgatgcttgagcattacggtattaagagttaa

SEQ ID NO: 259559 - DNA, 237 bp, Klebsiella pneumoniae
atgcagccgaaccagcgcaccaccttcatccagcccagtttttcgcccagaatgccccacagcacgttagagaaaatggtggtaaagaagaagaccgcccacacctgcagccattctgaggtggtgaagcccagctcatcgacgaacatcatcggcataatcaccgcaaagccgaatagcgagagcgtattgataattcgcaccatgctcgacagcagaatattgcggttggtatag

SEQ ID NO: 259560 - DNA, 816 bp, Klebsiella pneumoniae
atggcgaaagtcgccgaagaagcaggtgtctataaagcgacaaaacatccgataaagacgttttatctggctatcaccgcaggtgtcttcatctctatcgcttttgttttctatattaccgcgacaaccggcacggccgggatgccattcggggttgccaaactgattggaggcatctgcttctcactgggtttgattctctgcgttatatgcggtgccgacctgtttacttcaaccgttcttatcgttgtggcgaaagccagcggaagaataacatggggtcagctggctaaaaactggctaaacgtctatgttggtaacctggttggttgcttactctttgtattgctgatgtggctttcaggcgaatatatgactgccaacggtcaatggggacttaacgttctgcaaaccgccgaccacaaaatgcaccatacttttattgaagctgtgtgcctgggtatcctggcaaacctgatggtctgccttgcggtatggatgagctactccggccgtagcctgatggataaagccatgatcatggttttaccggtggcaatgtttgttgccagcgggtttgagcacagtatcgcgaacatgtttatgatcccgctgggtatcgtcattcgcgactttgcgagcccggaattctggaccgcagttggttcaactccggaaagtttctctcacctgaccgtcatgaacttcatcactgataacctgattccggtaacaatcgggaacatcatcggcggtggtctgctggttgggttgacatactgggtcatttatctgcgtggcgacaaccatcactaa

SEQ ID NO: 259561 - DNA, 324 bp, Klebsiella pneumoniae
atggaattctgcaaagcgttcaacgccaaaactgattccctggagaaaggtctgccgatcccggttgttatcaccgtttacgctgaccgttcctttacctttgttaccaagactccgccggctgctgttctgctgaagaaagctgcaggcatcaagtctggttccggtaagccgaacaaagataaagtgggtaaaatctcccgcgctcagctgcaggaaatcgcgcagaccaaagctgccgacatgactggtgccgacattgaagcgatgactcgctccatcgaaggtactgcacgttccatgggcctggtagtggaggactaa

SEQ ID NO: 259562 - DNA, 216 bp, Klebsiella pneumoniae
atgggctgccaggtagtgaccactgaaggctatagcctcggtaaagtcatcgacatgatggaaaccgggtcgaatgacgtgctcgtcatcaaggcaaacctgaaagatgcatttggtatcaaggagcggctggttccgttcctcgatgggcaggttatcaagaaagtcgatctcactacgcgtactatcgaagtagattgggatcctggtttttaa

SEQ ID NO: 259563 - DNA, 768 bp, Klebsiella pneumoniae
gtgtttataggtatcgttagcctgtttcctgaaatgttccgcgcaattaccgattacggggtaactggccgggcagtaaaaaatggcctgctgagcatccaaagctggagtcctcgcgacttcacgcatgaccggcaccgtaccgtggacgatcgtccttacggcggcggaccggggatgctaatgatggtgcaacccttacgggatgcgattcatgcagcaaaagccgcggcaggtgaaggcgcaaaggtgatttatctttcacctcaggggcgcaagcttgatcaagctggcgtcagcgaactggcaacaaatcagaagctgattttggtgtgcggtcgctacgaaggcgtagatgagcgcgtaattcagaccgaaattgatgaagaatggtcaatcggcgattacgttctcagcggtggtgagctaccggcaatgacgctgattgattccgtttcccggtttattccgggggttctgggtcatgaagcttcggcaatcgaagattcgtttgctgaaggattgctggattgcccgcactatacgcgccctgaagtgttagaaggtatggaagtaccgccggtattgctgtcgggaaaccatgcggagatacgtcgctggcgtctgaagcagtcgctgggccgaacctggcttagaagacctgaacttttggaaaacctggctctgactgaagagcaagcaaggttgctggcggagttcaaaaaggaactcgcgcaacagcaacataaacatgatgggatggcgtaa

SEQ ID NO: 259564 - DNA, 633 bp, Klebsiella pneumoniae; identical to SEQ ID NO: 256075

SEQ ID NO: 259565 - DNA, 339 bp, Klebsiella pneumoniae
atggtcggcgttatccgcctggccgataaagttgcggataatctgcatttcgttgcgttccgcgccgatgacgcgcccctcgctggtgaccagcagcaaacgctggcccggcggagcccacttatcgatagcgcgaaacagacgacgccaccacatcaggtcgttcggcggatcgttcgccagttcggcctcgacgtgctgttcaatcatgatgccctgacgttgctcgctctccagcagctcggtcatctggcgcgagtccagcttgggcagcatcagaaccagcatcaacaccagcgccagcgtgagccagaaaatagcgaagatgcgtgcggttaa

SEQ ID NO: 259566 - DNA, 531 bp, Klebsiella pneumoniae
gtgatcttgttcaataaaccatacgatgtattgccgcaatttaccgatgaagccgggcgcagcacgctaaaagattttattccggttgccggcgtctatgccgccggtcgactggaccgcgatagcgaaggcctgctggtgctgaccaacgacggcgcgctgcaggcggctctcacccaaccgggtaagcgcaccggtaaagtttattacgttcaggtggaaggtgaacccacggtggatgcgctgaccgcgctccgcgacggcgtcacgcttaatgacggccccactctgccagcgggagtggaacgtgtagcggagccagagtggctctggccgcgtcatccccccatccgcgagcgtaaatccattcctaccagctggcttaaaattaccctctatgaagggcgcaatcgccaggtgcggcggatgaccgcccacgtcggctttcccacgctgcgcctgattcgctatgcgatgggaggctatacgctggatggtctggccaacggcgaatggcgcaaaattgattaa

SEQ ID NO: 259567 - DNA, 273 bp, Klebsiella pneumoniae; identical to SEQ ID NO: 255182

SEQ ID NO: 259568 - DNA, 192 bp, Klebsiella pneumoniae
atgttcgccgccgccagcctgatgctgcttaacaaggtcgacctgctgccgtatctcaactttgacgtagagaagtgcctggcctgcgcccgcgaggtgaacccggatattgacattattctgctttccgccaccagcggcgaaggcatggaccagtggcttcgctggctggaggcgcagcaatgtgcatag

SEQ ID NO: 259569 - DNA, 477 bp, Klebsiella pneumoniae
atgtcgaggtgcagctcacccataccggcgatgatagtctggttagattcttcgtcagtccatacgcggaaagacgggtcttctttagccagacggcccagagccagacccattttttcctggtcagctttggttttcggttcaacagcgatagagattaccggctcagggaattccatacgctccagaatgatcggcgcgttaggatcacacagagtatcacccgtagtaacgtctttcagaccgatagcagcagcgatatcgcccgcgcgaacttctttgatctcttcacgtttgttagcgtgcatctgtacgatacgaccgaaacgctcacgagcagctttcacggagttcaggatggtatcaccagagttaaccacaccagagtacacgcggaagaaggtcaggttacccacgaacgggtcggtagcgattttgaatgccagagcagcaaacggctcatcatcgctagcgtga

SEQ ID NO: 259570 - DNA, 315 bp, Klebsiella pneumoniae
atgaaagccatcgccgcctgcgtgctcggcgggatctcgctgctgggcggtaccggcacgctgctcggcgcttttctcggcgccttcttcctcacccaaatcgataccgtgctggtgctgtttcgtctcccggcgtggtggaacgacttcattgccggcctggtgctgctcggcgtactggtgctcgacgggcggctgcgtcaggcgctggcccgccatcagcgggcgctgaaatacagtcgctttcagcccggcaataaagggggcaagcgcgtggccccgtttcctgaacgcaaaaataaagaggtggcgtaa

SEQ ID NO: 259571 - DNA, 486 bp, Klebsiella pneumoniae
atgttcgaagacgacggcgaaggcggcctgaccgcgatgcaccatccgtttacctcgccgaaagatatgaccgccgcagagctaaaagccgcgccggaagatgcggtagctaacgcttacgacatggtgattaacggctatgaagttggcggcggttccgtgcgtattcacagcggtgagatgcagcagaccgtattcggtattctgggaattaacgagcaggagcagcgcgagaagtttggcttcctgctggatgcgttaaaatacggtactccaccgcatgcgggtctggcttttggccttgaccgtttgaccatgctgctgaccggcaccgataatatccgtgacgttatcgccttcccgaaaacgacggcggcggcctgcctgatgaccgaagccccgagctttgcgaatcctgcatcgctgagcgagctcggtattcaggtggtggcgaaagaggcaaaagagtctccggagaataagtaa

SEQ ID NO: 259572 - DNA, 237 bp, Klebsiella pneumoniae
atgcaaccgaaccagcgcaccaccttcatccagcccagtttttccccgaggatcccccacagcacgttagagaaaatggtggtgaagaagaagactgcccatacctggagccattctgaagtgctgaagcccagctcatcgacaaacatcatcggcataatcaccgcaaagccgaacagcgagagggtattgataatcctcaccatgctcgacagcagaatattgcggttggtatag

SEQ ID NO: 259573 - DNA, 393 bp, Klebsiella pneumoniae; identical to SEQ ID NO: 209836

SEQ ID NO: 259574 - DNA, 903 bp, Klebsiella pneumoniae
gtgctgaccggcacccggggcgtgcgcgaagagagccgggaagctgtgctgcgggccgttgaagaactcaactatcgcccgagctttgccgcgcaaaacctcgccagtcagacatccagccacgttggtctggtgatttccgcgcaggacgaaagccacggcgcacgtctgctgccgctgctctctcaggcgctgaaagggctgaataaaagcctgctggtccagtacgtcagcgacccggtagagcaggcggcggtaatcgacgatctgcagcgccagtgcgtggcggtggtggtgctgggcgccgttgccgccgacgcgccgcgcaacgttatcgcctttgaccgcttcggcgtcgccgggagcaacagccagggctatgacttcgcctttgccaccgaaagcgcctgccgctatgtgattggcaagggacaccgcaacatcgccctgctggtggacagcgatagcgacgatgccagccgtcagatgctggaaggctaccgcaacgtcctgcagaactactccattccttttaaccgtcagctggtgctgacggccaacgatgacgtcgagcaggcgctgctgaccttaattaacagcttcagtaaatactcagtcattatcgttaaacgcgaccgctacgcggctgaggcgatgcgtctgctgcgcgaattcaccatcgccgtcccgcaggaggtctccctgctgagccttgaggattccccgctcgcctcgctgctctacccgccgctgacctgcatctcctggccactggaggcgctgctggataactgtattcagcgtattcgcagcctgattgacgaccggccaaccttcgctaccgagggccgctcgctggctggccgcctgatcccgcgccagtcggtcgccgatatttcttga

SEQ ID NO: 259575 - DNA, 423 bp, Klebsiella pneumoniae
atgaacactctacgctactttgactttggttcctcccgctctctgctgctgctgattgcgcgtatcgcggtagtggtgctgtttattcttttcggttatcccaagctgctcggctttagcggcacggtgcagtatatggcctcctccggcgcgccgatgccaacgcttgcggccatcattgccattattatggaggtgccggcggccattttaattgtgctgggctttttcacccgcccgctggcggtgatctttattttttatactcttggcaccgcggtgattggccatcactactggaatatgtccggcgatgcggtactaccgaacatgattaacttctggaaaaacgtcagtattgccggcgccttcctgctgctggcaataaccgggcccggagcgatttcgctcgaccgccgctaa

SEQ ID NO: 259576 - DNA, 540 bp, Klebsiella pneumoniae
gtgcgtattggcgaggtcgtttttgatgtcgcgaaaccctgcagccgctgcgtgttgacaaccgtcagcgcggaacgtgggcaaaagcaccctggcggtgagccattaaccaccctacagggattccgcacggcgctggataacggcgatgtcgattttggccagaaccttatcgcgcgaaatagcggcacgatccgcgtcggcgatgagttagaagtgctggcccgcggcccggcgaaggcctacggcgccggggaaagcgacaattcgctggcgcctgagactcagcagaacgcaacggtggaaattgagtggcagggactgagctttaccggtaataatcagcagatcttgctggagcagctggaacagcagggaattcgcattccttactcctgccgggcagggatttgcggcagctgtcgcatccgtctggaagaaggggaagtcagcgcgctgaagaaaaatgcggtcgccgccgatggcaccattttgtgctgcagttgcgtaccgaaaaccgcggtaaggctggcgccttaa

SEQ ID NO: 259577 - DNA, 486 bp, Klebsiella pneumoniae
atgatgctcgatctggctaatggtatgttattccgatcccgttttccccgccggatgctgacgccagatgccttcgccccttccggattttgcgttgatgacgccgcactctatttttcatttgaagaaaaatgccgcgaccttgaattatccaaagaacagcgcgctgaattagtgctcaatgcgctggtcgccattcgtttccttaagccgcagatgccgaaaagctggcatttcactactcatcaacagagttggcagcccggtaccggtgatgccgctagcgcatggctgagcgataccggtcagcaggttaatctgctggtggttgagcccggcgaaaacgctgcgctgtgcctgctagcgcagccgggactgacgcttgccgggcgagtgatgcagttgggggacgtgattaaaattatgaacgaccgactgcagccagcgaccgccgtcgccagctacagcctgggccaggcggtttaa

SEQ ID NO: 259578 - DNA, 879 bp, Klebsiella pneumoniae
gtggcgccgcacgactgctacggcggcagctaccgtctgttcgacagcctggcgaagcgcggctgctatcgcgtccagtttgtcgatcaaagcgatgagcaggcgctgcgggcggcgctagcggaaaaaccgaagctggtgttggtggaaagcccaagtaatccattgctgcgggtggtggatattgcgaaaatctgtggtctggcgcgtgaggccggggcaattagcgtggtggacaacaccttcctgagcccggcgttgcaaaacccgctggcgctgggcgccgatctggtgctgcattcctgtaccaaatacctcaatggtcactccgatgtggtggccggggtggtgattgccaaagatccggcaactgtcaccgaactggcatggtgggcgaataatattggcgtcaccggcagcgccttcgacagctatctgctgttgcgcgggctgcggacgctgtctccacggatggaagtggcgcagcgaaatgccctggcgatcgttgagtatctgaaaacccagccgctggtgaaaaagctgtatcatccatcgctgccggaaaaccaggggcatgaaattgcggcgcgtcagcaaaaaggttttggcgcaatgttaagcttcgagcttgacggtgacgagcagacgctgcgccgttttctgagcgggctgtcgctgtttacactggcggaatcgctggggggcgttgaaagcctgatttcccatgcggcaacgatgacgcatgccggcatggcgcctgaagcgcgtgccgccgccggaatttcagaaacgctcctgcgtatatcgaccggtattgaagatggtgaagatttaattgccgacctggaaaatggcttccgggcagcaaacgaggaataa

SEQ ID NO: 259579 - DNA, 294 bp, Klebsiella pneumoniae
atgaaagaaaaaggcgaagcgtataagaaaccggctggctatgaagagattcatatgccgaaaaacagcggcgcgggcattgtcattgcagctttcgcaacgttgtttggtttcgcaatgatctggcatatctggtggctggcgattgcaagcttcgtcggcatcctggcgacctggatcattaagagctttgacgaggacgtggattactacgtgccggttgcagtagtcgaaaaactggaaaatcagcatttcgatgagattaacaaagcagggctgaaaaatggcaactga

SEQ ID NO: 259580 - DNA, 552 bp, Klebsiella pneumoniae
atgcaaacgagaaaaaatgaaatctgggttggggtattcttactggtggcgctgctggcggcgctgtttgtctgcctgaaggcggcaaacgtgacctctatacgtactgaaccgacctaccggctctatgccacttttgacaatatcggcggtctgaaagcgcgctcaccggtgcgaattggcggcgtggtcgtagggcgcgtggcggatatcaccctcgatcctaaaacctacctgcctcgcgtggctctcgatattgatgagcgctataaccatatccccgataccagttcgctggcgatcagaacttccggtctgctgggcgaacagtacctggcgatgaacatcgggtttgaagatcctgagctgggaacggctatccttaaagatggcggcaccattcaggacaccaaatccgccatggtgctggaagatttgataggccagttcctctacaacagtaaaggtagtgacaataagaattctggcgatgaacaggctgctggagagagtcatactgacgctacgccgcctgccggcacgacgcattaa

SEQ ID NO: 259581 - DNA, 297 bp, Klebsiella pneumoniae
atggagaatatccagaatcatcgtcgtaaagacatccacattccctgtttgctggcgacggatcatcaaaccgttctgccacccctcctctgttccggccatctcaacgaggaatcctttacaagatggcagcgccgccgacccaagcgaaagaggatgaggaaacacggcaatcagcatttcttcattatcaggctgacgacgcccggcatgaaagctacagccctggtgcgtaaaaagccgaatcccgcgccagccctgagcgccaggcagttcgtctatctgagatcgatctaa

SEQ ID NO: 259582 - DNA, 282 bp, Klebsiella pneumoniae
atgaatcaacttggcttgctgcgctggaagaaacgcagcgtatttttcatgccgatcccggacgcaatgaagggcgagaggagcccgtcgttccaggtggcgtggtactgcgtcggattaaaggatttggccttaacgacattccagcacagcgtcaaaaaggtttattgctcatttacttactggacccgcagcaggcattgccggcagtggaatatcaggacgatgccttacctgtggtggcttttggcatcagttttccgggaagccgcagtggggtaa

SEQ ID NO: 259583 - DNA, 276 bp, Klebsiella pneumoniae
atggcccagcgcgacgtgacccatttcgtggccgataaccgcttcgacttcattatcattcatcaaatccatcagtccgctgtaaacgcggatacagccgttagccatggcgaaggcgttaacgtccttggtctggtacaccttatagttcaccggctggccgttgatgttgtcccccagcgcggcggcgattttactcagacgtttgctgtattcactgctggcaggcgcgatagtcgctttcgcatccatctcctgacaggctttgtcgcttag

SEQ ID NO: 259584 - DNA, 513 bp, Klebsiella pneumoniae
atggtgtatcgtacaaaaacatatattgctggtgaatgggacggtgatcgggatgctatccagcagttacattcttggaataacagtaattattggagtttatctttcactgatgcacatgacttaacacaagctagagatagtagcttaaattgcagcataaaatcatctttatctacacgcctaaattcatcaaaaacatttatattaattgttgggaataataccaaagacgcaagaagtggcagttgtcaatattgtcatagttacaatagttgggttggtagttgcgctaggggacactcagtagattaccgaagctatattgagtatgaatgtgaaaaagcgttaaaagatggattaaaaattgtagttctctataacgcagcttctgttaataaatcaaaatgtcctagctctataaggaacacaggcacacatacggctatgtgctactatgaaaatgggaaatactactggaattattcagcagtaaaaacagctttgagttaa

SEQ ID NO: 259585 - DNA, 234 bp, Klebsiella pneumoniae
atgcagaccatcatggagcggcgcgggagtaaacttgaccatttgcgggaactgacgagcggtgataaaggtgccatcagtttccgtcaccataaatatacgatcgaaggccagcccgctgatgtctgcataagcgtggctcaggccaattccccgcatcgatttgacgggatgaataaaaagtcgcgaaagggttaccatacgctgcccctggctttaaaaataagcctttaa

SEQ ID NO: 259586 - DNA, 381 bp, Klebsiella pneumoniae; identical to SEQ ID NO: 139053

SEQ ID NO: 259587 - DNA, 429 bp, Klebsiella pneumoniae
gtggcggctaatctgttgggctataaccatatggcaggcacgaatatcaactggttctccgtcaacggctatcgggggcacgccggggggtttacctgctgcatatcgctgccggaaaaatggcggcccaatatgcaggtggcagtggagtgggaggttaaccctaacccgtttccgaaggatctcccccacttctatgatccaaactatgaacattatatggaaaaatataaggctacctttcgtcagtataaagcggtggccactattcccgaatatgaagattcctgcggcctgcaggtgcatttcttgccctgtcagcagattaaagtaacggccacctgccacgggccgacccatcctgaccacccgattaaagaacctttcgatctgccggagtctgcccagtgcccgccagaaacgccatga

SEQ ID NO: 259588 - DNA, 612 bp, Klebsiella pneumoniae
gtggctgccgcctgcggcctgaaggtcgccaaacacggcaaccgcagcgtgtcgagcaagtccggttcttccgacctgctggcagcattcggtatcaatctcgatatgaatgccgataaatctcgccaggcgctggatgaactgggcgtttgcttcctgtttgcgccgaaataccacaccggtttccgtcactacagtccggaactggtgctgccgattgcggaaaccctgcgcgtgctgggctaccagcgagccgccgtggtacatagcggcggtatggatgaagtatcgctgcacgcgccgacggtggtcgcggagctcagcaacggtgaaatcaagagctaccagttgaccgccgccgacttcggcctgacgccgtatcatcaggagcagctggcaggcggcacgccggaagaaaaccgtgacattcttacgcgcttactacaaggtaaaggtgaagccgctcacgaagccgccgttgccgccaacgtcgccatgttgatgcgtttacatggacgcgaagacctgaaggccaacgcgcagcaagtcatcgatgtgctgcacagcggagcggcctatgacagagtgaccgcattagcggcaagagggtaa

SEQ ID NO: 259589 - DNA, 249 bp, Klebsiella pneumoniae
ttgcaggacgttgcgatagccttcgagcatctggcggctggcgtcatcgctgtcgctatcaataagcagagcgatattgcgatggcctttgccgatcacgtagcggcaggcgctttcggtagcaaaagcgtagtcatagccctgattattgaccccggcaatgctgaaacggtcaaaagagatcacgttgcgcggcgcatccgccgggacggcgccgagtaccactaccgccacgcactgacgctgtag

SEQ ID NO: 259590 - DNA, 591 bp, Klebsiella pneumoniae
atgctaatgatggtgcaacccttacgggatgccattcatgcagcaaaagccgcggcaggtgaaggcgcgaaggtgatttatctgtcacctcagggacgcaagcttgatcaagcgggcgtcagcgaactggcaacgaatcagaaactgattctggtgtgcggtcgctacgaagggatagacgagcgcgtaatccaaaccgaaattgacgaagaatggtcaatcggcgattacgttctcagcggtggtgagttaccggcaatgacgctgattgactccgtttcccggttcattccgggagtactgggccatgaagcatcggcaacggaagattcctttgctgatgggttgctggattgcccccactatacccgtcctgaagtgttagaggagatggaagtaccgccagtattgctgtcgggaaaccatgctgagatacgtcgctggcgtctgaagcagtcgctgggccgcacctggcttagaagacctgaacttctggaaaacctggctctgactgaagagcaagcaaagctgctggcggagttcaaaactgaacacgcgcaacagcagcataaacatgatgggcaggcgtga

SEQ ID NO: 259591 - DNA, 348 bp, Klebsiella pneumoniae
atgcgccagggtggtcatcgtctgccccaccaccgccagtttagcggtctggatcagctcgtcctgcgtggcgcgcagatcggcctcaatcgcttttcgctcgccaatctcctgttccagctgctgtttttgcgcattaagctgacccagggtatgacgaagcaaaccggcaatacgtcccagctcgtcgcgcccgtaaaccggaatggtcgcctcggtccggcccagaccaatctgcaccaccgcctgattcagcgcggtaaagcgtttcaccagccgcgagcgaataaaataatggttcagcccccatgccagcagcagcgccagcagcgtcgccaccaggattaa

SEQ ID NO: 259592 - DNA, 261 bp, Klebsiella pneumoniae; identical to SEQ ID NO: 252054

SEQ ID NO: 259593 - DNA, 192 bp, Klebsiella pneumoniae; identical to SEQ ID NO: 254225

SEQ ID NO: 259594 - DNA, 444 bp, Klebsiella pneumoniae
atggaagagctgtttggcgaagtcatggtgccgaccgaagaagtggtcgaaatccgcggcggccagcgtcgtaaaagcgaacgtaaattcttcccgggctacgtgctggtccagatggtgatgaacgacgcgagctggcacctggtgcgcagcgtaccgcgtgtgatgggctttatcggcggtacttctgaccgtccggcgcctatcagtgacaaagaagtcgatgcgatcatgaaccgtctgcagcaggttggcgataagccgcggccgaaaacgctgtttgagccgggtgaaatggtacgcgttagcgacggcccatttgccgactttaacggcgtggttgaagaagtggactacgaaaagtctcgtctgaaagtgtccgtttctatcttcggtcgtgcgacgccggtcgagctggactttgctcaggtagaaaaggcttaa

SEQ ID NO: 259595 - DNA, 267 bp, Klebsiella pneumoniae
atgcgtttcgtcccgggaggcggaaaggcgctcaaacgccgtcaccacgccctgaatcgtgcgtaccggctgccggatttttaccccgaagccctggtcaaccggggcctgcagggtgaaggcggcatcctgcatcagcatctgctgcggcgtgagggttttgtcggcgctggtgaattcaatctggtagctgaacggttcgctcagggcctcatcgccttcaaaggccagcacgtccaggagggcgcggcagccgcgcaccgttaa

SEQ ID NO: 259596 - DNA, 249 bp, Klebsiella pneumoniae; identical to SEQ ID NO: 138230

SEQ ID NO: 259597 - DNA, 303 bp, Klebsiella pneumoniae
gtggatgatgccgtttttgtcgttacggtaacgaacctgacctgctttagcgttcttaaccgcttcagcaacattcggagttacagtaccaactttcgggtttggcatcaggccgcgcggacccagaacctggcccagctggccaacaacgcgcattgcatccggagaagcaataaccacgtcaaagttcatttcgccttttttgatctggtcagccagatcttccatacctaccagctctgcgccagcagctttagctgcttcagcgttcgggccctgggcaaatacagctacgcgaactga

SEQ ID NO: 259598 - DNA, 330 bp, Klebsiella pneumoniae
atgtacgaagctcttttggttgttttccttattgtagcgattggccttgtaggtctggttatgctgcagcaaggtaaaggcgctgatatgggagcctccttcggtgcaggcgcttccggcacactgtttgggtcaagcggttctggcaactttatgacccgtatgaccggcatcctggctgcgctgttcttcatcatcagtctggcgctgggtaatatcaacagcaacaagaccagtaaaggaagtgagtgggataatctgagcgcgccgaaaacggagcaaactcagccaactgcgccggctcagccgaccagcgatatcccgcactaa

SEQ ID NO: 259599 - DNA, 411 bp, Klebsiella pneumoniae
atgctggttgagcagacaatagcgcagcgcagcgatgtggaaaatcagtaccgtcgcgtggtgccggatgagggcaacccgctggcgcaggcggcgatggccgacgtcttccgcctggatggcgacagcgaatggcgcggcctgggggtcatcagcgactccggcgtgcagcttacgccagcctatcagcgcttcgatgccgaggcgcattttcgcccggcgccgcagcgcgtgtgcgacgacccgcgcgcccgctgcggcgaggtgctgaccggccgctgtaaaccgcaccagtgcccgctcttcgccagcacctgcaatccgcaaagcgcctttggcgcgctaatggtctcctctgaaggggcctgcgccgcctggtatcaatatcgcagtcaggaaaatgaagtatga

SEQ ID NO: 259600 - DNA, 150 bp, Klebsiella pneumoniae
atgcgctcctgcgatttacgcattttggaagcggcgaccatctccatcgctttagtgatcttttgcgtgttctggacgcttgcgatcttactacgtatctcttttgcgccggccatgagcttctcctcaatgccttgcggcctgccctaa

SEQ ID NO: 259601 - DNA, 228 bp, Klebsiella pneumoniae
atgtccgtcgcgcagcagtctctggttctgttcgcagcagaacgtggttacctggctgatgtagaactggcgaaaatcggtagcttcgaagccgctctgctggcttacgtcgaccgtgatcacgctccgctgatgcaagagattaaccagtccggtggctataacgacgaaatcgaaggcaagctgaaaggcatcctcgattccttcaaagcaacccagtcctggtaa

SEQ ID NO: 259602 - DNA, 381 bp, Klebsiella pneumoniae
atgtcagtgtcgctcttgagtcgaaacgttgctcgtaagcttctgtttattcagttactggcggtaatagcaagtggactgctgttcagcctcaaagaccctttctggggcatctccgccgttagcggaggtttggcggttcttttgccaaatatgatttttatgatttttgcctggcgtcatcaggcgcatacacctgctaaaggccgagtggcctggaccttcgctctcggcgaagctttcaaggtgttgttgaccttcgcccttctggcggtggcgctggcggttttcaaagtggtgtttttgccgctgatagtgacgtgggttttggtgctggtggtacaagttctggcgccagctgtaattaacaacaaagggtaa

SEQ ID NO: 259603 - DNA, 327 bp, Klebsiella pneumoniae
atggaagccaaacgccagcttgacgtgctggacaagcagcttgcccgcggtcgttttgtggcgggagaagagtacaccatcgccgatatggccatctggccgtggtacggcaacgtggtgctggggaatgtctataatgccgccgaattccttgatgccggaagctataaaaacgtgctgcgttgggcgcaggatgttggcaatcgccccgccgtacagcgtggacgcatggttaaccgtacctctggcccgctcaatgagcagcttcatgagcgccatgccgccagcgacttcgaaacgcaaaccgaagataagcgccaggcgtaa

SEQ ID NO: 259604 - DNA, 171 bp, Klebsiella pneumoniae; identical to SEQ ID NO: 259517
